United States Patent Application Publication US 2007/0083945 A1 - sequence listing, part 34

SEQ ID NO: 229943 - DNA, 410 bp, Glycine max
  unsure (1)..(410): unsure at all n locations
agcagcgttattgatttatatatatanctttttataacaaaacaggttgagccttgtgaagaaatagatcattgtaaacaggtgtagcatctgttgctagagaaatgattatttggactcaccaggttcactagagcacacttggctataactttttcagacagcttcaaattaattccatttgtcattatccaattgatatgaagcacatgaccaaatctttcacagttnttattatagtacagagattagcttcacatgaatggatgttctttttaatataaccaatgattcttattagatatatgttcaaagttttaattaacaatatcaacatgctattatttattagaagaatctgatgacaaattgcgaaaacttatctgattttnttcgtttcttaaccaaac

SEQ ID NO: 229944 - DNA, 375 bp, Glycine max
ggaactttaaactaactattgcatgggacctgtatgtttacctagtttccctagagtcatgacagactgccaccaatattagtcaagtactctcactagtaatatcataggagaccagacgggtccagtgtgtgcagaatttccacctatgatatcaacattgcttatagacactcaaccggtgaccccaagcctacactcaagatccgtagggccttcctcctgatatgtcaaccataaatatttatacacagactcttctatgaactgacaaacacatgactttaattgtctaaaaaaataactcgcgccttaagggctatataactcgcgccttatagactaacatactctcgcctataggactaactcact

SEQ ID NO: 229945 - DNA, 322 bp, Glycine max
  unsure (1)..(322): unsure at all n locations
tccagcgggttgaacaccttaatactgttttggaaagacccaacagaaggattaaagtagaagtgcatatggaaaaaaagggccattttcattgatcttccgtactggtctgatctagatgttatacattgtattgatgttatgcatgtaaaagaaaactgtatgtgacagtgtcattgggacactccttaacattcatggcaagacgaaagatggtctaaatacccgtcaagatctatttgacatgggcatacgatcgcagttgcatccaaggtctgatggtaaaaaatatacttgcctccagcttgtcatactntatcca

SEQ ID NO: 229946 - DNA, 232 bp, Glycine max
cccacatatccaatcttacaaaaccatgttcatatgtcattgtagcattcccacctagccacttgctgggcgcatggttatgcatgaatagcaagataatgggggcaatgtggcatgccctattgcttcacgatgcaacaaaggcctaatgccattcactaacacaccgcatttcaaacaatcaagcatgatacaacccaaaattgccccacaattgagccaatctcacatt

SEQ ID NO: 229947 - DNA, 272 bp, Glycine max
attccttcatggaaaacgttctgtatatctttgtatggatactaaactctgaagactcctcgaatggcttgagagaaaatactaaaactgtggagtgatctatctgtgtctatgaacatcacggcttagtcaatatgcacacttccaacaaatctatttgctacgcttagagctaacagctacttgattagacataatagctcgggttacagtcaaacctgatgtatagcttgcctgtggattacccctcattggctgaaagaaaactcgca

SEQ ID NO: 229948 - DNA, 447 bp, Glycine max
acacccaacacgaaatgttggagaggtatccaatccgcttcaatttccttagataatgagctaccctattataggttcagatatacacaaattcagattacaatgccaccaagatcaaatcacattcctagtcaaactctaggtgccatttcagcctcaccacaaaatgaaagtagatgagtgaatgaaataaggcaacgttgctactctaagatgcttaccttacttgcaagatagaagaatatcagctagagtagtgaactatattccatgcacgaccgtctgagtatgttatataaacttaaaactattccattaacaacgggtgcactatacttcagagacaagagtttgttactatatgatctgaaaatttgaacttccatagctatcaattaaaatatctgactatttatcaaatggatttaaaatgggtgtgaaatatat

SEQ ID NO: 229949 - DNA, 353 bp, Glycine max
  unsure (1)..(353): unsure at all n locations
tcaagaataatggccgcagtatactatctatgtcctgattgtgatncaatatataggccttctattttcaatggagtgggttaccattactggataacccatatgcaaatttttatagatgtaacagatttaaatgtctcggatgctataaaagtatggcactatattcccactatggtggctggaagtaaaaccatagaaaagcctatggaagaatagaatgaagaagataagagattatggctgtcgcaacctacccttctgcgggagggcgacgcgtgactcgcgggatgcgtgttccacgataggaatacgcgcggagtcgccaccaacgttcattcgaggaaaacgtc

SEQ ID NO: 229950 - DNA, 347 bp, Glycine max
  unsure (1)..(347): unsure at all n locations
tctgcaacatttactagcaagtaccacatttgtggtgctaaaggcatcacaactcggcttgaatagttnttccaggtcggcaacactgtgacaaagatttatacttctcaatggggacaaactcatgtccatgatagatggcatgcctttcacatttttgtgtactattangcatcttttctagcataaaggagtatatcaattctattctttaatttcgttgaatacagtgataaagaaacaatctatgacgtcgatggtngtataatatcttgtttgacctgtagcttatagcttgattacatatacatgtgttgattgtcgctgaactggtatattctatgatt

SEQ ID NO: 229951 - DNA, 275 bp, Glycine max
gatcatggcagttgagtactatgttaccaggcatatatttccctcagcttttattttcagagatgaaatgaatcgtggcacctatggactccttgagacatagctcatttttacctgaattgtgggattgaagcatctctaataaattcctacctcgcagggcatataccaaagctcccctgcagcatcatatctctctatgtgctatctctaaatatgagatggtgtcaaattggggagaattgcacattctgatttccatatatcactttcat

SEQ ID NO: 229952 - DNA, 324 bp, Glycine max
tattaagcccaatcaaaacccacgccgtctcttacccactttctatcgcggtccacggttccacaacggcacagcccgatgtaatggcagcgaacccgccaagcatgccgttacacacgtcaatcacgttccagtggccagccaataaccgcttgctgaactacgtcgtcagagccgcagtgctcccagacaatgtcgtcgtgacagctgtcctccctatatcgctccattgaccataataccctccacttccataccccttggctattgtcagaaacgaaccagggttgaagccgtaccatccgaaccatatcaaaaacgaac

SEQ ID NO: 229953 - DNA, 163 bp, Glycine max
aaagaaaccaaagggggaagaaaaacccgaaagcccaaaaagcggccacaaagggaaaggcgaacagcacaaagccaagccaagcagagcaaaaaacagaacaagaggcggaaagcaaggaagaccaccacaaaagaggcacgcaaagaaacagaacaaaaaa

SEQ ID NO: 229954 - DNA, 330 bp, Glycine max
aagagtatggtaaggaacagatgagtgtatagactcctagaatgtgtggagcattcgatagaacttatcttcgccctatgatacaagttatctccaacattcattgtgaaggaggagtattataaataatggtacgagcctgtattcctaacgttccaattagagagcctctctgatagagacgataatagttggcgaagtctctatctctaagctagagtatcctctccaaaaaaaagataatagcttgggagcctctatcctcagcttgaggagccacctaaagcgaacatatttggatcacatcctgtaacctacaagacttgttag

SEQ ID NO: 229955 - DNA, 320 bp, Glycine max
ctgcactataagcctacacccatgtttttatgttggacgaagaggcaatgggacgatgtagtgttggagaacgacctgccgaaccttgggctgaaaaactggctggagaaaaactatcatctgtgagttgcatgctgtactgattattttactcattgcctcttttctgaaggcaatctattggggaatttgttgaaatggcgtattagtctgggtggctacaactcctacctctactatagtattgtgagcaaagcttattggggtgtacgtggcaatattgataacttaatacttctattatgccttggatatgatcg

SEQ ID NO: 229956 - DNA, 421 bp, Glycine max
  unsure (1)..(421): unsure at all n locations
tactgtttgttcctttacttgcatatgcaaaagtgttgtaccttaacataaatgctttagaagtaatataataaccaagactagaactatgtcaggagacataataacaattgatacaaaaactagaaatttcactatacaattatctacaaattgtgacattngtggcgaaaagattttataaataatgcagacgtagtagatgtgcaacgtgctaaagaataaatgatcctaggacttgattttattacacatgataatagatcagttactattacaaaagaatatgtattaatctctacaaactcacatatgtcaccaataatagacgaattcacatcatagtaacgaacatagcgtggtgatacccctaccaaccctacacctacactcaattnccgatgtccttgtgacatatctg

SEQ ID NO: 229957 - DNA, 437 bp, Glycine max
  unsure (1)..(437): unsure at all n locations
tcaaaatatnttcataagatatgtatgaacgtgtaaattgcgtcatataactaattatttattaattntgaaaaagtaaataatctcatataactaattcgagtgattcgtacaaggaaacattcgtgcaaaatatcattgttggtcttattatacttcttatcccccatcttgctttcttatatgtaaaacaatgttttcttacttattcaattatatcaccaatggtgagtcaagattaggtaaaatatgaatcttagcctacttgaaaaatttatcaatgagaaccttaanaataataataataattattttttattctaataataaatatcttaatattacaatagtgatgtgttttattagtaataatgtaactttttatactaaaatgatctttaactaataggaaattntctaaaaatattactacatgt

SEQ ID NO: 229958 - DNA, 339 bp, Glycine max
aaaaaaattgaactttatacgtgattcaactaactgaaggctacacaagcagtacgtctaaaaattaacggacttttcaaaaagccagtgaactctgcattttatgcaatgcttatgtagccataattgtgttttctcctgctgacaaattgttctgctttggccatccaaacatcgactccataattggtcgctatctcataggagacaacaacgcatagtgtgaaccatcagcaaagtcatcaaaagaaaaatcagtgtcatatgatgagtgttacagacagtacgaagcggccacaaagaagttggagttggaaaagaagaacttggcacaaactg

SEQ ID NO: 229959 - DNA, 475 bp, Glycine max
  unsure (1)..(475): unsure at all n locations
tataacccacctgctgcatgcaagctctaaaatctgaatcagaacatctaggtgctgctgtgaatcttttacacagtgtaaaanttgaattcatatttctgataactgttataaatcatcttggccactggtattcaattacatcctctggtaatcgattaccagagagtaaatctcttgaaacagacatttttgcttaaatttcttggccaaaccttcagcagtgtcaattaggaattcccttcctaaaacactagagatcttcttgttgtcgtatccgttattcttggatttttcgcatgaattacacttggatagtgcatcttcataaggcatcaaaacatcatgatcattggcatcatagaacataaaggctaagctttgttctacatctcctctttttatgatgacatttaatcctgaatcaaaaatcagcatgcatatgcagaatatgcgtcactcattatactcccat

SEQ ID NO: 229960 - DNA, 400 bp, Glycine max
tctccctatgactactgtcatcgacttcttcgttcaatctctcacccatgtcttgctatgctggtgagctctttattgactcatctgttccttagagtggcgtctacattcttccttcttccatatccgttctgctaccgttaaacttcatgatgcgagggactccattgacgtacatgatccaacgcctatatgctccacatagaggtacactgtgaaaaatactgtgctgaaaatgattcaattacgaagcatattagattatcatatatttaaatacacacacacacacatattctagcttactgatactaaatatacttaataatgatgcggtactagaatatttacgaactactaagtatcactatatcagactgttttaatgtcacattataca

SEQ ID NO: 229961 - DNA, 436 bp, Glycine max
  unsure (1)..(436): unsure at all n locations
tgtccacaaaataggattttgaagattgtcatttcaatctcntcactaagaaaatggatcattctcaaggtccaacgccttataatgatcacctcttatagaataaagaatcacttgataagcatgaactacgtatgtctgatttcctcattgcaattgatgatacgtatgagcaaaagccctgcttttgtctaccaccccaagagatcgttaatggtcacatgccttaacgtttctctcctttcaaaatacatgagatcgtttatggtccaacgccttaacgtttctctcctttcaaaatcaaaagaccgtttaatggtccaacaccttaaatgacctttcgttcaataaatacatattatgcataaaagacataacaacttatccaaacactttgttccaaagactacgtatgctgattcctcatgcaaattga

SEQ ID NO: 229962 - DNA, 291 bp, Glycine max
atctacattatatatctattccatcaaaagaactaattcgtcagatgatccttagagacgactgttttatgtgaaacatataacgcatttatagaagacctgtgcagatgacaattctatacagttttccacttgaccatagcccctcgcaattcttatttgcacttctacaaactttatcagacaaaaaagaagattatgagtgacctttcttctggtcacaagtcctcatcttgaacaaggtctttttttgttcaaagccctttttctatagatgcgaacacaggagcc

SEQ ID NO: 229963 - DNA, 316 bp, Glycine max
  unsure (1)..(316): unsure at all n locations
atatcaggatnctggagtcactataataatttattcatgaactattgtgtctcatctctcaatttggactcaaataaacaacctttactttattaatcgatgcgaattaatacaactacttttattgacgcctcaagcttttaatttttggcatggtatctttaatggattccattaatccttgaaattgtatgaacgagacattctaattcttcagatttaaatatctttcattaattcttaactgtacaaaccagcattcactgtatctcttgtggatgcaaaatgacagtgaaaatgtatgattaaaatgaat

SEQ ID NO: 229964 - DNA, 381 bp, Glycine max
  unsure (1)..(381): unsure at all n locations
ggctagagcttcatgaatgtcttaaattatgtaaaaatggtcaatttcaaatataagtataaccttgttcattctggattgtctagaanacatcgttgtagttccttcatacaattgtgcatcgtatattttgatgttatttgctatacaaagatgcctcttaagcttaatggagaatttaattgtgcaatcatatgatcaatgttgctttaattatggtgttgaatgtaggccaaggccatttcacaaatatatggatcttatggtcgataatgatgatggtgatgatcatgaagcctagtttcacaanatgcccttactttcctttattgtattatcttattagaattaatataagaacttcgttattaacacttatta

SEQ ID NO: 229965 - DNA, 205 bp, Glycine max
  unsure (1)..(205): unsure at all n locations
tacggacactatgaaactcagctttagccaatggacttacctngaattaatttctttgattctccctttgagtctattttcccctttctttaatttgaatctcattacaagccttaagtgaaaaaccataatatcaccttaccctttaggaattttggagctttggaattgttttgggaataagctgggaataagtgtgtgtgtg

SEQ ID NO: 229966 - DNA, 417 bp, Glycine max
  unsure (1)..(417): unsure at all n locations
agcttncattcttacataccatttttacttttttatatggnnncagcatcggttatttaggactttcaacatcggttaataatcgatgttgaaagtattattgttaacatcagttctcagttaatataaaattacaacatcgattggttaaataaccgatgttatataataagacttataaaaaagagttatatatcttcatatccgcatcgattttttctaaaaccgatgttaatatatgcagacaacatcagttttagtaaagattgatgttgtatgtgtatattaacatcggttttggtaaaaaaccgatgttgatgtcaataaaacaacattgatttctttaaaaaatcgatgttgttntattaacaacatcagtcttcttataaaaagatattgtgtattaacatcaacatc

SEQ ID NO: 229967 - DNA, 415 bp, Glycine max
gtgtctgcataagtcacttaacgctgttgttatgtccatctctttaaaactgtcatctttgctgttatcagttaacatggaccgttcataaacatgaaatcaacacataactttaccgcttgtgcaaagaactacgtaggtttgattttcttatcgcaattgaggatacgtatgaggaaaagccccgcttttgtcgaccaacccaagagatcgttaatggtccaatgccttaacatttctctcctttcaaaaactaagagttcgttaatggtccaatgccttaatgtttctctcctttcaaaaccaagagttcgttaatggtccaacgccttaacgtttctctccttttcaaaaatcaaaagatcgtttaaaggtccaatgccttatacgacttttgttcggctaaaatatatct

SEQ ID NO: 229968 - DNA, 426 bp, Glycine max
  unsure (1)..(426): unsure at all n locations
agcttttggagtagaaacatggtaccaattcattttatttcaaaaaggaagtcgtatccagtcaaggtctgagagaccatacaagtttcctaacgatttctaattatgtgggccattaagtctatcatatgctgacaatagccgagaagcccatgaatctcttcgggggtggagtatgcgtctgccatcgccttggccttggctaacaagcggngaagttcttgacttttnnncaaggtaagagcaaaccggtccatccacatnggtgcctcttggtgtaaagagtcgatcacccttcctctagcctctttntgcgcatatacttgagcatactcatccgcgattctatgctcgtgggccgtggctagacctaactcttcttggtacttggcgatgatagctagcatgttggtctccgtctcacat

SEQ ID NO: 229969 - DNA, 420 bp, Glycine max
actcaatcttaacatacttagaaatcaagcggtcatattttccgatattttggggagtatatgcacattttatatctatatacatttgtttgttgcttgctcgaatcttgatttcaggtattgtattgtcatcatcaaaaatggggagattgtatatgcaattgcctctggtgttttgatgatgatcatgatgatttgatgaaattgatgcatatgggcctttcaagattaaattcaagacaatacttcatgattacaagtcacaacatcaagatgatcactagtaaattaagaatggaattcctaattgaatttacaaaaagtttgtgcaataatttaaatttaaaagtgtttttcaagggtttactctctggtaatccattaccacatgatgtattgatctccagtgccaaatatttt

SEQ ID NO: 229970 - DNA, 436 bp, Glycine max
  unsure (1)..(436): unsure at all n locations
ttctctaccattctgaccgagtgaattgggcttcaaggtagttctttacagaacctanggcaagctgggtttggaggccttgttggtaacattgagggacaattcttgaaaggattctatggtaatattggttggtctgacaacctgcatacagagatntacgcattaagacaagggttggaaatatgttcggatctgggtataagggagttaacgtgcgaaacagactctcttcacacccttcagttggtgaataatgtcattgacccccacccacaacaggtatatgcttctctgagttagttactattaagagcttcgtggagaaggattggagttgcaatattatccatgttttgtgagaggaaactcgtgtgttgtttccttgcaagatgatatatncttatcaaggatgctctgtatttggatgtgatgt

SEQ ID NO: 229971 - DNA, 334 bp, Glycine max
gacacttaatactagctgtgcaagcaaactgtattggtaagacgatttctgataaaagtagaaacactacaccatctgagggaagtgaattgactatcatattacatcatataaatttgattatttgactctggactacaaaaagacatgaatatacaggaaaatggggcaggtgaggtatccaccttacgacaaagttctatccagaagtgtgtagataaatcttggacacaagagacgcataaaggagactctgccaaaatatgaagaaataaattaatcataataagataaaaagaagataaaaatcccatgatgactaattgaataacat

SEQ ID NO: 229972 - DNA, 426 bp, Glycine max
  unsure (1)..(426): unsure at all n locations
agcttctttaggaccttgaacattcaacttactcctctntcaaaaccatgctatgtgctcgcgattggtccctctcttcccttcgcagcttgagttcattgttgctaccccacagagctccgcgaaatttgttccggccatactcttccttgcgagccctcttggtctcttgttcaagggctcttgcggtagttgcattctcttcccgtaatccggcacactccttccggatgtgtgtagcggccaacttgaacttctccttggcaagtttcgcctttcctaactcgcttttgagagcttggacttcctcgtcttcttacggtgcttcaaaactctcttcgctgacgactnttaacttggcgagccaatccaaacctctgatatgaactntcagccattcatggtaaccaccaatggcgccattac

SEQ ID NO: 229973 - DNA, 443 bp, Glycine max
  unsure (1)..(443): unsure at all n locations
gtgacatgtgtactcctattaacaaggtttcttctctccttctgtcanacttagttgaatgtacaacatttttcttttgtgttatgctcaaggttatcaataatcagtagtggtttatggtggactgcggtgaccacctttatacgccatatcaacatggtggatggcgtaacggtctatggcagacaaaaaaattatatgtatatatataaaaagactggacacaaacaatatatatataaactagacaaaaacagtatatatatattaaaaacaacataatgacaaactaaaattcataattagatgattgtcttcacataaatacataattaataaaaacaccaacaaatatgataaatagcaagtagccactaacatagactctataattaagacacaatgacaaattataaaactaataatcatcattctcatcttca

SEQ ID NO: 229974 - DNA, 268 bp, Glycine max
agattcgatcccttattgtatttataccatatatacacttaggagaacttaataaacatgatatgttttatcactaataatcggatggatctgataccgagataaagcccctcccttctctaaacttttatcgtatcatataattgtaagggatggataaataatatgattgatcatatgaatgtttaatacgagtataatgaggaacaatctatatattattgaagaaaaaaatacaggtaaattggggtgggtatatgatattaac

SEQ ID NO: 229975 - DNA, 412 bp, Glycine max
  unsure (1)..(412): unsure at all n locations
gagcatgcaactaaannactattaaaataattatccttttatncagnncacaggatagaattatatactaattaagcttattttattcatatattatatcttaaatcctataattttatcacatattcaaatttatttataaagcaaaatataaataaatcttatctttatgatatttttttaataaatataatctcaaaaatgatatattttacatctttttaaatttaatatgcatctaatatggattttttacctatataagaatcttttatgattataaaaatttttattcaattaacttacttaatccgtcgaaattttttaaaaataaatataaaaataatatatcactaaccaagatatttaaaatcattattataatacattaactgttaattcatatcattat

SEQ ID NO: 229976 - DNA, 300 bp, Glycine max
ttcctccagaagcaagagccttatggatgaatcttctggagggcccaagtgggcctggatgctatgtgcacccacccttttactaaatgtaccccgcttctatttttttgtaattctttctccgtaacgatacgaaactttgcgaatttcgtaacgatgcttattttccttccgcaaagctacgaatccttacggattatagatttactcttatctagctttcgaagaagttacagaatctcacggatagcgcaaaaacacctcttttcacttccggcagttacggaatttacagatcgc

SEQ ID NO: 229977 - DNA, 475 bp, Glycine max
  unsure (1)..(475): unsure at all n locations
gatacttaagacacctgcngcatgcaagctgaagcataatatcttttgattttccncccaaaacaagattcgatttgtactctctatatgcctggagactcaatgattcaatattcaaaatcacattgtgagtcatacttctcaaggttatccttggtgtagaagatgaaacactgccatccatatcggcgaaagtcataaatgttgggcattatagccctcccacaattcataggaagtcttttttaagattgaccgttattaaatatggttctgcaataataagcacggattcgctgcttagcccataagtgttcgatagtaatgagtcggtaagcatcgttcttgcatcttctgagagatccattttctctctaacactacctactattggattgtctggagaaaataatatcatgaatacattctttcatagaatttccacataatcgtcttcactcttcttgcgacactt

SEQ ID NO: 229978 - DNA, 295 bp, Glycine max
ctctcactcgatgtccatatctgctacatcctgatcgaaatcgattgtgaaaccctctgttgttatggttcctcacaagaatcaacgcctgcatatcttataaccattactcggaccaatagatgcacataactcgcaccatgatattgagaataggtggatctgctagaacaaatgaaacaagatctctttgtgtatgtaataaggtaggcttccaatacaaaatgaaaaggaaatccagcggctctaattacattgaatcaaccgtatagaacttctgactggcttatcacac

SEQ ID NO: 229979 - DNA, 404 bp, Glycine max
  unsure (1)..(404): unsure at all n locations
aaaccactgagcatcaacatgncgaaataagaacagatgcttctgactgtgaatttgacccaactattgaacacatgtcaattgaactcccaatatcaacctttcacaaccaaggtctgaagaccatcgaactcgtccaaaatcttttgaaaaaaaaaggaatcttctccaccatgtccttcgtcatcaatgggatgagcacacattttcacccaagagccatcatgctctttacggtattcaaagatgcattcacaccagcacctattaaaaaggatctcttgattggaacataacgatcagaatcataacggatgctgaagcgttgaacgaagagggtgactaggtatggatatagcaatgaagcatttaatcgcaatgctttatgcatgcaatatctgact

SEQ ID NO: 229980 - DNA, 400 bp, Glycine max
tcatatgttcaacaatgtttttcccttaccaatgtgacaaattactctcattatttgcaaatacacactacagatggatacaatgtacctatcacagctattgtggtgatatcgttttctcttaccaatgtttatgttttccctgatctcaccaataaccttatttcaattggtcaattagttgacaattatcgtagagttgaatttcaaaatctggttatcctatgcaggatcaacactcatggaatatgatcaccaaagggcctaaagttgggcgtctatttcctctttattcattgtcgtcaccatattcttttctgcctttatatcttgaattccaaactgtaatttcaatatggctagcatttggtaccaattcatgtcttatgatgataaatca

SEQ ID NO: 229981 - DNA, 481 bp, Glycine max
  unsure (1)..(481): unsure at all n locations
gcttgtaagttacaaaatagagaaattctatagaatcttaatgcatcctttngcatttaatcattttattatattatgtaactactaccaactaactgtaattaanatatagtttattctctttatatatcaagggttggacgtgttggcatggcatcattaattggcgaaagaagattctctctctctctctctctatatatatatatatatatagatatcaaggatcaagcttgcactatggtttataggcggacaaaataatgtgattaaatgaataactgcagtaaaatttcaaggatcaacctagcacatagcttgaaaatcgactaatagtagcaccggtaatagntttcttttgtgccaaactaatttgaaattcctagcacttcatgaaaatgaattaattcctgtgagatcagacaggtntgattgcattttcataatcactcttaccgatgcaactaatgaatgtgttaaa

SEQ ID NO: 229982 - DNA, 386 bp, Glycine max
  unsure (1)..(386): unsure at all n locations
tatattaaaactaaatgatataacatgatctattctatattcttaatgtttgaaattatctttaataaccttaacatcttataaatacgacaattattctgtttggtccaagtagcatcaatttgtcattggaacttatcagcatataataaatcctatcaaacattatgtatttctaataataagttcttctacaaacttctagtatttcttaattggcagtttctatctttaaatttttatatttatttttgcccttgaaattntctaaattccttaacattcatttatgagcttctaatctttactagttaaaatattgttgttgaacatgatcatttagtattttaacattatttgtaggtatgaaataatttttaaattac

SEQ ID NO: 229983 - DNA, 393 bp, Glycine max
  unsure (1)..(393): unsure at all n locations
gatcatcctactntgatgaatgcaattaattggcgcaaatgaataggatgagaatgatggagaaacccttgttgtgactaccattcctacactgtcaaatttcccaatattccaactatgtcattactcagctaataataacccttctcattacccaccacccaatcatttcacaaaggccattcgcaatcatccgctaggcctacctaccgcatgaccaatgccaagcaccacctttagcacataccataacaccaaccaacgaatgaattttgcagcatatagcctatataattcaccccaattccagtgtcctatgctaacttgctcccatatctactcgataattcaatggttgccataaccccaccaaagttcctcaactccatttta

SEQ ID NO: 229984 - DNA, 392 bp, Glycine max
  unsure (1)..(392): unsure at all n locations
attttttacaaaaggaagtaactaactcaactaactgtccacttaatactatatgagctgactacctcatacagaaagtggatgagatattgatctttgcccaatctaattctacactaattaaatacttacgatagtctcaanaccnttgcagcctcaaattatgtcacagtgtagtaggttacaatcttccaagctcaatttgaccctcgatatgacagaatcggccgaaacttatttgtgacttaattgaatctctttgtcttatatttacatagactactcacatgctccatttgtagatttgtagtgtcctatacgccctacataaagcagataggtcaagtaagcactaaatctaaaaatatctacaattctcaatcaagctcaat

SEQ ID NO: 229985 - DNA, 384 bp, Glycine max
tagctagagcatacacattcacttgctaagcatgttcaactcgtttttccacaactcaactctataacttcagtagaataatcggcttatcaagccaccatatgctaagcgagtaccaattactcgctaagcgcattatgcacgcttaatggatcttgtttgacaaattaacctattaatcatgctatgcctggtcaacttgcgctcttcaccaaactcttttatggttgcacttacccaaattgggcttattgcacatttacgggctaagcgcgagttaaaaatattaaaataaaaataatgatgacggagtcaagaaggcgagaataccaaatgtcaccacctatgcacactaagtgggaaaagcacctactaagcgcaaca

SEQ ID NO: 229986 - DNA, 451 bp, Glycine max
  unsure (1)..(451): unsure at all n locations
aacncgaagaatggctagacatgttacatgttatggctagganaggaacaaggagataagggatgccccacattatttccatgacacatatgcaaaattgatgatttggatattttatgccaaactggttatgcatgcacctatgcggacactcaagtgttatatttttatgtgcatgttatgcctaggcctaggatttattttccctaatatgaatcaacccaatgtttcaatatatggtctttatcaatatgagcatatattctagtccattttgggctgccatgggaatttcacagcattcactcatcatgtgtagacacgttattttctcttcaaaatcggtcatgatcaatgaatgttttttcgaagaagagtcggaaatatctcttttcaaagcatgtcggttctagctagacactattttcctgtttaccttataatactggct

SEQ ID NO: 229987 - DNA, 286 bp, Glycine max
aagcttgatatgattgatggtgacccggtgttgttagatacgatgttatgggctacttgggagtacgtgagctcatgtggaggtgggcaacatgggatggtgggtttatgcgcgcattgtggatgtggaaagcttgttgtgcaccatcgtccgaccgccacctattactacatgtgatgggtaccccattatcctacaagcttgagatgatgaagtgttgaagggtgaaacttcctgcttttattgttgaccacagagtggtaactggagatatgtctcgggggtc

SEQ ID NO: 229988 - DNA, 116 bp, Glycine max
ttccctcaaaaaaggaagctggattttggaggaaaaacaaaaatatgaacctgtgatcttggcaggaaataaaatacccttgtttgaaattatgaaacagtgaataaataaagttt

SEQ ID NO: 229989 - DNA, 408 bp, Glycine max
  unsure (1)..(408): unsure at all n locations
tgtaatcgattacacacatactgtaatctanaccagattttttttcagaaaacattctcaacagtcacatctttttgtgtggttcttgaatggctatcataggcctatatatatgtgactngagacacgaatttgacaagagtttttcataacaaaaaaggtcttatcctcttataaagagaaatcgttgtatcctcttacaaattccttgtgcaaattacttgtgattcaataaggtattatttgagtgctcaaattgttcaatctatctcttgcaagagagatttcttcttctcttgttcttcattctgaaaagggattaagagaccgacggtctcttgttgtgaaagaattctaaacacaaatgaaggattgtccttgtgtgttataacttggaaaggaatttac

SEQ ID NO: 229990 - DNA, 345 bp, Glycine max
gcaagctcatatgcactgtgcgtaggagggtgtattcttcttcggcgaaagcgagataagttgtggcaatgattttattgacccgccctccgaaaccttataccgagatgtcttgggccacgtgggcctcgagtataacttttactatcagagcccgacgaggctcggaactcatgagtaactcccgcagcgagaccttgggcggagttatgttgagctgtacgataactgtgattttgctctgctgaattatacagatgaactcgctggcttcctctatcgacacctctgttttaccatcctttatctccggaacgtcttgtgccgaatatcttattgaagcgg

SEQ ID NO: 229991 - DNA, 447 bp, Glycine max
  unsure (1)..(447): unsure at all n locations
caaacccccaaatagggattttcaaggtagaaacggaaaagaaaaagcggtaaatttgaacaaactctcatcctcacacaatgctataacataatgctaaactccgtacaactggtgttacgacgaatactctaccgaaacaaaattngactcctgcacacccatgttaccctagaaatggctcttgccctcacttagtcattcattgtactcctttgacagcccaagctattccacagtcctaattgacatttcatactatgatatactcactttaatctccaattaccactaaatccagattgatgctttcaaatccttataagcatacacttgttcacgcatatcactacattctcacgttttaaccctagagtaactctaccctgcatctctatgcagttatcatatgccatgtcagcgtagcagcatcacaagcattatcat

SEQ ID NO: 229992 - DNA, 353 bp, Glycine max
aataaagactaatatctataccatgttttgggcattatgattgacaggatgtagtgacatatagtgcttatagagttcacttgcatgtgataaattttcagaaagaaaaagacttaagttaaatggataatgcgaccagattaatacttccaaagatataaatgttttgcaaagacatgttcagacaatataaatatttttatttgactatattaggataaatcatctctaatccatatatgttttaatactatgtcacttttattcatcttgctttgatatactttgtggttaataaattgaattcaatatgattgtgtttatcaataatttctggatttgtacatacctat

SEQ ID NO: 229993 - DNA, 435 bp, Glycine max
  unsure (1)..(435): unsure at all n locations
agcttgaatacaaattaatatctttgctatttcaaggtgggactaattaagcattattgtgtattgtccaatgtcttaacaaattctcactttagattgctcttactttccacttcatattttcatttgttttcttctcactntcaatagcagagccttggttgcttttttacagacttcatgaaagtanttgttatgggattagctggcgtctataattcaatcattggctcatagctggaggtagtgttgtgtgtcatgctcttgtggagagaaagaataaaagtacaaacaactgcattngctctttctcttcagctaaaatgacccatgacaaatattcttatgaaaccttctattcctttccattctatccttccttaaattcaaatgtcgacaattcataatacgagaggcaaaaatgaatctatgaaa

SEQ ID NO: 229994 - DNA, 268 bp, Glycine max
aaaaataactggacttatcctttatctactgtagagctttaacagtaattgcattgtcatcagaaagagacctatgtctcgaatagaagcagaactactggatcttacagcatgtccaagcaaatcctgcgatgctaatgtcttactcaataacactcatgaaccctcagaagagaaataaatgtatgtacatacaatttggtatgtacgacgctggtcaccacaacgacatgctagaacagatagaaatagatcactcagttcaaag

SEQ ID NO: 229995 - DNA, 364 bp, Glycine max
tgtgctctttatgtattttattaatgattaataagtgtttttcttaaacaatttaaaataaccatgctaacaagttcttttcaaggggaacgagctcataactcaattcaatgtttggcatagaggggctaaatataaaaaatccatcttcacaaaatactgaaagagatccatctacatatcttgaattcaatactataatcatgttgaaatcgaacacatggaagttagcctatctagctaacaagtgtgttgattaactaactttcaagaacagccaacaacatttgacatctgaagtcaaaccatttatttcttcacaaattaaaggagttaatagaactattcacgcgggtttttttct

SEQ ID NO: 229996 - DNA, 327 bp, Glycine max
tatctagtgtgtaaactttcgtctcttcgacatgcctaactaaactgggccatatcttaaacagatcgcatgtattcgactgcgtggagcacaaagtacattgtgatgggaattgtcaggcgtgatgcccaaacgttcatctcacttccaatattctcagacaccagtgctagagtagattcactcactttaaactgccatctcgagcatatcaattattttatgcgataggatctgctacaaactaacattagctcttatgccgatggtggtacctctttgaaattatgctcggtaggtggattatacagtaatattacttctaaa

SEQ ID NO: 229997 - DNA, 410 bp, Glycine max
gtgtaacttgtcagtcaatgtaaatattatttaataaaatttttattcggaaataggaaaaaatggatgaataaaatataaatgtctttatcacccacaattgttacaattagtaattagtacaacacagaaacagggtattgtctcgagtctccactatttatttatttatttggtcaaaatgtataacttgtctttctttatttttttttaaagatgagatttgttcagaagtcaaagccacgatatgcctgtctatgcattgcatctgctaaagaccaagatggttaacatgcttcagtcaacttgtgcatgttcaattcttaaatgacgacactagacaaccatccaaccttgatatgccattatttattacataatgattagcaccgataagttctcatgaatat

SEQ ID NO: 229998 - DNA, 390 bp, Glycine max
ttagcgtcacttctgaccatggtcgtatttggcctcttctttctaatattttaaggaagctatatataggactctatacttcatataaacaatagtttgtctaactttatctctttacgaatttatgagaaccttgaaagcttttgatagatgtaatgcctataatacaccgtgaggatggatcatgatcattgttcctgccttattggcatgtctatgtctattttgtataagattgttattttatctttgatcatgagcagtcaatccccgtagtctgagagttatgatgtaactatccaaatgtaccattctccctattcttaaaggaattcctcattgtttaatgctaattaattctcttacttgcctttattgttatttgaaatc

SEQ ID NO: 229999 - DNA, 434 bp, Glycine max
agctttgagccaattaaacaacaatgactttttactcttatgtctgattgagtcccgtaacatatcgagacgctcgaaattgaatgttgaacttttgagcctattcaaacgacaataacatttttctcggatgtctggttgagtcccgtaccatatcgagacgctcgaaattgaatgttgaacctcttagctaattcaaacgacaataacttttctcacggatgtctgatagagtcccgtaacatatcgagacgctcgaaattgaatgatgaagctctgagccaattcaaaagacaataacttttttctcggatgtctgattgagtcccgtaatatattgagacgctcgatattgaatgtcgaaactcttagccaattcaaacgacaatatacttttactcggatgtctgattgaagtccgtatatatcgagac

SEQ ID NO: 230000 - DNA, 445 bp, Glycine max
tcgagcgtctcgttatgtacggaacgcattgagacatcccagtataattttatagtcgtttgtaatggctgaaatcttcaacatttaatttccagcgtctcgatatgttacggtactcattcagacatccgagttaaaagttattgtcgtttgaattaactcatagcttcaacattcaatttcgagcgtctcgatattttacgagcctcaatcagacatccgagtaaaaagttattggtcgttgaactagttcagagattaacattcaatgtcgagcctctcgatatattacgagactcaatcagacatcccgagtaaaagttattgtcggttgaattgactgaaatgctcaacaatcaatttccagcgtctcgatatgttacggtactcaatcatacatccgagtatatattattgtcgttgaataactaaagcttaacattaa

SEQ ID NO: 230001 - DNA, 456 bp, Glycine max
  unsure (1)..(456): unsure at all n locations
tgcagcatgcaagcttcaatcaaagaggaagatgactattctactttgcaccaanagcgagcaaatatgctgatgcaccctcaatacttcattcttatacattgactctgttatgttcattngcctcagcatctccattattcttcgattgattggcattttctggaattcttacaaaatatgtacattgggactttttaaacccacactttgtctttgcacttgcagcagcattacaagagtacgcaaactcatcttcttaactatcatcacatccaaatcggttcaccaaaattcacaatctctcatatttgccatattaccactgccagaagtactgtaagtgagcccacttatttctgtaaccatatattccctcaacatcttcgaatacatttgggggaagtttgctgcacgctgcaccgtgcccgacttacaatcaggtgtgattgctcg

SEQ ID NO: 230002 - DNA, 456 bp, Glycine max
  unsure (1)..(456): unsure at all n locations
acctgcatgcatgcaagcttgggnatggcagcattctactaatattttgttttgcccattgctntgcctgagaataacaattgcttgaccacaacagcgcttggggcggcaacagacaatggtctttcaaataatacctgtgtacatgaactaacattatatcatgcgctgaccgtgccaaacgaaccagcgaagtcattgcataattgttacactaactatattcaatgtacctgaacaaaatgatttccaaacacgtgaccgacacatatgatgcagtggccagaagagtcaggtggtggttgacttctaacagggaaaaatgtcatgctttgttgttgggacaacgatacaaggattacgttatatcgtgaatcaatcacatatcccatgtctggtatatccatccacttgatcacactaacctgaatgaacgaaacatacacatgtaagtaa

SEQ ID NO: 230003 - DNA, 92 bp, Glycine max
tttccgagataaaatgtcggtgttgcctgaactttaacttaattcatgcctgaactatatttgttataaccatcatgattaaattgtctacc

SEQ ID NO: 230004 - DNA, 238 bp, Glycine max
ataagcatttggatgactttaaataaggcctagtgccagagaagtataccggatatgctgccatctggatgttactattcactcattgaagaattggcatacatacatctcgagggggaaaattctaatgtttagcccaatggtgctaaaatactacatgccattcctccaccaatttcgacacccgatgatgtacttatggcatactgctcctagattcctaatacatagcggaaca

SEQ ID NO: 230005 - DNA, 404 bp, Glycine max
catacaaagggaaaaggttatatcgtagccgatgctctttcttggcgtcatgcattaatttctatgcttgaaacaaaattgattggtcttgaatgtctgaaaagcatgtatgaaaatgatgaaacttttggagaaacttttaaaaattgtgaaaaattctcagagaatggcttctttagacatgaatgctctcttttcaaagaaaacatattgtgtgtgcctaaatgttctactagaaatctgcttgtttgtgaagcacatgaaggaggtttaatggggctatttgtggtccacaagactctagatacattacaagaaacattttattggcctcatatgaaataggatgtgcagaaatttgtgaacatcgattgtatgtataaggaaagtcaacgtaagcctat

SEQ ID NO: 230006 - DNA, 449 bp, Glycine max
  unsure (1)..(449): unsure at all n locations
ctggacttactgtgttctgtgaacctctcctttctcatgtgttcccaaacccaatcacctggntcaagcacgactttctttctgctattgttggcttgccttgcatatctcgcatttatcttttcaatttgagccttcacttgctcatgcagcttcttcacatactcagctttatcctgtgcgtccttatgcttaaacataacaatgttaggcatatgcaacaaatcaagaggagtcaaaggattaaatccatacactatctcatatggtgaacaattatttgtgctatggatgatacgaaatcagagtgtggtaacggaagcaaacaaccaataacgaaggtactaagtaccacccttattagtcgaattcctttaagtattcttggtatctgtgtgtgtgggtctttacgaaaatcagcaaggaaaaataagcattattaaactaca

SEQ ID NO: 230007 - DNA, 249 bp, Glycine max
agggcacaagagtccagccagtcctaagactgaaagtcgaagggttttagacgaacgcacatcaaattgtctatgcaggaaatacacaccttgacgattacgagaagaaactcgatggaaccagaacaacctacttgaaactaaatcgcaggcagtagcttatacatgctgtttcaaaccagtcggaacaagcttacaagagaggcagtctagcaaggcagcctgcttaggacaagacctcctaaccac

SEQ ID NO: 230008 - DNA, 439 bp, Glycine max
  unsure (1)..(439): unsure at all n locations
agctggcgggctataccttcgattttactctatcgngnnnctgtctcggcccgaatgtaacgcgggctgcatcactggctccgcttccctaactgtactggaggcggttgccgcggctttatcctctatatttctctggagttttaacatgacctccgagatggaagccatttgatcttttaaggccgatagatcggccttcatctgttcctgcatgccctcttcattatccatttttctggatcgagtgttataggggtgccttggcgttttcttagttatgatgaaactcctatagaaataaacaacgatgagtatgccaccaaaacatgaatatgcaaatgaatgatcggagcactgggatccaccacaagggtattttagataacatgatgagttcagaacttcccatcttattaaaagaacatagctctcatct

SEQ ID NO: 230009 - DNA, 409 bp, Glycine max
  unsure (1)..(409): unsure at all n locations
actcagcttctanttcagagatcagctgattttttctaccttttcactcctctaatgactatatcatcatttctggcgctaaactgctgtgagttggaagccatcttctcaattaaatgtctggcttcagcatgagtcatgtctccaatggctccatcactggcagcatctatcatacttctctccatattactgagtccttcataaaaaatttgaagaatcagctgctccgaaatctaatggtgagggcaactggcacataatattttaaatctctcccagtactcatacatgctctctccactgagttgtctaatacctgagatatccttcctgatggcttgtggcctagaagcatggaaaaattttgctaagaatactctcttaagtcactccagctcgtgatgga

SEQ ID NO: 230010 - DNA, 407 bp, Glycine max
  unsure (1)..(407): unsure at all n locations
agctncgatatcttgacttgagctacaatgtattttatttgatggcaattccttctttcctttgtgcaatgacctacttgactcacctcgacctctctcatactggattcatggggaagattccatctcatattgagaatctctccaatttggtctatcttgacctcggaaattatctttccgaacctctgtttgctgaaaatgtaaaatgggtatcaagtatgtggaagctcgaatatctttatttgagttatgcaaacctatccaaagcatttcattggctacacactctccaatctcttccttctgtgacccacctatattttgcagactgcacactccctcactataatgaaccatccgtgctcaacttctcatctctgcaaactctccatctttccttcact

SEQ ID NO: 230011 - DNA, 289 bp, Glycine max
actcgctgtaattgcagactttctgctctctttttttgctatccaaaagacatttgaaggaccaaacttcatggttccctgattattaaaaagatgaattgtatcattcctgattgcggatcccaaaagcgatgttcttcattgatattaccataagtgcaaagaaatcaattccaaaattgaaggtcctcagttgatgttgacaaatgagtacagaattcaatttccaggctcaaatatcctgcagtgtggtgattcaaactgaacatgaaacgatagatagttaaaa

SEQ ID NO: 230012 - DNA, 312 bp, Glycine max
gttagcagttcatctagtttccacaaaacccataatacatatttgatgtctcccacttgtcgacctcttaaagcctaacacagatgcaaagtgtgcgccccacctcatttatgatacaaactcacgtagccctaattctaatctaatcctaacaaaacatataaaccataacaatctaaagctacagtgttcttcttccaccctattatctagatatataactgagaaatatgatctcggacttatttggacggggatgattgatgctcaaagcacaatgctccaaagagtcatatgcaaaatgtgcatttt

SEQ ID NO: 230013 - DNA, 299 bp, Glycine max
gtcagcagatgagcacattccacatacccttgtgacaagtacatgatttctgattcaagtgccagctggttaccatattaccaatgatccagattgtcttctagcttctatgttcatatgatgtaagtcggtttgtagctacctcatgcactactctaatgactatggcatcatttctggcgcttatctgttgagaagttgatgccatcttctcaatttaatttctggcattatcatgagtcatgtctccaaaggctccaccactggcagcatctatcataacttctttcatattactg

SEQ ID NO: 230014 - DNA, 452 bp, Glycine max
  unsure (1)..(452): unsure at all n locations
agcttaactagggattgaaaacttgctttttattgatgagtatcaagcacttaatatcaattgtcgtataaagattatgtcacaatgganatatttntctccttttccaaggcatgaatgattttcacaatttagttggaaacatctaaantttttgaattgaagataattcgttttaaaattttcctaactcaatattggttgtaaggaattttatatagttgattatcttgatggacttatggacactgacagtgggatacgaaacattgtttcaatgtttgaaattgctaatattctatccattttttaagtacatcatcaatctgaattctcaattaatgtgatgcttggtattcaactnttatnntatcataattttttcatgctaagtttgnggagaaagaactatacaaataagttacatcattttatgtaaagctagaacagta

SEQ ID NO: 230015 - DNA, 465 bp, Glycine max
gtaagacatttagcatctgcatgttaccattgataagaatgtcctgttccacttatacatttattgtctgcctacaaaaatcaatattcattctataatgacaatagaccctactactcttaagtattcaatattcattctaaaatggaaaattcaatattcagtattcatacctttctgctctaacaaatgtgttgttcatgtgatagcaatcaccggagaaagaacactatatctgcttggtgaatcttaatcatgaatagaaacaagaattatcctcttagaactctcattgtctgtcacatgaataagtaacacttttaatagccaacaagcagtttcacatactttggttgagcataagctgaattaagttggtgtagttgaacttggtttgactttgagttcttctaatgccattactcattatgtctcaaaggtttttttgtgcaaatgtgatacata

SEQ ID NO: 230016 - DNA, 350 bp, Glycine max
  unsure (1)..(350): unsure at all n locations
agcttgactntgcgagttgattttanccttattttcactttagttattagtcaattcaggtaagatatagaaatcgcagagagaaatgtttgctttattttactaaaagatatttattatattattattttacctctttttggcttccaacatggttacggcatgactgaacggtcggatttcattttaacagaaattaacggatattacaaatcatatgatcggtggaaatttattttattttttgattaggcgagaaaatgacttaagtaaatgactgaagcacgtcaaatgggggtacggaaagtaaatgaaacgagaataatagtacgcgaaacatatggcgacca

SEQ ID NO: 230017 - DNA, 376 bp, Glycine max
tctcattcacgtatctcctcagtgttgtgagcataaatatgacaggggcttgcgtgtttaatctctaactttccgaggtattattctcatagacacttctcacggaagttttctcaagaaagcttctaaatgaagctacctagtctataaatataatcatgtgtaacacttattgttactctgatgaatgagactcttgtgagacacaactcacatgtcaacttctctacatttttcttccttcaatatcgtgctcccccttctttctttctctccctctttcctttcctccattgaataatactcttcaaactttttatacaaggctcatcttggtggtgaaactacttcttacatggcttattccctaatggat

SEQ ID NO: 230018 - DNA, 405 bp, Glycine max
  unsure (1)..(405): unsure at all n locations
gctacttatggaagccntctcaagagagcatctgagggaagctacttatnctataaatagatgtatatgtaacacttgttgtaactttgatgaatgagagtcttgttagacacaactcaaagttcaacttctctgccttttacatcctataatatcgtgctcccccctgtctttgtttctcccttctttctattctgcattgaagcatcctctccatacttcttattcaatgctcatcttggtggtgaagctccttcttccatggtttattccctagtggatggcgcctcctctaacctcttcttcttagcatccactggcatttcatggtggagaatcaccattaaagaaccttattgaggcttaaagatccaccttcatagatgccccaccaagcaagcttcc

SEQ ID NO: 230019 - DNA, 395 bp, Glycine max
actccactaatatatacagtgactaatcaatagaaaaggatgagccttgattaggcccatctaatctacctaattaaactaattacacaaagcaaagtgcaaattcgcagcccaattattcagtgcaagggtttgacttccaagcccaatttgacccttgaaatggcagaattagcccaaacttatttctgaaaaaattgaagttcatattcttacctttccaggaattatttacatgctctattatgagttctgtagtgtcatataggccctgaacaattatcaagtaagtaaaatgatcaaaaataagagacaattatcaattaagcccaattatttgcctaagaccaaaactgagttaagggtgaataatatgagtcatatagaggtcaaat

SEQ ID NO: 230020 - DNA, 452 bp, Glycine max
  unsure (1)..(452): unsure at all n locations
cgacttgcaggcatgccagcttgaatgctngattgtattntcaaatactatagagagtataagctaaanacatgggtcgagtagtcaaagtagttaaataaccccacattatagagcagtacctgacccctatatgctataatggtacagcaaagcagctgcaataccaaagcaaatagtttctgtataacatgctcaaaactaaagtactcaaatcaaaactggagaaacagtgttgggcttggctggaaaaggatgaaagagaggcggagggacaggaaaatgcagagggtacagagacaaacaaagcatgaacagatgtttggctgctggaaacttgagagagcaaagtgcacagagtgagaaacaggcatatgcggcttcacgatgcataaacaagggtgaagtagtggcaatcttctgtagcaaggggtgggctatgcaaattcctt

SEQ ID NO: 230021 - DNA, 471 bp, Glycine max
  unsure (1)..(471): unsure at all n locations
ttgaatatctatatgctatntgtgtatgttgctaatggtcataactntaaaattccaaagaaatcatcggaccttttatgtcacccagttaattggtttattataatttcgttacaaagcatacgctcataattaatgtcaatacaaattttcatcttgaataacggtccacaagggctttggctatatctggtgcaaagaacctagcctgcacaaaaaggttacaacagtgttaaaaaaatttacaaaaacaggacaaaacaatcatgcatatgtgcagaaaaagaaacttttggtttatgtaaatgttattntaacatttttttcacctactcaattatgcaagttcattctataaacttacttgtatgaacatcctttctgcatcaccaatattattgttttctattaggatgattacctgtanaaatacatggcataattngagtgaacagcttctttcactacatg

SEQ ID NO: 230022 - DNA, 380 bp, Glycine max
  unsure (1)..(380): unsure at all n locations
tgcaagctngcacaattcatgcagagaccacaactatatcattggaacgttnttctatgtattgggcattatttgaaaggtaaactagatcaaggaattctactctgtgttggctatgaagtactacatgtctctgatgtttcaaatcgaaaaggaataaacataaaagtaaaacttttatttcactattatatccaatgttccacatgagtttttttttttttttaaactcttaatattatatatgcagtgatttactaaatgttgagatatggagaaaagggatttactcatgacattaagagatgtcatcgttgagagttatcaccatcgatagttattgccttcaaggttaacataactctctttttttttttagt

SEQ ID NO: 230023 - DNA, 462 bp, Glycine max
  unsure (1)..(462): unsure at all n locations
agctcctttcgacgcctgatcgatgacgtactccatccaacangttctatttaaagagtcaagttgttcatgaaagcattaaccatggcgataaattgtgtagtaaaacattaattcaggtcaacttaatccttatccttaatattagcacaaaacaaaataaatcaccgtcaattaatatgatccctcctatttaatcactaacattactaaatcagtcaatttaatagtacttatagttaatttaattatcaaaatcaataattaaattgacagatcctattcttaggactttaaactcatttggtcttttgactaanagacaaggatacggtcataaagaacatttgcatatgcaacacggcgtttgaaggagcgtaatgcagacctatggaggaagaggtgtacgtgtagactggtatttgttcatcatgactcagaanagtcataagtgagtcataa

SEQ ID NO: 230024 - DNA, 426 bp, Glycine max
  unsure (1)..(426): unsure at all n locations
agcttgtcgcaatgtcgcttttagtttattattgtttaaacgaatttttatgacccattcacgcaaaagagaacaattggatgataacttgataagaataaatggtaatgacattacttgtgagacttttatgttggctttataaagttataattgcggatcattgtctattaacggagagactaagaaaagaaactattattattattatgtgatgatagtagtatttctataactttagttntttaaaattttatttaacactctctttctattgcaaatatttatattagtatataaatttattggaatgtctcttgttattatttgaattctcgaggacgaagagataaaagtgaactaaagatggccttaactgcttgtcacggtgctactagcttctttggtcagagaaaggctctgttt

SEQ ID NO: 230025 - DNA, 249 bp, Glycine max
  unsure (1)..(249): unsure at all n locations
caaaaattaagcatccactcgaattaatcgatagcaccaggcaaacactgagcactacaccatactttagcagaagaaaatcagtataacatgcaatggcaatccaagggagtgttcctgttattctagacagaacagcacaatcaatcaaaatatttcaagcattcactttaaaattaacaagcagcactaaccgtcgcaggccaagcagggaatcccttaaccttagcgagcacgagatncgcgagc

SEQ ID NO: 230026 - DNA, 430 bp, Glycine max
agctggtagggttaaagtctcatgactgtctctgtgctcatgcaacaattgttagccgtggctatacgagacatcttgccaaacaaagtcaggttagccataaatcgcctgtgctttttcttccatgctatatgtagcaaagtcattgatcctatgaagtttgatgagctggaaaatgaggccgcaattatattgtgccagttggagatgtatctcctccctgccttctttgacatcatgatttacttgattgtgcatctagtcagagaaatcaaatattgtggtcttgtttatttgccatggatgtacccgattgagcgatacatgaagatcttaaaagggtatacgaagaatctttatcgtccagaagcatctattgttgagaggtacatggcagaacaagccattgaattttggtctgaatacattg

SEQ ID NO: 230027 - DNA, 443 bp, Glycine max
  unsure (1)..(443): unsure at all n locations
gcttgtgagatcattttgacaaccacgcatgagaataatggtgttntcttctcaacttagtattataattatgcttaatttngtagaagcactctntacatctgtgtgtgcatgttttctgtaccactagaagttttccatgcctcgtgtgtctgtagataatggtctttagcccagtggatcttgtgacatgttattgaattctgaacagttttctctttgggctgacgcacctgtattggagagttcagattcaaagataaggtttctttntgatattactatataataaatatagggagacaaaacttggctgttcacagcttgatcattntatttctgaaattttctgcacctctcagattgttgataattctcttccaatgctgattcagtgaaagtgttttttaacagatgatgcttttgaacatgttggttcaata

SEQ ID NO: 230028 - DNA, 296 bp, Glycine max
  unsure (1)..(296): unsure at all n locations
agcttgtactgctgtgagagttgcttggtactatanacataggacgaccataaagatccaaccctgcggctcagcgccatgaaaccacaagcatgttaagctcatgacgcgtgaccctgtaaggacatgacatggcggaagctgaggtatgagagtcggtaaacaaggtgacaagcatagactaatgcacttagatagcacaccatttactatagtcatcctagtcaaagactcatcgagggacatatgtagattggtgagacaaattaaggctttctaaacgcagtctgaagatc

SEQ ID NO: 230029 - DNA, 428 bp, Glycine max
  unsure (1)..(428): unsure at all n locations
cttataagtgcgggtctgggagacgaaggtcaagtggtcgctatatgtgaagatgatgttccaagaactctggatttggtccgaccatgccctcctgatttccagctgggaaattggcgagtggaggaacgccccggcatttacgcaacgagcataatgtaaacctttacggttttaaaagctctatagttgggcctaggctntagagttttcattttgttaacgctatgtgtcttttgtttttgaatctataatacaaggatctttcttcatctgttcctagtctctacccattctcattcatttgcatgtatacttctttttctaaaacggcagattcgatgacgagtccctcgaaggtactaatacctgtgacccgtctatcaacttctagcatgaaatgaaccatactgaagatgaaggagatg

SEQ ID NO: 230030 - DNA, 406 bp, Glycine max
  unsure (1)..(406): unsure at all n locations
tctccttccttttcctataaataggggaaggagggatgtatataagtgttcaaccctcctggtatatgagattcacttaaaattattgagaaaaattgtttccgtgaagaaaatccaagccgaggcacttccgtaacgtttctgtgggtgatntcgtgaagaatttcaaccgttcgtcgttcgntcttcgtcgctcttctgtcttcaaaccgatgagttcccgaaatcgaacttttcaattcattctatgtacccttagtggtcctcatttgtttcgcgtgcttttattacctctttcaaaatacataaagagatcattaatggtccaatggcctaatgtgttctcttctttcaaaagaatcgaaagatcgtttaatggtccaacgccttaaatgaccgttcattc

SEQ ID NO: 230031 - DNA, 463 bp, Glycine max
  unsure (1)..(463): unsure at all n locations
tgtgggtgntacatcaatcataccctacgagtttcaacctgaattgcctatgtacttgttatcttatttcttctttttttcttggttcactcaactatcttcctttttcttttttcttttattaaacccatttatgctttaatcaactgccacttttttcaaacccattaccgtttatttattttactttacattattattttttctgttaatttttaaaccaaattcggtccgcataagcctaatagttgaatttgcttttgtttcctttgataatttttctttccacgttgaactcataaagaaaaaataaacaaaaataatcaacaataaaaacaaaatagaacaaacattaaataaatataagtatatgctacatgaaccctaaacgaaaaggaaagnttggtcaacatggtaaacantaattccatatagtttcaacgacctttaatgtaattagagt

SEQ ID NO: 230032 - DNA, 439 bp, Glycine max
  unsure (1)..(439): unsure at all n locations
agcttgttaatcatcttggcaagaaaaatgaatcagcacgtggacggtttaataaagagtgactaaatcctcactatataaagtgtgtgtatgaaaaataaacttcacactntattattataaaatttcaaaacaaaagataaagtgcttttaatgcgtgaaaattgaatttttaacactaaagtttaagtggtttaaatgcaagtggacaattgaattttacttgttagatgaaaactatttgaatggatacattgaaaattattttgtttcaattttcaagagaacttatttattttagttggtgaaaatcttcaccataaatagagaagagaattagtggaaaagatacacatganaagagtgtgtgtgagaagagaaattgtaaaataaaatcactttgttcagagaaaaaacatctttgtgtgaatgttatcat

SEQ ID NO: 230033 - DNA, 408 bp, Glycine max
  unsure (1)..(408): unsure at all n locations
tctgtgtggtgatcggcaaaggagcataaaccatagagtcttgcgacaggtgcctgatttttaatcattgctaagtgggttaccaggttaaacaaggcatctagtttaccttcaagcttcttagtctcacctgatgaagatgaattcatggctacttcatgcacntctctaatgacaatagcatcacttcttggcactaaatgctgggagtttgaagccatattctcaattaaatttctggcttcagtaggggtcatgtctccaagggctccaccactggcaacatctatcatacttctctccatgtngcagagtccttcatannaatattgaagaagaagctgctctgaaatctggtggtgagggcaactggcacantaatttttaattntcccccagtattcatat

SEQ ID NO: 230034 - DNA, 440 bp, Glycine max
  unsure (1)..(440): unsure at all n locations
cagcttcaagaaaagatggcctcagcatattccttatttcttataaggaatnctatcaatagacctccaatctttaatggagaaggttaccactactggaaaacccgaatgcaaatttttatcgaggcaatagatctaaatatctgggaagccattgaaatagggccttatatacccaccacagttgaaagagtttcaatagatggtagttcatcaagtgaaagcataaccatagaaaaacctagagatagatggtctgaagaggatagaaaacgagtacaatacaacctaaaagccaaaaacataataacatttgccctacgaatggatgaatatttcagagtttcaaattgtaagagtgctaaggaaatgtggaacactcttcgattaacacatgaacgaactacagatgttaaaagatctatgataaatgcactaac

SEQ ID NO: 230035 - DNA, 319 bp, Glycine max
acgtgacatgtccgcagcgtacgcgtcgccggcgaacataactggctgcgccaccgttacaaacaccaccttcttccacaaactagtcttaccgtcaccgtaccactcaccggtgaacaaaccttcttcacttacgcacaacaccgctttccgcgcgtcaccctctccgggaatcgccgcgcataccactattctcgctccccatgcagaaccactcttagacctcacattcaccgcatacacgcgttatcgggggcagcagggtgccacgactctcaccgcaccccatcacataccatagttcataagcctcacataa

SEQ ID NO: 230036 - DNA, 437 bp, Glycine max
  unsure (1)..(437): unsure at all n locations
agctnggaccctgaagcggagcatggatgtgatggaccaatcacaagagcacctactaagaaaatggtgaatgaaggccaatctaaaatggaaaacgtggagcccaaacccatattgatcaaccgcttaaggaataaggaaaatgagctaacttgaagaaaagacccaagagcaaatctgatttgtcatttgggtccaatatttttgtttggatatttttatcaaattaatgggcacgattttatttttctttattttataatttttagttaggaataatattagtagttattggtttgcttacaaatatttaatagccactaactaggaagaaaatatgctattaagagtttaattactagtagaagctcttggcatgccttaggatagctatatgtaccttacaatnttatcaatgaagggacttagattagata

SEQ ID NO: 230037 - DNA, 395 bp, Glycine max
  unsure (1)..(395): unsure at all n locations
aatgccgctttctaaacacaaaggatattcttcaaaataacattatcttgcanattttctctaaaaaacaatcatccacgaataataaatgcaaaatcccaggtgctttcccacaaatcttaatgccatgaatatccctcctattttcaacccttctcaataaagatgtaagaccttgagctaaaattataaatataaaaaagggagaagggatctccttgccagagatctcccaggggagataggatcaaccttgtcatgattcactaccactacatactaaacagtttngacacacatcatcatccactcngtccattgattgcaaaatcacaacttgacaaggattgcatctagaaaccccagtcaacgaggtcatatgccttacatatatc

SEQ ID NO: 230038 - DNA, 440 bp, Glycine max
  unsure (1)..(440): unsure at all n locations
agcttcatanggagccatgccaatggtagagtgaaaactgttattataagtgaactctatcaatggaagaaaactctcccagcttcccttctgctctaagacacatgctcttaaaaggtcctccaacgattgaatggtccgttcagtttggccatcagtctgaggatggtaagctgaacttagtctaagcttggttcccaacgctctgttcaagctctcccaaaatctagaggtaaatctaggatctttgtcagatactatgctagatggcacaccatgtaacttgacaacctcacttatatacaaggtggtcaacttctccaaggaaaatctgatattaatgggaatgaagcgagtagacttagtcaatctgtcaacaataacccagatagaatctaaacctctaggggttctaaggtgtcttaccacaaaatccatgg

SEQ ID NO: 230039 - DNA, 455 bp, Glycine max
  unsure (1)..(455): unsure at all n locations
caatagcaccccacctgacgtcgtcaggtcttctgacccccgcgacatatctccaggtaccactctgtggtcaacgaataaaagcaggaagtttcacccctctatacttcctcatctcaagcttggaggaatatggggtacccatcacatgtggtactaagtggcagtccggcgatggtgcacaacaagttttccacatccacaaagcgcgcataaacccaccatcccctgttgcccacctccaactgagctcacgtactcccacgtagcccataacctcgtttctctcaacaccgggtccccatcaatcctcccaagcttccccaacatcaaagtaaatcaacattcaaacagcacanattaccacagccaagaaaacagggcataggcagaatactctgcccaaaacaccaaccaaaatcacagcntttctcacttaaagaccccagtaacaa

SEQ ID NO: 230040 - DNA, 458 bp, Glycine max
cactacccgcacgcatgcaagcttctgaagcaactgcttgaccacgattttgtttctactttctgaagctcttgttctgccgctgcttgagccttcatctccgccaaagtgagctccaacactgctacttcattctctagagctgacatcttcacctccatcttcttgggtggcattccacaggctcctccgctgatattgtcactgtctctatctctctagtcacagatcaatgttaatcccgcaggtcggaccaatttgatgcacaccagatttatagatgaacagaaataagaattaatagagaaatacgaaaggaatcaagtgtatgtcattgatgaaataagagaaatagcaatatgggaaaacctactacccacagagcctaactcctctcgagaatgatggtattccttacctaacaaatgatcccacaatcataatccccctgactcacc

SEQ ID NO: 230041 - DNA, 430 bp, Glycine max
  unsure (1)..(430): unsure at all n locations
cgactaactttatgatacgttctggccaccgnatctcatcttcttcggtgtaacctaactacgtaactatttcaatgtttcataatcggatttatgaaaaaactgtactatattattgaatccaaaatggatatgaaatcaagacctgttgcgcacacgtttcaaaactccttccttttatagctctcacacatatagaatctatattaattatatatcatattatatggacgctaactatatatcatatggattgtgagtctcttattcgtcgaaattgatatactttataagtatattcctaatgcttttaatttattaaatcttatctgtatatatattatcttggactcttcctaatatttttcatgccaaacaaatgaaaacatatcgtacagctacaattatatattcgaatatatatatgata

SEQ ID NO: 230042 - DNA, 410 bp, Glycine max
agctcggctgtgcccacacttaagcctgatatatagtagcttttaaaataaaacatatgaaaagagaagtttcaagaataaaattttgtgtgtgctgctacttaagctaagtgccttatatgtatgtggcatctcaatagaagctgggaatgaaagaaaaaagttgatctaaggatgaatgctcttctaaaacctaagcttttgcatcctaaaaaaaccatgaattgtttgtagtccagcctcattacaagccaagaaagtctttcagattcaatttgtgtgtttgtgattgtatgacatgagatgaaatgcacaagctgagacttatgttggttgctgattcgaagaatcgccttaaacacttcgtgctatgagagaaacacagaccgtgaggatctggcttgatgaac

SEQ ID NO: 230043 - DNA, 234 bp, Glycine max
tcaaatactcttatcctattgagaggaaacactaaatgtattatgtccacactgctgtcagatgatagacaatttgatcattgcgcacactctaacaattagatttctacgacttgtcatgagcagcagcgacttggtgtggactaatagtcatgccagccgatcgaactagcaatggagtttgattggatacaaatgaacccgtatagtttcttcacgttgcatcctattgcg

SEQ ID NO: 230044 - DNA, 276 bp, Glycine max
cttcagaaagcaaattctagtggatataagctcactacatgcagcaatagacataaaggtcccatcacagatgttgatgaaacaaaaaagcgagcgaatgctacaaatcaaatcatggtgagtaaatcttgtaataaaaattaaaaacatccttagcttaaatttcagcataatattcgccaagagctgtccgtatatttaaaagtccacgactcctagcatctattgtgctcatacagcttgtaagtctctcgttcaggtcatcaatgatttccc

SEQ ID NO: 230045 - DNA, 424 bp, Glycine max
  unsure (1)..(424): unsure at all n locations
agcttctttgagaaaacttgcttgagaagctagagcttagctacacacacccctctcataactaagctcgcctccttgagaagcttccttaagaagattcctaaagaagctagagcttagctacacatacctctctaatagctaagctcacctccttgagatgagaagctagaacttagctacacacccctataatagctaagctcacccccatgacaaaatacatgaaaatacaaaaaaaaaagtccttacaacatagactactcaaaatgccccgaaatacaaggctaaaaccctatactactagaatggccaaaatacaaggccgaaacaaaggaaaaacctantttaatatttacaaagataagtgggctcatacttagcccatggactcganatctaccctaaggcttatgagaaccct

SEQ ID NO: 230046 - DNA, 417 bp, Glycine max
  unsure (1)..(417): unsure at all n locations
tgcttgaggagcttctatgaagggatggagtctatgagcttctatgaggtccttcaatggtgattntccaccatggagatgcagcggaaggcacaggataatacgagaggggaggcaccatccactatggaataagccatggaagaaggagcttcaccaccaagataagccttggataagaagcttggagaggatgcttcaatggatgaaaagaaagagggagagaaagagagaggggggagcacaaaattgatggaagaaaaaaaaggagagaagttgaactttgagttgtgtctcacagactctcattcatacaagttacaacaaagtgttacacatgtttctatttatagactaggtagcttcctttgaaagctctcttgagaaaacttccttgagtagcttctttgagaaaac

SEQ ID NO: 230047 - DNA, 421 bp, Glycine max
agcttctatataagttgaactattttatcaataaacacaagttgagttttattcagaaaattagagtttatctcttttatcttagtgagagtgattctcctaaattcttgagtgattcaagaacaccctggctgtatcaaaggactttcacaacctttgtgtgttgccctcgctggaaagagtgattctttccttcctttcatcttcacccttgttctttcaaaccacaattccagaaaatccacctctgcccagaattatctcgtggccataactcccattttacgcactcaaattaagtgattcttgagcctaaattgactttcaaaacgagacctttcacctcgttttggaatcacctcatttggagccctgtagcttcagttatagccatttctatatttctgtccagccaccactt

SEQ ID NO: 230048 - DNA, 466 bp, Glycine max
ggcctcaaagaggtccaggaaggacaaggcagccgattgtactatttccgctccggagtatgacagtcaccgctttatgagcgctgtacaccagcagcgctttgaggccatcaagggatggttgtttctccgggagcgacgggtccagctcagggacgacgagtatactgatttccatgaggaaatagggcgccgacggtggacatcactggttactcccatggccaagtttgatccagaaatagtccttgagttttatgccaatgcttggccaacagaggagggcgtgcgtgacatgagatcctgtgtaaggtgtcagtggatctccgttgatgccgacgctatcggtcagctcctgggatattcgttggtgttggaagagggccaggaatgtgagtatggccagaggaggaaccaatctgatgggttcgatgaggaggccatcgcccagctgctatgtataccg

SEQ ID NO: 230049 - DNA, 415 bp, Glycine max
  unsure (1)..(415): unsure at all n locations
agcttctttgaaccaaaatcacaataaccttatcaccaaaatggactccctcaatgccaaaatcaatntgattttggatcgcctcgccaccatcactgtcacaccaccgtcaccctcatcttccccgcatccacctccatctccagctcatcgtccacatatgaagctggatgtgccacgcttcaacggccatgaccctctcggctggatatttaaaatatcccagttctttgattatcaaggaattcccaatcacgaacacctcaccgtggccactttctacatggatgggccatccttggcgtggtatcagtggatgtcacgaaatgactactttctgtcttggtcgaccatgcttcangctctaaagtcgaagtcgcaccttccttctatgaagacccactaagtgctctat

SEQ ID NO: 230050 - DNA, 397 bp, Glycine max
  unsure (1)..(397): unsure at all n locations
tcatatcatcgtatgactcgacttctgtgtttattacttgtgtttactaacccaaatgtgaggtgatggacacacccaagcacacattatcacctcattttaaataggcaaaattgcatttttagtccttcaatttgtctttaattttgattctggttcccctttaaaattattgataaatttcgtcctcttattgtatttaatcacacaattcttgtgtatccaatccaggatattgactgtcacgtgccatgttctgattgatcaatgacaacgacaatgcatttcatctttcatggattcaacattcacacaattcgtgaataattttaatgggggaaccaaatcaaaactggagacaaatngagagaccataaatacaattttacccttttaa

SEQ ID NO: 230051 - DNA, 132 bp, Glycine max
accaaaaaggcaaaagcagggccacgaacaaggaaggcaaaaaaacaagaaaccacaacaaggcccaacaaagacggcagcccgacaacacaacccagcacagaaaaaaagaaccagaagaacaaaacgcac

SEQ ID NO: 230052 - DNA, 343 bp, Glycine max
agctgccagctatctggaattgtggatctacagtatataatatcttatctttagcaaataacgtgaaacttggtcaatgcatgatccatcaaatcaaaccttgacattttacagacctaaagctttataatttcataacattgctcttccacatctaactcttccttctcaagctgcatgtctgcatgcaatctagaaccttgaaatgatactgaatgttcaccatcgtaagacgtgatacaacatctgcattaaaataaagccacatttcttcataaggatattgatgtcaaaaatatatctttacacattaacctgtggtatcataataacatatattaat

SEQ ID NO: 230053 - DNA, 443 bp, Glycine max
  unsure (1)..(443): unsure at all n locations
agtcacctgcggcatgcaagcttgaaaaganaataaccacctaaaatacactctggtgcattgaaaacaggagtgccaggtgatcgacgaagctcatctctatcatcctgcaaaatgaaactgttaaagtttgttgtaaaagttaggaagaaagaatgaattatgacaagatccgtatgacccaattcagatcagatgtagggttctaatcttctatccttactagagctagtagacgccaaatgtgaaaggggatatgttaattcttgtaagaaaaatcctcccagagtagggaactagatcaaggaaggccgtgagaagaaaaaaaactcataattggctgaggttcggggataatgatgatgaggaagacgaggtttattttgtgcataaatcttacttttggttctcacataatgcataagtgtttgatcccctggttt

SEQ ID NO: 230054 - DNA, 440 bp, Glycine max
  unsure (1)..(440): unsure at all n locations
catattccacaatgcacggaanaatccaaaaaaaaaaaaacaacttgcttatattagtttaatctttaggtcattttttaaaaaatatcaaaaagtaaaaaaaaagaaagatgtgtgtccaggtagtattgccaccatgtcgaagcaaaataaaataaaattggacactgcaaaaacatgttcgtcatgtgtccacagccgtgacacatccttcggccagccagtgtgtctgtgcttcatagaagataacatgcatgctagatgcttactctaaaaattcaaatagcagccgcaagaagctttatgtcaccgtacaaggactggtaaaaaatattataatgccataaggaaaaaaanaattattggcaatctaaagcttaatgctatggaaaattatgaatganntagtctgtaaaaatttccattttcataanataatt

SEQ ID NO: 230055 - DNA, 303 bp, Glycine max
agcttgtgcaacaactgagtgtatacatatgttgtattcgtagtatgtattagaaatccattatgatgggttctgcatcacgagtgaataataacgtattggacaattccgctctatgaaaataattatattgtagcgcatatttctaatccgtgattattatctatgatcataattgtgtattgaaatataaattgataagtgtaaggatttgctgtcagaattcattttaattgattatgaatgagtttatcaaggctatatttaaccttttttcctattgtcactagttaagtccaatct

SEQ ID NO: 230056 - DNA, 463 bp, Glycine max
  unsure (1)..(463): unsure at all n locations
tgaatcccttacactagagcgctaagcacgagtgagtgtgttttttatganggtctcgngagaagagcttgatatggtcatgcttagcttgggaccactggaacaagataaggctagtttgtttaaacttatatgttaaaaaaacacttattgtaataaaataagcaataattttcttcttatgttgagaaacaaatcctatntgcttattatataagtacctttttaaaaagcacttatttaaaaatttaatcaaatcgacccatagtgtgtntagcgcatttccattcacataaccaatgcttttactttntatgtatcacatgaatgcttgaggatatatatgcacaaatacatgaatgttaaaatggtccacattggagagaggaggacagtaacctctctggactccattggangaacaaaagtatttaagtatataagacatgcaaaagaattgatg

SEQ ID NO: 230057 - DNA, 363 bp, Glycine max
  unsure (1)..(363): unsure at all n locations
aacatacaacacaagagcacgattgatatgagaaatatatttctatgcattaacttggttgtttgaaagaaccaacatacctacctactgttgtcattttatntaccttgcattttatagtatttagcataccagtttagtttaaattctggttgaaattatcagctatacatgttctctcaacaatgctttgattctgaacttaattcacgctaacattagttccatgtgttcaatactccgattcatctgttctaattttaaatacttgatgacccggtgcgctttccggtaaacccccattgaaatttctcgagacataatgcacaaaagtaactgagtgggaatcataatcataatatg

SEQ ID NO: 230058 - DNA, 370 bp, Glycine max
  unsure (1)..(370): unsure at all n locations
agcagatgtgtcttcggcactgnactattctctnctcttcaaatgtcatctgaccaaaacacttaacctatatagatttgagtggctggaagttggaaggaaactttcctcattggtgttggaaaacaacacaaaaatgaccgatgctctattcaggaatagttctttcactggtactttccagctaccaatgagcccccttcctaacatacaaacaattgacgtgtcggacaataccgtatatggccaaattcctagcaacaatatcagttcaatttatcccaaattgcaatatcgtaacttgtttggaacaacatgcacgatcaatcctagagagtatgccaaatgacttattgctttatggaacttc

SEQ ID NO: 230059 - DNA, 251 bp, Glycine max
cacttgagtggcacacactctgagaatttgctatattctaatccatggcaactaagttgcaatcatatgttgatcacacttacgtgcttctgtccatattagaacatattatttggggtgactactattatgggaagaatggtcctacaatacatccttctattcatctacaagaatatctgcattctaaatcaccttcagcatgaagccacttaatttccttactatataatatcgacctttaaaattga

SEQ ID NO: 230060 - DNA, 391 bp, Glycine max
  unsure (1)..(391): unsure at all n locations
ctgagcanattcaaacgacaataaccttgtactcggatgttttattgagtcctcgaatatatcgacacgctcgaaattgaatgttgaagctctgagcaaattcaaacgacaataaatctttactcggatgtctgatattgtcccgtaatataacgagacgctcaaagttgaatgctgaagctctgagcaaattcaaacgacaataacattttactcggatgtctgattgagtcccgtaatatatcgacatgctcgaaatcgaatgttgaagctctgagcacattcaaacgacaataaacttttacttcgatgtctgattgagtcccgtaacatatcgagacgctcganatgaatgttgaagctctagccaattaaacgacaattatcttta

SEQ ID NO: 230061 - DNA, 299 bp, Glycine max
  unsure (1)..(299): unsure at all n locations
ntacagcagattntagtaatgacccactatcctataattattataacttaatgccattaacctanggaattaaaacaaactaaatggctgagtgtaactggaaatgttggcaaccaaaagtcacccccaacagccaacaagtcagccaccatttggtctcccaaaaggctgatgcctaggttgccaattgggcccttattacaacttgaactaaagcccttttagttgattaacccaaaacatatttttggtcagccaactttacaaggattgggccattatttagacaaactaaacac

SEQ ID NO: 230062 - DNA, 435 bp, Glycine max
  unsure (1)..(435): unsure at all n locations
agcttgaaatgaggaagtgtagaagggtgagacttcctgctttntattcgtgaccacagagtggtacctggagatatgtcgcgggggtcaggagaccttggggacgtcatgtggggtgctattgcccaaaaccaagcttgaccaatcccgacccaacccgggcatagtcaatcagtgagaacctgtgatgtacctaagcaggcgagcttctggcagtcaacagataaaaggaacaaagaccacaaagcaaggaggcttgtgtggtggctggccagctgtgaactttgattgatatatgggatatggcctctggtaatcgattaccaagggtgggtaatcgattacaaggcttaaaaatgaagacaggagactaagatggtctctggtaatcgattaccaaggggtgtaatcgattaccaggcttaaaaacgagat

SEQ ID NO: 230063 - DNA, 296 bp, Glycine max
  unsure (1)..(296): unsure at all n locations
gttgaaagttatcatttagtttcttactcagttaaaaggatcatttttaagggccaacgccttaaanatgatcacaaattcaagtaaaaagaatcgcttgattcactcttaagaaagaactatgtacgtctgatntcctctccaaagaagggtacgtaggagaaaaagccccaattttgtcgacctcanaaataaaaagaaataaaagttaaggtaacacaatttccacaattctaaaaaataggctgctgtcctttgagacaaacgtgagaggtgctaataccttcctcaagcgt

SEQ ID NO: 230064 - DNA, 440 bp, Glycine max
  unsure (1)..(440): unsure at all n locations
agcttgtagcatanggactgaggtttaagagctntggacatccggtcctatggttgctgacagaggagctggagtggatgatgaagggatgtcatctgctctagccctttttctcgatgccatctgtaactaaaaataactcaaaattccttagaccaaatttattcaagtttaaaaacagaaataaaggctgaaattaacgatgggcgcttagcgggatacagctcgctcagcgtgccctcataaatataacatatcggcttagcgaaacagcgtgcgctttagcctaatcaatgctgcaacagatatgtgctaagctcagcagggttgcgcttagaggcaccatgaaattcagaaaattcactaagtatggnggcttagtgagcaaggctcgcttagcccaatggctgtcgcaatgaaatgagcttagcccagatagg

SEQ ID NO: 230065 - DNA, 312 bp, Glycine max
  unsure (1)..(312): unsure at all n locations
taacaaaaattttcatgcaggtggaccttcttcaagtaattntgacttaccgcagccctctatccctcttccattcccacctagagcaattcccaacaaaaaaaatggaagaagcagaataagagatcttggagaccttcaggaaagtagaggtgaacatacctctgctagatgccatcaagcagattccaagatatgccaagtttctaaaggagttgtgcacccacaaaaggaagctcanaggaaatgaagggattagcatgggcagaaatgtgtcagcattgataggtagatctgttcctcacattcttg

SEQ ID NO: 230066 - DNA, 432 bp, Glycine max
agcttgcctgtccaatgcagcagtaatgatggcccgagttatgttggggaacggttacgaacccagaatgggtttaggcaaagacaacgacggcataactagcctgataaatgccaaaggaaatcgtgggaagtatggtttaggctataaacccactcaggcagatataaagagaagcatcacgggaaggaagagcggtggtcaaagctcgcggttgagacaagaaagtgaagggagcccgccctgccacataagtagaagctttataagcgcaggtctgggagacgaaggtcaagtggtcgcgatatacgaagatgatgttccgagtacattggatttggtacggccatgccctcctgatttctagctgggaaattggcgagtggaggaacgccccggcatttacgcaacgagcataatgtaaacctttac

SEQ ID NO: 230067 - DNA, 430 bp, Glycine max
  unsure (1)..(430): unsure at all n locations
gctatctatgctagaaatagaagcatgtgtaacacttggtataactatgatgaatgagtgccttgtgagacacacttcanagttcaacttctcttcctcttttcctccttcaatttcgtgctcaccccccccccctctctctctttttcttttcctccattgaagcttcctctctaagcttcttatccaaggcactntcttggtggtgaagctccttcttccctggtttattccctagtagatggtgcctcctctcacctcttctcctttatcttccgttgaatctccatggtggaaaatcaccattgaaggacctcattgaaactcanagatctagcctccatagaagcttcataagcaagcttccatcacaagacacttatagtagtcaagaggatactacttctttccccttctctagtggaagtga

SEQ ID NO: 230068 - DNA, 439 bp, Glycine max
  unsure (1)..(439): unsure at all n locations
agcttcatggcaagccagtggttagaggactttgctggatggtgaagttgatgtgtgggattcataatcatgaatttgccaagtcattagttggacatccatatgttaggcgattgagtaaagctaaaaagacacttattgctgatatgacgaagtgaatggtcaaaccaagaaacattctgctaactctgaaggagcacaatgccaatagttgtacgaccatcaaacaaatatacaatgcaagaagttcatacccttcttccataagaggaagtgataccgaaatgcaacatctaatgaagtttcttgaacgggatcgatatattcatttgcacagattaaaggatgaagatgtggttggtgatatcttttggtgtcaccctgatgcagtgaagttagtcaatgcatgtaatttggtattnttgatagacagtaccta

SEQ ID NO: 230069 - DNA, 395 bp, Glycine max
tgttcaagtggacttaaatgtgtgaattcgtctttatagctttattagaataaaaattcaattaaataattggaattgctagaaaatcatttaactaaacatgttgaatatgataaatataatactaatgcaacaacaataaaaatagataagtccatataaaccaactatccttccagttccaagggaagggaaacatagtattcgagcatttggattggtctcatcgtaaggccaatgcgagaaaggagggaaacactatggggtaggcccaagctggagggaccacagtggtgagaagggtgatttactcactttccagagacattccaagtggtggacttgtggaagaattttgtaaatgggggaaggtctgggctggttttatttcacat

SEQ ID NO: 230070 - DNA, 373 bp, Glycine max
ttgaaaatatgagaacttattcatcctgcttggacgaatgataaaactggggcaaactaagagggtgagaatgagggacaagcccatgctgtgactgccattcctatacagtcaagtttcccaccaacccaacaatgtcattactcaggcaattacaaaccttcttcttacccaccgcccagttattcacaaaggccatccctaaaatcaaccacaaatcctacctaccgcagcttcaatgacaaacaccacctttagcacaaaccagaaacatcaaccaagaaatgaattttgcagcgagaaagcctgtagaattcaccccatttctggtatgctatgctgacttgcttccatatctacttgataattcaat

SEQ ID NO: 230071 - DNA, 292 bp, Glycine max
  unsure (1)..(292): unsure at all n locations
atcaatgattcacaaaaagctcgacctatatcaactcatgagcaaagccagaggacaagacaccaatgcctcagccttgcaagcagaaagggaagcaagggatagggtgatcgagtcaatgcacagagaagcaatgatgtggatggacagatacgcaattactttgaatgggagtcaagatctcacctgactgctagccaaggccaacgcattggcagatgtgtacacggcccccgaggataaccacngtctcctcaataattgtaacacatgaatgaactaatggaccaca

SEQ ID NO: 230072 - DNA, 428 bp, Glycine max
agcttgtccacaaaaatagtgtttttttgaaagtttatcatttcagtttcttactaagtaaaatggatcatttttaaggtccaacgccttaaaatgatcacccttcaagtaaaaagaatcacttgattcatgtataagaaagaactacgtaggtctgatttcctctttgatggagggtacgtaggagcaagagccccgcttttgtcgacctcaaaaaataaaaagaaataaagttaaggtaacacaatttctgcaattctaaaaaatagttgttgtcatttgagacaaacgtgagaggtgctaataccttcctcaagcgtaaatacaactccggaacttagaattttcattttgaccggtttccttcggtttttccgacgttttccacaaataaacattggtggcgactccgcacacctttcttcctt

SEQ ID NO: 230073 - DNA, 269 bp, Glycine max
ctcttctacagcttggttccaccaaaacttctctcaaatcaaattcactaatagccaactcgggaaagcattccaatattttttccaaaatcagataatttatcatagattacattcagagttatgcacttaaaagcccgtggacatttgaacactaactcgatcagagctaagaatcaagcactaattaaaaaaaatgaaggatttaaacttagaaactcaaatacgtagacttgacactaagatctaccacctgttcattatgtcat

SEQ ID NO: 230074 - DNA, 389 bp, Glycine max
agcgtgaacctttggtgcgtatttctgtttttatcgcgatttgttgcatctatggagtcgtgaagcgcgtctctacgtgtgggacttcgaaatttcaggtttgggtggacttttttacctcttgattttcgagggtatggggtttagggaaatatgatgggtagccttgataagtttctgcttcatgatagttatttgtgaaggaatttgttgaaagcatgtcgaacttgccatgtttagatgagtatagcttacccattcagttttagggctttcatgatgatgcttgtgatgtttatgtgctgaaattacttactgtatactgttatagaggaagggcagagtaaacctagggttagaaagtgagaatgtggtgctatgagtggaaa

SEQ ID NO: 230075 - DNA, 397 bp, Glycine max
  unsure (1)..(397): unsure at all n locations
gctatgaggattggtattcacaggcagtttgacgtaataattcctctgatgaaacatcagattcagaagaacaactattttttaaattcttggttattgatcgctctttaacttccactaaattggcagatgacacattattttcaggatcattgtctcttggctcctcagaaattgggagaggtaattctctcccattctcttctattttgtattctgattccataatttgaagattgcatgtatctgtatcattattagaccgagcattatgattttttgtcagcattaattcatctttagtagcatcagactgattatcacaatatttcagcaataacactttcttgtcttttttatgtnaatgtgcagcatccaaaatagaactagaatccct

SEQ ID NO: 230076 - DNA, 472 bp, Glycine max
  unsure (1)..(472): unsure at all n locations
tagtgcgaagcaagaagcattgttgttgatgagcctctacttgttggcctccggcagtgcacgtttgaaggcttccttgccatcacatggtgctgatcaaattgatgaaagagaccccaaagaagcaatgcaaatgtcaagcttcttcaatggtctcttgtagcagtttgcattggtggtgcattgagcttaacgtttaatgtatatatacaagaccgctatggatgggattggggctttggaatctccacttgtgctattgtattgggaaccatactctatgcctttggattgccactataccgaattcatgttgcacatacaaaaaacggcatcatcgagatcatacaggtatgtatacagtcnttagtaattaccttcttggtttaatttgttttcatatataagttggatgctctaaatagctcaaactttgatcacgcatgagctagatttcataattattcattat

SEQ ID NO: 230077 - DNA, 421 bp, Glycine max
  unsure (1)..(421): unsure at all n locations
agctgtaactntcctctcgatcttgttacttcttataaacctcaattaccacaagaaacatttagatttatattatgccgatctgtacacataaactgcctttctttatttgcatgccaaaagaaacctctcacatcaaaccaaaaaaaaaaaaaaccctctgatatttgaagtataacatcacatatccacttaattaaatgattcaaagttcgaattctgatttataagtataaaataaattatgttaaaaaaaaaataatcatcttatgtgtgggttccaacaaaaatttgttactattttcaattgaagtacctccataccaatatataccatgattaaagaaaataaaataaagactacaacatcacacgtgcaatgtgtgtgtaccctttcttctttatgctttgctgtgatttc

SEQ ID NO: 230078 - DNA, 482 bp, Glycine max
  unsure (1)..(482): unsure at all n locations
cgcttgtggagcttctatggaggctggatctttgagctttattgatgttcttcaatggagatttttcaccatggagatgcagtggaaggcaaaggaaaataggagaagggaggcgccatccactacggaataagccatggaagaaggagcttcaccaccaagatgagccttggataagaagcttggaaggatgcttcaatggaggaaaagaaagagggagagaaagagagaggggggagcacgaaattgaaggaataaaagagggggagaagtagaactttgaagtgtgtctcataagactttcattcatcatagttacaacaagtgttacacatgcttctatttatagactaggtagctgtcttgagaagctttcttgagaaaacttccttgagaagcttctttgagagnacttccttgagaagctagagcttagctacacacacccctctcatactaagctcacctcttgagagcttctt

SEQ ID NO: 230079 - DNA, 359 bp, Glycine max
agcttgctctaaatttacattgatgtttgtatttatgggaggaggttgtatgccatttttgttttaagagtagtgtcccactggtaaaactaactttccaaatgtttgccttcgcgggaaatggccccgaggaagcttgcctcaaagaggtccaggaaggacaaggcagccgaagaaactagttccgctccggagtatgacagtcaccgctttaggagcgttgtacaccagcagcgcttcgaggccatcaagggatggtcgtttctccgggagcgacgcgttcagctcagggacgacgagtatactgattttcaggaggaaatatggcgcccgcggtgggcaccactggttacttctat

SEQ ID NO: 230080 - DNA, 468 bp, Glycine max
  unsure (1)..(468): unsure at all n locations
ggatatgtgaatactatactgctgctgtctttntaaaatatcaatacggctgaaggctgataacatgaagtttttcataatgaaaattaattttgtttcaatatatacgtctttntttggcacaccattttgatatgtgtatccacagtttcgacttgcagaagagaagtgtgaagaagctgaatcaagagttaggcaactagaaccaacaggtaatacatggcatggcaatgtttgtcagtttaatgctctactgtacaagtgaatcactaggaatatgctagtatgacaatttggatgtgattataggtttaaacactagtaccatagtttgccccataagaaaaagaatatctagtgcacaagcatacaataatacaatatacatgtgatgttcatctcagccgtggacacataatctaagggtgtggaacanaacgatgaanaatgaaatttgtctaagatgtt

SEQ ID NO: 230081 - DNA, 417 bp, Glycine max
  unsure (1)..(417): unsure at all n locations
agctggccattaattgtacatctggtgtgtttaatattntctctntgggtgtcgtccagtggctgcatctgacttcacaagagccttctcaccattagcatatcaccctgcatagctttctcctcaagctcttcttccacctcttcttcttcactgatttcagattcactggtgatttctccatctgccttcatgatcatggttctcctggttggacagtcaaaagcaatatgtcctctgcctaagcatttgaagcattttatgtttctggtaccggtgttggatcatggggtagaattatgcttagttctagctactgacattccatgtgaagactgtgttgatgggctggatgagtttgcctcctccttcttggatttggtggtccagttctaagtgaaggtgctggatgagttc

SEQ ID NO: 230082 - DNA, 302 bp, Glycine max
  unsure (1)..(302): unsure at all n locations
ntataagtgcgggtctgggagacgaaggtcaagtggtcgttatatgtgaagatgatgttccaagaactctggatttggtccgaccatgccctcctgatttccagctgggaaattggcgagtggaggaacgccccggcatttacgcaacgagcataatgtaaacctttacggttttaanagctctatagttgggcctaggctttagagntttcattatgttaaggctntgtgtctattgtttttgaatttataatacaaggatctttcttcatctgttcctagtctctacccattctcattca

SEQ ID NO: 230083 - DNA, 398 bp, Glycine max
  unsure (1)..(398): unsure at all n locations
agctnttgattntacaattagcaaatagaccaaaatgttacaactataatcatcaatgtagcacaagagatacatttaaccactatttgagattggctctattggtctgcaaatatgaggggaaaaaatttcacaagggacatttgaggcttcgagttgaggtagtccatgcaccattttttttgtctatagtgtctttattcccttgtagcttaagtagccatacctttgatgccaaaggtaagtgagatcggaggaagtatgtagccattcttcaataaaggcagtgatgttggagctttcattgaaaaggataaacatatnggtggtacttatctttgtgtgtgtgcaatcaagcctttacatgtatgataaatattgcatatcccattttttat

SEQ ID NO: 230084 - DNA, 478 bp, Glycine max
  unsure (1)..(478): unsure at all n locations
taataaatctatatatggtttaaaacaagcttcccgtcattttgtccttaagnttcatgggataatttattcatttggttttgatgaaaaccccatggatcaatgcatataaccacaggttagtgggagtaaaatatgttttcttgttttatatgtagatgatattntacttgcagccaacgatcggtgtttgctacatgaggtgaaacaatttccctctaagaattttgacatgaaggatatgggtgatgcatcttatgtcatcggcattaagattcatagagatagatctcgaggtattttaggtctatcacaaganacttatattaacaaaattctagagagaattcggatgaaagatgttcaccaagtgtngctcccattgtgaanggtgatagggtttaattgaaccaatgtccaaagaatgactntgagagggaacannatgaaaacattcctttatgcttcagtgttggaa

SEQ ID NO: 230085 - DNA, 425 bp, Glycine max
  unsure (1)..(425): unsure at all n locations
agctntctttatctntgttcttcttcttcaattatgcaaaataacaccacactcacacacatatacttncacaaatatcaactcacatgcactctgctcgctattatctagataaagtttgtttcatctttgttttttcctttcttttttgtatgtttacattcaaattgtaccactttctctaaatattntatttaaggaataactattttttttaaatatactattaaaaaaaatggattacaatatttttttaaaataatttaatttaaatacactntctttaaaaaatatttattttttatagaaagattgagataattttatacaaaatactgaaatgaaaagaaaatgaaaaaaaatgaataaaaaaatacccaattaaaaataacaaaataaaataaatatttagaanaaagaaaagt

SEQ ID NO: 230086 - DNA, 236 bp, Glycine max
tctcttggccttatctgcttttagcgacttttcaaaccagtggttttataataagttttttttcttggaggttctatttgggataaaactgtgtaaagatttcacttgggtgcctctgaaaagattttcttcttatatccctgttttcaccatttgaatcacttgccaatattgtgcctactccattaccctcataggatctgcctaatgattaaacagacttactcgttgatact

SEQ ID NO: 230087 - DNA, 440 bp, Glycine max
  unsure (1)..(440): unsure at all n locations
agcttatcatggatagattcagggactttctttanaattatttatcatccctagatcattgtcagttcacaaaacatacaataaaggctaaaacaaaacattcaacaaaaggtcattttgtatgaataataacaaattcatttctcactcaaattgaacatattctatatggatttatatgccccaaaagtctattttcataatataattttaattttatcatacaaagtcttagtaagtcccacctttaaattgctgagacatgtcacaataaaaaatttcacaaacacttcatatgcacaatttttaatatcaaacaacataataatcatatatatcaaactttaccctcacgttatttactgccactgcctgtgaaaaaaacactgcccctattgttgatttctatagccacaaaagaactaattagtttactaaca

SEQ ID NO: 230088 - DNA, 381 bp, Glycine max
  unsure (1)..(381): unsure at all n locations
ccgcatgcaactatagcaacgagtgctggagcctgttttcagcctttcttcttnattataggagaaaggggaggttggtgccgcccatacgcttcttgaggaagattcctgagcgcactcccaattgataagtttaccccgtcccatggttgcttacttattaagttttctgagtgcacccccaattgattagttcacccccacctttcagagtggtttggataaagttcctgagtgcacccctcatgtctgataagtgcaccctaattttgatttctttattttatgctggtttctttccgaaacgtctcagaactttactgattccacgacaatgggttctaaacattttgaagtggccaaacgatggtcgaatgccaa

SEQ ID NO: 230089 - DNA, 347 bp, Glycine max
  unsure (1)..(347): unsure at all n locations
aaaacagaaaaggaggagggcgaactcantttgttacaacaaaaggggcattcaaggccacgcctaaaggacccctccaagaacaaaaaccccaggatccgcataaaaaagaactacgtacggtctcgcatatatcatcacaaatgacgaatacgtacgacaaagggaaacgcccttatcgaccacacaaatataagaacgtaaaaagggaaaagaatataaattgaagtcatatttgcacatatgaataaaggctgccgtctcttacgacagacgcgtggggtgctaataccttcccccgtcgtaaatacaactcccgaacacttcacttacaactcatagaccac

SEQ ID NO: 230090 - DNA, 421 bp, Glycine max
  unsure (1)..(421): unsure at all n locations
agcttgactggtctttaactcaagaagaatttattgctntaatatttaccttgttgatcattttatccagcatatanctttcactttntatcaattagtaagccattctgattcctgtatacaatttgtattctattctttagtgttgactcttgactcattttttttattctaattgttgtttctccattatacttctgctttttaaaaattctcatagatacattaattaaaaaaaaaagccaatgcaataccttaaaaaaaaaggcaaaaaaaaaagtcaagcaaaaaataaataaaaaaagattaaaaaaaaagcaatactacgacggttattgtataaccgtcttagtatgttacacctactacgccggtaattttataaccggcataaaaattcattttcgcatgtcatatacaa

SEQ ID NO: 230091 - DNA, 454 bp, Glycine max
  unsure (1)..(454): unsure at all n locations
tatattactacgaagaattatttttttgataaataaaaataatactaaaagattaaagaattaactcaattgattgagtaaagtgcatgagttattataaatctttgatacctatccttaatatttatgaatgaaaaaaatatgtaattacatatttaacatccaactnttattattttgtgaataatatcctttaaatcttatttttatgcaatttattatctaaattttttatttttcattcattntactgatgttaatgtgacactaaaaaaattattttgtataaaatagtgtcgttttattaccaacaacatgataataaaatgtgtaaaattaagaacttagaataataaaattcactgaanaagaacttggatgatgaaattcataacatgatgaanantgagtgataaaatatgaaattaaacctannnaaaactattacaagttt

SEQ ID NO: 230092 - DNA, 419 bp, Glycine max
agcttcgaaactagtcaattgtcttcaagttcttatttttttaacacgttctcaacaatgaataataatacgggtgaaattaattaatattgatatctttatgtgatagcctgtctcttggctctgacattgtgaaggttccatggccatagccatgtcctaattcagccatccaattggacatttgaattataaattaaaccttcatggccttatgttatatttccatatgagctgttcagctaagtcaaactccacaaaatcatgcagtacaatagccttataaacaacttcctaaggacaattacaagttctccccattttagtctagaaccgaatggcaagttgcaaccaatggcatcaacccagaagaagcatacttgaataatgtactccaacttcaacatgttatcattgtc

SEQ ID NO: 230093 - DNA, 332 bp, Glycine max
tagaaacatgaatttggctataaaaagtaagaaaaaactaaaaacttgatattcttccatatcaatccttctgagcagagagacttctttaggtctatatgcatgacaccttatacgctggaatccccaaaatgtcttaattctttggggggccatcagcttgccgagctgaaaacaagcttataatgatgaataagtatgattcaagtatttgatgatgacaaaaaagccaaagaagagtcagatgatcaacagtcagatcagataagaaagacatcagagatcagatcagagaataatccgatcagaaagaacaaagcacagcagattac

SEQ ID NO: 230094 - DNA, 435 bp, Glycine max
  unsure (1)..(435): unsure at all n locations
agcntgtggaaaatgatgtctatacaaaagtttgtcatataaagcgacaaacaaactcccccaaatttacaggtttgcttgtccttaaacaaagaaagaacaattcacttgtcctctagtgacaaagacagtggccaaacaaagaaagaacaattcacttgtccatcataaacaaccaacataagttccaacctttgcatttcatctcatatcatatagtaatgaacacgcaaaaatgaatccgaaggactttctaggcttgtaatggggttaggctgccaacaattcatggtttttctaggattcaaaagcttaggttctaggagagcattcatccatataataaccttccttttttttccattccttccctatacttccctttttcttaggcacttagccttcatacctgaanttatagcatacacacttatt

SEQ ID NO: 230095 - DNA, 272 bp, Glycine max
gaaaaatagtgtgacacacgaaggggaactctgtgaaaattccccggacgcccacaatggacgtctatgaatgcacaaatcgatataataacactatctggaaacattgtgttgatttaaaataaatgaaatgaatactgagccctagcatcacatgaccatataaatatgacacttgagtgtccgcatatgtgcatgcatgaccagttttgcatacaacttccaaatcatcattttgcattcgtgtcatggaaataatgtggggcattcct

SEQ ID NO: 230096 - DNA, 359 bp, Glycine max
  unsure (1)..(359): unsure at all n locations
agctgtaacaactacattcatgactacacacataaggaggaagataagtagttatacgtttaanatagaataaaataaaataaaataacatgtttgaaacatcatgcaattaaaatagaaactcatgccctaatgtcacatcctatcagagcattgtgtcctgacgtcctctatcacaaggttccttaaagaaatccacctagtcatctgctttcactaacacaaggttcgagatcatcacatgatccaaacacaaacagcacactgagagtgacttatcacatttcttacaaatagggagaaacaggagcacttaagatatcctggtttataaaaaacaactactaacacaattacat

SEQ ID NO: 230097 - DNA, 378 bp, Glycine max
  unsure (1)..(378): unsure at all n locations
ttggcagaatgaaagagaatatgttgataagcattgatttttatattataaagtgaacctagctattagtcacaggcagaggctggatgatgagcatgcaaaggtataagctctgcaaattgaaagggaagcacgagagaggatgatataatcattgcacgtggaagctatgaaatggatggataggttcgctctcactctgaatggaagtcatgagcttccaaggttgctagccagagccaagacgatggctaacacgtactcagctctcgataaagtgcatggtctctatgattactggcgtggatcaatacttcgacaacttatcattatcatgcattcatgtntatttagatgtcgcaatactcattggatatt

SEQ ID NO: 230098 - DNA, 334 bp, Glycine max
  unsure (1)..(334): unsure at all n locations
agcttgcttctacaaaattgtgattcaaatttttagtatgtgataaatngaacttgtgaataaagataaaatacatgtgtattgagttgtgagttatgaactgtgcaatcacacaattgtaagaccctataagggcgacgagtattgtgatgggatccactgtgggaacccaacgagttaaaatgattttgttctgaatagttgtgtgtattgcatagttcataggtaaagtgtatatgattcatgaggtgtgataatgtggtaaattgagaatataccattgtgattgagatcgagtgtatgtgataaattgagtatgtatgtgattgagatg

SEQ ID NO: 230099 - DNA, 485 bp, Glycine max
  unsure (1)..(485): unsure at all n locations
nttgtgtgaaaggatgngactcttcacattggaatttgattttaacgttcaaagatactgcgaatcgattaccaaaactttgtaatcgattacaacttnttgaaaataattggaacattgtaaatncaatctgaaaactttttcanaacaattttgctactggtaatcgattacaacaatctggtaatcgattaccagagagtaaaaactctttggtaaaaggttctgtagaaaattcatgtgctattcaaaggtttgaaaaactgtttaatacttatcttgattgagtcttctcttcatccttgaatcttgatcttgattcttgagatcttgaaccttgaatcttgattcttgtctctagactttcttcttgagtcttgaattcttcatgattcttatctcgagactcttgaattgtcttgatcacttgatatgtctttgatgatctttgagcacttgagatgtctttgatgcctttgagcttt

SEQ ID NO: 230100 - DNA, 411 bp, Glycine max
agcttgtaggactatggtgtacccatcacatgtggtactaggtggcggtcgggcgatggtgcacaacaagttttccacatccacaaagcgcgcataaacccaccatcccctgttgcccacctccatttgagctcacgtactcccacgtagcccatatcctcgtttctctcaacaccgggtccccatcaatcctcccaagcttccacaacatccaagcaaaacaaaattcaaacagcacaagctatcacagccaagtaaaacagggcaaaggcagaaaactctgctcaacacaccaaccaaaatcacagcttttctcacttaaagaccccagtaacaattcctacgatccaattcgttaaccgttggatcgactccaaaatattactggaagtctatagtacataagcctac

SEQ ID NO: 230101 - DNA, 228 bp, Glycine max
  unsure (1)..(228): unsure at all n locations
tatcccaagcttcagaatntctacacctaaaccactccttgaaacactccttttttactctaactgtgctctgaacactttcattccaccaccacgattctttacccctaggtccaaaacctctagattcacccaacgtctctttagccactttaataatctcttgggacatcttgttccacatatcattngcacttccttgtgattgtccacaccatccctcccata

SEQ ID NO: 230102 - DNA, 74 bp, Glycine max
  unsure (1)..(74): unsure at all n locations
tgcgcatcgatataacttntataacgtatgctttcgaagtattagctgatacttcgacttcctatgttatttca

SEQ ID NO: 230103 - DNA, 317 bp, Glycine max
acatataatgtgtgcttgttcagaacattcatggtatacttaataaataatgtattattatttctggtacattggaacttagcaatcttttctattacatatttagaatatttaggactgtactgcaaaatgttaagttgttagtgtaacaaacaaattcaaaataggaagctcaataactacttctagtggaccttcaacgaccaaccttgtctcttctctgtgacatgtgtgacaccctctaccctcacaaataacgaataaaaggaaataacatcatgcacatctttttaacacatagactttaaattaatacc

SEQ ID NO: 230104 - DNA, 446 bp, Glycine max
acctgaagcatgcacgcttgctgattccacacacataataggcctctagctgtatttataactagctggaattcccacccaacatctgagtccccccataaggcctggcatgcggccttatcaactcccttttggtttcatggatgcaaatcatgtctactttttgttttctgaccatcctccttattgcggcccatttaacccccctcctgagtcctctaatattgtaggatacaatattcatgatggactgtggctttttcccatctttgcagcttccttattggctctattctccatttcagttatcctgttaatgattgatgcctggtctgattcactgttcacccccatgatttttgctaactctcattgagatactgcctcttctgatcatcctcgattgctttcttcagagtttcgggcatgtctacactatgtgagag

SEQ ID NO: 230105 - DNA, 346 bp, Glycine max
gagagcctttgagcctacgatagaaggattgtcttcaactattctaagagctagctctcggttaaattcaaaccactgagatccctttcgccagtcactcatattgatttcaaattattttgtttgttattagaagcatattctcccaattgagtcagaaaaagtgtacaaaacctattataacatgcacacctcactgaaaaaacactaaggataagatcatgaacaaagcatgagccagaaacccaaggatcaagacggaataaggatcatcaagaaacaatatggagttacttccatttcaagaagaatgatttcttctttctttggcttctgtcatctaata

SEQ ID NO: 230106 - DNA, 435 bp, Glycine max
  unsure (1)..(435): unsure at all n locations
agcttataatatatcgatacgctcgaaattaaacatcggattctctcngggtattcaaatagtcataactattcacacggatgtctgattcgggcgcataatatgtcgagaggctcgaaattgaataccggaagctcttgagaaattcaattggtttaacttttcacacggatgttcgattcaggcaaatcacatatagagacgctcaaaattgaacaacggaagctcctgagaaattcaaatggttataacttttcacacggatgtccgattcaggattataatatatcgatacgctcgaaatcaaacatcggaaactctcgcgatatgcaaatagtcataactcttcacactgatgtccgattcatgtttataatatatcgatacactcgtaattaaacatcggaaactctctagatatcaaatggtataact

SEQ ID NO: 230107 - DNA, 399 bp, Glycine max
tacatgttggtaagcaccatggctactgcggagaaagcccatctcacaacaaaaggcccttcgtagatcggggcccatttacctcggtggtccttgacagcatgggacattttctttagcacaaggtctacctcatggaacttgcgcaagcgtactttattgtctaacgcgctcttcattctctgctgagacaagcgcgcatgactcatggccgttaagcgcttaccctcaatgaggttgagctgatcgtaacgtgtttgagcccactctgattcctttaatccggattctgccaagatccttaatgacgggacttctacctcagatggtaacaccgcctgcatcccatataccaatgagaacggcgttgcaccagttgacgttcgcactgaagtccgg

SEQ ID NO: 230108 - DNA, 430 bp, Glycine max
  unsure (1)..(430): unsure at all n locations
agctntagatagataagcaaagatatccaaagcatcaataagttaaaaaatcaaaattaataattaataatgatgttaccttcaaaattatttacatcagtatcctcagtttcttcattatcatagtttatacctcaattccttgctccaatcttgttggtcattcttattaatgtactcattaagtggcatagctggacatttgagacagtctttttcttcttagtagcagcttgttccattgatccttcaacttgattttttgttgtacacctaattaaccaccttttaacacttttactctgacaaaatcctttcgtttgctcatctattttcttaaaagtgtgttcctatgctaatccctgatcttgatttcccacaatagaccttacttgcctcttaacaaaattctgctcaataattttcttag

SEQ ID NO: 230109 - DNA, 398 bp, Glycine max
gcacaaaccacaaacccttgcgacaggtacagatttctgattcaagccagctgtggtaccaagttgaacaacgcatccaagttggctttcagcttcttagtttcagatgatgcagatgggtttgtagctacctcatgcactcctctaatgactatggcatcatttctggcgctaaactgctgggagttggaggccatcttctcaattaaatttctggcttcagcaggagtcatgtctccaagggctccaccactggcagcatctatcatacttctctccatattactgagtccttcataaaaatattggagaagaagttgttctgaaatctgatgggtggggcaactggcacatagtttcttaaatctcttctaatactcatacaggctctcttcact

SEQ ID NO: 230110 - DNA, 326 bp, Glycine max
cctacatcactaacatgagcgacatcctatagaaagcaatccttcatagaaggacacccatgagcaattgccttgagacctacattattcactccacgatctgaattgcatccacgaattgtaagcttccccaaccccttcttgagaggctgtcccaacggcaatggcatgcaacctaacatctgttgccttctttccctctaagcttcgggataggtatccttcggcactaatttcctgcgtttcatttccagtacttccggaactgcggcattcagtcttgcaaatactgctcagaagcataaacccacgcttggatacataat

SEQ ID NO: 230111 - DNA, 427 bp, Glycine max
  unsure (1)..(427): unsure at all n locations
agctntaaaatttgaattaaaatgttcagaatctactggtaatcgattaccatatatgtgtaatcgattacacagtacataatttaaattcaaatttaatagctgttgtaaatcgtttttggccactggtaattgattacatcctctggtaatcgattaccagagagtaaatctggtgaaaaaacctctttaacttagatttcttggccaaaccttttgcgacttcaattggaattctcttcctatttaatatacccttcctaagactctagagactgtcttgatcattcatcttgaatatctttgtcttgaaaaaatctttgagaagcatgtgattcatgtaatcctttggcatcatcaaaacattcagcttgatcctttgtctacaccatccacatttgaaaagaggactccccccccctctaag

SEQ ID NO: 230112 - DNA, 448 bp, Glycine max
  unsure (1)..(448): unsure at all n locations
tcanagacttacacanggaaataagagtgtagatgagtatttcttttagatggaggtgtccctgattagagtcaatcctaatgaagactacgagaaaaagtgtcttgagaagaagctcctctaactttcattcttcaagttgcaaggatagaaataagaaggatggggtacttcttcaagtaattacaatgttgcacctcaaagcactcaaaaattcaatgagtcacttaaaagacaaggagtggtgaaataaaatgctntaagtgtttggcgagaggtcacttagcttctcaatatctaactaaaaagactatgttacttaacgaggatggagagattatgagtgattctcttcagatttgtaccattagtgtgaagagacatgagaggaaaagagcataagagattgtatggtagaagatgtcggcgtcagcggggaatggatgat

SEQ ID NO: 230113 - DNA, 421 bp, Glycine max
  unsure (1)..(421): unsure at all n locations
agcttagattctcagcttctcaaatctccttttcgggaatctgatcccaaaataaaacttggacaacaatgtcctcaagaaaatttcaaaatgacaagcataccctcctcatttttctgaaccctaaaattttctctcgttcctgagaacttgccgtgctgtgccttcctcggaatttttctcccatgcttccgatctccttcgtcatctcttccaatcatccttcgtcattttttcttcttcctttgttagcatcacaggttcttcattaatttctttttcttctcaatattggtatggattagggttatgcttttgtttgtttcattaagcttatgaaatgtctctcaatcaagttcctgtgaaaagaaagaaagcagatggntatgcattttggttttatttgctcatctctgatatc

SEQ ID NO: 230114 - DNA, 500 bp, Glycine max
  unsure (1)..(500): unsure at all n locations
tcanaccagctcctgcttcaagctgtggtctctgctgatctttacacagcaaaatctctcaaaactatctggaacttggacctttctctctctagaaaccctagacatgaaaagctctaaatcccaatccaaactccctttctaaaatctgatttcaggcttaaataggtggccttgtttgtgctcgtgcgcttagcacacttatggactgcttagcgcacatgagtgaattatggcttagcgcgtgcctttctcgcttagcggatgaactgaagcggtgcacttagtgagatgaaacggtgcacttagcgaacctgtacaagtcatcttcttccagagtcttccttgcgcttagcccacgagtgttgcgcttagcggacgctcgctaagccagcagaatggcttagcgagaaggtgaanaatagcactnttcaaagncttgcctaataacctgaaattgagagaanatgattattaaactcacanaatggaagtactaa

SEQ ID NO: 230115 - DNA, 405 bp, Glycine max
agcttatgacatatatgtattatgccaccttttcccctcacaataacgcacaaattaaggttaatgaaagtatatatacaacctctcgtacaaatattttccagaagaggcgcaacttgtgtattattaataaatgcatggatatatatcactaattattgccttgtgttatagttttcattaattgcttcttcatgacttacagcgccttgcgtctactataagttgaaagctagccgaaatagtcaatgctcttgatttatgtagactatgtaccagtatgattaatctaaatatattcgaagtgaggaagaccatttatactaattcattagaaaacctggcattggagagacctgcttcgttgcccataatttaaattacaacacatgttctatttccacg

SEQ ID NO: 230116 - DNA, 423 bp, Glycine max
  unsure (1)..(423): unsure at all n locations
agctgtgcgggattggtcttcgccagngattggatcgatgtgggtccgaaaagaggcaaatttgatcatcctactaggacgactgagaaaactggggcaaatgaagagggtgagaaagagggagaaacccatgctgtgactgccattcctatacggccaagtttcccaccaaacccaacaatgtcattactcaattaataacaaacctcctccttacccaccacccagttatccacaaaggccatccctaaataaaccacaaagcctgtctaccgcacttccaatgacgaagaccacctttagcacaaaccaaaaaaacaccaacaaataggaattttgcagcaaaaagcctgtanggttcaccccaaattccgttgtcatatgctaaacttgatcccatatccactcaataattcaatgggg

SEQ ID NO: 230117 - DNA, 311 bp, Glycine max
  unsure (1)..(311): unsure at all n locations
ctccccatcaatgttatcgaaggtggcggcggaagagctgggaatgagagagttgtgttcgtagtggaatttcttctggtattcttgcccggcaatggaggtgactatggaggcattgctgaagttgcttcatatttgacagttaaagatcgaccatggaaagaaatgttctagatctgaatgttaacaaccaagagaatgaatgaaattgagagcataattcgattgccataaaatttaaatctgattntgaagtaaatacttactgtttttaagtcatcacanatattcagtgaacactttattactta

SEQ ID NO: 230118 - DNA, 433 bp, Glycine max
  unsure (1)..(433): unsure at all n locations
agctngaaggtgcataccccaccatttttcatagtaaaacactggtaatgtgtctactattattgtgatcatctctttctccgtcattggaggtgccacttgagctgccaggtctctccacctttgggcgtattctttgaaagattcgtgcccctttntgcacatgttctgtagttgcatcctattcggagccatatcagaattgtactgatactgtccaacgaaggcaaccattaggtctttccaagaatggactcaggaaggttccaagttagtgtaccaggtaacagctaccccagtaagactttcttggaagaaatgtatcaacagtttctcatcttttgcatatgcccccatcttccgacaatacatctttagatggttcttggggcaagtagtccccttgtacttgtcaaagtccgggaccttgaac

SEQ ID NO: 230119 - DNA, 336 bp, Glycine max
  unsure (1)..(336): unsure at all n locations
ccatcaaaggtttcagtagaaaagaattccctatcaataaacttanggtcgataattggacgagangagaaaagattggagtaccgtttctgctgttcgtctgaagaaaacactggtgaagaggacaatgagggtgggattggtgctgtggatgcactagtggctccagaacgatgagctcttgaagccgaagcggaggcgaaagaaccctttcgtttctttgacgattctgccatttgagggagtttttgcagattttaatctgtgaaatcaaaagaanaatggaaaagaagaagattgcaatttacgggagttgatttgatgaagaaatgagtg

SEQ ID NO: 230120 - DNA, 309 bp, Glycine max
ttacctctacttttcttaaccgttccaagatctctttctcttgctcttccattttttttgtggaaactgctcttggagggaaaggaagagggggaatgtgctgcttctgcaaatcagaattacctgtggaagaaaaatcacctgcacagaacattgtaggtaaaattttgtcatcacctttttctggagtagagtgaagtttggcaggttcatttgcagatgaagaaggtgctacgggttgaggtccttgacactgctttcccgacctcaatgaaatggcactgacatttttgggattttggacaactt

SEQ ID NO: 230121 - DNA, 440 bp, Glycine max
  unsure (1)..(440): unsure at all n locations
agcttgtgaattctntgcagtatcagatatagaagtccttttggataaagctttcataacaatatccaatttcaataagatagaaatgcatggcttgatacaacaaatgggtagagaaattgttcgtcatcaatccatcaaaagccctggaaaacgaagtcggttatggaaacctgaggaagttcaagaagtattgaaatataaaagagtgagtggtagattcaatttctttttgacaatatgtatatcctctatgaatgatattcatgttaattattattctattttctatattttttgtcagggaaccgatgttgttgaaggcataagtttagatttgtgtaaattaaccggggatctaaatttgagctctaattccttcgcagagatgattaacttgagatttcttataattcatgattcgtgccggacaaatcgat

SEQ ID NO: 230122 - DNA, 228 bp, Glycine max
  unsure (1)..(228): unsure at all n locations
gtctcagatttggaaaattacccgttgaagaatgaagaacggatgaagaacggtgaagaacggangaaaaccttcacggatttgcttactgaaacatctcggatgcgttacggaagcacctcgacttggattttcttcacggaaacatattttttcacccaaaataactgaaatgcatatccagggggatcaggctcccttataacaacccctttttgcctttctata

SEQ ID NO: 230123 - DNA, 407 bp, Glycine max
  unsure (1)..(407): unsure at all n locations
tcaattcaagctgagaaaggacaatacaataacttttcgatctttataggcgaaatacctgattgcatctactgcctgcccgtgatatagatcatagtttttatcttcttagctcattctgtgtagttaacaatcccatgtgatgctttgatcttgggtggagcttgtattgatcccagactatgctgaactggctcgagttttaaatgcgagctctagttacattctcgtcaaaaggggtgagagaacatgtactgcactatgtttttcgtgtacatatagctcacatgagttcacatcttgacgcattaaggtaattgtgtctatttggctgcttgtagtgtcataaccaatgttcaatattcactgttaaanatctttgttaaactttttccgctgactttctc

SEQ ID NO: 230124 - DNA, 449 bp, Glycine max
  unsure (1)..(449): unsure at all n locations
ccggaccttaagcaccgctgctgcagctgatattcaagctagtttggggtttattccntcttccttggcttatttgctagtggatggtgacttccctctcctctactactttgcctcccgctgcatctccatggtgtaaaattaccatcgaatgacctcattgaagctcaaagattcagtcttcatataagccacacaagcaagctttcatcatcgccaacctctatatgagacatttcacattttttgggacatgcatgttccatattctcacaagaatttcttatgcttgaccatcctacacactattatatatggcccaataagtagactttgtagaatatgttttggcgctacaggaccaacatcgtgtatcctatgagttatataagctacatttttccaactgttcattgatatctttattccgtagtctccttccaaacaaa

SEQ ID NO: 230125 - DNA, 281 bp, Glycine max
atggtctcacgtttactagcaacttctttactgataatgatttaacataatcagatattctttaatttacagaatagaatgtaactaatatggtagttcttaaagaaatcataatttcatttccattccatcctctcattttatttcattctcaacataagagaataacatagcttcatgatagtaaaacataaacatagtctacaatggattattatacattagatgcctggttgtgggatgtgtcacaggttcgctatagatatgaacagaatataaat

SEQ ID NO: 230126 - DNA, 225 bp, Glycine max
cattcaaacagacagttgggaaaagcacggaacgttttaacaattgtctggatacgatgtgtgcatttgagaaactagatggtttcccaactgtgccgcgataactcatgatcactgctatagattcacacctcgccaagcatacaagataatatatataaaaacgtgaaacgacaaacttagtcctactttaacaatattcgaacaactgggattgcaacaacc

SEQ ID NO: 230127 - DNA, 249 bp, Glycine max
agcttgaccaatcccgacttatcccgggcatattcagtcagtgagaacctgtgatgtacttaagtaggcgagctcctggcagtcaacagataaaaggaacaaagaccacaaagcaaggaggcttgtgtggtggctggctagctgtgaactttgattgatatatgggatatggcctctggtaatcgatgtccataggtgggttatcgattacaacgcttcgaaatgaatacaggagactatcattgtctc

SEQ ID NO: 230128 - DNA, 494 bp, Glycine max
  unsure (1)..(494): unsure at all n locations
taagaaatagaaacaatgantaacatttatatctaacattgtataatatttatcatttaaaatcacatacaacacatcatttatatctatgcacaatataaacattgtaaaatttcaaaataagatttcacaaaaaaaaaatatcagaataggacaatgaaacaaaatctgatttggttntaggacaacgaanagtaacaattccataagctgaaaatttaagctttaagaaaaggtctactgagagcttttacttttgtaaaagctaaaaaaaattaataagcaaacactcttaagaaataaagaanacctttttttagaagataagatgccggaaggtcttttgggttgcatccaaacggattgtacggtgcattngtgaaaagctctacttgttatgcagtgaataaaaagatacatcaatacacactttttgttcaaagcgaatgaagtattgtcacaccctctaccccacacatatatgcactaatact

SEQ ID NO: 230129 - DNA, 429 bp, Glycine max
agcttatgcgcatatatccttacgaacattcactcgcacaagatattcttctaactaagaaaaatgcacccatgcacaatcaaggcactttcgttacctacattatttgtatgtacttccaaggtgtactacctacaccacatgcatttcctcggctaaatttacatacatgcatgctcaaagcctcttggctaccaaaagttgcacacatgcaaactttatgatgaatcttggctatctacacaataaggtgctacatttcatgatttattcaagtgtttttactacctaaagccgcatgcaaattcaagtatattttcttttgccgactaaaattgtattcaaaataaaaggtgtttttgtaaggtattttctttacataacatgcaacatatttatatatttttggagacattttgactacaaaaa

SEQ ID NO: 230130 - DNA, 405 bp, Glycine max
  unsure (1)..(405): unsure at all n locations
tacggaactataaaactcagcttgagccnaatccgactaccataacctgacccatgtgataatgtaatcctgccctcgaagcgaaagaatagaaggaaattccaatcaagaaaggaaagaggaagatttcaatcaggagaaagcaaatgaaagaagaaaattcccataatgaatgggagaagtaaaaggaagaaaagaagaggaagctctgacagggatcaagaaacagaaaaatggcaaaggttttgaccgacaatattgacaatacaaatgtaccaatgacaaagaagaaggaaccacactaaaggctttcttgatacaacaaatccggcgctacattttcgccgactacnaacgatagaaagccacaaaataagccaacaccaaccgaaacatagaaccatc

SEQ ID NO: 230131 - DNA, 362 bp, Glycine max
  unsure (1)..(362): unsure at all n locations
agcttggtctattgcatgttttgtncaacttgtcangcctcaacgtgtgggttgagcatattcgctaaagtccccctttcaattgctcttccaacatggggagttagtcccattggcggcttggctgttatcatctgtatgagcatgatccccagtgaataaatatcagatctgattcccaacatgcccgtttgctgatactcagggtcaatgttacagaaagttccaccagtgatgtcatgcaaacctgtgcactgtgtctgcaactgtatgaaggaccagtcttgccaatcctacattactgatcttgctcacatagttaccgtcacccaaacgtttcccggctttagttccgattcccc

SEQ ID NO: 230132 - DNA, 409 bp, Glycine max
  unsure (1)..(409): unsure at all n locations
acataccncaacgggtagcaggggtggtgttagtatnttaattatacaggagncgcgaagcaccaaatataccatgaacatggaaactggaccacaacgaaactttcgtatctccataatgaagctctcgtagtattccatataactacatcagctgttaacaaagaatgaggtatttcgttataactcaactatgaacgaattacagatgcatatatatagaaccaggtgcacaaaaaggcatagaacagtcaaatatccacaagcaaaagctaatagagcactgctaaagagagaataaatgaaataccagttctttgattcacctagaccaccttaccatgcagaaaacatgtaatacagtgtgtacacacacacgtcacacattgcctgcaagtgtagtcagtag

SEQ ID NO: 230133 - DNA, 232 bp, Glycine max
ccaaaatccgtccgacccacccatcttaacccaccataattaccttgcttaccatgtgggacagaaccgaatatcagcagaatagtaaagcaatgacaaattttaccacattacaaaattgcgacaattgaattctacctcgtgaaagctgcacagtactcaattcatctattgtagtcacatacacagtacccagaccggtgtttgagcagccgaacgctagcttgccatt

SEQ ID NO: 230134 - DNA, 448 bp, Glycine max
tgaggaagccatcaaccgccttacacatgttcatgcttctctcaattagaaccacaacactctgaattcaaagatggattctatccacacagcactcaatgccaaaattgattcaattttggaacgtttcaccacaatcatggtgactccgtcttctccatcttctcttcagccgcctcctccactgcctgttcatcaacctcacatgaagctggaggttccacgattcgatggccacgatccccttggctggatatttaaaatatctcagttcttcgattatcaggccattctagagcacgaacgcctcaccatcgccgccttctacatggacggtcccgccttgtcgtggttccagtggatgtcacgcaatggctatatcccttcgtggccagccatgcatcaggctctggagtcacgaatctgcccttcttattacgatgatccc

SEQ ID NO: 230135 - DNA, 429 bp, Glycine max
gcttgatgatgatgaataggcaatttgatgttgccaaaagcccaaatgattgattcaagattcattcaagattgtaagaatccaatccaagattcaagattcaagagaagaaatcaagaagcaacaagtcaagacttcatataggataagtattaaaagattcttttcaaaaaccaaatagcacagttttgttttacaaaagaattatctcaaattttctaagttaccagagtgattactctctggtaatcgattaccagttggtagtaatcaatttccagtgaccaattcggttttcaaaatgttttgaaatgatttgtaacgttccaaaatgatcttcaaatagtgtaatcgattacactatattagtaatcaattacaagtgaatctgaacgttggaattcaaatccaattgtgaagagtcacaac

SEQ ID NO: 230136 - DNA, 430 bp, Glycine max
tcactttctttcgaagctgtaacctcatcgtccctcacaggctttagatttgggagccaatccaatccttgtggtccgactctcagccacttatgatagccgccgatgatcccattactgcttcccctaagctctctgtcctttcttcacgccgcatcacatgccttgcgaactccttggagtaccctcgcgttgtggtcactaaaaccccgtgcgatgaaaggcgtgatgctttcgtctaatggcgctcctctcatggggtagccaagctgtcttatggcgagaacgggattataattaatacaaccccttgttcccatcacgggaacatatggacatccttcgcatgacgatagaatcttgattcttactttcttctagcgagggaaccaattaacagacgtactctccatgctagccaagagttggt

SEQ ID NO: 230137 - DNA, 467 bp, Glycine max
  unsure (1)..(467): unsure at all n locations
gtgatcctctcagtcacctgcggcatcaagctttcatatcatttagatgatttattgcttcaaataagtcaaacaaggctttctgatcctccatgctcaattctagtttgcctttccccatatctactatgcagttggtcatggacagaaaagggcggcccaatattatggggatgtcaggatcttcctttatatccataaccacaaaatctgtaggaaaaacaagttgcttgacctgaattaacacatcctcaatcactccatatagccttgtaatggagcggtctgctaactggagggtcatgcgtgtaggcattatctctatctctccaagttgtcggcacatggaaagaggcattaaattgatactagctcccaagtctatgagagctntgcctacaacaacctcaccaatagaacacgatatcatgacaactccaaggtctttgtgcttgaatggaagaatg

SEQ ID NO: 230138 - DNA, 461 bp, Glycine max
  unsure (1)..(461): unsure at all n locations
cgatgtgggtccttttagaggcaaatttgatcattctactaggaccacttgaaaaactggggcaaatgaagagggtgaaaaagaaggagaaacccatgctgtgactgccattcctatacggccaagtttcccaccaaacccaacaatgtcattactcagccaataacaaacctcctccttacccaccacccagttatccacaaaggccatccctaaatcaaccacaaagcctgtctaccgcacttccaatgacgaagaccacctttagcacaaaccataaaaacaccaacaaaaaggaattttgcagcagaaagcctgtagaattcaccccaattccagtgtcctatngctgacttgctccatatctacttgataattcaatggtagccataaccctagccaaggttcatcaacctccatttctccgagaatacgactcgaacgcaacgtgtgcttgtcac

SEQ ID NO: 230139 - DNA, 404 bp, Glycine max
  unsure (1)..(404): unsure at all n locations
caaacttagcttcatggttatattatcaatcaaatccaccttttcacataggaactggccactaaattctccagcttcatcaactatgtcttcccctgctatgcccaatngtgaagcttcatacaaacctatcattcccttgatattttgacctaattttgggttgaaatttccttcattgtttgtgaacttgtcaaacacgtctgtaaagtttccaatatgaacaacaatttagtcttccaaaattaaaaggaaaaaagntatatatatatatatatatatatattagatggaaccggtgataaatgttaaggcgacatatatttaacaaataataaaatatgggttaaaaaagtttctatttctatatacaattaanatgatgtaaaataataaatagatgt

SEQ ID NO: 230140 - DNA, 446 bp, Glycine max
  unsure (1)..(446): unsure at all n locations
gatgatgacaaaggtgatgaccaaaagctcaatgagttcaagatgttcaagatagaatcaagaacacttcaagatttaagagaaaagttgatttcaagaattaagattcaagagatcaagattcaacactcaagattcaagattcaagagaaggcttaatcaagataagtatgaaaaggttttttcaaaaattgagtagcacatgaatntttctcaaaacatgtttaccaaagagtttttactctttggtaatcgattaccagattgttgtaatcgattaccagtagcaaaatgaatttganaaagttttcatatgaatttacaatgttccaattgatttcaaanagcggtaaccgattacaatggtttgataatcgattaccagtgtctntgaacgttgaaattcaaattcaaatgtgaagagtcacatcctttcacataaaagc

SEQ ID NO: 230141 - DNA, 440 bp, Glycine max
  unsure (1)..(440): unsure at all n locations
agcttgtgttattcacagcctccaccgctagcttggagtcactttcaatccataactttctccacccacgatcaaacgcaatctcaatggctgacagttcgcttatatcactcttattatattcttcctaaaaatagaataaactttgttatactgatagaatttagtagtagttaggagactttgctgtagtaactagtaactacttgatgagtcataaatgcagctgcattatacaaatgcatagcatctgtattcatttcacaattntattcaatcaatacatgatgtgtggccatatcaagtgggtattgcatggaacgtaacatccattgaaattctaatattgaactttcagtttatggatgatgttaatcaaatgatacagtaaactagatatatagactttctgacatatgccctttatcttttgtatattg

SEQ ID NO: 230142 - DNA, 438 bp, Glycine max
tgcggttctctcaggatggtacagatgggggtgtaacacaactaccatctcaatatgcttgcttgaatctgctcggcgtaaacggtgcgagcaaagattcaccgggatcgaactcgagactcttggccaccattgttgctggatctgatctagcaggggagctgtcactgatgtctgctatagctgcagggcagctagtgaagagccacatgaaatataacagatcaagcaaagatatgtctaaagtgtcatcatcctgagaaggaaggagcatgtggttccagccttacttgatgccaaaagcagagaacagcgactgtttgatgggtcaggaattctgagagggaaaaggaagacatcactatgctggcaccccatgcgacgttcttcggcttgtattgattgatgtctgggaatgtatcattacttgtaatgtgc

SEQ ID NO: 230143 - DNA, 388 bp, Glycine max
  unsure (1)..(388): unsure at all n locations
agcttgttatgttggttcttgtgtgtattaattttcactgcaagtagatccctagtgccattattgttttctcttatgacaaagcatcaataatgcagattttaaaatttaatggtttatatgttactgatctttcataatgctcttttacagaattactcattattatattatcgggattattttcattttgatagttcaaagttaatatgccttcactttatctttttaaagtaatttcaactataaaaatgttgatttattttaatttatcttgggatgcaaccattgttttattttgtttcgttattagtcaaatgatttttgtggcaaagatatgcctattgttttgggtctcatttactctcacacctcttacnntatttat

SEQ ID NO: 230144 - DNA, 481 bp, Glycine max
  unsure (1)..(481): unsure at all n locations
ntagtagtaattagtgatgcagcttatttttgtatgatcttacttgaaaactgcaccattactaatcagattaaaatgtcatcttgtgtgcattcaggaattcttatggtccagattctaatntcctctgccagttcctctatatctttaaggcagaaaatattgaggacttcttagttcttgtgcaaatatgccggttgctttggtggtctgttcacgataatggtaattcttaatcagccttccatttcctatggattttacagttctttgtctactgtacttgtattttaatgcatttggngaaaaaaattgcaaactggaacctatatttgttntacatttaatcttttcacccaccagaacagagaattctagtgcaatcaactgactatatggtgcttggttccctctagttagctttatatattctttcaagtngacatatggatgatcattgagttggcattttccttctata

SEQ ID NO: 230145 - DNA, 414 bp, Glycine max
  unsure (1)..(414): unsure at all n locations
agcttataaaaatgaaaggtatgaatcgaatgtgataaattagtctcaaccacaggggatctttnttataaaattctcaatcacaataatcataggcgacaacagtagcattnttccttcgatctgtcaacgacgacatctccccggagatccaatgatgatgacaacatatccataaagatccaacgacaacgatgactnttgtgacttaagcaactttaacagcacattgtttgagccagagtttaaaagcgaagtttgtgtcgtcatagtcttggaggtgatagaggaagacgaggtcaacgttgcgactgtcggaggagactgtggccatgaaataccttttcaatattgttgctagaagcggcgagtgacaacattgtgcacatgggaagcctaatatatgtttttttt

SEQ ID NO: 230146 - DNA, 425 bp, Glycine max
  unsure (1)..(425): unsure at all n locations
aatagaacatattatgaagacaaacgaacaagtgatataacgatgttagtctactagataaaggaaacttaaacaaattgaataaatcttagttttgccaagttaactagtttcattgtatttaagtttattgtgtaaacactcattgagtgattagaatataatttctatcaaacatatactgtttgtgaaagcgaaaagtaacttggtgataaagaatacttatgtcttaatctcatagaaagattaagtgtaatgtcaaaagtggcctataaagtacttggtgtaaccagaagtgacatagaanacacttgattggaatcaaatatttgattagtgaaacccttcagggttataggagaactnacgtagcacanaagtagaatgaaccggataaacttatatttcatactgttggtatacta

SEQ ID NO: 230147 - DNA, 409 bp, Glycine max
agcttatatgattttcagaagtatttttcattttagcgaactctgtcatcctataatctgtatattgtgtaagcgttattctataactcttgtctttgaaactattattaagttttctttcatcttatcatgatttcctttctctatattttttttccattttattattttattaataaatccaatgacttaacttaaatccattttattatttttttactttaaagacataaataattctattcgaattaatattctttatattatttttatttaatatattcttttatattttatttgatattttctatattaaacaaatccttaatattatttaccactctaaagttataatcatttcttttcaatgttgtcctcccaaatcccatgacaccttccacaaccacat

SEQ ID NO: 230148 - DNA, 483 bp, Glycine max
  unsure (1)..(483): unsure at all n locations
tctggggatagctcgggatccaccgtgaaaccaaaggccctatattctgtggctaaaaaaaaagagtgggatagaatggagcgaactttctgccgatggcgaacgcgaccatggtggagtgaattctggtgaagaagtacttgatgcccggttgcagttcccacacttccctctcagagagttggtggtaccccgcgctacgcaaacgcctctttgcctcgtctgaaaggaacgaataaagagtgagtgaggatttgttgcgattttttggtgagaggaagaaataagagaatgagaatttggttttggttntaccgacggcgtggaaagccgctggagaagcgttgaggaagtcgatcagatcggaagccacggcgtgggtgtctagcttcgccgccattgtttatcagattctactttcgctcgctctgtgttcgtttaatctatcgtagctaacacccgttactattctatgtctcgagt

SEQ ID NO: 230149 - DNA, 422 bp, Glycine max
agcttacttgcagagattcctttatgggaaagactgatacaagctgtgttgatccattgtgatagtatcgcggctattgcaaaaattgagaaccgttattacaatgataagaaacgacagatacgtcgtaagcacaacactattagagaattactctcaacaggagctgttagagtggatcacgtacgcactgatgataatttagcagatcctttgacgaaaggattagctagagagaaagttcataacacttctaaaagaatgggactattgcccttacttcgatgatcattcatgatggtaacccgacttatatgactggagatcccaagaactagggtcaatgggtaataacgagttatgaagtgatatgagatgaacatgctgttataagtgaaagcagcatgattcctgaagtaaca

SEQ ID NO: 230150 - DNA, 480 bp, Glycine max
  unsure (1)..(480): unsure at all n locations
tgacatgtaattgcttttgacttggatacttttcggtatgaaagaaaatgatttctttcttaaaaagttttgacattctctgaagtcttgtattggcttttgtatatattcacttcagtcttctcctcattgaacctcaagaagtaacttttacttttgatcagaggttatactatacttagaactccttacttttcattaaatgcctaaaatttaaacgttatagcatattcaaaaaatagaaagaatatcatacgagaatatgatagtaattcaaaccttagcattcaaaagcattgaacatagcgttcaccacatgttcattntggatgaagaanacttagatgaatataanaaactagagcatangttntcttaagatatcgatcgtaattcattgaacattgaatggttcataanacactttggatgcaactntgtttatgcagcactttggacnngtggttctttataaaagtg

SEQ ID NO: 230151 - DNA, 374 bp, Glycine max
  unsure (1)..(374): unsure at all n locations
agctntacatgttngagtggacttgtccaatgaaacctctactttatcttgaaatgttttctcaagttccatatgatctttcgacagctttttgaaatctattcacaagtttttgtaatattttgaaagaatggatgagtttgacagtaattcacaatgagcctttttaagagtttcaagatcatcgagatataccttatccttttgatctgattcaaattctttagaagttatgtatgccattagacatagatnggcttcttcttcatcatcatcaaacgaggtgtagtccaaatcttcctaggtgctcataagacctttcctttctttgtcttctaatgttcttcttgtcttgtgacttctccaatctgggc

SEQ ID NO: 230152 - DNA, 406 bp, Glycine max
  unsure (1)..(406): unsure at all n locations
taacgataatcgggcctcattggttaggttcctcacgaagctcgcaaaaaagacgaagccattttataggctacttaggaaaactgagtcattcctatgggatgaggcttcgaagcaagctttcttagcctttaagatagccaattctaagttgaccaaagccaggagcacccctactcctttaccttaagtagcagaagaggccatcagcttagccctcgtccaggaagatggatagcaccaaatgcccatttattttgttagccatgtcattcatgatgttgaaaagaaataccaaatgatcgagaaggtgacattggcactcataacctctgcttgacacctcaggcaatactttcagagtcactagatcattnttaagacgaactaccctaccaggtaagtg

SEQ ID NO: 230153 - DNA, 393 bp, Glycine max
agcttcttatgtcagtttcatatcccattttttacatccaacagaacagatgatttcccagctgaaaagggaatcagcagaaaatcaatgccatcacaaagtggtataatggaggagggggtaggataaagttcaaagataactagtgacaagaaagaaactcacactctttcttttttgcagatgccttcactgcagctgcccgttcctcagctgccttcttctcttcctcagtctcttcaccaaacaaatcaacatcatcatcatcgtcatcctcagcaacagcagcctgaaaaacagattgcattcagtcaaaggtcaagcaataattagatgtaagacacaatgtgaaaagaaaacatgaaaccaatcacagttatcattatgaaaaca

SEQ ID NO: 230154 - DNA, 463 bp, Glycine max
  unsure (1)..(463): unsure at all n locations
tgcaattcanaatcacatatgtcatctggttcacacccaatcttacttgcaagcaactggtgaaaagtggaaagaagaaaatcaccgataattagactcgtaatcatcatgtatacattccaagacccaaattaagaaagttacaagttataaccacgtgttgcaagtgttaatacatatctagagtttcaaaatttgttgttaacctgtagaagaagaaggtggtgcttcgtattgctggtgcctgttttatcatttgctttctttccatcgttctgatttccactttcaacagggaccatttcagtggacactttattgagctcaccctgcaaaacaaagctcaacgaatgtgtaaaaggtagatctanacaactcataatgagcactatgaatctaaataagcattgtttgtagagactttacttatntcgtttaataactanatacgagtctaaacgta

SEQ ID NO: 230155 - DNA, 398 bp, Glycine max
  unsure (1)..(398): unsure at all n locations
agcttatgcgcatatttccttacaaacgttctcttgcgcaagacattctattaaccgaaaaaaaatgcacccatgtacaatcaaggcagcttcgttacctagattatttacacgtacttccaaggtgtatttgttacttacatcacacacatctccttggctaaattcacatacatgcatactcaaagcattttggggtaccaaaaattgcacatgtgcacctcttggtatttctaatacctatacatacacaaacttcatgatgaatcttgactatctacacaataaggtgctacatttcatgctcttttcaagttnttgctacctaaagccgcatgcaaattcaagtatattttcctttgctgactaannatggattcaaattaaaaggtatacat

SEQ ID NO: 230156 - DNA, 384 bp, Glycine max
tatatatatcgatacgctcgaaattaaacatcggaaactctcacgatattcaaatagtcataactattcacacggatgtccgattcgggcgcataatatgtcacgaggctcgaaattgaacaacgaagctcttgagaaatttaatggtataacacttcacacggatgtccaattcaggcaaatcacatatacagacgctcataattgaacaacggaagctcctgagacaatcaaatggtcataactgttcacacggatgtcccattcacgcttataatatatcgatacgctcgaaatcaaacatcggaaactctctcgacatgcaaatagtcataactcttcacactgatgaccgattcacgtctataatatatcgatacactc

SEQ ID NO: 230157 - DNA, 410 bp, Glycine max
aatggaaacttctgtgcatggactttataatatatatgggggacgtgctatggagttattattggaatttccaggaataatgtttctatagtacacattgaaggaaaaattcatcttgaaggttggccatagatatatctaaattattgtattattatggcgttgggttcaaatgggcgtgagtagaaatacatgaagatttggcttctttaaatgaatcttagtaattaaaaaagaaatctttaactttcgttcgaagaatatctcgatttataaaatgacatacattaagtgtgttggactatgttgtatacattaagtggatactataagagatatagtaattttaaaaaattaacattatgaacatattaatacaattagggctaacataatgagtgggacctgtt

SEQ ID NO: 230158 - DNA, 347 bp, Glycine max
cacagcatggctgctctttcctttctaaccattcttctaaccgccgcccattttactcccctccctaacccccttatgttgtatgtgataatcattattattcacgcttcctgttacccaacttattggcatcctccttgtccctcagctccatcttcgtgaattgtgaccaccattgcatctccttcctcacatgtaactcccaaattctgcgccatctcccattgtgctgaggcttactttgtattctcactcgtgtggaggtatctttttgcaaatggcgctgagatataatctgcacttcatctggtggtattattcatatctgttcttctacccactaccac

SEQ ID NO: 230159 - DNA, 397 bp, Glycine max
  unsure (1)..(397): unsure at all n locations
aagctaatgcgtatatattatgaagtgctgagcaaaacatgcaagtctgaatgaagctaacatatgaaggaaaaaaacacaatcaaaacatgcatcaaccactataactaaatttggtaaacatgacaaaataaactcatctggtaaaatgatatatcctccatcttcaatttgggttacaataatgaaaatngattntcaaagcccctgtgctggcaaacacaagttttacctagattagcattcgacatgtaaaaaattaaaataagtaaacccaaaaaaaactatttggatgaaaagaagagtngctgcaataaaaattaaattaaattaatgattnttntcatttctggaccccttatgtatttcacacaagcattngaacaatcactaatta

SEQ ID NO: 230160 - DNA, 335 bp, Glycine max
  unsure (1)..(335): unsure at all n locations
attccttggattatagggttgaaccaagctcatgcttttacaaaaaggttcataaagtcaagttgaaatatggaagtaaccgtcttgcaaaattgtggcaaaagatgaatcgagtcacatcactacttcgtctactgccaaacatatttaggattgttgatgtccttgttacttccagtttcaccttgacaaagatgtcatggaccatgttgaanatctaaattgattcaaccccatgtcctgcgaaaaatttgaatacttaactgacatcattgctacatcatgctttattggtgattgctattgattcttccttanaataaataaataaataa

SEQ ID NO: 230161 - DNA, 424 bp, Glycine max
  unsure (1)..(424): unsure at all n locations
gctgtcatctggatcatcgaatgtggtgtagatttaatgataatgaatgaagntaacatactaatttatagatgagaaaaactaaaaaggaaatgcacataataattttcagaggggtaaattgctgtgtgcttaatgtacctgtcatgtaagaaaataaatgttcaaactctgatctaagttcttcattggtgtagttcagttcagctaatataaggctattgtctaaataagctggacaattcacattctctagatatggcattgaatgatagtctcttagcgatctttgatttgcttgcagcagttcttcaatttgaagcaagaccaaattntgaaaagttctatcatcaagctgcaatgctaatacacaaaagagaaaaaagtcaaattatgtgccgtatcaatattgatttgtctggat

SEQ ID NO: 230162 - DNA, 280 bp, Glycine max
  unsure (1)..(280): unsure at all n locations
ctcacgtactcccacgtagcccatatnctcgtttctctcaacaccgggtccccatcaatcctctcaagcttncacaacatccaagcaaaacaacattcaaacagcacaagctatcacagccaagcaaaacagagcagaggcagaaaactctgctcaacacatcaaccaaaatcacagcttttctcacttaaagaccccagtaacaattccttcgatccaattcgttaaccggtggatcgactcaaaattntactgaaagtctatagtgtataagcctaca

SEQ ID NO: 230163 - DNA, 336 bp, Glycine max
  unsure (1)..(336): unsure at all n locations
tctttattcccacctaactaaataacttacaacaaatatgtgataccacactaaattctaaaaccacctaaccaaataacttacaaaacaatattgatctcacagaaattttcaaacccaccaaaacgaaagcaactgctagggaaaaccagtgaaaaaaatggtgaaggaggaggtgtactaaacactctaaaacgcccaagccgttggcgctgtccatattcttacaatgtcgccaaccccatttgcgcttccatagctgtgctgagcactaataagctactcctgctctcctgtcaaagctgctcttgctctcttgccanagctgctcttcct

SEQ ID NO: 230164 - DNA, 468 bp, Glycine max
  unsure (1)..(468): unsure at all n locations
ttctcatccatggactcctgatgtagactattaggtgctcaacgaaagacgaagaggaacaacgactaatgatgacagaggaagaggaacaaccaataagcaccaagagaggaacaggaacaaccaacaagcaccaacaaaggaagcgaaagaggaagagacaaagatgacagaggaagaggaagaggaagatgaagcggagtatgaggagaaggaaggcactgtacggacagaaaaataggagttttataatattagggtgaaggacaatnttaccatttcaccatgggtgctgggtgcaccaagtaacacccctcagtttatttatgttaaaactgttcaataaaagaaggaaaannaatattntatttcttttgattcgattccataacacttaattcatttcttcacttaannnctcgtctatttccaagcttaaggtcttagcatatacagaatgtactatgg

SEQ ID NO: 230165 - DNA, 470 bp, Glycine max
  unsure (1)..(470): unsure at all n locations
tagacttaaccttgacgtatgaatgctccataaaanaatgtcctcctgaatgggatagggccacacctataatgaaaaagtgagattttcatgcatcaaataactntgtgagtatcacggagttattattaagatggatagaagttggatgaacaaaattcgcatgagccctgcatatgaggaaggcattgatgagttcatgcaattttcttctgaaagaagtcgatcggatgaggatgaaaaatattttggtccttgtataaattgtttgaacgggagacgatgaatactggatgacatatgagagcacctgctgtgtgataggattaagaagaattataccacatggatatggcatggtaaatggatatacatgcagagggggtctcaatctgaaccatttgatgtagaaatgggagatcgcttanaggatatgattcatggtcttggacaagagtctattcaacaag

SEQ ID NO: 230166 - DNA, 427 bp, Glycine max
  unsure (1)..(427): unsure at all n locations
acttangagaacccatggcattcacaaaagtgttctgatgcattttgttggaagggacaaaaatactactttcagtgtggacattgtgggacctctacaccaaagggcagccacaaccataaggcaccatgtttttaccattgatgtctctgaagatatgatacaacacaattatcaattggtaggtctttgttaatataatcataatcctttatattatttattggtgacttcttatctttaatcaccgtgttccttctaacctangttctgccaccagaggcttcaatntatttaactgcatcaaanaaatatatgatngtagatcgtggtagtggtaggcatcacaaatggatgatcaccatgaataatggcctatcatgtgttgctgacgcgtggatccattatttanngtgactgtcattaa

SEQ ID NO: 230167 - DNA, 269 bp, Glycine max
ctctcctctcttagagcttaacccactgttactgccacacagagcccctcgaaaattgtttcagctgtgtactttcctacgagcccttttggtctcttgttccaaggcccttggtggaagctatatatacatctctcaactaggaatttcccttccgatcttgagagctgctgatttgaacctctgactgtttgggcctgcttcatattctgacctaagggcctacacctcttcattctactccggtgcctcaacttcctcccctttag

SEQ ID NO: 230168 - DNA, 378 bp, Glycine max
  unsure (1)..(378): unsure at all n locations
ccactcctcacgtgtggctttttacggaaagacaccatcactgaacgcgccacatggcatccctatcgcaccatatccaaatctagaacgatgggtgatcaagaggagacacaagaacaaatgaaagccgacatgtcgactctganagaacagatggcttccatgatggaggccatgttgggaatgaggtaactcatggagaanaacaggggcaccggtgccgctgatagttctgctgccgaagcagacccaactctgttggcaaccgcgcaccattctccctcatacatagtaggacggagaagggacacactgtggcacgatggaacccttatggatagcacccaactactcaccacccatcctacaagacgatgc

SEQ ID NO: 230169 - DNA, 259 bp, Glycine max
  unsure (1)..(259): unsure at all n locations
tctcctcagagttgatgatgtaaccaaacattcaccatccccagttttcatcctcaaaactcacaacaaagaagtaaaaaaatgcaacagttgaatccaaaaataagtaagaattcatggtttcatgctacacttacccttgattntgtttcaactgttcatcactatcagcagcaccaatcccaaacccagatgagaaactcatgataaacaaagaaaacattaagataaaacagaagttacatttacggtgaggaag

SEQ ID NO: 230170 - DNA, 477 bp, Glycine max
  unsure (1)..(477): unsure at all n locations
ctaagctctaatcctttacattgatgggagggaacgggcaattacttctatntttnccctatctacctcaatccctcaagctgaaatcttgaggcccagaactataccttctcgaaccatgaagtgacatttttcccaattcaacactaggttagtttctacacacctttgtagtaccatctcttagttcttcaagcaactttcaaatgagggcccaaacactgaaaagtcttccatgaatacctcaatacatttcaccaccatgtctgaaaaaatggccagcatgcacctctgaaatgtggctagtgcattacataacccaaatggcattcgtctataggcaaagacaccaaaagggcatgtaaaggtcgtcttctcctgatccttgngggccaccgcgatctgggtataacctgagtatccatctaagaagcagtagtatgcctgtctcgcaagctcttcagcatcagatcatga

SEQ ID NO: 230171 - DNA, 188 bp, Glycine max
atgacacttagacacctttcacgaaagacttgagtactttgttgctatatccacaaaaacctatgtatcatataaaaataatcttgttattgtacaagtaaaccatgtcaatatcttcagctattttctctgatacccttctatgtaacgctgtacaactcattaaagtaatctaatctacgaacacc

SEQ ID NO: 230172 - DNA, 300 bp, Glycine max
  unsure (1)..(300): unsure at all n locations
caacgaatgctctcgagaaattcatnatggccataacttgcacacggatgtctaattcaggcgcataatatatcgagacgctcgaaatctaacaacggatgctctcgacaaattcaaatggtcataacttgtcacacggaagtcctactcacgcgcataatatatcgagacgctcgaaattaacaacgaatgctatcgagaaatcanatggcataacttgtacacggatacagtggaagattatatggtcatactttgaacggagtttgatacgccatatatatcaaagctgaattacac

SEQ ID NO: 230173 - DNA, 344 bp, Glycine max
  unsure (1)..(344): unsure at all n locations
gatgatgtcaaaagaggaatcaaacaaagttgcttcaaaagataagcatggcttcaagattaatacaagattgcttcaacaaacaaagccttgcttcaagattaactcaagatcaagccttgccttanagcaaagtgctttcaagacattcaaggctttggtaatcgattaccggaagatagggttgagaaatagttgttgaaaagagttttgaatttgaattttcaacatgtaatcgattaccatatgtctgtaatcgattaccagcaacgaaactcttgaaattcanattcaaaagtcatgacccttcannatatactgtgtatcgatacacaacattgtat

SEQ ID NO: 230174 - DNA, 414 bp, Glycine max
  unsure (1)..(414): unsure at all n locations
ataaaagggatgccccacattatttccatgacacaaatgcaaaaatgatgatttggaaattttatgcaaaactggtcatgcatgcgcctatgcggacgctcaagtgtcaaattnttatggtcatgtgatgctagggctcacgattcatttcctctantttaaatcaacccaatgtttccaaaatatgttcttttatcaatttgtgcattcctccaagtccatttcgggcgtccggtgaaatttcacagcattcacccttcatgtgtagacacatttttcaaaaatnggttatgatcaatcgaatttnttcatagaaaaggtggaaatcatctcttttcaaagcatgtcggtgttagctagaaacttatttctcttttccaccttttcttactgcttcttttccctatagctctc

SEQ ID NO: 230175 - DNA, 164 bp, Glycine max
  unsure (1)..(164): unsure at all n locations
ttcgagtgtctcgatatattacgggacacaatcgaacatccgagtaaaaggttattgtcatttgaattttctacgagcatctattttcaatntcgagcgtctcgatatattacgggactcaatcagacatcttagtaacaagttattatcgttagaagtttctc

SEQ ID NO: 230176 - DNA, 438 bp, Glycine max
  unsure (1)..(438): unsure at all n locations
tcctgcatctgccctgcanaatcgtacgtgatactctaaattatgaaggaatataagataacaatattattagattgttagacaaatgttaacaagtgcctaagaatattatgtaaggaactaaaggtataaagacggaaaattttatggtattggttaggcaacttaagatatatgaatgattttaattattaggagatagaaataattgttcataatctctttnttacgctcttcatatttttcctttntagttccttaactaattaggaacttagttagcaagatccttgttatgatagaagaaggccaaaagggcatggagatccacaattaatgagagacttgcatttatatgctgcttgtgatcatcttgaccgacatcagaggctctaacaataggaacagcatttaacatagcggcctttaacacttaat

SEQ ID NO: 230177 - DNA, 360 bp, Glycine max
  unsure (1)..(360): unsure at all n locations
tttggaattcaagtggtattctatcaaagaagtggctaattaccctttttggtcacaagggaagaaaactttgtagaggtgaagctcgtgaggaaaatcttgtagaagagcatgattcatgagaaaaagatgaagaanaaactaggagagaacaaaacaacaatgggagaaatgctcacaagtagaaaatcaacaagaaagtattattcaagtcaatacaccttctcatcaactgattggtaaggaagaaagatatgaagaatatgataaatctttaagtgtcattctcttcttgatcactagcatgtctcttgcaatgatatggaaggcgtttccgggatacatgagtttcatggagtc

SEQ ID NO: 230178 - DNA, 287 bp, Glycine max
catagagtaatacaccctacaagcaagcgctacaaaatttcaacttactcaaacgttatccaaaacaggaaaaaacctcacgacacgcatagtcaaccaaactcccctctatcaagtaaagaccaaataaaaaatttaaataataataataacaataactaatattaatatcaattaataaataaatacattaataaataaaagaaagaaagaaatcaagcagcaatagcgtgatgtgctacttaacacgttccgaactatagcaggaaatgaaaattattattata

SEQ ID NO: 230179 - DNA, 389 bp, Glycine max
tcatggtcttgcaggtgaagatcctcataagcatcttaaggaagcccatattgtgtgttccaccatgaagccccctaatgtccaggaagatcatatctttctaaagggttttcctcattctctggagggagtggcaaaagattggttgtactaccttgctcccaggtccattttcagctgggatgaccctaagagggtgttcttggagaaattcttccctgcatctatgaccactgccatcagaaaagacatttcaggcatcaggcaacttagtggagagagcttatatgagtactgagaaagaattcagaaattgtgtgcatgctgttcttaccaccagaattctgagcaactccttcttcaatatttctattagggacttaacaaca

SEQ ID NO: 230180 - DNA, 217 bp, Glycine max
tctaccacataataataagagcttattgaagatgagtttaataaagcgtttccactgaaacacacccgaaatagattaaattaaagtaagtccttggtgaggttaagtattcacctttccccaaagtccagagcatttatcataccaataggatccctgtcttcagttgtttggtgggtttcgacaattgaggagcaacttaagctgttccctattc

SEQ ID NO: 230181 - DNA, 189 bp, Glycine max
  unsure (1)..(189): unsure at all n locations
aacgagctgtgttttctacattntctggaaaaatgcgatgaactcgctaagcaagaaggctgcgctaagcgagttcatcaatactcattgtatataagctttatctgaagaactcgccaagcgcacttactgcgctaagcgagttcatcctttgaggatgaacattcatcctcttgctgaactacctat

SEQ ID NO: 230182 - DNA, 415 bp, Glycine max
tctggaatattcttcatgaccggtttccttcagtttttccaatgttttccgcaaataaacattggtggcgactctgcgcattttcctcctttggaagacgcacctgtgagcctcgcctcgctcgcccgcaaaagggtaggttgcgactcataccaagccctatgtgcttgttttaagccataaagtgccttctttaatctatagacatggtctagtttttgtgagtcttcaaacccaggaggttgttccacatatacctcctcctgaattagaccatttaagaaagcactattgacatccatttgatatagttcaaaattcataatagatgcatatgccaataacattctaatggcttctaatctagctacaggtgcaaaaagttcttcatagtctataccttcttctgggtata

SEQ ID NO: 230183 - DNA, 399 bp, Glycine max
  unsure (1)..(399): unsure at all n locations
acttgtctatctcacccacgctccaaagatccatcacctccaccgtcgccagcaaggtcaagatggccttcggcctgaaatcgttaggtttggcctccagaaagagccctggcttcagttcaggccaaggaaagctgaaacagcctctcaccatcgacgagctcatgctcaactaaatgagggtttccaaagcctacgacgtgccatgggtagaaaagtatcatcccaacaaggtcgtcaacatcatcagcaacgaggatgctgtctccaggctccaagtcatcacttgtgatacaacattngtgatcaagtacctcggataataagaaggngggtgaataatatgaacggcttgctatanaactatcatattatgtctaatcaatngcttactctagt

SEQ ID NO: 230184 - DNA, 436 bp, Glycine max
  unsure (1)..(436): unsure at all n locations
ctgattttcctcatttcttaacaagctttgaactatatatcttgccttcatttaactgtctttgggcttggcggccgcgctcaacaaagtactttcgacacctactatacgttgatttcaccaatgctgttatgggaatgttgcgacaatcctttaaaaccttactgatacattctgagaggttggttgtcatgtggccatatcgacgtccttctttatcataagccatcgtccattttttctttgaaatgcgatcaatccatgttgctatggctggactcagttgacgaaatttttctaaattntgataaaaaaaaatgtgcttttaaggagtgtaggctgcataaaattagttatgaataacaattntaagtatatatgaaagctaaataaacgtgaccatcacatatgaaatcttacccaacttcttcaacat

SEQ ID NO: 230185 - DNA, 391 bp, Glycine max
  unsure (1)..(391): unsure at all n locations
gcctctaaacccataaggaactaatngaaattcagcttgggcacactaatcctaacaatctataactcacaatctataaaacttccttttgtgatatcaaaactntgcataaatatcaaatgtgagcttaatggtgtggtatagaatgaaccgaaagataatcgcgaataaatatttgaattaaagtaatttagtaacgtgcaacatcccacacagaattctgaaattatgttctcatttcttcctaattngaacacaaccaaatcaaggattagtgatctggaaagaagaacaataggccactacataaaggatctgcgacctttatactagaaactactcttctcacgttcaatactatggtatcttcatacacaaaccaccttatttt

SEQ ID NO: 230186 - DNA, 328 bp, Glycine max
  unsure (1)..(328): unsure at all n locations
actcttcatgtattcctaactctattttctcaaatagagcctttaggcttcaggggtcattntgaatntgagggagtaaaccccttcttccataatctgaaacactgctgggaatttcttcaacacggcaataagtctcctctttttatcaagacccaaatctcttttgaacttaccaagggtcttaagtgacataaccctatctggttgagtcactagaatgttccttaccttgaccacaaatttgagcttcttgtccctctggatgacgttgtcgaagggaatctctttccttctcttcaccgctgctgttattatgggcctcact

SEQ ID NO: 230187 - DNA, 372 bp, Glycine max
  unsure (1)..(372): unsure at all n locations
tgcaataaaacaatcattgctctattatgatgattctattttcttcacctatgaataatccaacaaccattttgtcaactacttcttagttacaatgtaaccttttatttttcatcccattgttctgttcatgatcctcaggactgaagacttgactctggttgaatctcgagtagtgccccaagattggaagaggaatatcatcatgcatccatatcaagatagactagtgcagttccagatgaaaatgggatgaaaaatattcaaccaaagaaactagaaatacaagaaatggggagaagagaggtacttatgagnttgcctaggcttgatatacacttgtatcattcacttattcactaaacattacaa

SEQ ID NO: 230188 - DNA, 253 bp, Glycine max
  unsure (1)..(253): unsure at all n locations
tctctctctctctctcaatagctgaggaagagtagttccatgaagaaaatacaagccgaggcgcttccgtaacgtcttcgtgagtaattactcgaagatgctcgaccgctcttcaagaatcatcgttcgttcttcgttatcttcggtcttcaacgaggaagcacctcaaaccaagcttttcaattcattctatgtactcagggnggccacattgtgttcatgtattgtattctcgtatcattactattatacc

SEQ ID NO: 230189 - DNA, 320 bp, Glycine max
  unsure (1)..(320): unsure at all n locations
tagtcataactatccacacggatgtctgattcgggcgcattatatgtcgcgaggctcggaattgaataccggaagctcttgacaaattcaattggctagacctttcacacngatgttcgaatcaggccgatcacatatagagacgctccaaactgaaccgcggaagctcctgagaaattcaaatgtgtaagacttttcacacggatgttcgaatcaggattataatatatcgacacgctcgaaatcaaacatcggaaactctcgcgaatgcaaatagtcataactcttcacactgaggttcgagtcctgtttataatata

SEQ ID NO: 230190 - DNA, 390 bp, Glycine max
gctgcttgaatgaaacatgcagtccatgtgcgctcttgttgcgagtagaacctgaaagtgtggcgtatctgcttactgtgaaggcgccgaaactgtgatgccacaaacttcaagtcatcggctttcatggcaaaggcttccacttctgaaagggtttggacagtcctggttgaggtatgaaggttgggtgaggaatgaggatccaaagcccacgtgagaagctcctctccacagaagtcaccagccttgaggtactcagagttgaagaagccggttcttccaccgttagttgtcatggtcaatagcttgccacgcattatgaagagcatctcatcaaccggatctccctcccggacaatgtagctttcttctgtgtaaagcactggcttg

SEQ ID NO: 230191 - DNA, 455 bp, Glycine max
  unsure (1)..(455): unsure at all n locations
taaactcagctgagctaaataaaaatatatntataaagttgtttatgtttaataaattgcttattgtgtgtatttagtatttacacatatgtacgcacatgtaatgttataaactgtatccgaatattattacagaaaaataacacaaaattaaatttatgtaatttctaaaattataaattttttttatattaatttatctaaaattatcttaatgaaaaataccttataaacattttatgttaaatctttctcaaatntattatatataaaatgcacggatatttatttgtcaagtaaaaaattattattcaatgcctaactaattattcttatacttatttcctatatctttcattttttaaatttaataaatgtatcaacacagatagaatatagcgatttaataagactaatatagttaattaaggtataatatattaatttctttttag

SEQ ID NO: 230192 - DNA, 367 bp, Glycine max
cagccttctggaggaaacttctggagggcccaagtgggcctggttgctatttgcacccccatttttactaagtacacccccctgccttttttttggtgagttctttttcgtaaagttacggaaacttacgaatttcgtaacgatatttggtttctttctgtaatgttacggaaccttgtggattacataatcatcccctttttgacttacggaatgttacggaacctcactaattgtgcaacgatgcttccatttgatttccggtgtgtcacggaaccttacggattgtgcatcaatattttcttttgttttccggcacgtcccggaatttcacaaatggtctaatgatgggtgccaagcaccttac

SEQ ID NO: 230193 - DNA, 309 bp, Glycine max
  unsure (1)..(309): unsure at all n locations
acatatgatngtctcattcgacaaaacaactccaaagcctctntacttttatcactctgagcataccgtgatatcatgagactccaaggaataagatcatcttttggcatttcttcaaaaaactgctgtgcctcggcaatctctcctgacttagtgtacaattcaagcagtgcaatgccaacataaagatccctatcataacacactntcaaagcacatccatgaacactnttcccaaccttaaatgcttctagaccattacaggacttaagtgcggcagaaatgganaaatgtttggctataccccat

SEQ ID NO: 230194 - DNA, 465 bp, Glycine max
  unsure (1)..(465): unsure at all n locations
gctctagattcaagactcaagattcaagatttaagagaagacttaatcaagataagtatgaaaaggttntttcaaaaactgagtaggacatgganttttctcaaaaacatgtttaccaaagagttnttactctctagtaatcgattaccagattattgtaattgattaccagtagtaaaatggatttgaaaaagttttcaaatgaatttacaacattccaattgatttcaaaaagttgtaatcgattacaatgttttggtaatcgattaccagtgtctttgaacattgaaattcaaattcaaatgtgaagagtcacatcctttcacataaaagctntgtgtaatcgattacactgatttggtaatcgattaccagtgattgtttctgaataaatcanaagatgtaactcttcaaatggtttttacnnttttcaaattggtttaagttttctaaaagtcataactc

SEQ ID NO: 230195 - DNA, 371 bp, Glycine max
aacatgaagacgtggagctgttttattcctttataaaaaccggcgggtatttttaaagatgaagcatcgctgtcaatttgaaaaaatttaagttgaggacaatatatttcttctggaagctcatcaatgatatcactgttgcatatagaaatagaagtgcacctctcgagttcaggtcaatcatcaagtgtcccatttctcaaagtaaatacattttgctccttctgtgctatagacaaagcagcatctcgaaccagatcatgcatattgaaatgaatactagaacttccatccaacaccaaacctgagtttttcagctgttggattgatgtagatattctgccccgagcttccccaagcgagttgacccc

SEQ ID NO: 230196 - DNA, 312 bp, Glycine max
  unsure (1)..(312): unsure at all n locations
agcatgtgacagaaatatcatacactgatcaaatgtntcatatgaaattggcacaacactttaatatttgaattgaatatcaaatggaattgactcactaatgatgatcaacattgaaggccttgatcagttacatatgaaatgcataaaacatatatattatagactagtgaaaataaataggatatactcttaattggaaagatggcaagcagctagatgaagtgtgctagccatcttttcttaggtcatcaattggcagttaatatggatacaacatttactgcagaaaactaaggatataatatcttt

SEQ ID NO: 230197 - DNA, 136 bp, Glycine max
ctccggtgaggacacacgcggtagcaattcaagaataactggatatcaccctatcatgagacactaccccgattctgtacatgacaaggaaagatgaatcactggcaactgctcaattgcttctataatacagcaa

SEQ ID NO: 230198 - DNA, 430 bp, Glycine max
  unsure (1)..(430): unsure at all n locations
gatctgtattcaattatccacactttataatatacagaaaggaatcagacagatgcagtgtatctgaccttctatgaagagaagagtcctctgcttttttcacatcttccaactgatcttcagacagcatttcattgagctcaccagaagaatngagaacacttctcttattgcctgccatagattcgccttctaatgatgcattcattacagtgctattgccagaaccagaacagtcatcagaggagtcaagcagcttgatctgcccaaaaccaataataattactgcaatgacataagcagctacagcacaaaaattggtgaaacagagtgagtgacacctctatacattaaatccctattacgggacgcctacattatggatggctgcgttcaccatgctgtctcacctgattgctctgctttggtg

SEQ ID NO: 230199 - DNA, 445 bp, Glycine max
  unsure (1)..(445): unsure at all n locations
actattattgtcacctactccttctgtaagggaattattctttctgagttcccttattctttgtttggctntgtcactaattntgaatggtttgaataaaggttnttctgttgggatatttgactgaggttctccaaaagatttttgtctagggagtatcttgggtttgatagactcttctaaaacttgtaaatatttgttgctgtaatttgcctattccattaggcttttgatgtctttggaggttatttctttgttgatgtcctttgtcttaaaaggattggccatgacagaattatcattatcgtctttgacctttagaagttgatattgtgttgtggtaggtaattctgattggattaactcaccatccttaatttgccaatttgttatcacatttngtgttggatcacctatgatgtcttgcttccatgggtaatctata

SEQ ID NO: 230200 - DNA, 323 bp, Glycine max
  unsure (1)..(323): unsure at all n locations
aagagggagagaagtgaaacctttgaagtgtgtctcacaagactctcattcatcaaagttacaataagtgttacacatgcttctatttatagcctaagtagcttccttgacaaacctcctggagaagcttccttgagaagcttccttgagaaacttccttgagaagctagagcttagctacacacacccctctaatgggtaagctcacctccttgagaagctagagcttagctacacacacccctctaatagctaagctcaccttcttgagatgagaggctngaacttagctacacacacccctctaatagttaagctcaccc

SEQ ID NO: 230201 - DNA, 401 bp, Glycine max
actaagcttactccatatatggagaattcactgacttgcccatatgtgtaaaccgtttcgatcttttcaaagatagagaggatgctgcagccttgaatctgatccacattaaaaaattcgctcaagagtgaaggcatgccaagagttcattctcgcctaattgaccatttgagtcatttttaaaatacattattgagatgggtcttttttatttttatcatcaatgggtcaactagtttcataaagccactagtcaaactaaccattttgacccagtcaatgatgaaaagagacacatgtcactaaattattttagaacaaattcatgattatattttggttggaagtatgatctaataatatgacaaaattatgtaatcataagatacctcataattaca

SEQ ID NO: 230202 - DNA, 285 bp, Glycine max
  unsure (1)..(285): unsure at all n locations
ttcttctagcctcaatcttaaaccttgtgagccttgtaaacctattttctatagttttcttcgagcctcaatcttaaacctcgtgagtgactctccttattttcttctgtgcttgagcttaagctccaaagcataagttttgctagagtctcttttntcttcttaagcttaatctacaaagcttaagcctttaacctcattatcttcatttacgctctatcgcaaccctaatcccttgaatcctaattttctcatttctcttctaagggtacaccatacagctta

SEQ ID NO: 230203 - DNA, 400 bp, Glycine max
  unsure (1)..(400): unsure at all n locations
aaacagacattcnggtcaagtaagtggttgtctgcatcaaacagatcaaacttgatcttctgatcatctatgcacatttccagttnaccttttcccatatccaccacacaatccgcggttaacatgaagggacgacccaaaatcaaggcgatttcaaaatcctcttcaatgtccataacaacgaagtctgcagggaaggtaaattgctgcaccttgactagaacatcttcaatcacaccataagaccttgtaatagaccgatctgcaagtcgtagtgtcattctagttggcataatctccatctcttcaattctcctgcacatggagagttgcatcaaatatatactggcctctacatcagtgagagccttaccaacagacatcggcatctaattatact

SEQ ID NO: 230204 - DNA, 338 bp, Glycine max
  unsure (1)..(338): unsure at all n locations
caatagagaatcatttnggatattaactgagaggatccttgctacttctttgtcttcttgcatgctaagtgtttgttttatttattttgcacatgtaataattgcacccttcatttagacttttttatttgtaacttttaatggttttctaacattcgcaataacagaaaaccatacaagatcttgacataaatgattctcacaaataatagataaacaatatgtatatttatccgtaatgagacttctctttgatgtgttttgattccttaaaagaggggggaaacaagaattcatttcctttgaggctctttctattctctctatacttcatgatg

SEQ ID NO: 230205 - DNA, 330 bp, Glycine max
atcatcacctctcatgcatctgtctcgtcagcggcgttacattcacactactatatatctctctctgttcccattataattaggacccacgtatataaactattatttcatcgtgcataaccttctgtacgttggataattatccactgcaaaatactatgtgattgattatatatcattatctcttttattttactgtttaatttgttaattacattgtatgcacatatgtattacattcttcacgtataaatgatgataacattggtgtaacgcggtatcgcatataaataagatggaactaatattaacattgattacaacattatt

SEQ ID NO: 230206 - DNA, 271 bp, Glycine max
  unsure (1)..(271): unsure at all n locations
tctcccacatccacaaattacacatgaacccaccatccccagttgcccaccttcaactgagctcacgtacccncacgtagcccttatcctccttcctctcagcaccgggtccccatcaaccccttcaagcttncacaatatccaagcaattcaatatccaaacgtcatgaactaccctanaccaagaaaacagggtagaggcagaataactctgcccaaacacattccaatacgacaactntccctactcanatatcccagtaacattctc

SEQ ID NO: 230207 - DNA, 206 bp, Glycine max
  unsure (1)..(206): unsure at all n locations
agctncaaccctataacacaacgtggcagacaaaagtgggcagttaacttgaatggtcatcattgtcaatgcggaaggtattctgcgcttcactatccatgttcacacattattacagctggtggttactgtggcatgacctcttaccaatatatagatgttgtttatacaaacgagcacatcttaaaagcttactctgcacaatg

SEQ ID NO: 230208 - DNA, 421 bp, Glycine max
  unsure (1)..(421): unsure at all n locations
ntactagactcaagacccagaagaaggatattcacacctgtttacctcanggatttcgttaactaacaatagctgagctggtgcatcttgtagggcccttcattatcgcaccactatagccttgtctgccatttgcttgtgcattttcatttctattaggatatgttgaatagaatcacaaattctgttatcccaattctcagtataaatttagcatcaatgtaataaggcaaaaccatgaatgaaatattatcatgagtcctctctcattttctctggaggtactggccctcgaagccagcttatttcatagtgtaacagcttctctggtttgttctacacattngaaccacctcttgaccaaccaaatgatgttgaagcacaataatcagacacagtgaagaaagaagccctacctggt

SEQ ID NO: 230209 - DNA, 358 bp, Glycine max
  unsure (1)..(358): unsure at all n locations
accacagagtggtacctggagatatgtcgtgggggtcaggagaccttgnggacgtcaggtggggtgctattgcccaaaaccaagcttgaccaatcccgacccaacccgggcatagtcagtcagtgagaacctgtgatgtacctaaacaggcgagctcctagcagtcaaccgataaaagaacacagaccacaaagcaaggaggcttgtatggtggctggccagctgtgaatcttgagtgatatatgggatagggcctctggtaatcgattaccgagggtgggtagtcgattacaaggcttanaagtgaagacaggaagctaagatggcctctggtaatcgattaccaagagagtgtaat

SEQ ID NO: 230210 - DNA, 114 bp, Glycine max
tgtcatctacacacaatgctttattatggcaagacttgttctttcacgcactaccgtttattcatatgcaacatgatttttcacaccaagagtggttctttcacgatgagatca

SEQ ID NO: 230211 - DNA, 253 bp, Glycine max
acattcgaggggggcgtttttttttgcttttgcaacacaacaaagtggggtttatcattgctagtgccaaggactgctcgtgagcatacatatccatccccctaatcaaacactctgtgtgaaattctgtgctatgaccccagccttttgaaaattatctacttttctgtaaaaaaaagactgttggacggtgacattttatgaaggtacaccctcttgtgtctcattcgatgacactattgcattaacagat

SEQ ID NO: 230212 - DNA, 452 bp, Glycine max
  unsure (1)..(452): unsure at all n locations
actaagctgcaaagcntggtacctacttcttcactacattaagaatcatcgtgttgagtcttctctggggctggcttactggtttagccccatcttctaaatatattcgatgcatacatgtggatggcctaataccaggaatgtccgccagggtccagcctatagccttcttatacttcttaagaactgataacagcttctcctcttgctcatcaacaagggaggcagatataattactggaaaacttttgctatcatccaagtaagcatattttaaatttgatggcagaggcttcaattctggtgtggatggctggatagtggtagaaagagatggtttcacaacctgtcctcataaagaaagtagaggtatgtgacttcctgaacatggtagtctattgactctaaaacaatctagaggaaactcgcaactgtatcattcaaatcaatcc

SEQ ID NO: 230213 - DNA, 425 bp, Glycine max
atactacatgtgcctgcccaagatcaactggctgatcctctaactaagcctctgtcaccttctcagcatactgcaattcgtaccaaactcaaggtgtttcctttggcatgaatctccttgagtttgtggggggaataatagagtataccacaagtatagtgatagtatagtcatgtatatgaatacttgtatgaataccttgtacaatgtaggtatagtagtatatgctgagctgtcatgctgttaggcttagctgtggcagttacattgcagttatgaatcaaggctatatataagagccttccatcacaagaatgagtagcttgtataattcattctatgacatgaaacgtaaggaaaatagaatttcaacataagggatgtatacaacacacacttgatttagtacctggtatcgatcaaat

SEQ ID NO: 230214 - DNA, 476 bp, Glycine max
  unsure (1)..(476): unsure at all n locations
ctcagctcttggggttgatggacctctctatgataagccatattatcgggctcataatctttagcaattcttgctctcttacctcttcgaggctctatatctgattctggttgtgcaagaatttcactactaatagcaggaagatgactagatgaagtacccccactattccttaatttaaaagaaaatcagaaaccagattctttctcatctctggagtatgcatcacatctttgagaatcaaagtctttccaaaggtaaacttcagttcaacatgtccagttccagtaaccgtagaggtgtgggaatcacccagcaacactttcttattcgtgtatgttttatacatagcacgatcatagcagacatagcaggaggcgccagtgtctacccaccatccatctgatcatccaatcatatggatcttagntatcacagctatgtgtgactcttgagccaatntatgtatctcatgg

SEQ ID NO: 230215 - DNA, 410 bp, Glycine max
  unsure (1)..(410): unsure at all n locations
tgtcttagagggacttcctcgtgacatcttttgtcttgaatggaattgccatgacaggtcttgtgttactgtctttgatattcggtagctgatattgtgttgcgggaggtaattccgattagattaactcaccatcctttacttgccaatttgttatgacatttgttgttggatcacctatgatgtcttgtttccaagggtaatctatatcctttctgatggcataagcatgaaaccaatcaaagaaaaggacattaattntgactcgttcgacaaattcgtagaacttgtcttggagtatgtttctgtttgtacccttgtaatgttggaanaaccatctcctttgaggtcattctctggagaaaaaaatctttctaagggttccttatcatgctaaagtgcagatacac

SEQ ID NO: 230216 - DNA, 418 bp, Glycine max
  unsure (1)..(418): unsure at all n locations
gcttaatcagggtgcaaaggagtggtcacacagaataacactcttttgtcctattagggaactaagtggcagacaaactcaaagttctaactgtcaagtgaagcatccaaggttgttttggtattggttttatgagaaacagtggttntaattggcattgatgaaaaggtggttctaattggcacttaattcataagtataacaatattaaatcaagaaattattaacaatatcttgattcgatgaagataaaatgctctaactaaaatcttttacaccattctaactaaaaaatgatgaattatttataggtggaatattttgtggaaaagttttattatgtctgttcagactttagagctgactnttgttgtatctagtattacttgtttagtgtttacccgagtctangaactct

SEQ ID NO: 230217 - DNA, 388 bp, Glycine max
  unsure (1)..(388): unsure at all n locations
gatttntcactgcatcttctcatctgattgacaagattcaacaacttgctgaaataatatgctacccgctctccttcttccatttgaagtagcttgtactaccttcgcaatgattgaagccacacctttcgaatctttcctccaccaatgaagcatcttccttggttgtagatgcctttaagatcttataaaaaaaatacttgcatccacactctgaagaatcaagaacaaggctctgctatcgcattttatagcatctttgtaggcaactttctgtgcgtttgtaggaatggtctctaattctaggaagcctgcttgacaatctcagaacatctgtaatcgaaacaacacctcatttgatgtcctttgtcctaaatctgcatcaaga

SEQ ID NO: 230218 - DNA, 345 bp, Glycine max
cctagaggggatggaccttttcaggtttttggagagtgttcaataacaatgcctataggttggacctcccagaagagtatcgagtcaccaccactttcacatttctgattaaatccttttgcaggtggagctgatattgaggagaaggaactaacagatttgaggtcaaatcctcttcaagggaaaggggatgatgcaatcctccataggaagggaccagtcactagagccatgagcaagagactccaagaggattgggctagagctgctgaagaaggccctagggttctcatgaacctcagggtagatttctgagcccatgggccaaggttgggtccaattatc

SEQ ID NO: 230219 - DNA, 390 bp, Glycine max
  unsure (1)..(390): unsure at all n locations
catatttctttggcctaacaggaactccaatattnttacagcttctaatgttatgattggtttggccacaccttccacatgtaaactcagccaatttcctctttagcttatgtcctgtgacattgtcctcatctacagatctccttctatttttctttggccttcctctttggacctttntatgtggtggaacagggtgtgtatactgtgtctgggcccaatattgtgtgccttggactggttcaataaaatgcttgtatgtcttattataagcttctattgacagccactcatgacacatgtcctcaggcttccctcctttgtgagttattgttgcaatggcatgtcggcatggcatccctacatcaaagttgtaaatcagcacacatg

SEQ ID NO: 230220 - DNA, 363 bp, Glycine max
  unsure (1)..(363): unsure at all n locations
aaacatattatggnggatccattgtgtctgagatgcagtcttgaggaggaatntatgatgcacaccctggtgtcctacataaaggtgcaaaccttttggttntcttctcctttgnggttgtgtattgatgttgaaagaaattactgatttcaagagtggttggcaagttgtattagaagcgctaaggaggaggtaaaaaccatgattctatccttgcattgggcaatatgatttggtaggaaccaattagtgttccaaaataggaggttggagtgtatgcaaatcctttggaaagattcaacagtctgctttaatgtgtaaaggagaaggaggaagcgtcccgtgcgagtatcgatgtatttg

SEQ ID NO: 230221 - DNA, 373 bp, Glycine max
  unsure (1)..(373): unsure at all n locations
ctgtcctacatttactaacggaggagcaagagcggatgacgaagggatgtcctctgttctagctcttattcttgatgccatcagtaactaaaaagaactcaaaattccatagaccaaaattgttcaagttaaacaacaacaataaaggctaaaataaacaataggcgcttagcatgatatagctcgctcagcacaccctgagaaacataacatgtcagcttagctgaaggtaagctcgcttagcctaaaagttgccgtgatgaaatacgcttagctcaggtaaactccgcttagcgcgaggcttacaacacaaaattntctaagttactttggcttagcgattcagcctcgcttagccacaagtatctcaaca

SEQ ID NO: 230222 - DNA, 452 bp, Glycine max
  unsure (1)..(452): unsure at all n locations
gcttgtactcttgttggaggaacccttactcaagctagtctaaatgaattcttcaaccatanaaatttcatcacactcatagcaaatcaaaaataaatggcgtgaatggtttatcattacagttacaacaaatcatacacaagtggtgcacaaatcaaacatgaatggtgcgaatggtttctctttgcaactactatccacagagtgagatagaggttatggattaaacaaatcaaagcacaaaagtaataatggtatttgtagtgtgagaaaataacaattgaagattgctaaggcgcgaaaaatattcaattacacttctccaaaaattgagatatagcttcgagattaagaatatacaagtgatgaattaaaagtaataatgttatctgaagtgtgagaaatcacattcgacgagtggaaatgtgtggagaaaatcatgatctaagatt

SEQ ID NO: 230223 - DNA, 332 bp, Glycine max
  unsure (1)..(332): unsure at all n locations
agaggggctctcatgcaggcctatttgtttatattcaagacactctngatgcaaattacttttcctgtatcaattcccatcaaattccattccttgtaaaaatgctcatatttggcattctagatttggtcatatctcagacaaagttttcaaacatttgaataataaaattggtctgcacctttctcctaatttctcttcttctaattgttttgtttgtcctcttgctaaatatagaagattatcttttcctaactctaaccatttatctacattactgtttgacttaattcactgtgatatatggtgtccctatgctcaccttacctatg

SEQ ID NO: 230224 - DNA, 353 bp, Glycine max
  unsure (1)..(353): unsure at all n locations
aatatttattaaagattcaaagccatatctctgtatacgttggtcggcgacttaagatatcggctgttaacgtttcaccatgtgattcatggtgacgatgactaatgtagtaatgttgcgcacaaggatgagcaatcatagttatgaagctctccatcataatcttaatagatgtttttacgactgaataacgtggcttctgttagaattaagttgagctttttatgtgtatgacttggcggtganatggaaacttataaaacctggaatgtttataaatgattaccttatttatttttatgtaactatctatattgtcaatttattttcgactgtactgcatctacaacagt

SEQ ID NO: 230225 - DNA, 476 bp, Glycine max
  unsure (1)..(476): unsure at all n locations
aaagagagaagcaagtagaaactcctttcanagcattatacgtngttctacttcaaaaccccttgaactacttcacattgatttatttaatccctctagaactatgagtttaggtgtaaattactatggcttagcaatagtggatgattactcaaggttcacatggactctgtttttgaaaacaaaaaatgaagcttttgaggcttttcgcaaacttgccaagatgattcaaaatgaaaaaggtcttaacattgtttcacttggaagtgatcatggaggtgaatttcaaaatgagtccttttaaaacttttgtgaagaaaatggaattcaccacaatttttctgcccaagaacacctcaacagaatggtgttctggagaggannaatagatcgctagaagaaggtgcaagaacnncttctaatgaaacaaaggtacctaagtactttnggctcgatgctgacatactattcgtaca

SEQ ID NO: 230226 - DNA, 332 bp, Glycine max
  unsure (1)..(332): unsure at all n locations
cctaaattagggctgaataaccagtaaccaaagaaaagcataggtaaaacttttaaagaataaccagtaaccaaagttgtataaagaataagcagaggtgaagaagctaggtaggctctactnttgaagtggttactagttcagtgctgaataaccagtaaccaaagttaaatgtccatttactcttactctgatgctagttcataacatgttatatgnttgttccttttacagcctgtgaagcctgtgaatcaattcatttgatttaagtagtttatgcatggaaacgtgttaaagaatgataattgaatcattttnttatctagtgtatg

SEQ ID NO: 230227 - DNA, 397 bp, Glycine max
  unsure (1)..(397): unsure at all n locations
tcatgcttaactatgtatgggaaaacttcattactggtgttcaagacatacaagngagcttgtaacaaatcttctacactnggagtgatcacctgtagtcctcttgaacccttaccacccactctgtcatcatgccaagactcatgaagcccaacaggtttagccatctctaagtattctgaacaaaattcaatggcttcttctgcaatgtacctctcaacaatagatgcttttggacgatatagattctntgtatacccttttaaaatcttcatgtatcgctcaaccgggtacatccaccgtagataaacaggaccacaacatttgatttctctgaccagatgcacaatcaagtgaatcatgatgtcaataaagcanggggaaaaacatctcaact

SEQ ID NO: 230228 - DNA, 343 bp, Glycine max
accacagagtggtacctggagatatgtcgtgggggtcaggagaccttggggacgtcaggtggggtgctattgccaaaaccaagcttgaccaatcccgacccaacccgggcatagtcagtcagtgagaacctgtgatgtacctatacaagcgagctcctagcagtcgaccgattaaagaacaaagaccacaaagcaaggaggcttgtatggtggctggccagctgtgaatcttgagtgatatatgggatagggcctctggtaatcgattaccgagggtgggtagtcgattacacggcttataagtgaagacaggaagctaagatgggctctggtaatcgattac

SEQ ID NO: 230229 - DNA, 324 bp, Glycine max
  unsure (1)..(324): unsure at all n locations
gctttatggcgcaggtctttagcttattgaggtccttggatggggatcttacaccatggagatgcatcgggagacaaaggacaataggagagaggaggcggtatccactagggaataagccttggaagatggagcttcaccaccgagatgagccttggagaggatgcttcaatggaagaaaagaaagagggagagaaagagagaggggggagcacgaccttgaaggaagataaagggagagaaggtgagctttgtgctgtgtctcacaggactctcattactcaaagntgcaacgtgtgttacacatgcttctatttatagact

SEQ ID NO: 230230 - DNA, 343 bp, Glycine max
tgagagataatgttaagggaaaggcagtgtggaaaacttccatgcatgcggggggagtgagtttgaagaagcaaacagacaatgtcccaacaaaggtcttgttagaaaataaaataatgttaaatgtggcgccttgaacgctttatttttgtatttttcgtcaaaagcttattcaattatattatatatgatgataactgattaagaaattgggggctttctaaatactttacccacaacgatgctatgccttcttttttgtataaagataatgtatattatgagaaagtagtcaagacataccaaagtgatggacacacattgtggttgttttctttaactt

SEQ ID NO: 230231 - DNA, 427 bp, Glycine max
  unsure (1)..(427): unsure at all n locations
ctcctctttcagaaccatgctatgtgctctctactgagccctttcttcccttcgcaacttgagttcattattgctaccccatagagctccgcgaaatttgttccggccatactcttccttgcgagccctcttggtctcttgttcaagggctcttgcggtaattgcattctcttcccgtaacccggcacactccttccgaacgtgtgtagcagccaacttgaacttctccttggcgagttntgcctttcctaactcgcttttgagagcttggacttcttcgtcctcttccggtgcttcaaaattctcttcgctgacgacttttaacttggcgagccaatctaaacctcgtatgcgaactttcagccattcgtggtacccaccaatgatgccattacgaatgcctctaagctcttgatctttccttaac

SEQ ID NO: 230232 - DNA, 310 bp, Glycine max
  unsure (1)..(310): unsure at all n locations
ttatccttcaatggatataacttttcttggagctattggctagcatgttctataaatatgttntatagaacctacaaatccttttccttatttggcttagtattgtaatctggtgagcaggcttaatgatggagtgacagaaggtctaattctctaaaagaattagagtggatctatacatcttgccatgtgtcccaagattgtaaagaaccttatacctctgtcagggagatttctgagttctctatggtgcctnttgggagaaacatgtttatcccacatccctccttgacttctccataattgtgat

SEQ ID NO: 230233 - DNA, 249 bp, Glycine max
atctgtgggtggtgggttcttgggagctattatgggtaggtctactaaggtattgctttagggtagttggttgggaaggaaatttgtgtaattatgctaaacttgacattgttaatgtaagcaaaactgcctatgttgatttaaggttcaataatcgatgtttgagatatatgagtgctctaaatgtaatagaacattgtacagaggatggggagagttagcttacagttaaatgtgagaatggtagtg

SEQ ID NO: 230234 - DNA, 403 bp, Glycine max
  unsure (1)..(403): unsure at all n locations
actggaagatgacatgcctttccaaatacaacccgattaggagacattcctatgggtgctttgtaggcagtccgatgtgcccagagagcatcatcaagcctggtactccaatctttcctgcttggctgcacaatcttctctaaaattcgctggatttctcggttagaaatttctgcctgtccattggtctgggggtggtatggtgtggataccttgtgtaccaccccgtactttntaagcagggcatgcattgtcctgttgcaaaaatgggttccttgatcactaacaattgctttatgtactccaaacctgcaaaacagattagacctgacaaagtctgcgacaactttagcatcatttgttctagtgggcttggttccacccattttgaacatagtcaact

SEQ ID NO: 230235 - DNA, 432 bp, Glycine max
  unsure (1)..(432): unsure at all n locations
gcatgtgaattangaagcatcaacaagaatcaagccaaggctattgtgcacgcaatcaatgggggcaaaacacaccaaatgattatgatgatggatggctcanattctcacaaaggcaaactcatcactttcaaattgagctttcaaaactatcatgacatgtagaggagaatcaaggatttcaagtcacaaaatgtcaaaatcttttattttcaaaaaaattacccatttcttgaacatatcctatgattcaaagaaaaacatgcaaagtcgtacatgcacatagaattgacccaaaatattaaactataaatccgacgaaactaatcaacattaacaaattaacacaactaacaaattaacataaccaacaaaactaacataaaccaaagaacactcccncccatacttaaacaacacattgtcctcaat

SEQ ID NO: 230236 - DNA, 400 bp, Glycine max
  unsure (1)..(400): unsure at all n locations
actaagcttcttatgggacatccgatgggtgcattaaggcatggaatgtggatgcatatagagttgtctgtgacctcaacacaaccgaagcatttccaaggtatttcctaattatatattggcctaatatgttgaaggtccctgcacatatagtagtttttgtttttagtccctataattattttataacttgcaatgttcgttgtttttggtccctgtcgtgaacttgctgttaacatgttttacatctttgcaaatatatctgttttagttttatgtccctgcaaaatataacaattntttgtttatggttcctacacagatagcagtttttgtttttagtccctacttttaggtccctataaaatataaaggttgttgttttagtctctacttttat

SEQ ID NO: 230237 - DNA, 120 bp, Glycine max
gatacgcccttgaactaactgacggattactgggcttgcttgttgtaatcagctgtgcatctgaacaatgttgcccttgatgctgcgaagcatcctgaagcaaccttggctgactattct

SEQ ID NO: 230238 - DNA, 265 bp, Glycine max
  unsure (1)..(265): unsure at all n locations
agaaaagtatgggttgatcctctaggtaacttcatttcacgttcgtattacngactcatcaatatcagtaaagtatgtcgttgatgctcaacttcacattcattcagcgctcatattacggactcataacatcgaaaaagtattgcgttgattgctcaagtacattatttcacgctgatttacggactataacatcggaaagtatgcgttgatgctcaagtacatcattcacgttcgtttaggaccatcaactcataaagtatgc

SEQ ID NO: 230239 - DNA, 443 bp, Glycine max
  unsure (1)..(443): unsure at all n locations
taacaatcagtgtcatactattgatcaaaacanagcangtattaatatgcaatactagactcanaatatgcaacaaacactagacctaaatcagtgtcacagaaattggaagaaaatattntatccaagcacaaacttgaagccttattccatgtattgnggggaagttatggctggccatatgggtagaggtgtcatagaggagcaggtatggaggaagggaccttggactgctgaaggggacaagttgcttgttgagtatgtcaggttgcatggtgaaggcagatggaactctgttgctatgcttgcaagtaagaaacaccaaactntnttcactgttttgtttcttaatatatatgattggatttcacattataagtgcaatatagcanaaaacaactgaaattgtttcaacttctactggtcatagtggctacattcat

SEQ ID NO: 230240 - DNA, 468 bp, Glycine max
tacgacgaggagagtaattttctagtgtgcaatacaatactattactttgacttttagattaatatagagtcataggattatatgcatccttcatatcttatctccatttctttgtcagttgcattggaatacccgtcatcctcggtcatgagcaccacctacctgctccgagtgccgccacctccaccacgtcatagatctgagtgagtgcattaacatctacctcaccatatctgcgcttgcggcatcaccaccgacctcatcaatgccgcgctacccaaccaggtccctgtgcgtgggaccatctccgaccatgtaccctcatctgatgtgcacgcgctccagctccacagcatgctacaccgtcacacgcgactccaccagcaactgctcttctctgattgcgactgttaaatgttaatgacacccacgcatgcaccaaacttgttgttcagatctggaaccca

SEQ ID NO: 230241 - DNA, 462 bp, Glycine max
ctcgcacaagaagagatggccaagaggactacggatatactatttctaaacgcacggaaagagaaaatcacaatgagctgtattagagcactttgaagattatagaacagctcgctaagccgcaccagctcgctaagcgcaattccaacaattgggcctagcgcgaatgtctcacttaacacaattccaacccaaggagaaattgggtttagcataaatgtctagcatagcgcaattccaacccgagaaaaaattccgctcagcatgaatgccccgcttatcggaaaccttcagcgagaacttatgaaaactcctatttacttgtgtaacgggcttgagcttcatgtaaataagccttctaataagtgtctaaggggctattataggcttagttatctttttaagcctaatccaaaatactcaaaactcttagttgaagaactttttgattattgaaataac

SEQ ID NO: 230242 - DNA, 400 bp, Glycine max
  unsure (1)..(400): unsure at all n locations
tccagccatatggacgtaccttgaattaattcctatgatattccttttgagccatgcatccctttccttattttgaagctcactacaagccttaaatgaaaaaccatgatatcaccatatccttaaggaattttggagctntggaattgttgcgggaaaaagtgtggggggcttttgtttcattggataacttgatatgctggctaggcttcatgatgtatttagggccatacttgatgtacattgtatattggctaaatgttggacatgctgaatgaaatgttgcttctcagacgctatagagttaaaaaaagaaatcgaaaatgacaatgagtagcaataaagttgagtgaataagatcttaaatggcaaaagaatgatgagactcttggttctactc

SEQ ID NO: 230243 - DNA, 307 bp, Glycine max
  unsure (1)..(307): unsure at all n locations
ggagctaactttaattttcatgcacgaggaccttattctatgagcctgacttgcagcagactcctatccctcttccattgccacctagagcaattccgcacagaaagatggaagaagcggatataaagatcttggcgaccttcaggacagtataattgaacatacctgtgctggaagccacacgcaaagtccataatatgtcacgtttctcaaggagctatgcactctccaacggaggctcaaaggtggtggaaggattaccatgggctgaaacgtgntcgcattgatcggtagatttgttactcac

SEQ ID NO: 230244 - DNA, 466 bp, Glycine max
  unsure (1)..(466): unsure at all n locations
ntatatgttgatgtggatgtaagtgaacaaatatatcttatctctaaaacatgaggtggtaaataaaccatggaaagaaggatacaatgatcagacaacacatctagaggccttctaaagttaagaacactagaaggggttcaattaatcaaataaattgcagagcgcacagcctcaccccataaatgagataggacattaccatctatcaaaagtgatcttgtcacctctaatatatgtctatatttcctctcagccacttcattatgttgtggtgaataaggacatgttgtttgatgcaagattccattaaagttcatgaactctattaattcaatcttaaaatattcccctccattgtgtgatctaatgaccttaatatatgtgttaaattgtgtagctatcatatgatgaaaggaacgaaacacaacacacacatcactnttatgtgtaagcaaaacacccg

SEQ ID NO: 230245 - DNA, 390 bp, Glycine max
  unsure (1)..(390): unsure at all n locations
cgtggaagtggaggttgagccatgttctcagtataaaaattagtagtggaatgctcaaaatcacaatatttagaatcaccctcaaccgaatgttcagaatgctcaaaatgcacagaatgaccaggatgcacactatgcctaactaatctatgaaaagttctatctatttcaggatcaaagggttgtaaatcacctgtattgcccctagtcatgcactatatgcagcaaataatgtgtttctaacaagcacctaacaaggggttaaaactacaactatactcaaacgatatcaaaatgagctgaagttntgtgaggaacaccctataataatgaaaagatagcacaacattattcaaacaaaaattcanaggctaactatgaaaactacct

SEQ ID NO: 230246 - DNA, 443 bp, Glycine max
gtggaagaaagtgatgatgttcaagccctatatgttaattttgtaagagcccgggtagtcaaagagaagtttatgtccatagccatcacagtctgaagagagtatgatgaactaaaggacgctaatatggccatcgatgaacccttggaatgagaaaccaagaaggcccgaaaggaagaacacgtgccagcaaagtttcgaggggctctatagggcagcattagtaagctcaagctccgaagaggtgaaaggaatcatcacgggtcaaaggcatgatcttgaaggacgagctataggcttaccttaggtcgcaaagaaatttgtcccatcagttacaccagactgaatggattatgtgggccgccatcgatgagtgcaagagaagctaaatctatcgggactcaccagcaaggctagaggatgagtacgccagatatcagcat

SEQ ID NO: 230247 - DNA, 285 bp, Glycine max
  unsure (1)..(285): unsure at all n locations
gggaaaaacaccacaactaaacgcgccgcaagcatccatatcgcaccagagccaaaactagaacgatgggagagcaagaggagaccacaaaacacatgaaggccgacatgccgactcagaaagaacacagggcttccatgaaggagagcaagtggggaatgagcgcccgcatggagaaaaacgcgggcaccgctgccgcagatagagcggntgccgaaccacacccaacacgctgggaaacgcgcaccatactcctccaacacaatatgaccgggaagggacaca

SEQ ID NO: 230248 - DNA, 349 bp, Glycine max
tccacccacacaataggtcgaggcgtcacctctggcatcacctcgcatatataaagatcaaacttcgatgattatgatgaccaccaaatgaacccttatcctgtatgcatgcataacctctggcacctcgaaaagggacattaactgatattactataaataaccgtcacaatcaatgaggcttttataagtactgagacataacatatgactgcatacgagtaagattgcaccgcctcaacaggttcgacgcatgggctcattcactcgaaaaaatggttggccaacgactgacttctcatgataccgaaaaccctacagattctgcaacatcacctccagatgctgc

SEQ ID NO: 230249 - DNA, 175 bp, Glycine max
gggaggaatgaccctattacaaagtcaacctcccgctgatcgaggccgcacccgaatcaaataaacatgagaatgcagcaactaggaagcgatcctagagccggtcccaacgagcagtgacaagccaaaggggcataatatacttgcagcaacagtaacgatggggggagggggg

SEQ ID NO: 230250 - DNA, 373 bp, Glycine max
attcaaatatcaaatcatatatagatttttatatttaagaaccaccatcgtggtataacaactaatttaattaaaagttgcgcttggaaaattctaactgatggaatctttatataatatataataatttaactcttaaaacttgacattttcattaagctcaccaaaccttaagtcctccatttgagatcattccatttgctgtgactttctaggaatctaatattgcctcgaaaagaacaaacgataaatgctgaagacaaatgcttatagtcttatcataataatcaatagccattaactaactaatttgaatgatggcgacttgtgagaaaacgaatcgactgtaccggtacttgaatgatacgcaaac

SEQ ID NO: 230251 - DNA, 458 bp, Glycine max
  unsure (1)..(458): unsure at all n locations
tctaatagntgaagtaccacaatatgtttcagcaaagtgtttatgattggggctctgcagactccaactaagcgtgatagttctcgggctgatggaatataatattgctgcaatattataagcttgtaagatgttatatatcatcatgtaatattgtataatggtgtcaattttgcaaaatatgtttggttcataagctgtgctgttaaggctattgacagagaaggatgcaagtaatgcaagagatatatgtcaccttattatcagtagttacatggtcagattaatacctgatacaagatgctgattgctatcacaggtataaagacaatgaacacctgccatgcagcttgagacatcactcctataattcccagaagctggatcaaaatgaaggcaaacgatgcaatttgataatgaatgtctgtatccaatgcactctgatcagttgaagcctg

SEQ ID NO: 230252 - DNA, 407 bp, Glycine max
  unsure (1)..(407): unsure at all n locations
ttgatctaccaccatcgccgccaccatcattntaagttttcttttattctaatattactagtactttgagtgccagccgtgtatttggctatattattatgacatttgaacaatttagtatttctttatttgcatggtgtgtttgaacaattatgaattatgttatgtgactatgcgatctttctatatattcgattgggacatgtttcttgcttcatgactagtttatatttctccatgatcgatgtgtgaatgattagtcgtatttggatgttacatacttgtcacgcactntggcttnttggtgatgccaaagggggagagaaatagggattaaatcaagaactctcatgagtaattaacttaatggtaagtgaagcatatattcagaaacaaagggggagaat

SEQ ID NO: 230253 - DNA, 371 bp, Glycine max
gctatagaaggcactaccctatggagtcgacaagaacttctttatactgatcaacactggcacagcggccaaagatgcatgggagatccgcgaaatcactcatgaatgaacctccaaagtgaacgattgccagcatggcaactcataggctacaaaattcgaaaatctgaacatgaacgaagaagagtgtatgcatgacaagcacatgacacattctggaaattgccaatgcctgcactgccttgggagagaggataacaaatgaaaagctggtgagaaagatcctcagatccgtgcccgaaagatatgcatgaaagtcactgccgtagaggacgctcaagacatttgcaaccagagagaagatgaactca

SEQ ID NO: 230254 - DNA, 181 bp, Glycine max
catactcttatacatttattatatacaacaaaagtaaaaagaattaactaaaaaacacatatactaattaaataatatataaatatatatatatatatatctatatatatatagatatataatatatatatgaatatattaattagagttgggtcggatccgcactatatacatatattat

SEQ ID NO: 230255 - DNA, 450 bp, Glycine max
  unsure (1)..(450): unsure at all n locations
accttaaaactccgctctgggagattgcatgattgtagagatgttgttgtcattgtcagagcacttttaactnaaggcaaaccatgtcttttcagggaggggattgtaccacaaaaagagcaaagtttgatcaagacaccgaaggaaaggtcaatgatgaaacatatcctaatgagaggtgcggaaaagatcaggaacaccatgtagattccattgttccttcagtgcctagaactgagaagtcaggttatgatcagcttccaaaagaattaaatgaaatgaagattggagatgacaaaggcaaatacaacaatgagaaggtatatattgcgattcattttcttgttttcttttgatgtttggtgtagtcgtcaccgcgatacttctatatatgtaaaatcatctatgtatccattgcagagtagcatactagttagttcttgtaaagct

SEQ ID NO: 230256 - DNA, 435 bp, Glycine max
cgaggtacttacccgttgaagatcgttgaactattatgaacgactgacgaacgtcgaagaacggttgaaacctttgcgaaatacctcacggaaaacgctacggaaacgcttcgaaagcgcctcggcttaaatcttcttcacggaaacaatatttccaagcaaattcgaaagagagagaagtgcctaaggggcttaacccttttcttctacactgcctcccctatatatagcaaaataggggaggaggttgccgcccagctcgcccaagcgagccaggttgcttcctccagaagcaacaggcttctggacgaatattctagagggcccaagtgggcctgggtgctattagcacccgcacctttaactagctcacccacctctgcttctttggtgaatattcttcgaaagttcggaaactacgaatctgcacgatac

SEQ ID NO: 230257 - DNA, 423 bp, Glycine max
  unsure (1)..(423): unsure at all n locations
ttccatcatacacaaccaacacttatttcaatccttgcactttatcacacatcatacaacaatgaacccacaaagttgaatccacaggacattttacgcttgtaatggggttaggctgccaacaaaacatggtctttctaagactcaaaagcttaagctctcggagagcatacatccaaagataaaccctcacctttttcattcattcttaacccatactctccctttattaggcacttagctttcattattntgcagcatacacactcattcaagttatttgcacttacagttctttaacacaaaanacattatatacatacacagcgcgctgatactattttctttgaccatgtcaattcttacccaaagcctcctccaaataggggacaaattcaccttgatantacctcacccacatat

SEQ ID NO: 230258 - DNA, 392 bp, Glycine max
aatctacgtatctaacacccttcttttactggatactcaaggatagagaagtgacaatgagaatggggtaattctggaacaaactctcatcccacacacagtcataacattaactcaaactttctcaaactggttgtacaactaaaactccaccgaatcaaaattagacccctcaacacccaatttaccctataaatggctcttgttctcactatggtcactcactttcctcaattgctcaacccaagctttcccacaagtcctaaatgacatttcaaactacgaataactcactttaaccgcaattaccctaaaccaaattcagtttcaatccttaagcatccactttccactatacattacatccactttaaccctagaaactcacctca

SEQ ID NO: 230259 - DNA, 213 bp, Glycine max
tatcgacgcaacactaatagcatctgtgaatgctatgacggctagcatccatggcaaacaatagctaaccaacagacacttcttcttcttcttctctgactcgacaccagccaccggcgacacaccatatccagaccagggagagcgagaatggagacacagggacagcgcggaacgtcgctggcaccccccatctcgatccagaagccgaca

SEQ ID NO: 230260 - DNA, 394 bp, Glycine max
aacacaagcccgaggacagagaacaagggctagaaggagaagagagctattactatacgtgacagaggggacaccccaacccacttgggtcgctccaacatacgcttcttcgtacctacccaactgcgcttgcgccgaagagggagtgaccgacgacaccgcgtgaaccgcccacggccgccctctaggaagccgagctagaactgcagtggcattgccgctggcagagatcagtgcacagaggtcctcgaagtggtgacgacagaaccatgcgcgcaaactgacaacacggacacacgccctggcatgtgacaaccacagaaggcatatctactgctgaccacacaaacatggatcaccaaaaccctccgccacgtggaacttgaatactact

SEQ ID NO: 230261 - DNA, 452 bp, Glycine max
tgatctatacttacattggtgtttgcatttaagggaggtatgtattgccattcttgctttaagagtagtgtcccactggttaaactaactttccacattgttgcctttgcaggaaatggccccgaagaagctagcctcaaagaggtccacgaaggacaaggcagccgaaggaactagttccgctccggagtatgacagtcaccgctttaggagcgctgtacaccagcagcgctttgaggacattaagggatggtcatttctccgggagccacgcgttcagctcatggacgacgagtatactgatttccaggaggaaatagggcgccggcggtgggcaccactggttactcctatggccaagtttgatccagaaatagtccttgatgtttatgccaatgcttggccaacagaggaaggcgtgcgtgacatgagatcctgtgtaacgggacagt

SEQ ID NO: 230262 - DNA, 262 bp, Glycine max
  unsure (1)..(262): unsure at all n locations
cgcattgagagaataggacttcacaacacatgtatggttcttgttatattaagaanatggatacctctcctccctagaaagtctcacgcacgacgacaaaaaatgacggtcccaaaactctctatttgcggaagaaacgatgatctaatgggctcatgctaccgataacctcacttgacaagcatcaaagaccctttgacgggcatggctaacatgcataacgtcggcctcagaggctggctttgctnttgacattttatcc

SEQ ID NO: 230263 - DNA, 359 bp, Glycine max
  unsure (1)..(359): unsure at all n locations
ttatccacttcattaggtgatggcaataggtcacagcccacattattctaacctaacgtcgcgtaagagaacaaagaaagcatgggatatgtgtactattaaactctcacaatgaatgatctatntttgctgctttgtataaatacttgtcaagatcacacgggccacaacagtgagatcgcaatcatgatctacctttatgtatgcaccacaccacacgtgctagagaaaagcatttctatgatgctgaacacgggtgaagagcaagcagatggactcaacccacccactattctcttatgcttaactctttaaaatacagactaacagcctatacatgataattatttttcgacaaa

SEQ ID NO: 230264 - DNA, 150 bp, Glycine max
cctattagtgggcaatggcacaccaaaaatggcgtgacactaaccccacacaaaagaagctgaaacgggaacccctaaaagaagatacacctggataaacacccaatagggaccgcaaaaaaaacccttggataaaaactaaaggccctc

SEQ ID NO: 230265 - DNA, 449 bp, Glycine max
gctatataagctgaaccattttatcaataaacacatgttgttttatattcagaaacatagagcctatcgtctttatcttagtgagagagactctcctaaactcttgagcgagtcaagaacaccctggctgtatcaaaggacattcacaacctttgtgtgatgccctcgctggaaagagtgaatctttccttcctatcatctccacccttgttctttcacaccacaattccagataatccacctctgcccaaaattatctcgtgaccataactcccattttacacactcaaattaagtgattcttaagcctaaagtgaatttcaaaacgagaccttgcacctcgttatggaatcacctcatttggagccctgcagcttacgccattagccattttatatatctggccagccaccacttaacgctacgtgaaccatcccagtcatccatgt

SEQ ID NO: 230266 - DNA, 448 bp, Glycine max
  unsure (1)..(448): unsure at all n locations
taatgctgataagcagccattgaagatcctgaggaattttattattcctctagcttagacatggagcgttctttctttntgtaacctcattcctacctcccacacatttgatgtcaccttggacagagccaaattgatttatggtataattatgaagatggatatgaacttctcccaccagatctctctaattgcacaacatgatacatccagacttggattccctgccttgatcacaactctatgcaaggctagaggagtccagtcagactctagatccttggagaacttgagccctacaattaacttggaatatattaagaagaactgtcggaatcttgatgatccaacagtgacatttagagggccaaggaaggccataggtaagagatttgaggtccccactacttcagtagcaccagagacatcaactccttcttctaccaca

SEQ ID NO: 230267 - DNA, 424 bp, Glycine max
tgtctcctttccttgtgagagactttggcgcgcatagtttcaagattatataaagagtccatatggcgtgggaaagcccgttaaggaaagattaataacttatgggcatttgtaatggcatcatcggcggttatcatgaatggctgaaaattcatacacgagggttagattggctctccaagctaaagattatcaacgaagagaacttcgaagctccggaagaggatgaagaagtccgagctctgataactgaactaggaaatgcaagacttgccaaagaaaaattcaagttggtcactacagacgtccggaaagagtgtgctgggttacgagaagaaaatgcagctaccgcaagagcccttgaacaagaaaccaagagggctcgcaaggaagaccatggcgtgacaaatttgtggagctttgt

SEQ ID NO: 230268 - DNA, 446 bp, Glycine max
  unsure (1)..(446): unsure at all n locations
aactttaatagatagtagagacagaagccttattacttcttaggaacanatgactagttttcctttaaatgactcaccaagatttccacaagctccacaaacttcttacaaagggaaggcaaaaaccccattcgaaaatctgcaacaagtgtattcttagagatgctgttttcaacttccttaatgatgacagagattgccctgttccattacaatgaattcagaactaacgatgatgactgatgacataattntaatgaaatgtctataacttaattttattcattaattaagagaaacaacacaggcagctgacacaaaatttgggtgaccattaaaatgcagtatgcaattntgagttaatgaagttaaccatatattacctttatttattttgagttacagaatccagagtcctgacagacatttacaatataaatagatac

SEQ ID NO: 230269 - DNA, 387 bp, Glycine max
  unsure (1)..(387): unsure at all n locations
gagtggaatattgattagaatgcttattttttctttcagnatgggattatttcccttattacttattatatactttccttatgttgtaaacctccttcattataaataagagtattctgtgtggtctaataagacaacacaacactaacactgttatatgtactttaggttcgagaattgatatatacctaatataatcaattttgcttatgtacttctagtacaacaatattcggcctgctaagtatggctagtaaactctactgttaacttgtaaattcatccagttatgagtcgacacctacacatcgagctgaatcacatgtggaatgcttattggngaatttacataactcgggtggatcattcaactcactcaaaccaagt

SEQ ID NO: 230270 - DNA, 157 bp, Glycine max
cggcagccaccggggcaaaattttacacgcacgcaaacggcaaaccgaaacccacgaacgacgaccgcaaagcgccgtacagcccacgacaaagccacaaacaagaaagaggcaaggaaaccacctaccacccccacaacaaaagggaagggcgcac

SEQ ID NO: 230271 - DNA, 114 bp, Glycine max
gacacacgaccccgagagacaggcgaagaagacaccaaaaaaacaacggacaagagacagcgcaaaagaccaacgcaacgaaaaggcgcaacaggcaagcaaaaaaaaccccaa

SEQ ID NO: 230272 - DNA, 456 bp, Glycine max
  unsure (1)..(456): unsure at all n locations
tctgatttggaccaacanatataagaaaataaagaatgtgttgttggaatgcagcgctcttgtaatgagcgaatgctactaacaagaacagttaaggatttgtgtccttaattgttcgtgttgcatttcctctcatatattcatggtacctcaaaaaattccgactggtcttgtgtaatttgggctagtgggtttgtttaatacttactgggcttgatgtagtctgggcttctataacataacgcggaaccaattttaaaatactttttcatagatcttttttttaacccaagatatcttcaactgaaactcaatggttaatttttcaagatattgagaggtatttaagaagatattcttccttactcatacttgagaatcaaacctcaaactacatacataaagaacaaggttatgtgtctcacggtacaccatgttggttgccttttgagcttt

SEQ ID NO: 230273 - DNA, 417 bp, Glycine max
  unsure (1)..(417): unsure at all n locations
tcctatgtcaaatcanatactgtacaaaactaattatgattattcggcatggaaaagtacaaagaagcatcaactccaatgacaacatcaacttatcttgacttagatgagaaaggtaaatcagttgatgagtcaaggtgttgcaacctacccttcggcaggagggtgacgcggggctcacaagttcgtcttccaagaaagaaaaatgcacggagtcgccaccaacgtttatatgaggaatacgtcagaaaaactggaaaaggtgtggtctacgaaatttaagtgtgaaaggttcgggagttgtttttacgcacggggaatgtattagcaccccacgcgtccgtctcaaggaactacaagcttatatcaagtgtgcaaatatgacttcaacatgttgtattttcccttctttatgtc

SEQ ID NO: 230274 - DNA, 442 bp, Glycine max
ttggacgctggaatcatttatcctatctccgcagccttgtttgagtcccgtccaggtagtcccgaagaagaccggcttcacagtgatcagaaatgagaatgaggagcttattcctactcgggtgcagaacagttggagagtctgcattgactataagaggctgaaccaggttaccaaaaaggaccattttcccctgccattcattgaccagatgcttgaacgcctggcaggtaaatcccactactgtttccttgatgggttttctggctatatgcaaattattattgctcctgaggattaggaaaagaccacattcacctgccccttcggacttttgctataggaggatcctttcggcctgtgcaatgccctggtacctttcagcgtgcatattagtttttcatgatttttacaaattgctaagggttatggtgattcctga

SEQ ID NO: 230275 - DNA, 250 bp, Glycine max
gcacctagactacgcaactgggttaataaaaagaagacagactcatctataatcatagggataccgcgcacctcagaaatcaaagttccatcttgaatcttcaaatttgagtaaaagactcgtacaagttcatgataacaaggtagcttcaaagacataaagggaatcaacctactgctttgaaacaattgataacaaccaaaatgtttcaccataatacaaattataagtctacgtactttgggatcaa

SEQ ID NO: 230276 - DNA, 448 bp, Glycine max
cctgcatggatttctatggcatatctttcttatatattgtaagacaaccaatatgcacactacaaagacacgcatttgtaaaatggtggacacaatttgactcatccaaagcggattcagaacaagtaaaactatggttccaatcccatccagaagtcctcaaagcagctgatccagagacttctgtgtttttgaaccaaatgtctcatctggcagcatttttagcaggatcgacatcaaaggaggtcttagctaataatctgaaggaagttctacaaatgttacaacatgaagaagaagcttcatcctcaaagaaagatgaaacaatttctgctgaagaagacgaagaagatccttttaccataacgaagatgaatgttttggatctgtatagataaatctaatttcggtcacacaaccgtttgtttgtattgatgtgtaataatgc

SEQ ID NO: 230277 - DNA, 454 bp, Glycine max
  unsure (1)..(454): unsure at all n locations
tattaganaaactttntaacaatttaacctaagtcttgtatttccaattggntgacttgttcatgtttaagactcttcaaaatgtctattaactagcacctaagtcttattcaaaaaaaaaaaaagacctgctaaatctaatttaaaaaatataaaaaaattaacaaacaaggtaaaataaacgttttatagaaaataaataattagctaaacttctattcttaaagaataggtttaaacacagctgaaattaacaagtataattataagcatatatttattttcttttcaatcttatcttagaaaataatatatgcactaataatatagtttttttaatattgtcatccaattacatattgatatatatgataatattttaacctcgagttcataggaattaatatggtcgccatatgagatattataagcacatagatgaatttaaggaaag

SEQ ID NO: 230278 - DNA, 373 bp, Glycine max
gaacttcctgaatgcccattggacctgattgcttattgtacccctctgattactaaatacacactctgcctttttttgcagattctttgtccgatacgttacggtccattacaaatttcgtatcaatacatgttatttttccgaaatgtacggaaccttacggattacacatccatccctcttttggctttcagaatgatacagaacttcacaaatagtgcagcaacgttacctttgaacttcgacatgttacagaacctcacggattgtgcaacaatgcttccttttgactctccggatgttatggaacatcacgcattgcttaacatggatgcaaggaccttcatgtgatatataatggtccatctcaaca

SEQ ID NO: 230279 - DNA, 411 bp, Glycine max
  unsure (1)..(411): unsure at all n locations
acttagaanactcacgctcggcatcctcctatgtctgtgctccaaacgacagacattatttattcttcggacacgtgactcttgccctcatattaacttttctcactttcatccttcctcttatttctgatctgcctgaaaaaaataagtttaatagaagaacatgagacgagaacaaagaaacacacttgccacacaccatatgtaggatgaaaaccacaaaatccctttacacgcatgtctattctaaaccttgagaaatcattatgcgcgccaagactatcatgattgcaacaaatctccataagacttgtaattaagtgattttaatcctgcatgcacacgggcctaaggtacaaccatattacattttcacatgtgcactaatccacacatataaatgctaatctc

SEQ ID NO: 230280 - DNA, 423 bp, Glycine max
tatctacgagagcctatgggtgatttcccgccacggaggaccgaagaaaaccgaccacaccgcgaaaagaaatgacaaagaggagcagattcctactaaggagcagaacaagccggcgagtccgcatcgactataggaggctgaaccaggctaccaagaaggaccatcgtcccctaccaaacaaagaccaaacgcatgaatgcctggcaaggaaatagcactacagcagccgtgatggctagtctgggataagcaaatcactagtgcgcctgaagatcaagaaaagaccacattcaccgcgcccctaggaactttagcctaatagaggaagccaatcagcctgcgcaaagtcccagaaccttccacggcgcatgaaagaaaattaaggacgcttataacatagctaaacgcgtcatgaatgaa

SEQ ID NO: 230281 - DNA, 428 bp, Glycine max
  unsure (1)..(428): unsure at all n locations
ctctcaaatacttacataagtatgtatgccataagatatttgtaaataaaatcttccaaatgcactaatttcaatggtttgctgttgtgctttctcagtacattgaaggtccaactttctgacaccacactgggaactataagtcccatgaagtcccatcaggcaccataagtgaaatgtaaactccaatgtgagtttttcagctattccttgacccttgtgtgggattgggattgaatttccactctccttggacatgatgcatggcttatgattctctgtgtagttatgctcatcacctgactctgcttctatttcaccactctttgcagctatatcacccttcagctctgaacacctttgaacagatagtatatagtgccaaagganagcaaattgtagtttttcttgactacgatggaactctc

SEQ ID NO: 230282 - DNA, 395 bp, Glycine max
atagaccacaggctcttggccaggtgcatatgccaatttctgattcatggcaagcgcgattactaggtggaccaaggcatcaagagttacctcaagctttttattttcaccagatgataatgaatttatggccaccttatggactcctctaaagacaatagcatcatttcttgcactgaatcgttgcggatttgtaagccatcctctcaatcaaattccttgcactatgcatgcatggattaatagcaacaaatacagagcaattggtgaagaggacaaattaatcagaattcattagtaataaaaaacctcaaagagagctgtgcttgatcctcaagatgaaacaacgctggagacttagcacttcattaatcaacagataacgaaattgcaat

SEQ ID NO: 230283 - DNA, 426 bp, Glycine max
  unsure (1)..(426): unsure at all n locations
tgtagggttatggtgtacccgtcatatgaggcactatgttgtgatcgggcgatggngcaaatcaactctcccacattcacaaatcaaacatgaacccaccatccccagttgcccaccttcaactaagctcacgtacccccacgtagcccttatcctcgttcctctcagcatcgggtccccatcaaccgctccaagcttccacaacatccaagcaattcaatatccaaacatcatgaactatcctaaaccaagaaaacagggcagaggcagaaaactttgcccaaaacacattccaataccacagctttccctactcaaataccccagtaacattctcttcgttccaattcgttaaccgttggatcgactcgaaaagtgtactggaggtccctagtacataagtgtacattttgaccgtagggatct

SEQ ID NO: 230284 - DNA, 368 bp, Glycine max
attctttatcgtttctccacctacaaccaattatttggtcatcctgacgactcacaaagcacacgatttgaaccatcaaacagaccagagaataacttatcctcgatagagagcacacctataacatagaacactgtacaaagcatatgctcatacacgtctccttttcacaccttattattagggatattcatgacaaattcatccgacccagcatggccggtcagtcttcgagtaacaacgccagaacccccagatataccctggtacagaaacaaggcatcttatatcatcatactatgactagcatcacatcaacatcgatgataagtcaacaaaatcctaaccgcacttaattcataaaaaaa

SEQ ID NO: 230285 - DNA, 348 bp, Glycine max
cccagatcgcccatgcgagcacggatgctttctttttatcaacagccttccggaagaatcatctggagggcccaattgggcctgtttgctatttgcacacccatttttactaaatacaccctctgccttttttttgtgaatctttttcgcagagttaccgaaacttacgaatttcgtaacgatacatgttttctttccggaatgtaacggaaccttgtggatgacataaacatccccttttttacttacggaatgctactgaacctccttaattgtgcaaccatgcttccatttgatttccggtgtgtcacggcaccttacggattgtgcatcaatactttcttcgtc

SEQ ID NO: 230286 - DNA, 436 bp, Glycine max
  unsure (1)..(436): unsure at all n locations
tgtatgagaattaatgtaggccctgctntcctaatttgttgtgatgcaaatgtcgaatgttgatagacatggcttggtaccttgttgggtacttgcgatcaacatgtcaagaaacgagatgtttagagaaggttgaaacttcaaagggaaaaacttgttataagtacaaagacaactaagagctgcttaaagaagcaaagctaatgaaacaagatatagagactcatccctcttttcctctctgtaatctatctattatcaagaaagaaaacttagagtgcaagcactagtaggttacaaacagacacaactttatgcatcttggattcataatacaacaaccagttataaattattgtgcgctcaataataaacaaaaataaacaagagcaccaagatttattttcttctccacgatggtcactgaattgttaat

SEQ ID NO: 230287 - DNA, 441 bp, Glycine max
  unsure (1)..(441): unsure at all n locations
gtagttaatgtggntagctaacagcctctggtgcatttagttattccattatctcctactagatatgaagtgatcttttactgtcagcccttcaatgcatttcttgtaataaattgattacacgggaaagcttcgtctcaaaatttacattatcagagcttcctatacgtttcttgactagtttgatgactgctttttcttttgtaatattaaggctatatgcttttggctgtgcttctttcatactttctcgaaagcagtattttcataatttggctatatcactccttcagctatgttttgatcattctgagggaaatatattctgggatgtacgtgatttttccagctctagatatacgtgcgaagaatgtagcacagacatattctctcgagcacacaggggaaagcaacccttttgaccatctatttgagctttta

SEQ ID NO: 230288 - DNA, 307 bp, Glycine max
gccattacacatggaccttacgttccctctataatagccggacgtgcaacaagagataaacctacagcagactggactgaggaagaaagaggattattacatctaattaaaggccaaaaatattattacatctgcccctagaatagacgaatactctagggtttcaaattgctaaagtgctaatgatatgtgcgatacactacacagtacacatgaaggcacaacatatgttacaaatataggataaacactctaactcctgactatgaacctttaggatgaatataatgatagacacacaacacgc

SEQ ID NO: 230289 - DNA, 381 bp, Glycine max
ggacattagaaacacaccttgagcgagatagcgtggaagagtcagtctttctacttttattctgtgaccacacagtggtacctggagatatgtcgcgggggtcatgacaccttggggatgtcacgcggggtgctattgcccaaaaccaaacttgaccaatcccgacccaacccgggcatagtcagactatgagaacctattacgtacctaaacaggcgagctcctggcattcaaccgattaaagaacaaagacctacaagcatggaggcttgtgtgggggctggccacctctgattcttgagtgatatttcgaatatggcctctggtactcgattaccaagggtgtgtaatcgactacaaggcttacaaatgaagacagga

SEQ ID NO: 230290 - DNA, 383 bp, Glycine max
attacactactaacatatgaacaacttcttgttttattaaattatcggcgtaaatgtacatcaatatagatataatatatatacaatattaacaatgttgctaatggcggatagccataaactcactataaaaatatggcggatgacctaacaaaaaatgacggatgtcatggcgaacataaaagaaatacatatttataaagtcactgaaattgacaaagacaatggattgcattccataaactaaaaatgtttcatgagatcatacaataatcaattatcaatacctaataatccattaaagagttcaaactaataatatgattacaagtaaaacgcgtgtcacatatcaaaaggataaataagccgcaacaaaaaaaggg

SEQ ID NO: 230291 - DNA, 468 bp, Glycine max
tagcttcaacgaatgtcttcacatataatcatcacacagcagattattatcatatctacccatcatatctcccaaaaccccatacccacgaaaatcaaaggagaaagaagtccacccaaacctgaaatttcgaagtcccactcgtagccacgcacttcacgacttcaaaaatgccctcctttcgcgatttggagcacaaatgagcaccataggttggagctttgttggggcttcaatggagaatggaggagaaggaaaaagctacgtcaggaagagggagagctgtctgaaaagtgtgggggctgagtgaaaagagagaaaagcattttggttttaaataaaaggggttacacactatctattattttatttaagcactgccacatgtctccattagagtggagcagaaagggcccactctctctttcgatagcgacctatactcagccacaagagtgagacaaatct

SEQ ID NO: 230292 - DNA, 471 bp, Glycine max
  unsure (1)..(471): unsure at all n locations
cttcaaacaacctccaggtgcaaaatcagcatctaaagatacacctatttacatccatcacaaacatgtgggggagggtgtcttcctaatgatgccacttgcaggatcaaatcccgatatatctttcggcggaagagcattgttgaatataacgagctgttttggatgcaacaatttgtccctctcttcttcctaatgctgccgcctaattgatgaacatgaaaaatgacagaccatctgcaatctggtgagaaaggcaagctcccgatgcaataccgccgcaatcaaaaacattaagctgaacaccaaatgtgatattggtgatatcatctagtagaaatggaaccaaatggttgagttctcctggaactggtttgtgaataacgacgacaactntgcacttcacttttgcttctaagtangggataccctcgtcgttgcagactatgaaagaactggtcccattgactc

SEQ ID NO: 230293 - DNA, 463 bp, Glycine max
  unsure (1)..(463): unsure at all n locations
gaccttanaaactccacttgtgctatataatctagatggctacaatttatgttatgctagcacggctttaaatttcttcaataaaagtgaagctgcccttatccttatttagatattgaaaaatatgcggagatgatatggtgctggtgttgtgaaacttggttttgaaaggagcgaaggtgcatcttggttgagacttttgaggatattagtctattggaaggaggtgttttcccctcagtaaaccattttatttcctattctttttcttttgtcataaaacgtgaatttagttgtcatatctgcttatgctgaagccaatgtcctaccaccttcatcttatacagctgggatcaccatatgccattggcttatgtggtctatgactactttcctttggggtattgatgctaccagccacaggataggtaatttatgtgtgtgtggaatgattcccacccag

SEQ ID NO: 230294 - DNA, 446 bp, Glycine max
  unsure (1)..(446): unsure at all n locations
ngaagaagcaagtgagagatgcatcattattggctatatttctgtgtcaaagggctatatactctacaacttgtagaccacgaaagtgatcattagccgaggtgttgttctttatgaaaaagccttttggaattggcaaaacgataatgttggggagaaaatagttccaacagtacttttaaagaaaagtccaacctcatcaaaaaatgagcaacaaattccgagcacaccatcaccaagctctagttctttatctccaagctcaacttcaataaaaatgaggagtttgagtgatatttataccacgcgcaattattgtgttgtggaaccaaacaattttgaagaagcaattaacgaagatgcttggtggaaggcaatgcacgaggaaattggtctacaaggtgaagcatattctagatggttcaatccataagaacaaagcaaga

SEQ ID NO: 230295 - DNA, 455 bp, Glycine max
  unsure (1)..(455): unsure at all n locations
ctaaatcaaaagcgatatgncttgcatatgcaatttgtatactagaatcgggggtacataaaagcagattgctggttgctctatatgttgggtttgtttgaagatttttttaatgtattgactgaggatgaaagattaacttatattcaggcagatcgatcacgtgcctctctatggaatttaagttacttgaataaaaatatcttgtaagcattattccaaatttactaatgcaaaaagagacgtgtatgggacgtgcgcatgaatgtgtcaagacgaagataccagtctttcaggtgcacttagtcaatctcacatatattattacaacatctgatgaaacacacaaaaaatcttatacttctcagtgtaaattccctttacttttttccattcaaattttaatgtagaaatatttttctattggtaaaaataaacaaaaatccgttcctcta

SEQ ID NO: 230296 - DNA, 427 bp, Glycine max
tatgctgctattgacaatactcattatggatgtttaatgagaactacttatggtcttcatgtgcatgtgatctggctagatatgttcttggtagcataccacttaacataatccatatgtcttggcagaggctaagttttttaaaccaaggtttatctgagcccgaagccagcataatcgaagacatggaaactatatccaagcgacttgaagagcttgattgatgtggcaaagtgactctaaagagtaatcttcgggaaattgcctactctgatctaaattctatgtgtgttcctctagaaaaggtcaaaacaaaaagtgctcaaaagaaacatatggcccaacaacaaagaacgaagcatgatccgccttactgggaatatgtgaatgcattacattctgatcaaaatagaaattcttcagtgaa

SEQ ID NO: 230297 - DNA, 451 bp, Glycine max
  unsure (1)..(451): unsure at all n locations
tggtggctttactatatatattntttcttttagttaaccctgttcaaacatattngaatgaatntaaattgtgattctggatgttggtgtgtttgggtggccttggtcacaagatgttttattaagtgtttatgtaatgcaaggttggtcagtttggttctgcactaatgtatgattactatgtggaatatgcttaaagttgaagattttttaaaaatctctgcttttttcttgtatatgtgtaatcaggagagcccaagaggggtcttgtattgtaagtaactggccatgctaagttttttaataaattgtgttaaacacttgttgcagcaatcaagagttagatcattcatttcaatattcttagattntgtttgctgtttaccaaatctgntatgtgggtaatgaattataatctactatcgcttattgctggtggccatttcttcta

SEQ ID NO: 230298 - DNA, 467 bp, Glycine max
  unsure (1)..(467): unsure at all n locations
agctntgaatatgtgaggaggaaaacttttcactcacttgcttagttttatttcattcaaataacatatatatatacaaataggagagagacagcttgacaagctttgacaagacagtacacactgctgttttctacaacaagataaaatagggaaatctactctaaagatacatctaataatacccataattataacatgtcccttattaaccgccaagcgaataccgttatcttgctaggaattctaatcttccataattccttacaccattcctcttgccgacctcctgtaatagtatccaaaatcagattatatgcgctgcttgtcgaataatttcctgattgatcacctaaccactcccattgatctgatccttgctgctgaatgttcatgccttcgatctcccttatgaaatggatggctgactcgatgtcattatcaaacagcgatcttctccacataaa

SEQ ID NO: 230299 - DNA, 379 bp, Glycine max
  unsure (1)..(379): unsure at all n locations
tctaagaccactacacgacagatggcagggtacctgactctattatatggtaaatttgtggttttaaatatgttacgttcgattatgagttaaacatgtttttatgttatgttaacctctctnttttgtagtgctggatctatgagcactttcctagtgtgcatcagtgcgtcacagatgatgcataccaggagacgtccccatgtgtttcccggtggctgacgtcnnaagtccttatgaagggaatcacaggagcaccataccgggcactttgtgatgctatgaccgtcatagatatgtcttggttaccttacactgaccatcggggggttagggccttcgacctgatttcatcattctaaggtcagttgagatgggt

SEQ ID NO: 230300 - DNA, 466 bp, Glycine max
  unsure (1)..(466): unsure at all n locations
agcttgaatatatgcagtgtgtgtcaatatacatgttggagattgtataatctatgacatccaacccagttgagagagaaaaagcatgaccagtcaggtacattaatcaaaataaaaagagagtgaaaaatatctaaggaaatgagagggggaaaatctagaaccacactggatattgacaaaggaaaaatctagaaccgtaggaaacattgatcactaacttatttttttaagagaaacttggaaagataaaataatttaaaaacattacatgtttcggcaaatcatctcttaaaccaagagcaaagaaagaaagaaagaagaaagtcggtaattagatgaatctggaaccattctaaccctcgattctcgaaactactcacttactctgatcatgttgctgtgaaactcttttgaacccttttcccttntaataataatcttnttttgttctgcccaaacatgt

SEQ ID NO: 230301 - DNA, 443 bp, Glycine max
  unsure (1)..(443): unsure at all n locations
acaacatatttcttaaaccatcggatcaatgagagcnactcatgggtgtggagagtcaaccttcatgggcttcctgtaggaattatagtataacatcatctgaaatgtagctacatataggttcaaacaatgtaactaaataaattagtagtgagtacattataattgtaggaaaatggttagtatatagatattatatgtaccctaacaggttttttaaaacctccttgcaaactacactcgtggtagaggtcaagctttttttgtctttatcatgtattaaaacctttaatccattctttgatttgactctcgatagtgcaacatataattgaccatgactaaacaatggggtttatgcaagtaaagttcaacactatatcatgactggcctggagacttattaattgtcattgcataagagagcattattggaaatagtc

SEQ ID NO: 230302 - DNA, 475 bp, Glycine max
  unsure (1)..(475): unsure at all n locations
cctgcngcatgcaagcttagctcacccaggcgagtntggttgcttccaccataagcaacttatcttcaaaaatgttctggaagggtctagatttaaaaattgctatttactcccccgttttttacctaatacactccttttgtgtttttctgtcgatttctttctgaaacgtcgcagaactttacggattcaatggtgatgggcgttaagctttctgaagtgatcgattgatgtccgtatgccaacaaacaattgtctccggaaaaaatttgggcttgatagtccgtttacaccctctctactttgctaaatacacccacattttcgtgtttttggcaggtttctttccgaaacatcctgtaactttatggattccacgacgatggtggtttaatgttttgaagtagtcaaacaaggtctacataccgacaaacaatggtcctcagacgaaattagggtatgatagtgacccctc

SEQ ID NO: 230303 - DNA, 476 bp, Glycine max
  unsure (1)..(476): unsure at all n locations
caacatccaaacatcatgaactatcaattaccaagataacagggcagaggcagaaaactctgcccaaaacacaaaccaataccataactttccttactcaaataccccagtaacattctcttcgttccaattcgtttaccgttggatcgactcgaaaattttactggaggtccctagtacataagtgtacantttgaccgttgggatctgctagaaaatatccgtaaccgaatatatacaaccctttccacaaccagccatgcataagcattttctgcacaagcacaaaattctgctgcatatttcaacagcaaaattctgcataatagtgcagattttcgaaatcactcttgccctcatccaattttgcccaaattggatcctacaagtcctaaatcatgtataaatcatatctaaaccaaagacaagcttcagaccatagcaactcataatctaggaatttaaacccctcaatt

SEQ ID NO: 230304 - DNA, 461 bp, Glycine max
  unsure (1)..(461): unsure at all n locations
agctntnggcacaaagaagaagaagaagaagaagttcaaagagattcatggcttgtaaaggattgattgaataagtgtaaaagtgtattgaaaagcaaatcaaagccttgcttttatagactcttcatgtctggccaagaggaccatttagaagagttataacttttagaaaaacttaaaaccaatttgaaaaagtcaaaaaccttttgaagagttacatcttttgatttattcagaaacaaaacactggtaatcgattaccaaattagtataatcgattacacaaagctttgtgtgaaagggtgtgactcttcacatttgaatttgaatttcaacgttcaaaggcactggtaatcgattaccagagagtaaaaactggttggtaaacatgttttgagaaaaaccatgtgctattcaattnttgagaaaaaccttttcatacttatcttgattaagccttc

SEQ ID NO: 230305 - DNA, 441 bp, Glycine max
  unsure (1)..(441): unsure at all n locations
gacaaccttatattcccattattntcttgttctcttcattctttttcattccttgcttgctctcttttccttatgctctctctttcctttgatagatatttatcatttgctcatttcctctctcgactttcttttgttttctctttttctctctgaagaagtcgtgcggacaacggcacacactacctactcacgtcttaccacaatgtgaacgagaaacgcacaaaaatggtaggtcgtaatatggtgacgaaatagatgagagccataacgccgaacatttctaacagaaacgagcaataatgatagtaatgttaagaaccatatgaacaaaatataaaatagtaatgtcaacaacaacatgggcaataacagacaacgtttatagcaaactaatgaaataaacagatatgtcaaaaaatgcggtgacctcgcgcacgt

SEQ ID NO: 230306 - DNA, 578 bp, Glycine max
  unsure (1)..(578): unsure at all n locations
tccaccgtttccttcctcttacatcttctattccatattctgnngtngttttnnnnnnnnccgcgcgatgaacctctgagccgttcgtaacggaacttagatgcaccgcagcatgctacctgcgaaatgtattgaatctctccacgatatttgttcatccctcacggtcgactatgactaccctcgtgtcagcagcttcacaactctgcgaagccccagcgtctaaccggctccacctgatcctaccacgcggtatatatggtagaactacatgagtaaaacacgtctagatatcctgaccaagctactgttgatgttgaaaaatcataaaagtgaaaccctgctcaactggttgagcacaggtgccattgggaagcacgatcacacaaagtctccaaagctatgctcacaactatcgccatgctctgattatgcgcattctaactgctatgggcctatgagagttccatcaccgtgactggcaacgaattcttttcatgatgtataattttctacgacacctgggctccatggcgaccaaactcttaatcttcacagttcactcactcaacattcct

SEQ ID NO: 230307 - DNA, 456 bp, Glycine max
agcttgtcaaagttagtactcagcagaaccatttaatcaattcaatgggtatcttagtggataacagatgggagtggaagcttcaatggaggagaaacctatttgaccacgaagttgatacggcagcagcctttatggcagatattgctgagtttcaaattcaacctgcaagcagggacgttctgctatgggggcttgattctggtggaccctattccaaaaggcagcttatagcttcttgaaggatggtgacagccaggttactgaagatagtgacttcaaggcaatctggaatctcaaaattccacctagagcaagtgctttttcttggagaatattcaagaaccgaatccctaccaaggttaacttaaggcggagacatgtggagctgccttcctataactgcccgctgtgcgatgaggaggaggaaacagttggtcatatcatgtactcatg

SEQ ID NO: 230308 - DNA, 274 bp, Glycine max
  unsure (1)..(274): unsure at all n locations
tacaactacaagtgattgtcaattctccattctcaagttgggattcataactaactctccactctccattgttatcacatattcaccatgagcttccgtttcttttttattttttgtagatatttgtggcagctattagatcccactccgcttgaaacaaattgaacatgggaggagtgtactcttgagaaagatgtccaatcataggtgaactntgtatgatcattcttggcaacttcttacgcatctcataatctggctttaactcactata

SEQ ID NO: 230309 - DNA, 404 bp, Glycine max
agcttcaagtttcatggggttttggaagaatggttttatggaagcatttcacacacatcgccaaggcgttcatttctaacaactcaatcataatgttattcttcgacaacttggaggggaatatattcctcttgtctatgatatggaacatatagtagcagcacgatgaaagtctttctaacaaggagctccatactcttgtgactacaaacatgaatacctctccgcactatctctcgaatagtgtgccctctgcacctcaccctttcatgtcaaaatatgaggagtattttcacatattaaaggcttttgaagccttcattccatcatcatcaataagtcaaagactcaaatgacttggagagattgatcattgagtacttttttatcgacaaatgctaatt

SEQ ID NO: 230310 - DNA, 459 bp, Glycine max
tcccgttgcccgagtcgacccggcccgagttgggctggttgagtgttaactccagcgtttcaagtctcgggtcgctctggtaagcgaaaaacgggtacgggttgatcgtgaacggcgatttgttgtccttgagtatcgccagcagctgtttgagcgtgtcttgcatcgcctggttgaacaacccggacgagggcgggtccgactgagtcaacacgggcatctgagtgcactgtggagaccttgatcttgccgtcgagcgaagccgcgccgagggcattttggacatttagcatcttcgggactagctgcgacttaataccctgatcggataatgtcaaaatctcttttccgacggtgatcatagtgatgttgctcgccaggtagtaaggcaagacgttctcgataacccactgtgtggccgctgtgggatcgcctgcgagactcgctatgtctccgttg

SEQ ID NO: 230311 - DNA, 450 bp, Glycine max
  unsure (1)..(450): unsure at all n locations
agcttgccacccagctcgcccaggcgagcaaggttgctttctccagaagcaacagccttctggaggaatcttctgcagggcccaagtgggcctggttgctatttgcacccccatttttactaagtacacccccctgccttttttttatgattcttttttcgtaaagttacggaaactcacgaatttcgtaacgatacttgttttctttccgtaattntacggaaccttgtggattacataataatcccctttttgacttacggaatgttacggaacctcactaattgtgctacgatgcttccatttgatttccggtgtgtcacggaaccttatggattttgcatcaatattttcttttgttttccggcatgtcccggaatttcacaaattgcctaatgatgggtgccaagcacctcacaaggaccaaacaaaagtttcatgtcatctagc

SEQ ID NO: 230312 - DNA, 446 bp, Glycine max
  unsure (1)..(446): unsure at all n locations
ngactaggcgagttgattntagccttagttccaccttagttattagtcaattcggttaagaatgagaaatcccaaagagaaaatgtccggttgattttccgctttattttactaaaagatgtttttttttattattattatattattttttacctctttttttgatttccaacgtggttacggcacgaccgaacggtcggaattcattttaaccgaagtttacggataatacaattcaaacgatcggtggaaatttattttatttttaggttaagcgagaaatgacttaagtaaaatggcttaagcacgtcaagagggggtataaaaagtaaatgaaatgagaataaaaatacacgaaacacaatgtggaccaccacgggtacatagaatgaatcgaatagcttggttcaaggtacttacccattgaagatcgaagaacgatgaag

SEQ ID NO: 230313 - DNA, 443 bp, Glycine max
  unsure (1)..(443): unsure at all n locations
agcttctaatagggtggttaatgccctcagtagttgtcattccttgttaagatgcgaatccaagtccttggctttgattctttccctaaattgtttattgttgaccctttatttgttgcaatgttgttgaagatacaaaatgatgaacgcacaaattttgttttacaagatggttttcttttttgcggccttcaactctacatcccatagagtagtttgcatctganaatcatccaagaactacacaatgaaggtcacgctagtccttatcgcaccttgcaccttgttgttgactcttactattggcccactttgcccaaagatgtcaatagattcatcaaccaatgtcatgttttctagttgtccaagggtacactcaccaatgctaggttacacttacccctgccaacacccacttagccttgggcatgtattagcatgga

SEQ ID NO: 230314 - DNA, 465 bp, Glycine max
  unsure (1)..(465): unsure at all n locations
tatatacctggtgagttgtgatngaatgactgtacaaaaaatttcactatcaaatgtataactatttttatctttttttaatcaattctgtaaaataaattcatgatcaaaataatatatattttatgtattgtatattttatcattaattaaaatgaattattaacacacaaataaaataaatttaattaaaatatataaaaatttctatattttatatatatttgaccaaaaaatattttaaaagtgtaactataaaaacttatacttaaaaatttacagcaagttaccaatcatcaattctaaccatttatcaatggttaataagaagtttctccattgatgaagatgttattcatttccctatcttagacgtttgccttttttacaaactttcccctctgagcagggagcacaatgatgtttaattntatgaaaaagatggcagcggacatgcaatgtggt

SEQ ID NO: 230315 - DNA, 515 bp, Glycine max
  unsure (1)..(515): unsure at all n locations
cgacgtttganacccatctcttacnctttgatgcccttctgcagcaccctgcgatcctgtanagtcatccgcagcatgcaancttctgtaattttatgcctcacctttctgtttctgtctgcccacaacgggttgatatcacacctgatcttctactaacgaatgcggtcgtcggagacactccaatgcttgcattaaacgcacactatatccttatgtacgctgtccactctccataactcgcgcgttgagtattgtctccagtattcactttctctatgtcacaccatggcttgtggtgcaaaacccttatttggctggtgattgacgaatatctgaccttaactccatttatcctcgataggacgcaactacctcacgataatgtttttacactataatctgatgaaatcctacattcactcaaatgtgaaccagctccagatccacccgcttatcttcagacttcaacccctctctgttgactgtttatgagcattattaatcgtcgcctc

SEQ ID NO: 230316 - DNA, 163 bp, Glycine max
  unsure (1)..(163): unsure at all n locations
cttgaatatcagcttgacaaaacttgagtcactcactgtaatcacatttgttatacaaactaanggacttttgagcacgtctccatgcaacctctgataagaaaccaataatgaaccactctatcaccgcgaccgaatcgatttacttctgtctctgattgct

SEQ ID NO: 230317 - DNA, 496 bp, Glycine max
  unsure (1)..(496): unsure at all n locations
atcctcttagtcacctgcggcatgcaagcttctntnggaccttgaacaagcaatcaactcctctttcagaaccatgctatgtgctcgcgactggtccctttcttcccttcgcaacttgagttcactattgctaccccatagagctccgcgaaatttgttccggccatactcttccttgcgagccctcttggtctctcgttcaagggcccttgcggtaattgcattctcttcccgtaacccggcacactccttccgaacgtgtgtagcagccaacttgaacttctccttggcgagttttgcctttcctaactcgcttttgagagcttggacttcctcgtcctcttccggtgcttcaaaattctcttcgctgacgacttttaacttggcgagccaatctaaacctcgtatgcgaactttcagccattcgtggtacccaccaatgatgccattacgaatgcctctaagctcttgatctttccttaacggggtttcccat

SEQ ID NO: 230318 - DNA, 337 bp, Glycine max
  unsure (1)..(337): unsure at all n locations
atatgtgtntgtatgtgtgtgtgtatgacatagagttagattattaattatgcttcctttaatcttctcttttcaagttgttttgtatgatttgagcaaaagacctatagaacgcaggttcgtaaggaaagatgaagttataaaggaaggtgaatcaatatattttgatggacatttactggaagtaggacaacctgaacggattcatcactctccagcgaagttaaatgaacgagggactgacaataatgttgttgaaaggagacaactaggacatgtacaaaatggattctgctaggtcaatccatctttttgctaaaggttattccttgaataa

SEQ ID NO: 230319 - DNA, 570 bp, Glycine max
  unsure (1)..(570): unsure at all n locations
ctcattactactctcacttttatctcatattgacattagtatgtttcnnncntcatacagtgctgactcatcataacccttatccttcgcgcccctgcatgcaccttgacgtcgctgatatcactctaatatattctcgcacattatctgtgtgatggcttcacatgcatactaatccttcgtaaggcatacacccaatgctatttggttcaacgaaggagacatctacacagtcttttctcactatacaatcaattccagaacacatcatatcagtctacatggaattttcatgtaacgaatatgggtacacgcaccttatactggtctaggatgaatctgccaaactcccagttatactatcctttgctgaaaatgattgtacagctactttgtatggagtacaccgctatatgatcactcatagccgaagagaggagcggatcgattctttatcaaatcatgaactatcaactgctgttcgtagctgtctaggagatcaatcttatgtaccgatggacctcattacatttactcaagcattttgggggcgaacaacaccatataccg

SEQ ID NO: 230320 - DNA, 294 bp, Glycine max
tgaagatgttcatgttactgtctatcatatcacaagagaaaattttgttataaaaataagtgttgttatgctgtcagtccactagacgaaggacacttgagcaaattgagtaaatcttagttttgctaagttagcgagtctcattgtattcaaacttactgtgtaaacactctttgagtgattagaatacatccactatcacacatatactatttgtgaaagctaacaatagcttaatgacaaataatacttgggtcttaatctagaggggagattaagtatagtgtcaggaat

SEQ ID NO: 230321 - DNA, 439 bp, Glycine max
tactaatgacatggttcacaatgtaccatccacaattcatgagataactgcatagcatttcaaacactttaatggccaactcttaagttcacatttgtcatgatcacatgattaaagcatgaaaggatttccttggagataagatatgttagcaagtatgaccatcgtcacagaagattcaccatgcttcattccttacaatgctagtgtttctctcaagcacacaagtgtctcgattatgaatgtttcaatcacaacaactgaaactaacattcccaactttgcacatcatctcattcaatgcaatcatacatacaaaatgtggatcactaaggactttatcaagcgttgaatgtggccgggctaacaaagacatcatcatttttcttggattcacagcttacgttctacgagagcattcattccccattttcttgac

SEQ ID NO: 230322 - DNA, 472 bp, Glycine max
  unsure (1)..(472): unsure at all n locations
nganagagcccaggtagtcaaagagaagttcaagtccatagccatcaaagtctgaagagagtatgatgaactaagggacgttaatatggccaccgatgaagccttggaatgagaaaccaagaaggcccgaaaggaagaacacgaccaaaacaagttttgaggggctttatagggcagcaatagtgagctcaaactctgaagaggtgaaaggaatcatcatgggtcaaaggcatgatctggaaggacgagctaaaggcttgccttangtcgaaaagaaatttgtcccaacagttaaagtgagactgaagggaatatgtgggcaatcatcgatgagtgccaagagaagctaaatctagcggcgactcacgagcaaaggctagaagatgagtacgccaagatatcagcagaaagggaagcaagggaaagggtaattgattcattgcaccaagaggcaactgtgtggatggaccga

SEQ ID NO: 230323 - DNA, 316 bp, Glycine max
gcagctctcattcatcttgtcccgagtggtccacatgatttgtgcattttattctcgcttggttgacttttattaccccctctggacggcctaaaccattttaacttaggtgcttcttggtttaccttaaaaataaaataaatttccaccgaacgttggaatggtattatccactaacttcggtaaaaataaatccgaaccgttcggtcatgccgtacccacgttgaaactcaaaagaggggtaaatatattatatgtaatagtcaaaagaaacatcttttagtaaaataaagcggaaaatcaacgggacgttttc

SEQ ID NO: 230324 - DNA, 145 bp, Glycine max
tatatcaatacgctcgaaattaacagcggaagctctctcgatattcatatagtcataactattcacacggatgtccgggtctggcgcttaatatgtcgagaggctcgaaattgaacaacggaagctcttgagaaatgcaactggt

SEQ ID NO: 230325 - DNA, 428 bp, Glycine max
agcttctacttatgtggcagggcgggcttccttcactttcttgtcttcaacgcgagctctgaccactgttcttccttcccgcgatgcttcttttcatgtccgcctgagtgggcttatagcctaaaccatacttcccacgatttccttgggtatttatcaggctagttatgccgccgttgtttttgcctaaacccatctcgggttcataaccgttccccaacataactcgggccatcattaccgctgcatcggacagacaatgctgcccaaagagggagtccacggaggaaatgctgaccacctcaaacgactggaaagcagtttctaacgattcttctgcggcttccacataaggcatggaggatgggcagcttaccaagatatcttactcgcctgacacgatgaccaagtgccccttcactatgaat

SEQ ID NO: 230326 - DNA, 492 bp, Glycine max
  unsure (1)..(492): unsure at all n locations
gatggcctcagcanattccttatttccagaagggaattctatcaatagacctccaatctttaatggagagggttaccactactggaaaacccgaatgcaaatttttattgaggcaatagatctaaatatctgggaagccatagaaatagggccttatatacccaccacagtagaaagagtttcaatagatggtagttcatcaagtgaaagcataactatataaaaacctagagatagatggtctgaagaggatagaagacgagtacaatacaacttataagccaaaaacataataacatctgccctgtgaatggatgaatatttcagggtttcaaattgtaagagtgctaagaaaatgtgggacactcttcgattaacacatgaaggaactgcagatgttaaaagatctacgataaatgcactaactcatgagtatgaattatttagaatgaatgcaaatganaatattcaaagcatgcacaagagatttac

SEQ ID NO: 230327 - DNA, 418 bp, Glycine max
  unsure (1)..(418): unsure at all n locations
aagtccatgcccattaataaaataaaatctggacaagataagataagatttgattaaataaaatctagatgaaataaaatctagatcagataaaatctagatgaaataatatctagatgagataaaatctagataagataagatttggtagaataaaattgtctgctctcttcaagtccaaacccaattgcttataattcttctgaaattaaattaaaaacacaaaattagtccagtaggcccaaatgataaaactgcataattaatttgacaattaaggctagtcagtaattaaaatggtgacaaaaagggttaagaaataggaaaaaatgatgacacatcaaatccttcacacttagccttntgcactcctgtgcaaaatcaaaaagcaaagcaagggacatatccagagacatta

SEQ ID NO: 230328 - DNA, 421 bp, Glycine max
  unsure (1)..(421): unsure at all n locations
tcaagtcgctcggatagcaacttgttntgngccaacatagtgttctatgatgaaagcttcaacaggctgtctttggttgggatgtgtgctctatcacacaagattgaatggtcactagcaaccatattgtcaatcaattccatggcttcttcaggggcgcttcaatttatttttcccctgcagaagcatctaaaagctgcttggattgtggccttaacccgtcaatgaaaatattgagcangattggttctaaaaatccatgagtaggcgtctntcttagtaacccacagaatctttccaaagcctcactcaaggactcgtttggaaattgataaaaggatgagatggcagcttttccttcagcagtcttggactctangaagtatttcttcaagaatttttacccacttcatcctaagtc

SEQ ID NO: 230329 - DNA, 435 bp, Glycine max
  unsure (1)..(435): unsure at all n locations
agctntatgcaagtncaatttcaggaggcatctctgagaggatcttttccgggcatatttgcgcataatctcttgaactatgaagatgttgtccatcatctttctgttcttaatgaaagcagtttgagtttccccagtaatagtctcaagcactgggactatgcggttagccagaattttagatacaatcttgtataacaaattatagcaaaatatgagtctaaaatagatagagatttcaacatctctccaagttaccttcaacatttatttgttcttacataaattaatttatttgtgaaacttttttataaatgtaatttctaaatcaaccattttaattaaaatatttttaaaatgattaacaattagtattgtttgtntctatttggtttggtcactactcactacataaaggaaaataattaaaatatg

SEQ ID NO: 230330 - DNA, 614 bp, Glycine max
  unsure (1)..(614): unsure at all n locations
cccgacacccgacctcgacgacttcgtcaccgtgctctacatcattagtnantgctaataaantatcccnnnnnccgccgcgttgataccatcattactgacactaagatacacaagcaagaatgactcaattcgctacagaatgaccatggcaactctctgcatatgcaatcaggtcacccacctacgatctacgatgggacactaatcatatcacgacatgaataatcatacaagctccatatgactaacaagcccaagtccagtgaataacagcttatgtactgacaatatatgaaattcgatactgattatgaacaaagacgcaccacctttcagatgcaagccacgcatggacaagctgtcggcggatatgccgtaggcaaagaaatgcatcgaactctgcatctgttagtactggggatatgcggtctacaccttattacctgacagatacactaaattgacacggtccaggcaagtttatagatgaaccacagaactatagaccataactaccttagtaaacaacgaagcacgatctctatctggaggaacgaaatggcactgaagaggatgtatcttatcacatncgcaccccagccttggtcgag

SEQ ID NO: 230331 - DNA, 311 bp, Glycine max
agcttgaaggacaaaaggaactcatttcactcatttgctcattacaaagatagtatggttaaactttagagagatctagagtcgtgcttagacggtagtgacagggagaagcactttctcaccttaaggaagatatcaacagctctatagagcccatcactcacaatacgtgcatgatctggaagtagttcagcaagggatatgaactctgatggcaacaagtttgggtctagtgccacttcagcaagatagttgcccattaatgtggatacctttagaatagacctttgtttgggagatccggggctgtc

SEQ ID NO: 230332 - DNA, 414 bp, Glycine max
  unsure (1)..(414): unsure at all n locations
caattactgtgtaaatttcatagttgccaatcattgtcttctctatatctcttatgaacaacacgagtgcaccacttttactctgatattagacaacctataacagagacgggtgtttaatatttctctatgaatagagacaactattggacaagtatggaactggggcaacctcaaagatttcattaattgcaactttgtcaagatcatcctctccagagccgtctactcgtagtaaatgatntgctgcattatgaatcatcaatgaattatacgtgccacaattatagcatacaatgtattaatatgcagcttaagaaacaaaagttcaatctaatacagcgaattaccagaacagaagaacccacggtcatcttcacaaatgccaccaagatcattgccatctggaattga

SEQ ID NO: 230333 - DNA, 447 bp, Glycine max
  unsure (1)..(447): unsure at all n locations
agcttgaagattntcaatctttcatttatgaaatataaatcacatccttcaaaagctcctgtaaattaaaagagaagccccatatacttctaaagcgggagaagaaattttttataatttataataaaaagcaaaatcagactgatgcaaagccaggtgaataagaaaaaacatatgaaataagtacagcttgatttgatgttaaagaatatagtcataagcccaagaagtgaagatgatctttccaacaatagccaataaattcggcaagagaagcaaaacataccccagagaccttcacgaattgcccattttttgcagttctaagctcagagtctggataatgagtaacaaagcccataatagatcttcttccccaataagtattccaagtgaaagatgcagcaactaagccaaaaagaatcacaactacaataaggagaatag

SEQ ID NO: 230334 - DNA, 490 bp, Glycine max
  unsure (1)..(490): unsure at all n locations
tctntccctaacctgtggcataggcaacacagaaatgatgtctatgatgaagtaacgttntaaatatctcttggcaatctttctaggatctataacaagttcacctcgtccaaatacccgagatgaaggcgcaatgtaggcggtgcggaattgaaaacttatgcggaggagataaatgaaatcacatattgttctcattgtgacagcaaaacttgctaggctgttatctatggcgaggcaaaatgatttgtggttgaaataaggaaggtaaaagaagaagggatcgcatgctatagaaacaatgcacagaatctcaaaaaacttgttccaataaagaaggttcttatcttgaggatcaaatactttnttctcagacactttaagatcttctgggaacactgcccaagtagtcactccagtctttagtgatcttccanatgtctttagtccatctgaactcttcttcattcctagcctaaatgatttcgat

SEQ ID NO: 230335 - DNA, 205 bp, Glycine max
  unsure (1)..(205): unsure at all n locations
agctttaagctattcaattgcttcagattgttgtatataagggcaaaggtctgtgtggtggtcggcagaggagcataaaccacagagtctggcgacaggtgcaaatnttttattcatggccaattaggttaccaggttaaccaaggcatctagtttaccttcaagcttcttagtctcgcctaatgaggatgaatttgtggctact

SEQ ID NO: 230336 - DNA, 440 bp, Glycine max
  unsure (1)..(440): unsure at all n locations
tgtgattctatatccgtctcccaagaccttgttcaccggttgctctggcgatacaaggatgattggaagtctgcattgngggtattcagatgggccagttcgcgatcgagctttagacattcgcggagtcgtagtagacatattgtgtagaatgaaggttatggaaaagttgagggatttgtgcgcgagggcggtcttgtcactatgaatactgttgctaagacaatgagatggtttgtttggacacgatagtgggtagatgctgtgaggatatttgatgacttgcaagctcttgggttggagaaaaacacgaaatccatgaacttgttgcttgctaccctgtgcaaagagaaatttgtggagcaagcctgcaaaattttcttggagtgcagcagcatattgctccaaatgctcacacgtttaacatattcattcgtgga

SEQ ID NO: 230337 - DNA, 465 bp, Glycine max
  unsure (1)..(465): unsure at all n locations
ttatgtganaggatgtgactcttcacatttgaatntgaatttcaacattctaaggcactagtaattgattaccaaaacattgtaatcgattacagctttttgaaattaattggaacgttgtaaattcaatttgaaaactttttcaaaacaattttgctactggtaatcaattacaacaatctggtaatcgattacgagagagtaaaaactctttggtaaacatgtcttaagaaaaatcatgtgctactcaatttttgagaaaaaattttcatacttatcttgattaagccttctcttgattcttgaatcttgagtcttgaatcttgattcttgactctaaactttcttcttgagtcttgaattcttattgattcttatcttgaactcttgaattgttcttgattcacttgagttgttctttgattgatctttgagcttattgtcatcacctttgtcatcatcttt

SEQ ID NO: 230338 - DNA, 421 bp, Glycine max
tctacttatgtggcaaggcgggcttccttcacttccttgtctccaacgcgagctattaccactgttctttcttcccacgatgcttcttttcatgtccgcctgagtgggcttatagcctaaaccatacttcccacagtttccttgagtatttatcaggctagttatgccgccgttgtctctgcctaaacccaccccgggttcataaccgttccccaacataactcgggccatcattaccgctgcatcgaacagacaaggctgcccaaagagggagtccacggaggaaatgctgaccacctcaaaagactggaaagcagtttctaacgattcttctacggcttccacataaggcatggaggatggccagcttaccaagatgtcttcctcgcctaacacgatgaccaagtgcctctccactacg

SEQ ID NO: 230339 - DNA, 464 bp, Glycine max
  unsure (1)..(464): unsure at all n locations
gcttgtctcacttcttggcggaaaaggtgcgattccaaccatacttataaggtctgagtacaacaaacattccttgtactgctcttttcacatcttcggtcgaaggtgtcatatagatcggctaggatagcgactatcgggcttttcttgcggtcatgaaaggcgagaaaagcgtcgatcgcctttacgtccaccaacccatccacatttggaaagataactccttcgaagatcaaaagtgcgaggatgtctatgaacggtgcctattcgcctctacctaccaagattcttgcttttgcctccaaacaatttctcggtactccaaccaccccattctttacttgctttctgtggtctaattcctctgccaagatctggactatcttagacattctagctaaatagggataaaatcctgagaagagtactgttcccatcccctanagggcatcctatgatctctt

SEQ ID NO: 230340 - DNA, 421 bp, Glycine max
  unsure (1)..(421): unsure at all n locations
tatccctagaggtgatggacctttgcaggtcttggagaggatgaataacaatgcctataggttggacctccataagagtatggagttctgatttaattccttttgcaggtggagctgataatgaggaggaggaacgaacagatttgaggtcaaattctcttcagggggaggggatgatgcaatcctcccttgtaagggaccaatcaccacagccatgagcaagaagctctaagaggattangctagagctgctgaagggtctatggttctcatgaacctcanggtagatttctgagcccatgggctaaggttgggtccacttttctctgtaaatattagaataagttcttcttcttttaagtttgtatgataccctacaaattaagggtctcctaccttacaagtataaggtacccttagt

SEQ ID NO: 230341 - DNA, 175 bp, Glycine max
gcttgaaattgaacaatggaagctgtcgagaaattcaaatggtcatatcttgtcacacagaagttcgatttcagcgcacactatatcgagacgctcgaaattgaacaacggaagctttcgagaaattcaaatggtcataacctattaaacggaagaccgaatgccgcgcataata

SEQ ID NO: 230342 - DNA, 422 bp, Glycine max
  unsure (1)..(422): unsure at all n locations
cggaagctgacgcganactaanatggtcattacatttcacacggaagtccgattcaggcgcataatatatcgagacgctcgatattgaacaacgtatggtgtcgataaattcatatggtcataacttgtcatacggatgtccgattcaggcacataatatatccagatgctctaaactgaacatcgacagctctcgagaaattacaatggtcataactattcacacggaagtccgattcatgcgcataatatatcgagacgctcgaaattgaacaacggaagctctcgagaaactcatatggtcataacttatcacacggacgtccgattcaggcgcttaatatatcgagacgctcgaaattgaacaacgtatggtgtcgagaaattcaaatggtcataacttgtcacacggatgtccgatt

SEQ ID NO: 230343 - DNA, 456 bp, Glycine max
agcttggccaaagtaatggaagattcatccaagttcaagcaaaagatttcactacaagcattgcgaacaaatttaggtgggaatggttttcaaagatgtcgttctcttatttgatttaaattgttgttctgactaaacaaatttgtaattagctagcctgatttaataagtaaatataggctaggtcaatcgtttgcaccatacttagcctataagtaaaggatcgatattgtctaccaatcttcttattaagacaatttaatatattctttaatactagatcaaatttatgcctattttactaaaggtttactatctatgtttcatttaattattggtgtagcaagaaagacataaaattacttaacttcattgtttgtttaatgaaatttgtgtagttattttttttccaaatcaaaaataaataacacggatgtataacaatctacacattct

SEQ ID NO: 230344 - DNA, 491 bp, Glycine max
  unsure (1)..(491): unsure at all n locations
tatcacatcattgagttcctaggtgagttgtcactcttaagtgcggataaatgattntcataataaacaaactntaaatatcttaacaaaataaaccactgatcttttgttcaaaactggcgggtaaagatagatgggggttactccatgagttaacaagatttcacgtattcaaataagtcaacattgtccaaaacatactttttgtaaatactattatattagataatccaatttagatttcctaaatttgagtcactaaacaggatattttgaaattnttatagatagagcgagctactgctgtttagttaaggcaaaggctaattgtgtatgaatcggataggatgagttccatataataaataataaaagagacattgttatgttttaactataaatgagacanttttttgcttccttttctnttcaatcccaatacataacaattgtaattatacgttaatgcttgcanatgtggagcgagcaac

SEQ ID NO: 230345 - DNA, 456 bp, Glycine max
  unsure (1)..(456): unsure at all n locations
agctgttaactgaatntacaacgttccaattgatttcaaaatggtgtaatctgattacaacatattggtaatcaattactagtgcatctgaacgatgcacttcaagacattgtgaagagtcacatcctttcataaaaagcgttgagtaattgactacaaggatttggtaatcgattactactgacaagttttgaacacaagatcaaaacatgacacctcttcaagtggtttcttgaccagacttgaagagtctatagaagcaataccttgattggcatttgaagagcacttacaacacttacaacctttacaaacaactactcgacatgatctataacaaccttcgaatctcttcgaacatcttacacttcttcttattattcttttgcaaaagctatctaaagtattctggttttccaaaccttgaaaacagaagtgtgctatatctcttattct

SEQ ID NO: 230346 - DNA, 503 bp, Glycine max
  unsure (1)..(503): unsure at all n locations
tactcagctagctaacacacncatctagaaactaacctcacctccttgagaagcttccttgagaagctagagcttagctacacacacccctctaataactaagctcacctccttaggaagagaagctagagcttagctacacacccctataatagctaagctcacccccatgacaaaatacatgaaaatacaaaaaaatcctactacaaagactactcaaaatgccctgaaatacaaggctaaaaccctatactgttagaatggccaaaatacaaggcccaaaagaagaaaaaaaaacctattctaatatttacaaagaagagtggacccaaccttgacccatgggctcaaaaatctaccctaaggttcattagaaccctaaggccttctttatcagctctagcccaatcctcttggagcctcttgctcatggctctggtaactggtccttttctagggaggatagcatcacattatgacaagctcagtcttaactggttcac

SEQ ID NO: 230347 - DNA, 422 bp, Glycine max
  unsure (1)..(422): unsure at all n locations
actctagtaatattgagtgtttatctaagtttacttaataagaatatattcttttttaataaataattgtttgtaacttcataaaaagaaaatcaagttgattttcttatatagaatcctcattttttccctataaatactctgaaatctaattaaaattaatcttatattgaaatttaaattatttattgtaatccaaaatatagtgtatgtattgaaagatatntattttgttacaatttttaattacaatattatttacatattaaaaattttatttggttattttacataacaacaattctttatttcttataaattctaagcatataaaaataaatatttatccttccaataaccaaacgaaaatactatcgcttataatttatgaaagaaataaacatattagataataaagtata

SEQ ID NO: 230348 - DNA, 327 bp, Glycine max
tgatcatcctactaagacgactgatataactgtggcacataaagagggtgaggatgaaggagagacccatgctgtgactgtcattcctgtacgaccaagtttcccaccaacccaacaatatctttactcagccaataacaaaccttctccttacccatcacccaggtattcacaaacgccagtcctaactctaccacatagtcttgtctaccgcactttcaatgacgaacaccacctttagcacgaaccagaaacaccaaccaagaagtgaattttgcagcgagaaagcctgtagaattcacccccaattcagtgtcctatgctgac

SEQ ID NO: 230349 - DNA, 461 bp, Glycine max
  unsure (1)..(461): unsure at all n locations
agctnttgctatattagttttgtcggcaaaaggattgaagtgggtctgaaaagaggcgaatctgattatcctgctttgacaaataaaaagcctggggcaaatagagaggatgagaaggaggaaggaacccatgctgtgactgtcgctcttacatggccaaatttcccaccagctcaacaatgtcattactcagccaatatcagcccttctcattacccaccatccaatcagccacaaagtctgcctgccgcacatccaataccaaactccacccttaacacaaaccaaaacaccaactagggaaagaattttccaacaaaaaagcctgcagaattcaccccaattctggtgtcatatgctaacttgctacacgaaaccacccttgtgaattatcactataagtggactcttggatcctttccattagattcctaaacttaggggggcacatagcaaactta

SEQ ID NO: 230350 - DNA, 463 bp, Glycine max
  unsure (1)..(463): unsure at all n locations
ctaggcttagcacgtgaagacatgacgcttagcgcaagggttgcgcttagcggttggacaactgnataattttttctgagtcttttgtgcccatatcttcacatgagcttaaaaacccccttgttcacttctaaacaagctgcaaaattaatcacaatcacaagcaactatcctaactacatgcaagagatacagaatgaaaaagtgaaaagggaaagaaaagttgggttgcctcctagtaagcgctcttttaacgtcactagcttgatgcatcatcctgttatcttgngtccaacaaggttccaacttccagatccttcttctctagtctcttttcctccatcacattcaccttcaaacaaaaattntggttaggcaaagctntctcttcatgaaacatatcaaaactgattngctggtcttctatggccatttgtaggttcctctttcccatgtcaaccat

SEQ ID NO: 230351 - DNA, 451 bp, Glycine max
  unsure (1)..(451): unsure at all n locations
agcttcatgatgatgaaccaatgcaatttgatgatgccaaaagcccaagtgattgattcaagacttcaagatcaagcatcaagaatccaatccaagattcaagattcaagagaagaaataaagaagcaacaagtcaagacttcatataggataagtattaaaagattttttcaaaaaccaaatagcacagttttgttttacaaaagaattntctcagattttctaaagttaccaaagtgattactctctagtaatcgattaccagttggcagtaatcgattaccagtgaccagattggttttcaaaatgttttcaaatgatttgtaacgttccaaaatgattttcaaatagtggaatcgattacactatattagtaatcgattacaagtgaatatgaacgttggaattcaaatccaattgtgaagagtcacaacttttcatanaatacatt

SEQ ID NO: 230352 - DNA, 398 bp, Glycine max
  unsure (1)..(398): unsure at all n locations
tatgagtntgtggatgatgtgaggcttgtgttgtcttatgcattgcaataccctccaaggagtgaggctcacagaactgcaacaaggatcaccgagggttntgaggtcaattggaaaactatgaaggagaagtggatgcgtgaggccgaagagacgaacaagatttgccagagggaattacatgtgtgtccaaatgaaagaagtcaagtgagtaatcatctcacaaaaaggagcaatattcctatgtgctgattcaaaatagcttcttaccacaagtcaagaaagctatgccaataacggtcattatgagcagcatggacattacccctcttcaagagtntcatttaattaccctggttattcatctttatgtataaagtatctattgagtttcacgt

SEQ ID NO: 230353 - DNA, 448 bp, Glycine max
agcttgagatgaggaagtgtataagggtgaactttctgcttttattcgttgaccacagagtggtacctggagatatgtcgcgggggtcaggagaccttgggaacgtcaggtggggtgctattgcccaaaaccaagcttgaccaatcccgacccaacccgggcatagtcggtcagtgagaacctgtgatgtacctaaacaggcgagctcctggcagtcaacagataaaaggaacaaaaaccacaaagcaaggaggcttgtggtggctggccagctgtgaattttgtgtgatatatgggttgtggcctctggtaatcgattaccaagggtgggtaatcgattacaaggcttaaaaatgaagacaggaggctaagatggtctctggtaatcgattaccaggcttgaaaacgaggtcaggaagccatgagggcttctggtaatcgattacca

SEQ ID NO: 230354 - DNA, 492 bp, Glycine max
  unsure (1)..(492): unsure at all n locations
ggcctaattaacctganattgagaganaatgattattaaacacacaaaataaaaatactaagtatttattacctatacttaacaganaatacttataaccttacaaaataaccataaattgggagagtttgatacaatttatataagttttatacacaaaagttagtcattttcaccaactaacagttgccccaaatttacagttttgcttgtcctcaagcaaaaagagaacaactcacttgtcctcaagtgacaatgacatgcagtgattatgtacgaaggtgtatgctacaaagtgactaattgcatgataagagaatggagtaaaatgccctcaacacttgtctttcacaacagttatctaaagacaagaataaaatgtaacctgaacagatagatgaagttaggcataagacagatattaatgaaagtagcttaaaccacagtctcacagctaatgtttcactcaagcacaagtgtttaagctattca

SEQ ID NO: 230355 - DNA, 446 bp, Glycine max
agcttaactggttgaagctttcagaaacatgtatctcatgaggtgacataaattaaattatttatatcaatattattgaagatacacgtttatgagcataaacaatcaatctaaaaattataataattttattgaaaaataaacttatcttatttaaatgactttttgcacaattttaataagttatcaagaatatcacagtaaaccttaaaatgttcattatattatataaataaattagattttgtttttatctctattttgatattaaaaaaatatcacaagttaagtctttaatcttaaaaaaaaacttttgatgagtaagacctaaattcggtctatttctcctcctattcacatctatagaagatagtggttcaaaataatcagaaagatgctattcagcttatttttacctctttagagtatgtctctatcgtgttagt

SEQ ID NO: 230356 - DNA, 487 bp, Glycine max
  unsure (1)..(487): unsure at all n locations
ngaagggttctggtctgagtcttcagggaaggctngcatggtatggaaaggaaatggttattctaagacaggtaagcatcttaatttggatgctgtgtttaagcttgataaggttttcagtgcaagcaatatcactagcttggttaatggaagcttggagagcttgagttctccaaaggatgagagctacttcgaacccatttctgtggtgatgtttccaaaagcaaattacaaatataccttgaattccacagaagttaccaatgagttctcttctgggagtgatgctatgaagggtggtttgtcattgagttcattgagtttttgttctcgtcccctctcaagggctattagaaggctcccattagagttctctcctgagtgcaattcttcaaagaactgcactccttttagtgagaattctggtccactgccatttctagtgtctttgaaaggcattgagtgttccatttctaacaacaagcat

SEQ ID NO: 230357 - DNA, 399 bp, Glycine max
gctcgtcgcttattaagcaatgtataaatagcatcgtcttacgtgctagccctgaagataaaagttcgtgcattctgtctggccagtcaaaatctaatctgcgggcaaaatctagcacttccctgcatcaaagggtaccacccaaataaaatattagggtgcatcataccatcatcttaaaagcactctagagtaactaccatgcaaccatctctttatatcaaagagataactttgatctacctaaaatgagaaggcaacaacacatggaaggtaaatagagtcatgaacattgccactatgcttaactcaagtgtgcaaaaatcatacgttccactccttgataaccgaaaagatataagagttcaaatcattcccaggccttgtcctctgtatatg

SEQ ID NO: 230358 - DNA, 432 bp, Glycine max
tatctgatggcaacttggaagtgtcaactgctgattctgaatcatatacacggaatgttttttctcctttggatgtgaatgtccatgttagtgttcgataacaaggttctggtattgtccagattatagaattgtaactttgtaaccccttctctccctttctttttctccgagggatggaaaaaaagaggaccatttgatgtggatgtaaattagtttcctttacgatgttggaacttggaagagtgatttaatgagcttctgatttcaaatattcattcttcttccaatgagtgaaatattaactatatatacgtgtgtgttaacatgtttatgttacttgtgatgtattacgacaaaagcaatgacatgattcattttgacccacttactgatgagtaaggaattttgacatacaatgaagtggtatgt

SEQ ID NO: 230359 - DNA, 310 bp, Glycine max
atgcgttctttgattgatagagatcatcactctggttatgatgaagtgaactcgacctttgagctttatggcatcacctttgttatcataaaaacttctttgaatgaatcttgattcctcttgaagcttgcttgggcaatgtgaatgatgcgttagggttaaatagaggtaggtatctattcatgtatttctatgttgtgcatggaatggatatcaataaaaattgaccgccatttacataatcgaatgtcttgagctttcacttagaatctaaatgccgcatctagagttagtgatatcattgtgatgc

SEQ ID NO: 230360 - DNA, 148 bp, Glycine max
tatgtaagcgacactatggagtgctccatcttctcaatgaagatctctcaagaaagcttctcttgaagctaactagtctattaatcagaagcatcgtgtgacacatcgttgtcaatatgatgaatgatagtcttgtgagacatacttc

SEQ ID NO: 230361 - DNA, 434 bp, Glycine max
gctcgcaaaatgggcctccggagattattgagaagatcaaccaatatgcttatcatttgcaattgtcaagtcacattcatgttgctcatgttttcaatgttaagcacctcattccttattttggtgatgtttttttttttttttttgtattctcttgcgatgatatggtttctgatttgacgatgaatctttttcactccggagaggattatgcagtgtagggtttacccacaaattcaagtgtcttcatcttttatgaatgagtacactttttcgcatggaaatagccttctaagcgagattgcattccctttggcaatgtgttggttaatattttagccaaattccatcatttaagggatcaaaacaataattttatcttatttttagggagtatttctgctattttctttatgtaagagccttttcagcat

SEQ ID NO: 230362 - DNA, 492 bp, Glycine max
  unsure (1)..(492): unsure at all n locations
cactatagatactaagctaaaggaacactcaaatcgggtgtatntactcccaaggcctagactccgaagagtccgttagggcctctccttcttaattaaaatccaacccagaaaacattttagcacacaaactctatctatgaactgtacaaaacacatgactccttaattattctaaaaaaaaattcaactcgtcgcgcctaanagtaattaaactcgtcgggttcccacagtggatcctatcataatactcgtctcacattaactcattgtctttaaagggtcttacagtcatgtgattatatagttcattactcacaactcaatgcacacaacatttcaatacatgtgtgatctcacaatttaatacatactcaacttgtcatttacacacaattcatcacacttccataatcccaagacaacacattatcacgcctcatgcatcatatacatgtcacacaataataatattaatatgntatattcata

SEQ ID NO: 230363 - DNA, 420 bp, Glycine max
  unsure (1)..(420): unsure at all n locations
attggtcttcgctggcaaaatgatcgtagtgggtctaaaaagaggcaaatctgatcatcatgccttgataaatgcaaaanaactatggcaaatgaagagggtgagaatgagggagaaacccatgctatgactgccattcctatacagctaagtttcccaccaacccaacaatgtcattactcagccaataacaaaccttctccttacccaccacccagttatccacaaaggccatccctaaatcaaccataaagcctgtctactgcacttccaatgacgaacaccacctttagcacaaaccaaaacaccaaccaagaaatgaattttgcagtgaaaaagcctgtagaattcaccccaattccgatatcctatgctgacttgctcccatatctacttgataattcaatggtagccataact

SEQ ID NO: 230364 - DNA, 462 bp, Glycine max
  unsure (1)..(462): unsure at all n locations
agcttatgantggngtgaatgaagttgtaatttgagtaggaaactatataatttagaagcattatgttggttgctttgttatgtagagaatcaccgagggacagaacaaagtggtaattattgatagaatgtgggctaggcttctgtcctcaacaaatcagcctagctatacgattgcttagactctctctgaagaaaaaaagggagaaaggagcaaaacgatcatgtccctgagtaagggcattgttcaaataaccatttggcttaaaaagaagtcgacaacatttttcacccttctatatatgtacatgtttattgtattaattttatcttatatctattataagatttgtttgtcctagcaatctggctttgaactttgtcacaatttacctgcataccaaagtttttgtgtagcagtttaggttgactgactccattatcaataatctaattgattga

SEQ ID NO: 230365 - DNA, 448 bp, Glycine max
  unsure (1)..(448): unsure at all n locations
ctaagcttacatggagctacatcattntctaacatattcaaagacattctcagtaattgaacttggattntagttgttttaaaaataaacataaaagtggaaccaacgaaattaataaggggcgcttggtttgaacaaattacgtctgcatagcgcaatgcaatcatgtaacattatgaataaggaataatgaagacaaaatggacatttgggtctacaacacaacctgacaaaagggcaattgtaatgaaacatgagggaatacaataatattattgatgcagtcatgatgttgttttggccgaaattntgtttccatttgtttgaaaaaactatgacaattgggttgcttccctaactgtgacaaaacattgagttcaataaattaaggtcattagctggtatagtaagaagatggttactaaattagataaggtcatgcacctct

SEQ ID NO: 230366 - DNA, 462 bp, Glycine max
  unsure (1)..(462): unsure at all n locations
agcttcagaccaaagcaacacanaatctaggtatccaaaaccccttattttaatggattttcaaagtttgagaagtgaaattgagaatggggtaaatttggagcaaactctcacctcacacaagtctataacatcaatttaaacttgttcaaactggatttacacctaaaattccaccgaaccaaaatttgactcctcaacacccaattttaccctagaaatggctctttgttcactttggtcatttgtttttctctctagcacagcccacactttctcataagtcctaaatgaaatttcaagctaggattaactcactttaacctccaaataccactaaatccagatttggccttccaactctcaaaacctcactctttgtccactcataacaccatattctcactttctaaccctaggttaactctacccttcatctcaaacagttttccataagcaatt

SEQ ID NO: 230367 - DNA, 481 bp, Glycine max
  unsure (1)..(481): unsure at all n locations
gtgaagctcctgtttagctatacccgattntactcaaccattcgtagttgaatgtgatgctagtggagttggcattgtggctgntttgatacaaaacaaaacgcctatagcttatttctcggagaaattgggaggagccagattgaactattgcacctatgacaaagagttctatgccattgtaagagctcttgatcattggaatcattatntgcgttctaatcactttatattgcattcagatcatgagtcattgaagtatatcaatgggcagcagaagttgagtccaaggcatgctaaatgggttgaatntcttcaatcttttaatttctcttcaaaatacaaggatggtaagagtaatgtggtggctgatgcactttcaaggaggtatgctttaatatcaattcttgaaactcgtttacttggttatgagactttgatagattattataaagaagatgttgattctcgtgaaatatac

SEQ ID NO: 230368 - DNA, 318 bp, Glycine max
  unsure (1)..(318): unsure at all n locations
gcttctcaatatgttacgggactcagttggacatgcgagtaaaaagttattgtcgttngaatgggctatgagcttctgtgtgcaattacgagtgtctcgatatattaccgcattcattaggacgctgagtaaaaagttattctcgcgggacctgggtcataacctctctactgaattttgagcagctctcactgcacacttgacacactgggaacctctagtgccaactgcattgatgaatgaagcgacccgaacgccttgtttccatctcgaccgtctaaaattctaatgtacacaatcgtgacatccgagttaaaa

SEQ ID NO: 230369 - DNA, 321 bp, Glycine max
  unsure (1)..(321): unsure at all n locations
cgagcgtctcggtatattacgagactctatcggatatcggagttaaaagttattgtggtttgcattngctacgagcttctggtcgcaattacaggcgtctcgatatattatgggactcaatcggacatccgtgttaaaatgtattgcagtttgaatttgcaacgagctttcgttttcaattacgagcgtctcgatatattacgagagtcaatcgaacatcgaagttaaaagtgatcgtggtctgcatttgctacgagcttctgttgtcatttactggcgtctcgatatattatgggactcaatcgaacatctgagtacaac

SEQ ID NO: 230370 - DNA, 453 bp, Glycine max
agcttcttagtttcagatgatgcagctgagtctgtagctacctcatgcactcctctaatgactatagcatcatttctggtgctaaactgttgggagttggaagccatcttctcaattaaatttctggcttcagcaggagtcatgtctccaagggctccaccactggcagcatttatcatacttctctccatattactgagtccttcataaaaatattggagaagcagctgctctgaaatctgatggtgagggcaactggcacatagttttttaaatctctcccggtattcatacaggctctctccactgagttgtctaatacctgagatatccttcctgatggctgtggtcctagaagcagggaaatatttttctaagaatactctcttcaggtcatcctagctcgtgatggaccttggagcaaggtaatacagccagtcctttgccactccc

SEQ ID NO: 230371 - DNA, 371 bp, Glycine max
ctcagctttgttccattgagaactactatcattccatccaaagatgatagtataccaaggaatggtttcaccatgatggatgcagaggaaatcaagaataccaatggtgattgtcattttctaatttgtatattatatttgttgtctttatttactctttttactatgttattctttttagttttatcgttaacaattatttttgagataagaaggaaagaaaatcatgcttattcaattggaagttgctgaagagaagtacttcacacttaattcataatttaatttttgttgtaaaacgaattgaccaatctgtgtcatattatctattattagcattttaatgtatatgtatgaggtatcttttattc

SEQ ID NO: 230372 - DNA, 449 bp, Glycine max
  unsure (1)..(449): unsure at all n locations
agctatatgggttctgtaggctagtacatacggttcataatgatgagcaggtcccacgacgtgttgaagtttttcaaaataaaaatgttttgccactcgatgcaatcatatcaacaggttttgtgaattcttcatgtactgcaagtatgcctcacttgataaataaattacacactacaggcattatatacctccttcatagttgttattatgatgcttgatttctntttggtaatgtgtgttatgaactgataatattgatagcatgatgatttttttatcaggtttcaaacccatgctcttgaggagtttgatgctctcaataccagtcttaaatacttgttcataatttgatgtatgtataacaaagacaaagattagggctntttcttagaggcatttcttattttgttgtccaaattctataaagggattgtgaaaggggatag

SEQ ID NO: 230373 - DNA, 480 bp, Glycine max
  unsure (1)..(480): unsure at all n locations
nggagaggatgcttcaatggagcanaaganagaaggagagaaatagagaggngggagcacgatattgaaggaagataaagggagagaagttgaactttgagttgtgtctcaatggactctcattcatcaaagttacaacaagtgttacacatgcttctatttatagacttggtagcttccttgagaagctttctttagaaaacttccttgagaagcttctttgagaaaacttccttgagaagttagagcttagctacacacaccctctcataactaagctcacctccttgagaagcttgcttaagaagattcctaaagaagctagagcttagctacacacacctctctaatagctaagcttacctccttgagatgagaagctagaacttagctacacacccnctataataactaagctcacccctatgccaacaaaaaaacatganaatacaaaagaagtccttactacagagactactc

SEQ ID NO: 230374 - DNA, 448 bp, Glycine max
  unsure (1)..(448): unsure at all n locations
agcttatctctcttctaaatcgttntacgtatcatccggtcctcaattgcatctatagtgtattcctcgggttttttcactgaaacatatcttatggttcacgtagtttccactactataaaaaaagcttttctaagacagacaaaaataggatacaacgacggttgttgtctgtcgtagaagcccacatcgtggaaagttaaacctttcaacgacgaatcaaaaaacaccatcttagaaagggagcaattttcaaagacagtgcttacgtcagcactgtccttgaatcaaatattatttttaattattgatatttttttgaatgatatcccatcagaaaaaatataaataattaaaaataatttatattagcatgattgtaattaatattaatagtaaaaattatttattaaataaatatttaaatgatagattaaatcataataag

SEQ ID NO: 230375 - DNA, 466 bp, Glycine max
  unsure (1)..(466): unsure at all n locations
taccttgtgaatganatgatatatcctntgcacccatgattaatctaaaaatctgattgcttgagttgaaccttgagcctatgaaattatatctctacctaccttgtcttaagttgtaggagagcattatggttcaaagcaaatttgtctcaaatttgggggagcttattgggtgacaacttctaatggtaagaagatgacaacacacacaataaagtaaaaagctgctgttaaaaaaaactgtaagtatcaaaaataaaactgagtgtgtgttgttatctaataaagctaagtgctgaaaggcaagtaattgaagctggaaataataatgaaaagagtntatctatggatgaatgctctcctataacttaagctgtttcatcttagaaaaaccataatttngttgagcccgacctcattacaagcttagaaaagtccttcagattcagtttgtgtggttatgact

SEQ ID NO: 230376 - DNA, 443 bp, Glycine max
agcttctcccctattttcctataaaaagggggataagtgaaggaaaaaaatgttcaaccctcctggtaattcgaggtcacttgaaattagtgaaaaaaattgtttccgtgatgaaaatccaagtcgaggcgcttccgtaacgtttccgtgggtgatttcacgaagattttcaaccgttcttcgacgttcttcgttcgttcttcgtcattcttcggtcttcaaccggtaagttcccgaaatcgagcttttcaattcattctatgtacccttagtggtcgtcatttgtcttcatgtgcttttattttcatttcatttactttccgtacccccttttgacgtgctttagtcatttacttaagtcattttctcacctaattaaaaatgaaataaatttccaccgatcatttgaattgtaaccatccgttaattttgttaaaatgaaa

SEQ ID NO: 230377 - DNA, 473 bp, Glycine max
  unsure (1)..(473): unsure at all n locations
gcttggaatgatttcatacanaagttagtcgtataaagcgactaacagccaacctactaccatccttactcaaaaaccaaatggtcatagtaagcccgggaaaggtctatcaaccttcatttccctaatggtacaatcctaacgccatatgcacctatcacggtggcgtctcggggcactccatcgagcaatttgtagcttttaagcacaaagtacaaagtttgattgatgcaggatggcttacatttcaagaggatagttcaaatgtaaggactaatccactttcaaatcatggaagctcgttgatgaacgtggtggaagaatggaaatctcatgagttgaaacagataggggatgtgtcgactacaaaatgattcatattggaggcgttgcacgaggctgatgtgattaaatgtgatggtaataagggagatcaatgcttgatgcattcangggcattgcttgatgtagaa

SEQ ID NO: 230378 - DNA, 441 bp, Glycine max
gcttgccatgctctctggaatgccttcaactgtatcaaaactattggctactaatccaaataacgtgaattcttgggacccttcaccccatttgaggccagcacttactttgcctcaaatgccagtttttgcagcttggacagatgcatagttcatagctcaatagtccttttaattttttgttctctcaagtgaaatttcaatcctttctattgtctttttttgcatgcatgaacaacacaagaggaaggggttgtagctagtcaaatggagggtctaaatattatatcatcacatcactgtcagcaagtttaatttaaactttcaaatcattacattttagcattttactagttaagaattcctgaattttcattctcattttcaatatatccttgtggccagatctttgcaattcattcattgatagaaacggacgag

SEQ ID NO: 230379 - DNA, 392 bp, Glycine max
  unsure (1)..(392): unsure at all n locations
ntctctntgaagttntgtatgatattcctttcatacaaaatttcatactttgcaacgganaaacataattaatgccaaaagtatactatcgaaacatgtaattgaaaatacatgtaatagaaattaaaatccctaaatttcataattaggatttatacataattgagagaaattaaatcatccctagatttaataattagggttcatacataattggaagaaattaaatcattcttggagaatcataaatttcataacacatgttttgatatcacatgtaaaacattaagggggttcttagactatcaattataggaaacaacatgatcttaaaacatatgattctcacatacaatcaataaacaatagataatggtgcatacctttcttca

SEQ ID NO: 230380 - DNA, 386 bp, Glycine max
  unsure (1)..(386): unsure at all n locations
agcttatattgatcttattatggtggagtattctcgcacaacagagtgactctgacgggccactttatgattntacttaatgagagtgatttgacattcttattatgtggcgtgctntgttatatacttctaagcgtcatagtgtgatttttcactgacatgacaccacattgcatataagtttgagtcttagtataattattgcataattgataactactatttataggtatagtttggtattaaattatatagaaattagtaatttctctgtcttatttcttcctttctgtgcaaataattgttattttaacttcatttgagtttttgcgcgaaaaaatattaaaatttgatgaatttatcatgcttaaagtaaagcccaaaag

SEQ ID NO: 230381 - DNA, 420 bp, Glycine max
  unsure (1)..(420): unsure at all n locations
ccccttgttcattactaaacaagctgaaattaatcacaatcactagcaaggtatcctaactacatgcaagagataagaatgaanaatacgaaagggaaagaaaagctgggttgcctcccagtaagtgctcttttaacgtcactagcttgacgcatcattatgttatttaggatcaaacagaattcctacttcaaggaccttcttctcaggtctcctttcctccatcacatgcactgtaagacagatattttgtctaggtggatctttgtcctcatggaacaagtcaaagctgatattctaatcttctatgcccatctgtaacatcttctttcccatgttcaccacacagcttgtagtagacatgaataggcagcaagaatgagaggaatgtcagcatcctcttctatatctatgacaatg

SEQ ID NO: 230382 - DNA, 465 bp, Glycine max
  unsure (1)..(465): unsure at all n locations
gcttggagccattggaccccgaggactatattctcatcggaaaggaaatgttgaaataggtcaagggtaaactgatgtccctagacggtgagggtcacttgaaggcaaacagtgtcgcaatccaacaaatttctattacccatcataacctgtaaagctggtgtctatgatgttggagggttgaggactatatgtgagtacttttgccatcaaccaatatactaacgtggtggtgaaggatatggccataaatgcaaaacatctcgatggcaagcatcccagagtgtgtgttcaggcttaattgtgatggattgtttggaagatcgtctaaagaaagagctgccagagatgcgtcgactgctattgaatgatcagaatgtgagaggttcttttcgttgacaatgaagaggtgaagtcttggcttgcatctatggccaatgacccatntctcctcacaatggtagc

SEQ ID NO: 230383 - DNA, 460 bp, Glycine max
  unsure (1)..(460): unsure at all n locations
acagtgagaagaatgataaaaanatcgtgacttagttgacatatgacaaanaagagtataattntaaattttgaaagaaaatanttgtttcctctttcaataaatatttttttaaaagttgaattgaatggagcttttaagtattgttgatcccaatagctatggaattacctgtcgaaccttggtaaaagtgaaagataatgctaattagtgtcttgagggtattagttaaagaacttnaaagtagaaatattattattgggagaaaaaaaaattgtgttactcattatctttttacgttttctattaattatacaataaatatnttcttaattaatatcctananacattaattagtatgatcaaaataaaatacagattcataagaccatctaatacattgagtagacaaacaaatccctaatagnatgttgatagtctacaaatctcaccactgat

SEQ ID NO: 230384 - DNA, 455 bp, Glycine max
tgtagttaagaccgcagacaacttctgttcatgtttgaagcttgatagaaacacagatgttagctatagtaatatgaggaaggctgcttctcgagaagatttgactgacaactatttatactgtcctaaagctgtagatcttcagtacaaggatttaaggcattttcagtggcattgggaaaagggggagcctgtcattgtcagcaatgtgcttgaatgtacatctggtttaagctgggaaccacttgtcatgtggcgtgcattacgtcatgtaactaataccaagcgtggccaacatttggctgagaaaacaattgattgcttagattggactgagggttgcttaatttcccaatctttaactttattgaccttggagagctctttacacaaattttattcttcaccttcattctcatgaagattatgtctaattgtttaatgttggtacttat

SEQ ID NO: 230385 - DNA, 368 bp, Glycine max
  unsure (1)..(368): unsure at all n locations
atggctcgcctccggacttcacctnccgtgccaccccggaagatntaagccaagcccctactttcgaggggcaactcccaccttatgacgactatcccgggcaagacgatgaggaaggagatacccatcttggccccctgctccacctcaaagatctgtccccccatgaactaccccaaccgaacataatctgccatatcccggcctcacccacacctgtaaaagaatctgttcccttcgcggaagataagggaaagattgaggcgcttgaagagaggttaagagcagtcgagggccttggccattacccattctcgganttggcggatntatgtctcgtgcccaacatcgtcatccttcccaagttc

SEQ ID NO: 230386 - DNA, 462 bp, Glycine max
  unsure (1)..(462): unsure at all n locations
caagcttgcttcttcacaaaggtagtgctcatgcctttnttntggaataatgtggtttacactcttaaagtcatggctccacttgtgaaagtgcttcatcttgtggatggtgaaaggaaactagccatgggctatatttatgaagcaatggacaaggcaaaagaaacaattatcaagtctttcaacaacaatgaaagcaagtacaaagatgtgtttgcaatcattgataaaagatggaattgtcagcttcatagaccattgcatgcagctgcccacttcttaaatctagagtgcttttatgacaacactgacttggagtttgattttgaggtcaccaatggtttgtttgagtgcattaagaagttttgatttagaggtcaccaacttgggacaaaatagaatgctgacctatctaggagggcttaatggaatgttaatcacaaaatccaatctagcttttat

SEQ ID NO: 230387 - DNA, 389 bp, Glycine max
ttgtctcttaacagggcctcctcaacatgcggagccagtcgcatgatgatgatctgctgaccaccagcctagtgcctgttcatacccgtccccgagcatctgaaaacaggagatggcatttatgcagtgaaaatatggccttgctaccacttaccttggttcatccctgtctaggatttgacgctgtattgaccacctcacgaaatgatcatgtccctgtctgtcgattcataaggtacaaaatgcatgtgcatgcgtatgcatgggtagtttcaaaggcaataattctttagcaaaaacccattgtgtttagttctaaataagcacttagagcatccctataggtcgagcgagaaggcttgaatcatttaaaaagaatatgcatcctt

SEQ ID NO: 230388 - DNA, 371 bp, Glycine max
  unsure (1)..(371): unsure at all n locations
ctgcggcatgcaagctntaagccaattcatacgacaataactgtttactcggatgtctgattgagtcccgtaatataacgaaacgctcgaaattgaatgttgaagctctgagccaattctaacgacaataactttttactcggatgtccgattgagtctcgtaatatatcgacacgctcgaaattgaatgttgaagctctgagcctattcaaacaacaataactttttactctgatgtccgattgagtgacgtaatatatcgggacgctcgaaattgaatgttgaacctctgagccaactcaaacgacaataactttttactcggatgtttgagtgagtcccgtattatatcgagacgctcaaaattgatt

SEQ ID NO: 230389 - DNA, 431 bp, Glycine max
  unsure (1)..(431): unsure at all n locations
tactcagctanacattcaatttcgagcgtctccatatattacgcgactcaatcagacatctgagtaaaaagttattgtcgnttgaattggctcagaggttcaacattcaattttgagcatctcgatatattacgggactcaatcagacatccgagtaaaaagttattgtcgtttgaaatggctcagagctttaacattcaatttcgagcgtctcgatatattacgggactcaatcagacatccgagtaaaaagatattgtcgttngaattggctcagaggttcaacatataatttggagcgtctcgatatattacgggactcaatcagacatccgagtaaaaagttattgtcgtgtgaattggctcataggttgaacacttcaattcgagcgtctcgatatattacgggactcaatcagacatccgagtaa

SEQ ID NO: 230390 - DNA, 462 bp, Glycine max
  unsure (1)..(462): unsure at all n locations
agcttccgagaatcaacatcaagattcaagaatctagagaagacttattctatataagtattaaaaagttttttcaaaaactgagtagcacatagattcttaacaaaaccttttaccacagggtttttactctctggtaatcgattaccagattattgtaatcgattaccagtagcaaaattctgttcaaaaagctgtcaactgaacttacaatgttccaattgatttcaaaatgttgtaattgattacaatgttctggtaatcgattaccattgtgtttgaacgttgaaattcaaattcgaatgtgaagagtcacatcctttcacgaaaatgctttgtgtaatcgattacactgatttggtaatcgattaccagtgataggttctgagcaaatcagaagatgtaactcttcacatagttattgactctttcacattggtttaagttnttctaaacgtcata

SEQ ID NO: 230391 - DNA, 457 bp, Glycine max
  unsure (1)..(457): unsure at all n locations
caattatctaatcattccaatccactcaaatcatacaattgcttattcaaatcatactcaaacactcatttcatgcaaaataatccactgcatatcattttcaatcaattcactgttcaaacacacttttggtacaagaaaacaactcaaagtgctaaaatttaaataactgaaatataaagcaaactaaaaagcaactaaatcctgataaactaaaatgttcatgcttttcagaaattaaactaaacacaatttaaacatcctgctcatcctatggctgatgttcattaagatccagtgctggagctgctgatgaatcctgaataggctgctttggctccgtgactggtgcagatggctgggtctcctcanggataggtacangagatggctcatggatctggtttatggaagtcccctcctcttgagcaatgttcgcatctgcatcaaaataaaa

SEQ ID NO: 230392 - DNA, 425 bp, Glycine max
caatatgcatgtgaatcaagacgcatcaacaagaatcaagccaaggctattgtgctagcaatcaatggggcaaaacacaccaaatgattataatgatggatggctcaaattctcacagatgtaaaatcatcactttcaaattgagctttcaaaactatcatgacatgtagagaagaatcaatgatttcatgtcacaaaatgtcaagaacttatatgttcaaaacaattacccatttcttgaacatatcctataattcaaagaaaaacatgcaaagtcgtacgtgcacacaaaattgacccaaaatattaaactgaatatccgacgaaactaacaacattaacaaattaacacaactaacaaattaacaaaaccaacaaaactagcataaccaaagaacactcctcccctccatacttaaacaaca

SEQ ID NO: 230393 - DNA, 544 bp, Glycine max
  unsure (1)..(544): unsure at all n locations
cgcacgcgattgatgcatcgatggaccanggacacatccanacgccagcctcatggatcgccataagacttcatntcccaatcgaggatctatggttcgatggtctctcttacataacctacccaatattcttcaccaatcggcatttgctggatcaagtggtctgacagtaattcccaacgtggacgcctgctacacctctattatctgtccctcgctgaactacccctacccatcataatctgccatgttccggcctcactctcaccttgagaagagtctacttccttatccgaagacaatgcgtagatcgaggctcttgtagagaggttaagagctcctctacggccttgggcattgcacgctataagaattggccgctttatgtttcctgacccacatcgtcatctgttcctacgtgcaatcaccatgacttcgacacttcttaaggtatgacatgtccatcaaggcttctttcgatgcttagactcaacagaggagcgcccttctcatggaccctatatttgcccatcatttttccccg

SEQ ID NO: 230394 - DNA, 442 bp, Glycine max
  unsure (1)..(442): unsure at all n locations
gcttcaaaccaaagcaactcataatctaggtatccaaaatccctcaatntaatggatnttcaaggtctgagaagtgaaattgggaatgaggtaaatttggagcaaactctcaccttacacaagtctataacatcaatttaaactttctcaaactgtatttacacctaaaattccaccgaatcaaaatttgactcctcaacacccaattctaccctaaaaatggctcgttgttcactttggtcatttgttattctctcttgcacaacccaagcttctcataagtcctaaatgacatttcagactaggattaactcactttaacctccaaataccactaaatccagatttggccttccaactctcaaagtctcactctgtttccactcacaacaccatactctcaccttctaaccctatgataactctacccttcatctctaac

SEQ ID NO: 230395 - DNA, 427 bp, Glycine max
  unsure (1)..(427): unsure at all n locations
gctctctctgtcaatgttaggttcatatgctcaactacaccattgagttgaggtgttcctggcatggtcctctcccttctaatattgtgctcatagaaaaactttctaaatctgtctacatattcaccaccattgtcagttctgtgccttatgatctccaatcctgtctcattttcagccatggctttccatatcttaaaagccacaaatacttctaacttgtattttagaaagtaaactcataccttcctagagtgatcatctataaaactcataaagtattgtttgccaccaatggatgacacatatgttggtgtacacaaacatcagagtgaacaagctcaagtntttccttctttagggttctgctatctgtctaaaagctgactctnttctgattgccaaatatgcagtcttcacacatgta

SEQ ID NO: 230396 - DNA, 439 bp, Glycine max
agctagtaggattatggggtacccatcacatgtgtgtctaggtggcggtcgggcgatggtgcacaacaagttttccacatccacaatgcgcgcataaacccaccatcccctgttgcccacctccatctaagctcacgtactcccatgtagcccatatcctcatttctctcaacaccgggtccccatcaatcctcttaagcttccacaacatccaagcaaaacaacattcaaactgcacaagctatcacagccaagcaaaacagagcataggcagaaaactttgccaaaacaccaaccaaatcacagcttttctcacttaaagaccccagtaacaattccttcgttctggttcattaaccgttggatcgactcgaaaattttactggaagtctctaatacttaagcctacattttgaaccgtgggatctactagcaagca

SEQ ID NO: 230397 - DNA, 467 bp, Glycine max
  unsure (1)..(467): unsure at all n locations
tagcttcttatctaaggctcatcttggtggtgaagctccttcttccatggcttattccttaatggatggcgcctcctctcacctcttttcctttgtcttccgctgcatctccatggtggaaaatcaccattaaaggatcccattgaagctcaaagatccagcctccatagaagtcccacaagcaagcttccatcaagaaataggagaaaataatggcacatcacacgctgaatgaattaattcanaaagaagaaacatatagtaagattaatgtacttgttgcgataaagacttgaccagatgtgtcggccaagcaaggaaggtctaaattgcctaccccacttatgaaacctcatgagtgggtacaggaactgaagcatctgcatctataacctcctccacacttacctttacttggccaggcaacaaaggagtgttatgaacaatagtggatccctcataaactc

SEQ ID NO: 230398 - DNA, 415 bp, Glycine max
  unsure (1)..(415): unsure at all n locations
agcttcngaagaaagtgatgtggtacaagccctattgctaagcttgaaagagcccgggtagtcaaagagaagttcaagtccatagccatcagagtctgaagagagtatgatgaactaagggacgtcaatatggccaccgatgaagccttggaatgagaaaccaagaaggcccgataggaagaacacgaccaaaacaagttttgaggggctttataaggcagcaatagtgagctcaaactccgaagaggtgaaaggaatcatcacgggtcaaaggcatgatctggaaggacgagctaaaggcttgctttaggtcgaaaagaaatttgtcccaacagttaaagtgagactgaagggaatatgtgggccatcatcgatgagtgcaaagagaagctaaatctagtggcgactcacgagc

SEQ ID NO: 230399 - DNA, 410 bp, Glycine max
cagagcaaaggcagataactcttgccaaacaccaaccataatcacagcgttgtctcacttaaagaccccagtcacaattcctgtcgttccaatttgttaaccggtggatcgactccgaaattatactggaagtctctagtacataaccctacattctgaccgctgggatctactatctaacatccagaactcattctgcactacgctttccacaaccagcaagtgcatagcatttttctgcacttgtgctatattctgctgcacaatttcacagcagaattctgcacacagtgcagatttcgaaaatcacactttccctcatccaatcttgcccaaatcaaatcctacaagtcccaaatcatgtatcaatcatgtctaaaccacagtccagcttctaaacacaacaacac

SEQ ID NO: 230400 - DNA, 440 bp, Glycine max
  unsure (1)..(440): unsure at all n locations
agcttctaaactttatgcaatattgaagctcttattccacttgttagacaaatgtcctcagttatcttaagaagggggggttgaattaagataacaagaactattccccaatcttcctctttttcactcctctttcgattccaccgattgaaattcactaaaacttcatcaaatggcagaatcgtcaaagaagagaaagggatcatcttccaccgccgctgctgctgcccatcgccaccatggaccatccaaagcacccacagcacctatccatccttccttgtcatctccaagatcatccactctgttttcttccgatgatcagcgtctacggtacctagacatagatntcttcaatgatgagacatttgattgttatcaagtgtttcaaaattctggcttggttgatttcatgtctttaaaattgccttattatcctg

SEQ ID NO: 230401 - DNA, 473 bp, Glycine max
cttttcttcttcactggttaagcagtttacaacatttaccaaagctctttccagcgaagtctgtggagttgcaagagcgctaatgttttccttgtcaacttcctccaccttgaagcacttcctgttctcctctagatattttattgcttcaaacaggttgaaggtcaccttctgaatgtcaatgctcatctccagatttccattccccatgtccaccacacagttggcagtcaacatgaagggtctacctaagataaaaggaatctccgtgtcttcttcgatatccatgatgacaaagtccactaaaaaggtgaagtggcagaccttgactaggacttcttctaccaccccatacggtcttgtgattgagcggtctgctagctgaagcgtcatcctagtagggtctatcttcagattaccaattcttctgcacattgataggggcatcaggttgatgctcgcccctaagtcaa

SEQ ID NO: 230402 - DNA, 417 bp, Glycine max
  unsure (1)..(417): unsure at all n locations
agctataaagctgggcttagtgacgcaggatgttctaagcgccaatctcttacggtttttgaattcttggaaatgcgcttagcgcacctattgcgctaagcctgaactactcactgtaagttgaagtttgatggtatgctaagcctcacatctcaagctaagcgcatattgtagaaaatntttgtgttgcagaaagtgctaagcgcagcctgctacgctaagccccagatgctcactagaccttacaacttcaagttcgacttaacgagaggctangctaagcgcttgtgttttaaactcaaacatcatgtgggcatgctaagtgcagttgtgcactaagtgcgacatacgaatttcagtttttaaaaaaaccaaaagctgaggcacttgggtgttaccccaaataccttcagcttc

SEQ ID NO: 230403 - DNA, 333 bp, Glycine max
  unsure (1)..(333): unsure at all n locations
tcatgtcttcatggttcctcattgtgctcacttctctctgaagcatgtgtctgatcccattgcgatttcttcttatgaaaactagtttctatagtgtattattcacgaatntgatgttctttagttaagagacaaacaaaaataaacatatggcttgattcatcaatctataaatgagtaatgttctttactcagatacatgtattacagagcattttcacagaaattaagatgccaactagagtaattcaatacatgtattttgtggttgttaaagtgtttttgtcctacacccctgtggctatccttgcctctatcatcctatctagtctt

SEQ ID NO: 230404 - DNA, 346 bp, Glycine max
  unsure (1)..(346): unsure at all n locations
agcttctacttncatggcttattctctagtggatggcgcctcctctcacctcttctcctttatctttcattgaaactccatgactgaaaaccaccattgaaagagcttattgaagctcaaagatccaacctccatagaagcttctcaagcaagcttccatcacttaggctataaacagaggccttgtgtgtgcaatttttcaactttgatcatttgagaaattacacttcaaggtttacaactcatatgaggcataaattgggtgccccttctatacctgtccatccactcataatctgcttcctttaagctcttatcgatggcttactatggtggtgagcttgta

SEQ ID NO: 230405 - DNA, 405 bp, Glycine max
  unsure (1)..(405): unsure at all n locations
taccttgaatgataattatataccttgcacctcttttgagttgaatgatattgtcaaaagtttcaaccctgaacataaataattatctccanatacctcgtntagattctaggagggcatatagtttcaggcaaatctaccccaaatttgggggagtggaactaattgggatgcanagaaagagatatagcatcagcacacacaacagataagttgtcattttcaaaaaaaaagtgtgctgatgtaacaaggttaaaagcaaatgaaagtgaaaagctagtgagcaagccaattgtattaaaaagaccattatgataagtctaggatttgtgctctcttagaatctaagcctttgaatcctagaaaaacaaataaattgttctagccaagcctcactacaagcct

SEQ ID NO: 230406 - DNA, 452 bp, Glycine max
  unsure (1)..(452): unsure at all n locations
ntatagaaacagcggtgagtgctccttgatatataatatagatgggggattttctgcttcatgatcacctgtaaacaagaaagtttgctttattattctatgtaactcatcttatctaaacatttgcctttcttgttttgatgattgtcatagactcatagtttttgcctttgatataattttctgcaatcatatccgttttaatagtttgagtttttcaataatggatatgcagaatattttcaaaataagttggtagacacgatacatttcatggaaattctcagtttgaaagatagtgtggagagagacaccttcttccgcaagcttccaaatttagctgagcaacttcctcgccagatagtgttgaagaaggtatatttctgtggaatttctaattataaactatagacggatccacctttgttatccaanntttttatgattcttat

SEQ ID NO: 230407 - DNA, 464 bp, Glycine max
  unsure (1)..(464): unsure at all n locations
agctntatctccaaggcatagaatggatgcacttctggctctatcaatcatctctgatttctcctttgagcttagagattcagacatcctttcttctcctttaagagcttctgcagagccatgttgaatcaagattgcttccatcttgattctccataacccgaagtcattttcccctaaaaacttctcaatatcgtactttgttgttcccatctttcttgatcttgatcttgtccccacagttggcgccacttgttggttcttctacctctntatgttgtagaacctgcacaaatcaaggaaaagaaaaacacagcaaagcaacaagcaagaatctacagcatgagtttacgtggttcggcaatgtgcctacatccacgagaaatgcagctcttcttcatcacattgatcatgaaacattacaagttcaatacaagtagcaactagctntgatctctctctcg

SEQ ID NO: 230408 - DNA, 444 bp, Glycine max
aggcattctcaatggtggaaggacctccgaaagctatatcagtcgcttgagttcagtcttattcatcaacagatggtatggaaggtagggggaggggaaaaaattaaattctggaaagataaatggttgggggatgattgtaaacttgaacagcaatataatcagttgttcctgattagtggtcagcataatagtaccatctcgaacatgggaagcttctctcaaggcaattggtgttggggcatacagtggagaatgaatctatctgattatgagcaacatatagttgcggcatttatggaagcaattactgatatacaaatccagcttcatatgcacgatattataaagtacatattgagaagttctgaacttgcatccggattaaagatcaactatgcaaagagtagtttcggagcaataggaaaatctgatcaatggtgg

SEQ ID NO: 230409 - DNA, 459 bp, Glycine max
  unsure (1)..(459): unsure at all n locations
agctntattntaatctttagttacactccagatatgcagtatgtaagaattaatgtctcatgtgagagacatttgacttatgtaaggactaataagtaaataattaacgattaagagctaaattgtaattgggcttaataggagaagtttctaggattaactgctacttgatgggagtagtggttataaaaggggcttaatacccactaacgtgaaataaggtccccttcctgaccagaaaagtgttctctctcactcatagccatcactaacggagagaggcagaaaagaaaggccaaaggaagtgaaatcttatttctctcatctttcaaggaaatcaaagtaacggagagaagttcctatggagaaaggtacaagtcttcctatggagaaaggtacacatcattatctattggtgtttattgattgtntgtgagaaccatatgtttcaagatcctg

SEQ ID NO: 230410 - DNA, 468 bp, Glycine max
  unsure (1)..(468): unsure at all n locations
ccttcaattagaattatatcatctgcaaatgacatacatttagggataatcttttgagctaactnttttaatagtaattttgtgaacttaagttataagttatatatgtctaacaaatttcatttacgtggataaacttcactatccacttatatgaaaagagaatagggtaaattagaattttgttcctcctaatattttaaattctttgattttcctgaattttaattgtaacattttgatcccttagtttgataaattggtaatttgatcctcctgatagattattaacatataattttgattagttgagttaattataaattaattaaaattattaattatttaaaaattaataaaatattattaataatcctaattctccactacactgtgctcctcttcttgaacgcaaatatctcttccaccttcattgtcacatgcaattaccacattagggttaatagt

SEQ ID NO: 230411 - DNA, 365 bp, Glycine max
  unsure (1)..(365): unsure at all n locations
agcttggactcatgagtggtaagttgaggtctaattggattggtccttttgttgttactcatgtttttccttatggtacagttgagatcaaaagcaactcgacaagcaagagcttcaaggtcaatggacaccgacttaagccatttctcacaaacccttctttagtggacgtagtggtggaagagacttccttactccaccctactcttcctccaccatgacttanggagtntttcttttcctatttccttctttacttctattacatttgtccgattctatttgatggtttaattgcttttaatcttttacttgtgctacattgaggacaatgtgttgtttaagtatgggggagtgttctttgg

SEQ ID NO: 230412 - DNA, 439 bp, Glycine max
  unsure (1)..(439): unsure at all n locations
gctagaatacagttacctcgaagaaaaccgcgaaggtcagattggatgcttcgttctctaacaaaacctcgagataagcttggaagattccgctccaattaaagggttcctctcgatgtgggatttcaacagagaattacggcggtttgtggcggccaccgatggttttgggttgtggagaagaagcttgtgatgttgggaagggtcttggggaaaagaaagggaaagaaatggttgcttttccactaccacacganaacaaagctcgcaacactcaagtgtttttgctctcgggaaaaggaacatctctcacactccagaagtcatatcgcatatcacaatggtcagaatgtggacagttgtcctatgaacctcctgaacaaatttcgagatgatccaacggttaacaaatgaaggaggggcaatttaccgagagagc

SEQ ID NO: 230413 - DNA, 324 bp, Glycine max
ttttccggccgtctgaatcaacttgggagtttacttagcgattctagattcatcagctaacctgacctgccttcagttatgtctcgtgggcgctgagcaggaataatgtcatacacggctaccataattcaaattacacgagtgcaaagttagggtctcaaaattcactaagtctgccagtataattctgatcacacatttgacatcgcccatatctttggatattggtaaagtattagctcatggacacttacagagttggctaaaaatgtgctattccacatgtagactgtgtgtcatactacgaactcatgcggactagaa

SEQ ID NO: 230414 - DNA, 457 bp, Glycine max
  unsure (1)..(457): unsure at all n locations
agcttttcaacgatatctcatttgcctaacttggtctcgaattcaatgatatatgctcaaaagacaaaaggtatgtcatgcatgctcgcccaatacttctggtctaactctaaaactgaatnttaacaccgaaattcccaaattcatcctttttacaaagtttgtagatatctttattaactntcctagcatataaagaacgtcataattagagatctatagcttaagttatgactaaaatgttgatatagtgtcaaaatataactaatgttgtcaaaattaagaccaagtttgaaacctagaagcaaagttagactccttgttgatgtagtcaacttaaacaaatcacaccactatgctcacttagtagttaatagcatgatatactagcaccaatcattaaagaaaaccagaaagaaagacaggatcactactagtcgtcctataaataaccctt

SEQ ID NO: 230415 - DNA, 399 bp, Glycine max
  unsure (1)..(399): unsure at all n locations
agctttctggtcttaacaagactatcgtcacgctgccagtcctaagtcgacctaagctaggaatgcctctacttctatacctctcagtagctaacgaagccgtcagctaaaccctcgtacaagatgatgggaaacactagattcccatctattttaccaaccgtgtccttcacgatgtcgagaagggataccaaatgatagaaaaggtagcattagctcttttagcctcagcccgatgccacaagcaatatgtntagagccaccaggtcattgatgaaacggataatcttattagacaagtattgagaaagcttgagctagctggaataatggttgcaggatctgtagaaatattagtgtatgacctctaatatgagcctcgtggccccatgaagaccc

SEQ ID NO: 230416 - DNA, 455 bp, Glycine max
  unsure (1)..(455): unsure at all n locations
agctntctgaccattaaaaggtccncttcttcttgtgggtagatttcttcactagactcttccccttttccttgttcactttcactagaggaaggtgaagtagtagtctcatcttggctactataaatgtcttggcccctcattatcatggctttcttggtggggcattgagaagcaatgtgtcatcttccaagatatttaaagaactntatagagctagtcttctcttgcatactagccttaggggattgcttttctattgtcttccccttatcatctttgggcttagaaggtgcagcccataagatgccttgaccttggtctttctttggataagagtgagagccatatgattntgaagtaggcttccttttaagttgttgctctacccttatgcaaagttggactaggtcattaggtccctatatggaaggagctcaaccttgtccctcact

SEQ ID NO: 230417 - DNA, 378 bp, Glycine max
  unsure (1)..(378): unsure at all n locations
tctcccncaattntctataaatagggggagaagtgaagtgnantatggttcagccccttaggcacttctctctctttcgaatttgcttaagaaaattgtttccgtgaagaaaatacaagccgaggcgcttccgtaacgtttccgtaacgtttccgtgagtgatttcgcgaaagatttcgacccttcttcgacgttcttcattcgttcttcatcgatcttcaggcttcaacgggtaagtacctcaaaccaagcttttcgattcattctatgtacccgtggtggtccacattttgtttcatgtatttttattctcgcttcatttattttgtatacccccttttgacgcgcttaagccatttatttaagtcatttctcgct

SEQ ID NO: 230418 - DNA, 443 bp, Glycine max
  unsure (1)..(443): unsure at all n locations
agctggatgctaattatgtcttctggaaccaacactgaagcatcttcttcactccattntccatcacgaagtacctgctaaggtaaattagattagatgtcaaatgaaatggaaacaagacagtataacaaagtcattggaaaaggaaaacttaaacatgcaatagtgatgtaagtagctactgttaaatcagtgaagaggggaataacctttgctttgggggctaatctggccataagggcagcagctgcattgccagcattgttttcttctatgaaactgatggtggagtttataagtagcaaaagaactatgccagcaaaatcttgataatctccaccttcaccctgcagaagtttgagttattatattaaatataatggattgtaaattgtaacatcactgttttcagacagtaaaaattgactgaccgataatgaaac

SEQ ID NO: 230419 - DNA, 465 bp, Glycine max
  unsure (1)..(465): unsure at all n locations
tgagctgtgcataggagganaatgagagaccaaagtgatggctctagccatttctacggtaaattgggtgttgagaagtcaacatttgattcggtagagttttcttcgtaaaaacaatatgagcaagtttagattaatgttatagacttgtttgagatgagagtttgctccaaaattaccccattctcattttcacttctcacaccttgaaaatacactaaaatgagggggtttagatacctatattttgagttgccttggtctgaagctcgtctttggtttagatatgatttatacatgatttangacttgtaggacctaatttgggcaaaattggatgaaggcaagagtgatttcgaaaatctgcacttttatgcagacatttgttgttgaaatgtgcagcagaattctgtgctagtgcaacaaattcttatgcatggctggttgtggaaagggttgtacata

SEQ ID NO: 230420 - DNA, 465 bp, Glycine max
tttgaatgtcaagttcatattacttcatgagtcaataagttatttatgaacatataagctatcagttcatcgaacgaattatagtctatccaaacgagaacttggtgagttgcatgcataagtgggtcaagaaaaaaaaagttgatcaaattcaatttattcatctaaaatgagtttgaaccctactgaaagcttggatgtgtatttccttttatgggacaagtccaaattagatcatgattagattgagacaaaaaaaagtatttaattgattcatgcccaccatttcctttggtggatctgggttaattaggttagtcacttactcaatacaggttaggcatctgcttgtggtacccagtgttattgctgggacacccagcggatttcaaaattgccaacatacccttataaatagcatgtctcgctttcatttctacaatgccttttattcgtaaatctcac

SEQ ID NO: 230421 - DNA, 435 bp, Glycine max
agcttctacttatgtggcagggcgggcttccttcactttcttgtctccaacgcgagctttgaccactactcttccttcccgcgatgcttcttttcatatccgcctgagtgggcttatagcctaaaccatacttcccacgatttcctttggcatttatcaggctagttatgccgccgttgtctttgcctaaacccattccgggttcgtaaccattccccaacataactcgggccatcattactgctgcatcggacagacaaggctgcccagagaaggagtccacggaggaaatgctgaccacctcaaaagactggaaagcggtttctaacgattcttctgcggcttccacataaggcatagaggatgggcagctcaccaagatgtcttcctcgcctgacacgatgaccaagtgcccctccactacgaatttcaact

SEQ ID NO: 230422 - DNA, 386 bp, Glycine max
  unsure (1)..(386): unsure at all n locations
ngctctanattacattgatgtntgtatntatgggaggaggttgtacgccatttttgttttaagagtagtgtcccactggtaaaactaactttccaaatttttgccttcgcaggaaatggccccgaggaagcttgcctcaaagaggtccaggaaggacaaggcagccgaaggaactagttccgctccggagtatgacagtcaccgctttatgagcgttgtacaccagcagcgcttcgaggccatcaagggatggtcgtttctccgggagcgacgcgtccagctcanggacgacgagtatactgatttccaggaggaaatanggcgccgacggtgggcatcactggttactcccatggccaagtttgatccagaaatagtccttgagt

SEQ ID NO: 230423 - DNA, 452 bp, Glycine max
  unsure (1)..(452): unsure at all n locations
agcttcattcaacatgagnttggagcgaacctcagccctgcaaaagtggctttaaagctacaaaatcaattaataaggtaagaattacttttcatttgtaaactttatttcaacattatcttttaaccaatatgggtctttaagactcccccctttgctcgcaactacctaggagtgatgacaattaagctcactttataacaattgcacatagcaacctctccaaatttctttccaataccttttatttacaatctctattgttcattagcattactttaatatttttcctgtattttaacatgatttacattaatataataaaatgaataaaaattaagttctattatatttatattctggagttgttagattntttttagttagtaatatacaaaatacttcatgtttgtttttttaacttcactacatttagaanagcttactactta

SEQ ID NO: 230424 - DNA, 322 bp, Glycine max
  unsure (1)..(322): unsure at all n locations
cgctgcanaattcatttcttggttggtgttatggtttgtgctaaaggtggtgttcgtcattggaagtgcggtagacagactttgtggttgatttaaggatggcctttgcggatgaatgggtggcgggtaatgataagagctgatattggctgagtaatgatattgttgggctggtgggaagtttggccacgtaggaatgacaacctcaacatgggttacttcctaattctcatcctcttcattngccccagttttctcattcatcaaagcaggatgatcaaatntgcctcttttcagacccacttcgatccttttgtcgatg

SEQ ID NO: 230425 - DNA, 430 bp, Glycine max
  unsure (1)..(430): unsure at all n locations
tttttgtatggtntattatcagagttaaagtgagaattaattttagtgtgaatatatgtagtcttcacataattgaaaaaaatattgatgtttcaaaaactcatttattgtaatatattttaaatacaaaatatatcatttttattcttttaagtgttagaaacactgcattataattattaattttatgtttactcatgtttttcattatattcctcattgtatttctggtattattatgaatgaaatgtcttaagttgtctcctctaaaaaaaaagcaaactatccacctgctgcatggctacaacacgattttcaacaattttaatttcattttgctttttattttattggattttctatgttgggggttttcagaggacaatgagcccggatcagtgtcccaaacatttttttacctgcttccttc

SEQ ID NO: 230426 - DNA, 222 bp, Glycine max
  unsure (1)..(222): unsure at all n locations
agcttagggatggaacacttacttgttggtgatgaacaaaagcgcataacggaatcaaaaaatgcggaaaaggatgaccctagggctgcaaactcgtcaatcccgtgggtatggcttttgaaaggggggaaaagaagtttttgaatgcaaaaacgccccccctttcgtcattcttataatttggtgcaggggtggctccnttnanctcactttttaacaatt

SEQ ID NO: 230427 - DNA, 150 bp, Glycine max
gcttaacctcatcggctctcacagtgtttagatcagggagcggatccgtttcgggtggttctactcggagcgacttatgatagcagcgcgatgatcccactactgggttgactaagctatgggccctgtcgataaacgggatgcggtgcc

SEQ ID NO: 230428 - DNA, 493 bp, Glycine max
  unsure (1)..(493): unsure at all n locations
atcctctaactcacctgcggcatgcaagcttcatggtcttctccttgtagaatttggaattctcataggcttctaaacgaatctcatctagctcacttagttacaacttcctttcctctctagcctgatccatagagaagttgtaggtttttacagcctagtaggctttgtgctctatctctacaggaagatgacatgccttgctaaagacaacccgataaggtgacattcctatgggtgctntgtaggcagtcctatgcgcccaaagagcatcatccatcctggtgctccaatcatttctgttcggctgcacaatcttctccaagatctttnttatctccctgtttgaaatctcagcctacccattagtttgggggtggtaaggtgtggaaattctgtgcacgaccccatactttntgagcaaggcatacatggacctattacaaaaatggtgccttgatcactaacgatggctctcgggactccaaacctg

SEQ ID NO: 230429 - DNA, 314 bp, Glycine max
  unsure (1)..(314): unsure at all n locations
actatgatactaagctngaatgaggaagtgtggaaaggtgagacttcctactcttattcattgaccacagagtggtacctggagatatgtctcgggggtcacgagaccttgaggacgtcatgtggggtgctattgcccaaaaccaagcttgaccaattccgacccaacccgggcgtaatcagtcagtgagaacctgtgatgtacctaaacatgcaagctcctgtcagtcaaccgatcaaagaacaaagaccacaaagcaaggacgcttgtgtggtggctggccagctgtgaatcttgagtgatatatacgatat

SEQ ID NO: 230430 - DNA, 456 bp, Glycine max
gcttaagcatgcccatgttgaattgatgatgatgatcccctaactatcatcctccattgctctcaaaggtatcctaagaaatctcatttaattctctaacgtatgggctgtggatttgttaagcatttaagattctgccatttagaaaaagtaatcacttgtggtgcctgttttactgatttttattttccataccataattcataggatttgcattgtctagtgtgagaagatgcaatgtatccatcttttcaattcctttttcaatttgttatattttgatatttgagtacttaatggtgattctgagtattcagctttaacttctataagaaaattatcatatctagtgcaggatttgtcatacatgcttcttagaatgtacatttgaatctttaattcttttcacaaaaagacattctaagatggtttttccatagaaaccgtctcagaatc

SEQ ID NO: 230431 - DNA, 478 bp, Glycine max
  unsure (1)..(478): unsure at all n locations
attatgaaattgatgagtgttattacgtcttgactctagtgtgtgattcatgtgtaatgtgattggtgattgaaaaatgaattctaaatgataaagtggtgaagtgatatgcattgtattaagttgagctatcttataaatatttatataatgtattttgcttatgtctttgttcatctctattttatttaaaaatatgataactcactccctatgtgttgtctgtgtttggatcctgtgatgatctcaaaccttatgtttgtgggagcatatgactaggtggatgactttaaataatctcgtgctagaggatgctggaacacaatgctctaataggatgtgacattggggcatgagtttctgttttaattgcataatgtttcanacatgtattctactttantttatttcgctgcttaacttgagttcttttgtaatcttggacggccttgtttgagccggagatgttttaataagt

SEQ ID NO: 230432 - DNA, 289 bp, Glycine max
acataaattaaattatttatatcaatattactgaagatacacctttatgagcataaacaatcaatctaaaaattatcaaaccattcttgccaacgattcctatggtatttaaaagagcttttgcaccagtctgataacttatctaaacccattccgggaaccttaccatgtccattatattatataaccatcattgctgctgcatctgactgactttggatattaaaaaaagattccacggaggaaatgctgaccacctcaaaaaactgtgaagcggacaccacaattc

SEQ ID NO: 230433 - DNA, 486 bp, Glycine max
  unsure (1)..(486): unsure at all n locations
tntctagcctggatgtatagatctagggcacgtagcttgtctccgtaattgctataatagcactggccaacatcttaaactacctgtccacattattgccttcactggagaaggtgcaaccgagcccacgtccctagagaagagctaaacagcaaccgcagtcatgggaacaaccatcactcctgcattttacacatacccgattatgagcgtgctacaccgagcagccgttcgaagccgtactggacagaatgtttgtacgcgagcttacatagggactcaggcactagaagtggactcgttcttccaaatgaatacggaagcctctgttggcatcactgagcgctcacatatgctactgtcatgcanacacaatccttgagtatatactcatgctcggctacatatgatggggctgccgcaatatgaatcttactatgcgtaaagggtacgtntgacctatcacttttgccacatcattgatcg

SEQ ID NO: 230434 - DNA, 412 bp, Glycine max
  unsure (1)..(412): unsure at all n locations
ggatggtgaagttaatgtgtgggattcataatcatgaattggccaagtcattgttggacatccatacattgggtgattgactaacgatgagaagacaattattgctgatatgaccaagtcaatggtgaaaccaagaaacatcctgctaacgttgaaggagcacaatgccaatagttgtacaacaatcaaacaaatatacaatgtaagaagtgcataccgttcttccattagaggaagtgatactgaaatgcaacatctaatgaagcttctcgaacgggatcaatatattcattggcatagattaaaggatgaagacatggtacgtgatctatnttggtgtcaccctggtgcagcgaagttatgcaatgcatgtcattnggtggtatttataacaatacctacaaaacaaaca

SEQ ID NO: 230435 - DNA, 399 bp, Glycine max
  unsure (1)..(399): unsure at all n locations
tcaagcttaggactcattctntaactgccaacagagagagatgcagttttgctaagcccagactagagtatcttggccacatcatttgtggttttggggtggcagcaaataaatccaaggtggcagcaatgagttcctggccagttcctaaagattcgaagagtttgaacgggttctagtacagatgcaaaaaatatataaggtttattctagaatgaataaaagagggcttggatttacttagttgagccggttggtggttaacattttacgcgaatattacatgatacaacaatatttaacatgcgctatcattaatgtcatatgacgcatgcagagttctgagtggaacaccgagtgtaacatataagatgtggggtatctttaaggttttaaaaa

SEQ ID NO: 230436 - DNA, 439 bp, Glycine max
agcttctccttccttttcctataaataggggaatgagggaagaacaaaaatgttaaaccctcctggtatctgagattcacttaaaattagtgaggaaaattgtttctctgaagaaaatcctagccaaggcacttccgtaatgctttcgtgacgtttccgtgggtgatttcgcaaagattttcaaccgttcttcgtcattcttcgtcgttcttcagtcttcaaccggtaagttcccgaaatcaaactttttaattcattctatgtacccttagtggtcctcatttgtttcgcgtgcttttattttcatttcatttacttttcgtacccccttttgacgtgctttagtcatttatttaagtcattttctcgcctaatcaaaaattaaataaatttccaccgatcattcatattatagcatcctttaatttctgttaaaatg

SEQ ID NO: 230437 - DNA, 450 bp, Glycine max
  unsure (1)..(450): unsure at all n locations
gcaagcttanagggataagggtgttaactgggactgtctaggaaggtaagcaagcagatgaaatgatgcttcttggcagcggagttcttgtttgccctgtagtgcaatgggatgagcaggttattggtgatggtaagtgcttttactacttgcagcaaaaaatgatatgatttaatatatgcactcaagtaaactgtaccaaaaaaatatgcactcaagtaaattctgtgtatgcttttcaaagttttttttaaggcttgagttaactcaaatgataggaacttcttaccggagtttagacaattgtattctttttgttttgtcattttgttctttaaaatagtgactgagatgcatattctttcctgtcagtattttttaaaccgactttgtttcattntactgctaatttgggtgctgttgataataattgtaactgtagcattctac

SEQ ID NO: 230438 - DNA, 441 bp, Glycine max
  unsure (1)..(441): unsure at all n locations
tgctatanataggggaagaagtgaagaagataaggttcagccccttaggcacttctctctctttcgaatatgcttaggaaaattgtttccgtgaagaaaatccaagctgaggcgcttccgtaacgtttccgtaacatttccatgagaaattacgcgaagattctcgaccgttcttcaagattcatcgttcgttcttcgttttcttcagtcttcaacgggtaagtacctcaaaccaagcttttcaattcattatatgtacccgtggtggtccacattttgtttcatgtattttcattctcgttctcatttactttttatacccccttttgacgtgcttaagccatttatttaagtcatttctcacttaatctaaaaataaaataaatttccaccgattggttgaattgtatcatccgttaatttcgggtaaaatgaattccg

SEQ ID NO: 230439 - DNA, 441 bp, Glycine max
taactatcattatccatgggtcacaaaggactaactatgtaaaactcaattatctcctattatcgatccagaccttgtgtgatttagaaattacactccaatgaattttgccatgctatacccagagataatcacttgtgtgcgccggcagaacatgatcatcatatttgcataccataatatataagatttcgcttcggcgattgtcagaacaggtcgttgattcatctttccaatacctaaaacacattgttacagttagacttttactcactatacgtggagacagagtgtgaaatattcatttctataacaacttgtacacagtgaataacagaccttgccgtcttgtcaagtatactgacgagataagggataactatctacaagaacatgagatatacaagatgtctcgcctgtaaacctctcatagtccatact

SEQ ID NO: 230440 - DNA, 437 bp, Glycine max
  unsure (1)..(437): unsure at all n locations
ntagactcatagccatcattaacaatctcatacatgtgaattgtcccgtcttgacctccagtaaaaaggaagtcccctgtatggcttcgtgccaaagcataagtattaccaacatgagcattatgaacaatggtcaccaaagtcccacattctcacaacagagtcatacccagaggtaaatatgagcttcgcataagccaatacgaaaacattattaaaatgtaagtgtgaatttgattgcattactgttataacttcacctattttctgctttcattcttggatcttataaaattcttaaatgcgaaacttaatcataaaatccaataactatgagaatattcattaaagaaagaagatatcaatacatgggataagccaacaaatacaatatatatatataaacccacccaacacggtgaacaagctataataca

SEQ ID NO: 230441 - DNA, 436 bp, Glycine max
  unsure (1)..(436): unsure at all n locations
agctngaaccgcctgtgccaatggcggttatgagggtaccgctagtcccacttgcgggacatgtgctgagtangatagaggtgagggtgtgccgctgatggccgctgcaggacatgtgagagagtgggtgccgctgatggcagctgcgggacgtgtgcggaacagctggtgccgccagtactgcctgcgggacaccttcacaataggtgccgccaatactgcctgcgggacaccttcagctcccttgatgggacgcatgagaagcctgctcacctatggttcacatgactgaaacatgcactgcacctagggttcagctagggttcagtttacgttgaaggctttgcacacttgcattctgaaaagcatgtgaacgttaaaaatatttgaacgttgggtttaagtttcagctatcagaaaaatgtggactcattct

SEQ ID NO: 230442 - DNA, 269 bp, Glycine max
ttagagaaaatagtgcatatgcactgtacgtgtaccgcgttcttatacaatccatcaatttaaaatcgatatgtatgttaagtttttattattattattataacacaactaccttaaatgtatacataatgtgatttatctttgatctcgatgcacttaaaaaatgcattgaaattgaactctaaatttttattaatattaaagaatgagttcgaaacgtattactaatacttgtcttatattgtaatatcaacatcttggacggacac

SEQ ID NO: 230443 - DNA, 449 bp, Glycine max
gcttataattagtatttacctcctctcattctccagatgtacattgtcactgttaattaaggttatcaaatggcacttatgaacaccaaacaacttgctctcaaaccaaagcctaaattggacaagaatttattagaaaggtgcatggattgggcaaatatacccccatcgaagcacatctggtactaaaaaagcataagaatggctatacccaaaactaatttgtttccccaccagaatattacaatatgtaaacaaatacaatatcccaattaatttcatttaaacagttttaatagcgtttcagagcagaggctatcctaataaagattggttgcattacacttaaacctcaaattggaccacttggcagaatataatcatcgaagctaataggtttaactggaaaggaatacatgcatgcacctatcaatcatattgatgatact

SEQ ID NO: 230444 - DNA, 373 bp, Glycine max
  unsure (1)..(373): unsure at all n locations
tattaatggctnggcagcanagtctgatcattcacccataatcatccacctgcatgggactaatcgtagaagcttcatacgacaatttagatntgagaattcttggcttcttgagctagacatggtcaatattgttgatcttgcatgggaaccacaacaaacgagtgactttattcacataagatttcaataccaggaccaaattgatatatgtgagcatgaattggagtagagaaagaattcaaatgatgatgttaatggtgcggcctatttggaaacaaacaacaagttttgtactcttattgcgctagaagaagcttattggagatagaggtccaacgtgttcttgtgacaccctctacctcgacataca

SEQ ID NO: 230445 - DNA, 435 bp, Glycine max
tcaagctgttgtatcaagttctgttataaaacagcaaccaaatgaaaaatttatctatacttgtatctttagtacctctggtacttcttaatatataaaatatctatttttgctgagccaaaaaaaaaaaaaaaaaaaacaaaaaaatacttatatgaagaataaattctaaactacagcaatattaagttcacatcaaccctgatgtgcttggagagactagttcatgccacaaaatataatcaaatgaattttgatgctttcaagtccaaattaaaaaaattattttttatatttattaaattattcaaaagatcttggtttgaactggagggtggaaaatgagattgacaatgttttaagggtgagctccttgatactgcaattattaactaccctactttgtaaatatcatttttctgaaaaatcttgcat

SEQ ID NO: 230446 - DNA, 295 bp, Glycine max
  unsure (1)..(295): unsure at all n locations
gagtgaagatgagaagaagaagcttgaatagttgaatgtagaagttgacaacctctgcaaggtgatcaaggatgttttgggtgacaaggttgagaaagttgtggtctctgaccgcgttgtaaattcaccatgctgtcttgtgactggcgaataccgctggaccgcacacatggaaaggataatgaaggcccaagctctaatggacaacagcatggcagggtacatgtcaagcangaagaccatggagatcaaccctgagaacccaatcatggaggagctcacgaagcgtgctgat

SEQ ID NO: 230447 - DNA, 207 bp, Glycine max
ccggatccttaagtcacctgcggctgcagcttaacatcagaccacttacagggtgctggttctacttcacatggacttgatggggcctatgcaagttgaaagccttggaggaaagaggtatgcctatgtggtggtggttgatttctccagatttacctgtgtcagctgtatcagagagaaaacagacacctttgaagtattcaaaga

SEQ ID NO: 230448 - DNA, 463 bp, Glycine max
  unsure (1)..(463): unsure at all n locations
tctatataagctgaaccatnttatcaagtaacacaagttgagttttattcagataattagagtatatctctttgatcttagtgagagtgattctcctaaattcttgagtgattcaagaacaccctgactgtatcaaaggacattcacaaccgaagtgtgttgccctcgctggaaagagtgattctttccttcctctcatcttcacccttgttctttcaaaccacaattccagaacattcacctctgcccagaattatctcgtggccataactcccattttacgcactcaacataagtgattcttgagcctaaattgaatctcaaaacgagaccttgcacctcgttttggaatgacctcatntggagccctgtagcttccgctcttgccatttctatatttctgtccagccaccacttaacctactgtctaccattccattcatccattttatgccaagaacca

SEQ ID NO: 230449 - DNA, 383 bp, Glycine max
  unsure (1)..(383): unsure at all n locations
agctngaggatgtttacttatgaaagcttgctattatgcctacacttatcgttcttaataactaagccagttcacgataagccttatgattactaacccgtaagcattcgataggctgcttgggctatttccttcctatctgctatgagtgacgacatgagatgtaactgctcatttgtgcttataaatgtgaatatgctctctctaagatcatgatgacctattctatacactctgagactttggacgttatgacagtgtaacattatactgatgcgacgtgtggtgccctgatctataacgtctatgcaattgaccttgacgggagctggtacagtgactaggccaattccattctcgtccattatattgcaagcctaata

SEQ ID NO: 230450 - DNA, 549 bp, Glycine max
  unsure (1)..(549): unsure at all n locations
cgcacgaggatgattgcnatgcatgtncgtgacgctacacaatacatcagcttagctagtcataagggaattctgtcacttacatagttcgcgagcacttgttgagatcaaagcaattacgagtatatctcagaccaaaatgaatgtggactgagatcgtaccttaccatcttgtgttggagatatcgaaactgtatcagacatggatactaaggagcacgagcatacacctcaagacgatcacccgtctggaagcaccatatatgaaactgttatgcgatgacgttgctcatcatggacaaatgccctcgacccatcatacaccatatcctagagtcggtccatcttgatactagcatgtagcacactctttcattcctttcttcgagatgcctgagggtcgaaactcacgcaattttgcttgcgacgcttctnctacttctactccaccatagggtctggcatatgagaagaagagtgtgttatatgacaatggcgaccacccacaggaaatgcagcactgacgacactttctgcttatgatacatt

SEQ ID NO: 230451 - DNA, 459 bp, Glycine max
agcttgtccttgactcatcttttccttgaagtgacatctctaatgatctttcttccttctccattctcctgtcattgatcttcaagaaacaaaggacttcattgatgaagaagatccaaggcctacaagctccacatggagctacatcaaggaggaagcacactatgatattgatttacattcttataataatgctatcccttttaatgttgccaacaatgcaaagtttaagaagatgcttgatacagtttcctagcatggtccaggatctgtccctttatcatacaatgatattaggatgaaggagaaaactcatctttctttgaagaatcatatagcttattggaagacatctagatgtgctataatgacacatggatgaaccgatacgaggaagacgatgacctatttactaattttggtaaattatccacttggaactatgttttgaagtctgta

SEQ ID NO: 230452 - DNA, 509 bp, Glycine max
  unsure (1)..(509): unsure at all n locations
tactaagcttgaggtangagaagatgagtggagggagagggagagaaggtgtgctcatatttatgccttaaatgaggtctgaaattcgaagtctaatttctcaaatgattaaaggtgaaaaaatgcacacacaatacctctatttatagcctaagtatcacacacaattggagggaaatttgaatttgtattcaaatttcactggaatttgaatatgaattggtggagccaaattttcactaattatgattagtgaattgtggttatggttcaacccactaatccaagatcaagttcaagattctccactaagtgtgcttaggtgtcacgagacatgttaaacatgaaggacatgcacaaagagtgactgtatgatgtgacaatgtggtgtatcaagaaaatgctcatttcccccttataatggtccaaaatttaattggattgcgcttctcccaatttaattaaatntatcctccaatacacacacatcagatagtgcacttaatgcg

SEQ ID NO: 230453 - DNA, 461 bp, Glycine max
  unsure (1)..(461): unsure at all n locations
agcttaatggcccaaggtttccttcttttatagatcggatttcgttaatcaacggaggatcagatcgacacgtgtatggaccatcctcagcctccatcacggactcgtctttttctaatcgccgactgggttctgcacatccaaccatgcccgttggattggatccatcctatctacacttatcggttcagtttgtcttctgtttttattctctaaacaagaaatgaaaataaattatttctttaatgattatgaatcaatgtatctaaattaaattaataccttaattacatgcaacacaaatagtgtgtatacagacataaatagaggcaaagttgagagattgttttgatttgattntaaaaatttttttgtttgatgtatatttttcaaatgtcacattaattattaattttcctgatattaaagcatactccttaattgcatcatgcatgcgacac

SEQ ID NO: 230454 - DNA, 478 bp, Glycine max
  unsure (1)..(478): unsure at all n locations
tactaagcttagatcatccttggtatttccattatcagtcaacagactcacctaatagaaacccacgccaattggttaagaatgctttgctactctcagaanaatcacaataatctaactgtttttttcttgctggatgcttgcttttacactaccagttagagttataatatagcattgttttacttgtttaaataaaccaagttatatttagtcaacttcacaaaaatatcatgttggaagtgcgcccaatgccattttatcttggattataaacccgaaaggagaaaacaaaacaaacaaatattactatcttgaattgaatgtaaaggtttttgttagaaattaaaaaaagagaagaaaagtagaatcaataggagatattcgactttctccatgttatggaagcgtgccagaagactatntttatcttctanagcaaccttcaacaaaagataatctcagtttttagaacatg

SEQ ID NO: 230455 - DNA, 190 bp, Glycine max
ccgaccggccgtccaacaaatgtgatgtctgacgaaatattgtccaacttctaacactggtacgctgattatcactaattttcggctggtttcacataatgcatagacgatgggcactgccccaaatgattcctcgcctactccattaccagagccctgcactactaattaaacatttgcggaggggaag

SEQ ID NO: 230456 - DNA, 418 bp, Glycine max
  unsure (1)..(418): unsure at all n locations
ggatcttatagaactccttcttcttacggtgcttcatattttcttaccattgtcaatgattgctcacctgcagtttgggcttttttgttgattgataagaaagaagtatcacgggcacttacaaatttttttgctattgcagaaaggcaatataaaaaaatggttaaaactatgagaagtaataatggaacagaattcatttgcatgaaaaaatattttcatgagcgtgggatagttttccaaccttcttgtataggaacaccttagcaaaatggcagggtcaaaagaaagcatcggcatatcctcaatgtggtgcgagctttgtgatttcaaagaagtttacccattgaattttggggcgaatgtgngtngacaacatgatacttgattaatcgtactccaagctcagtcttaaaag

SEQ ID NO: 230457 - DNA, 218 bp, Glycine max
tgacacacttcaaggtaacgttctcctctgttctcttgattacgagcgccccttcctctactctctctctatgtgctttcgctccattgaacctgtatctctaagcttcttgtccaaggcactgtatcggaggagaagctccttcttccatgacttattccctagtggatggcgccatctttcatctcttctcctttatctcccgctgcatcttcatg

SEQ ID NO: 230458 - DNA, 447 bp, Glycine max
  unsure (1)..(447): unsure at all n locations
agctngccaaagggttacatgtttctcaaagctttattcaagacaaagatattcaagatggatgatcaagaaagtttctagagtcttagaaagagtatattaaaataggaagggaattcctattgaagtagcaaaaggtttggccaagaaatttaagttaaaaagtctttttcaagagattaactctttggtaatcgattaccagaggatgtaatcgattaccagtggccaaaaactgatttacaacagctattaaaatttgaattcaaaatttgcactgtgtaatcgattatacatatatggtaatcgattaccagcagttattgaacgttttaattcaaattttaaagcttgtaatcgattacacatatactgtaatcgattaccagagaaaattttcagaanaatattctcaacagtcacatgtttttacttggttcttgaatg

SEQ ID NO: 230459 - DNA, 417 bp, Glycine max
atacatagcatgcacgaactatttcagttgagaccaattatgagtatatagcagctcgatgagaatgtggactgacaaggagcccgaccttcttttgtgggagataatgaaagttttacagccaaggcacctcaacagcatgagccagaaccagaaaacgatcactcatctgaagccaccatctctggagctgtgatccaatgatgctgctcatcatggaccaatgccatcgtcagctgatgcaccatttccaagagtggatccatcttcacctcagcacgtagcagactctttcattcctgtcttaaagatacatgaggggccagaccataccaattcttcctttggacacttctcctacatctactccagtatggcgtctaacagatgagaagaatattatgttatacgacaatc

SEQ ID NO: 230460 - DNA, 447 bp, Glycine max
  unsure (1)..(447): unsure at all n locations
agcttagcaggatgaagatgattgtgaatttgttatgtatgaaattgtgcaaaaagtagatgtcatgaagccgctacaacttgtagatttgttaataacattgcagttaactgcagatgatcttaatctgattgctttggaagtgtattgatatcaacacaattggtcatcatatacgtagtagaggtacaatcatgctaatttactgggttacatgaagctngtcatgttcaaaatatcacatgcaaattagtgataccttatagataatagcctcagaagttgattatcatgacttaaaattaaaagttgcaccattacactgtcataccatttaaccacaggagaggatttaatacaaactcacactaaacttgacttacaccacatctacttaagactaattataaacattgcatgaagtatatatgcatttagcataaaatt

SEQ ID NO: 230461 - DNA, 425 bp, Glycine max
tctagctgagttggtttggtcctttgatgattattgtgtatattgaccaactgccctatcttttacttgtttacaaatatatatttgatgttggcatgcacatttatttaatgtaattcttttgatatgtgtagatagagaaaggtgcatgctacatattgtttaaaaattttagaagcccagtaatactgcatgataaggatgcaggtcttaaaattctaatgaaaggtaatggctaattgttcatgattaacatcttgcaagcaatgtgagatatgtctatttttcatgttttatgtatgcatttttacaattttttatgttggtctcaaatgtagttgttcacgagttacaagagcaacatggtgctgattctaagtcacttaatgtagtgagatgtacatatatgaatcaagatgggatca

SEQ ID NO: 230462 - DNA, 437 bp, Glycine max
  unsure (1)..(437): unsure at all n locations
agctntagcaccatttaggaatgagaagaaaagtatatcaatggtgagattatactgccaaggattaaactctggtacaactctagctcaacgtcggaggaataattaagatgctactgggctcagcacatacaaccatgcgcagttggattggatccatcctatctacactggatcggctcagattgtcttctgattttattctctaaacaagaaatgaaaataaattatttctttaatgattatgaatcaatgtatctaaattaaattaataccttagattacatgcaacacaaattgtgtgtttacagacataaatagaggcaaagtcgagagattgctttgatttgattttaaaaatattttcgtttgatgatattttcaaatgtcaaataattattaatctctgatataaagctactcctaattgcatcatg

SEQ ID NO: 230463 - DNA, 464 bp, Glycine max
  unsure (1)..(464): unsure at all n locations
nggtgcgtatgatntatatgctccagcttgaggaggagtgtttaatattctaatatttatctatgttaggtagcttagttggtaagttttattcagaaggcagcactgaattgtcaccgccaatagccttctctctctcttgcgtcttgaatatatgtatcattttgaaatcaataaaagctaagagagaaagagtgaatttttcccttaactcacctcagtcttcaagaagtctatatattcttcatttgttaatatatatacaaattaatactacctcacacattcattatatttgtattaattattgaataattcttaaatgaggaaattacattatatatgactaactagggaaaaataaaatacaaacattcttttggtttaattaaagggagaacagaanaattctctttctttctctctactctttaattcaaagtataatatatctttctattctc

SEQ ID NO: 230464 - DNA, 445 bp, Glycine max
  unsure (1)..(445): unsure at all n locations
agcttgctatccnctccaagaaaaggattaaaatttcctcatccgattctgatgatgatgtcgaactagatgtctcgacatctaagagggccaagaaatctggaagaaaggtgcctggaaatgttcctgatgcaccattggacaacatctctttccactccattggcaatgttgaaaagtggaaatatgtgtatcaacgcatacttgcggttgaaagagaactgggaagagatgccttggattgcaaggagatcatggacctcatcaaggctgctggactgctgaagactgtcagcaagttgggagattgctatgaaggcttactcagggaattcattgtcaacattccttctgacataactaacagaaaaagtgatgattatcaaagagtgtttgtcagaggaaaatgtgttagatactcccctgctgtgatcaacanatatct

SEQ ID NO: 230465 - DNA, 311 bp, Glycine max
ttcgagtgtctcgatatattacttgactcaatcagacatccgagttaaaagttattgtcgtttgaaattgctacgagcttccgttatcaattgcgagcgtctagatatactaacggacacaatcgtacatccgacaacaaagataatgtcgtttgaattcgctcagagcttgcgttttatatttctgagcgtctcgatatactacaggactcaatcggacatccgagtaaaaagttattatcgttggaattttctaggagcttctatctttaatttggagcacctcgatgaattgccggactcaatccgac

SEQ ID NO: 230466 - DNA, 438 bp, Glycine max
  unsure (1)..(438): unsure at all n locations
cgtctcgacccggatacttaagtcacctgacgctgcagctttgcaactttataaanaattgtttcttatttgacattagttctatattaaaattaacttttcatatgtttcaatgtgaaatatatagttgaaaccataaaggtatcacatgtgatatatatatgagttactttttaactatgcacatttttttacttaaagtaaaatagtgtgatatttcatatatctttaattgatatacttcacgattaagagaagaaacacgatgattaatatgataacgaatgtgataaaaagagatgaatgtgttcaattaggtttcatatgaatataaaattggaaacttaacatagttgacataaatacgattattaaatagtgaattctatagcatataatcagatgatggtgggaacttattatacacagataatatat

SEQ ID NO: 230467 - DNA, 308 bp, Glycine max
tctcagcttgtacacacgcacatctttttcgtgattatttagtttattacgagtatacttgcgcaaaatataacctccgaaaagtatgatagaattaagaatattgtttacacaaatagtgagatataaccactctatgtcattgtattaatataaaattgatggacaaccgccaatattgagaactctatcgaggatataacattaactacacgtgttccaacataaatagagataccccacgattatcaaatgcaactaataattttgagatatggagcacatacatatgcgttagaaatagatcg

SEQ ID NO: 230468 - DNA, 173 bp, Glycine max
agcttacatacaagctgtagaatttattattgtaatcgtcgtgcctcaatcgctgaactaaaaaatgcgtccaaaaaaaaaatcgacatcgcgcaatatatatctatatatgtctatgcatatatgaccatatataaatatatatacatatataagaaccctagcccgctcac

SEQ ID NO: 230469 - DNA, 350 bp, Glycine max
  unsure (1)..(350): unsure at all n locations
gtggtgcatgtgaactcgngcagtaacaatttgtctggngaaattccacactccatggcgtatctgtctcaacttgagtctttgctgttagacgacaaccgcttctcaggatatattccttcaacactgcaaaattgctctacaatgaaattcatagacatgggaaataaccaactctctgacacaataccagattggatgtgggaaatgcaatatgatagaaatgtgattagtgaagaggggcctatgccaagggtgtggagagcttatactacgaaacagacaataggaatgaaagatgatgacgtggctgtgaacgtatgagagtgactatatatagctattgctgg

SEQ ID NO: 230470 - DNA, 275 bp, Glycine max
  unsure (1)..(275): unsure at all n locations
tcgaggtacttacccgtcgtagatcgaagaacgatgaatatcggatgaagaacgtcgaataacggttgtaacttttgcgaaatttctcacggaaaacgttactgaaacgtttcggaagcgcctcgggttatattntcttcacggaaacaatatttccaagcaaattcgaaagaaagagaagtgcctaatgggttgaacccttttcttcttcacttactcccctatttatagcaaaatatgggaggtgagtgcctgccagctcgcccaggcgagcc

SEQ ID NO: 230471 - DNA, 438 bp, Glycine max
  unsure (1)..(438): unsure at all n locations
ctcatacgcttcgtcccacgagaatatcttagttntcttgagtagcgtgttaaaagacaccaatctaccattcagcttctaaagttctctgacattggccagagctttacgttttcaatattgatgtataattgtcagggttggctttgatcccttgacagatcatgaacccaaaaaaatttctacccctagccctaattgtgcatttttcagggttgaggcgcctgttgtatttacgaatttctccaaatacttcctccaagtctgctacatgttgggccatgctatgagacttggcgaccatgttgtccacttagaccttgacgttctgacctatctgatgtttgaagacctggttcatgatcctttggaatgtagctctagtantttttagtccacaaggcatgaccctataatagaagtcggcgtcttcaacga

SEQ ID NO: 230472 - DNA, 345 bp, Glycine max
  unsure (1)..(345): unsure at all n locations
ctctngcagcgaatggaaggggttgattatctgcagagttcatagtctcagtgttgcttcgttatatagctcatagatggtctgaaaaattagaggacctatggaagctcaaaatccctttaaaaccaacaacatttgcttggcgattgatcaaagatacaatcccaactaaagggaatttgcggagaagacagctagagaaaggcttttgccagccctacaactattggtctagtaatttatcaacaacattntttgattaaggtagcagtgcagggttattgtattctatctagattggcacctgctggtttctaccttgtatatntagtacctctggtactc

SEQ ID NO: 230473 - DNA, 409 bp, Glycine max
  unsure (1)..(409): unsure at all n locations
ttaagtcacctgcggcatgcaagctntgagccaaaatcctgactcaccataaaccttgacccanggtgagaatgccaatccttaccctcggaagcaaaaaaaaagaagagaaggaaaatttccaatcaaaggaaaaaggagaaggaaaatttccaatcaaaggaaaggaaattcccaatcaaagagtgggagaaagcaaaaagaaaagaaagaaaattcccaatcaaagaatgggagaaagaaaaaaagagaagtaaaaaagaagaaagctcctggtcaaagaaaccagaagaaatgtgccgagaggtccttggactatacgatatctgaacaatacagaattgtcaccaaatgaacaaaagaaagaaaaggaaaccatgacctanaagtggtcttctccctttgatta

SEQ ID NO: 230474 - DNA, 409 bp, Glycine max
atttcgagcgtctggatatattacgggactcaatcaaacatacgagaaaaatgttattgtcgcttgaatttgctctcagcttcaacattcaatttcgagcgtcccgatatattacgagactcaatcagacatccgagtaaaaagatattgtcatttgatttggcacagagcttcaacattcaagttcgagcgtctcgatatatgacggaactcaatcagacatccgagtaaaaagttattgtcgtttgaatttgctcagaggttcaacattcaatttcgagcgtctcgatatattatgggactcaatcagacatccgagtaaaacgttattgtcgttagaattgtctcataggttcaacattcaatctcgagcggctcgatatattacgggactcattcacacatccga

SEQ ID NO: 230475 - DNA, 472 bp, Glycine max
  unsure (1)..(472): unsure at all n locations
agcttcacggtcctcctttcagcactctttggtaatcaacattatggtagaattggaaaagaaatctaccagcaacaaggttagtgatggtcatcacttgaaatggtttccatactacagacatatgttccttcattatttggtttcagatgtttttgtctgttagaaaactacccaccagacatattgagaagtctgctttggccttaatgggagtgtcaaaattgatttccagtccaatatcctcgtcaacaatctgtaggttttctatattgggtgtctccataaggttatagctgatgggtaaagggaagggtacatgcaacaatgttgttcgggttcacaggagtangttaaagctctcaagggagagaaagcatctcactatggagagaanaaatcgagtatgactatcagcanaagtaagttataattagtagtttgaaagaagtcggctatttacaaaatcaaa

SEQ ID NO: 230476 - DNA, 423 bp, Glycine max
  unsure (1)..(423): unsure at all n locations
gacactatgatactaagctntctataanaggtagccacattntcctgaaatcatgccacttattatcaattcgagcagcaataatactgtntatacaaatctactttaaataaaatagaaaatacaattcaagtaaatcattaattcaaccttttggcttatctttgctaccagtaaactggtttcccatgaaacaaatatcttaacttgcaaggggaacaaatctggaaaatagtcctcttcatatgggatggttctaaaatctttcactgcattattaaaatcattatgcctacaagaagagtgagatgaatgatgaatcaattntctacttctgcaaacaactatgtcttagaatatttggcggaagatctttcatcagtagaaagaagacttaagatatcattcatcgctattaaatca

SEQ ID NO: 230477 - DNA, 447 bp, Glycine max
  unsure (1)..(447): unsure at all n locations
agctnggctgattaactctggcagaattgttnttctattntctttccttattgtttttctattttctttccaatatttgttttacttatccctgagttaagaagtatttgtcatatacttccctttttatgaaactttgctagcattatgaataatctgctgtgttacaatattaattttgtgcccaacattttgtacatgaagatactgttgtggttcatttatgtgcataaatatgtttgcattgtaattgctgatcttcataagtgtattcagagacctggattttatcctttgtattattactagtggtgtctgaaacatatgcttttgtaacttttctgtgaccgagatgttgagtatatgaaatttcatcttcgtaatatatcaacaggtgagggacatgcttggagatgggcgcctaataaaatgccgaattcatgatgg

SEQ ID NO: 230478 - DNA, 478 bp, Glycine max
  unsure (1)..(478): unsure at all n locations
ntgcgaanagcttgccgctggagctgacccatcaactgccctatctccttaaggctggtgacatctaggcccttaatcttgacttgatagaatctttttccgatttgatttgtccccatcatttacctaaaaaggggtgaatcaaggctctgatatgaatgatgcaatgcacatgcatgaaacgaaaagaagaaaaacaagtggtaatttacatatacgagaccgaaaaagatccatctttttaatactacactctaggcattgcggcgctccaacatatgtattaaaaagtgacgcgttactctaaagagacaagatatcactagatatacatcaaaactattaattatgtgctattcgcagaagaatgcatgagaacaaatggtacagagtgtgcttgctccatgcccctatttgnggacctataggataatatctangggtctctaataactanctccaacgatcgatatctcac

SEQ ID NO: 230479 - DNA, 424 bp, Glycine max
  unsure (1)..(424): unsure at all n locations
agctntaagcatacatgaaatacaggtgccaagcttgttttctatcccaactcacgcacttgcatttagtgattctaaacagtaagtcatgacggttcttttatgtatcgaaactgttaggagagagaaaacacctcagcacttgaaggattatgtttaagggattntggcacaagttcatttatttggtagcgcagtagtgcattaggataattctgttagtgttccctctgcttgcctagaggattctgttggtggctgttgtcctatagtgagcacatataactatatatatgcagtgtattgacagaagggaaataagaagaatataagcaaagttntctctctatgtcttaaagctttctactctcttctctctgcttctgcattctgcatttctgcttctatacaggttcttaacatt

SEQ ID NO: 230480 - DNA, 263 bp, Glycine max
gatatgttgggtctttctaacaaacaagctgatgcatagaaatatatttctctaatcaatcgtgctcttgtgttctatgttgtagcctaaattactaaaccctcgatccctcgtcaggatgaatatccaagctttgtccgcagatccctcatttaagactacacctgatttagacagccctcttaggtttagactaacttaaactgagtttcatccgcaaatccctcatgtaagactagactcagctcaagtagcttaccaaa

SEQ ID NO: 230481 - DNA, 437 bp, Glycine max
  unsure (1)..(437): unsure at all n locations
gcttttgtatccatgcatgataaaggaattgggccacatanaactcaatttagaagagatgaaaactatggtgattctttagatttatgtttttctcgtgcatgggaccatggagaaatgggggtggatggtataagttcatgttttgtggctttgttctcaatattaaactttgatggtacttttagaaagggtttttactctatggagatgttcactgaggtgattctttaaatttatgtcaatgattgaatgggccttgcataacatttactcaataataaaatgtgttaaagatcataatgttatttgttagcattcttcttcacggctgtgntctcaattagattattattattaatgatattattattattttatatactattattagtattaatattattattatgtatattaatattcaaaaaacaata

SEQ ID NO: 230482 - DNA, 393 bp, Glycine max
  unsure (1)..(393): unsure at all n locations
gagtntggagtgcacattgtagttactaagatgtggagagacatgaaagaagcaaagccactagtggaagggaatgagaggaaacaatatgccaaagtatttgattatgcacatgaattgttgaggagcattcctggatcaacagttaagatcaacacagtgccaagtccaggaggtccaccataatttcagaggctatatatttgtcttgttggctgtaagaaagggtttgttgctggatgtagaccattcacaggtctagatggatgtttcctaaagagtgcatttggaggaaacttgctctctgttgttgggcttgatggcaataaccacatctttgttatttgctatgctgttgtggacatcgagaacaaagacaattggaaatggttt

SEQ ID NO: 230483 - DNA, 444 bp, Glycine max
  unsure (1)..(444): unsure at all n locations
agctngaagaaagagtcatagatgcttttataatatctataatttatagtttgtaattgcagtaggtattattgaactcatcacctcacgaacgaattctattaattattttaatacggttaattctttggacataaaacataataacttgcatttgaaggatcaaatcagtataaagtaaaataaaggaggtaaataaggagaaattgtttatctttgaaggacataatgagaaattgttaagaaaataatcaaatactactgcccagttagatactttgacttggtgcccaacagcaattagagtgcatcgacaatttctattttgacttagtgtgcatgtgcaacagcaattatagctttcaacggtcaaggttctcactgccacattaactatctgtgcccaagtggcacttatatatctacaatagtattacacaatat

SEQ ID NO: 230484 - DNA, 296 bp, Glycine max
atgttgttagtcgtcatctggatgtcgagagtgttatcttgttggattctgagaagaagatcaataaaatcttggtcctctaattcagctccatcttcttttgcaatattgttcttttcttgatgctctctgatgatgttttccaggaccttgtcaacctgcttgtgcaacttcttcaatctggtcatgtttccagttaggaaatataacaatggaattgaaggaaagacatcagcaatgtcgaatccttccccggattctacgattcttcggatcaaagacacaacaaactcatc

SEQ ID NO: 230485 - DNA, 450 bp, Glycine max
  unsure (1)..(450): unsure at all n locations
agctngtctcctttccttgtgagggatttcggcgcgcgaaatttcaaggctatacaaagaatccataatgcatgggaaaccccgttaaggaaagatcaagaacttaggggcattcgtaatggcatcattggtggttaccgtgaatggctgaaagttcatatacgacgtttagattggctcgccaagttaaaagtcgtcagcgaagagagttttgaagcaccagaagaggacgaagaagtccaagctctcacaagggagttaggaaaggcgaaacttgccaaggagaagttcaagttggccgctacacacatccggaaggagtgtgccggattacgggaagagaatgcaactaccgcaagagcccttgaacaagagaccaagagggctcgcaaggaagagtatggccataacatatttcacggagctctgtgggagagcaacagtgaactc

SEQ ID NO: 230486 - DNA, 285 bp, Glycine max
  unsure (1)..(285): unsure at all n locations
cacccacattactacctgaaaagctgagagtatttcggctgtactaacgaacggaatttggaaattgcgaccacgccaatgtgaccggcgctcaatgtaggttacgaaaataacatgcatttcatgaaaggataatgtttacaaagtctctttctctaacgtttctcaaaggaagcataagacaagcaatggcngttcctaagtcagaatagatgcggagacaagatgaaactcacaagaaacaatcatagaaccatgattaccttcgaagaaaacgaaagatca

SEQ ID NO: 230487 - DNA, 259 bp, Glycine max
  unsure (1)..(259): unsure at all n locations
tcaccggatgatgccgatcgaacatttcctaatcgtattcatctcaagtgttattcanggattgactagaatatccaatggccggagtcggtcgttatatgaccccgactgatatatttcagccgacattgcgcaattacttctacaaacgctggccgataatgtttattcatttacggtagaggaagttttttgttttggtgttgcctatacaatacacaacgtaagaccgctatgtttttccgtgcgagctcaaccg

SEQ ID NO: 230488 - DNA, 445 bp, Glycine max
  unsure (1)..(445): unsure at all n locations
agcttctacttccatggcttattctctagtggatggcgcctcctctcacctcttctcctttatctttcattgaaactccatgactgaaaaccaccattgaaagagcttattgaagctcaaagatccaacctccatagaagcttctcaagcaagcttccatcacttaagctataaacagaggccttgtgtgtgcaatttttcaactttgatcatttgagaaattacacttcaaggtttagaactcatttgaggcataaatttcgtgccccttctcttcctctccctccactcatcttctccttcctttaagctcttatccatggcttcctatggaggngagcttgttcttgactcatcttctccttgaagtggcgactccaatcacctttcccccttctccattttgctcccattgatcttcaagaaccacaggactccattgatg

SEQ ID NO: 230489 - DNA, 498 bp, Glycine max
  unsure (1)..(498): unsure at all n locations
gccgggttntttgttgataccagcttatacgcgcctctttatactcagctcccctgatgttattaatcctctgcccctttttgagttgtattgatttggcaaaaaggttcaaccctgaacattaattattatctccagataccttcgttaaattctatgagggcatatagtttcaaggcaatttacccccaatttgggggagtggaacttattgggatgccaagaaagagataaagcatctcacacacacagataaatttgtatttaaaaaaaaaagtgtgctgatgttacaaggttaaagccaatgaaaagtgaaagctagtgagccagccattgtatataaagaccatangatagtctaggattgtgctctcttaaatctagccctgaatctagaaaacaataatttttctaccaagcttactcaggctggaaagtctttgatctgttatacattttacttatggatggatgaatgcaagattgatctctgtattg

SEQ ID NO: 230490 - DNA, 363 bp, Glycine max
  unsure (1)..(363): unsure at all n locations
tgtaatcgattacacacatactgtaatcgattaccagaggagtttttcagataacattctcaacagtcacatctttttatctgtttcttaaatggccatcaaaggcttatatatatgtgacttgagacacgaatttaacaagagttttcaagaacaaaaaggtcttatcctcttaaaaagaaaaatagttntatcctcttacaaattccttggccaatacacttgtgattcaataaggaattatttgagcgctcaaattgttgaatctatctcttccaagagagatttcttcttctcttcttctttattctgaanagggattaagagaccgagggtctcttgttgtgaaagaattctaaacac

SEQ ID NO: 230491 - DNA, 369 bp, Glycine max
  unsure (1)..(369): unsure at all n locations
atgatgcagatgggtttgtagctacctcatgcactcctctaatgactatggcatcatttctggcactaaactgctgggagttggaggccatcttctcaattaaatttctggcttcagcaggagtcatgtctccaagggctccaccactggcagcatctatcatacttctctccatattactgagtccttcataaaagtattggagaagaagctgttctgaaatctgatggtgggggcaactggcacatagtttcttaaatctctcccagtactcatacaggctctctccactgagttgtctaatacctgagatatccttcctgatggctgtggtcctggaagcanggaatattttttctaagaatactc

SEQ ID NO: 230492 - DNA, 307 bp, Glycine max
  unsure (1)..(307): unsure at all n locations
cttanatccctgtcctttgttggtgcccaaaataagtattatgaggcaccaaatccctatgataggtggtatgatgaatgtgctgagtggtgaaaccctcttttgtaaaatcactcatgcacccaacatcttcatgatttttgtacataaggactcattaggtagggttgttcttactttgtggttcaatacaaacttaagtgctcatatgggacaccttacgtgtgtcataatattttgtaggaatgatcaacatgaaaataaagaaaaatgtatgttttattccatgactttccttaacttttta

SEQ ID NO: 230493 - DNA, 477 bp, Glycine max
  unsure (1)..(477): unsure at all n locations
cacctgcggcatgcaagcttgcagtgtaacattctctttgatgtgccattattttctcctatttcttaaccctttttgtcaccaatttaattactgatttactctaattgttaaatttattattcagttttatcaattgggcccacttgactaatttgatgtttttattctaattntaggaattaatgaagcattgaacttaatctggattttggttgtggacttaaagagggcaaataaagcaacgtttaccttagataatttctaattaggagattgcaatcttattttatgttgtttagttcttatttcgttttgggccagaataatgtaatacggcccagtgactttgagtgacccttataaatagcagccttgggattcatgtaaggggaattctgtgatttcataattcacagcatagggtttagggtntctacgttttgtaggactgtttacttgaatgcattttcgaat

SEQ ID NO: 230494 - DNA, 449 bp, Glycine max
  unsure (1)..(449): unsure at all n locations
tgcaagcttgcanactctgacagggaacgtatcccagttcgtgttgtccatgccagtgtagctagtgcaaagggtttctttgaggtcacacatgacatttctcacctgacatgtgcagatttccttcgagcccctggagttcagacgcctgtaattgttcgtttctcaactgtcattcatgagcgtggtagccctgaaaccttgagggaccctcgaggttttgccgtgaagttttacaccagagaggtaaagatttatgagtatatagcataatttaaaactatctcccactttcagtgaataaatatgattactgtaattgtttaaatttctccttatgtcttttaaagaagggttaaatattcattctgtccttgtatttgtacctatttcaaagtttagtctctatatgagttggcagacaattttttgtagtggttattattgtc

SEQ ID NO: 230495 - DNA, 339 bp, Glycine max
  unsure (1)..(339): unsure at all n locations
gtctctaattatagattatccctatctttctttttggggcattggaattcattnttacaagaaaacagaataataaataaataatgtataaataaatttgggtttcaagatacactgaaaatagtttgtccaattacattgataatacattcaaaactagtgaaaataaataaataaataaaaggaggaagaaaaaaaaaacaatagcaaaacaatatatatatatatatccaaaacattctactttgtttatgtccttaaccaaatggttaagaaagtctaaatgttactacttgtttcaatccttgttatcttcatcccattttgtaacttcacgtt

SEQ ID NO: 230496 - DNA, 476 bp, Glycine max
  unsure (1)..(476): unsure at all n locations
agcttaacaatttagtttcctacgtgtgtatatcgtttgtaaaaaaaaatctgtgaattgtaaggatatttttaaatttaaatcaattttataaatttatgaataaaaatatattaaaggaaataagagatatttactataaaatttgacttttgttaattaggttatcttgatgaattgatgagcactagttatatatataatacgaaatatttctgcacgaatgagacaaaattgagaaggagaaagtatatataggaaatcttaactaacttcacctttgattaatgatattatctcaaaatatctttcattgaaattgtggagaaataagaccgaggagaagaaataggtggcaaaataaaaaagatattatattattgaaattcacacttttattattntccttgttgatatgcatagaaatgcacaatccttgagtctttcgtcactaatgatagaatataatgaaaaca

SEQ ID NO: 230497 - DNA, 460 bp, Glycine max
  unsure (1)..(460): unsure at all n locations
ctcaagttgattatgctgatgaatcacatgacatatatggataattgaggcatgtagcggngcanattaattagctccattcctgacctcaattntacatctcgagactattcttcaaaggtgaatttgacatctgaaagtcgagttggagggataagtacctatcatgaatgtctcgagagtgtaacactattgccattgagaataatttataatacggaactctgaattaatgtctaaagttattttctttcgtgtgtacgtgttggggatatatacactacaagctcacaagtatatcgtttcctaaatcagataacatcgtgttggaagtgggtctagtgagaccgtatgtatgactggttctgaaagcaaaacgaattttaacactcaacagccttnggcacttaaagagataaaagaaacaacaatataagtattatacgtgatataatgcgat

SEQ ID NO: 230498 - DNA, 387 bp, Glycine max
  unsure (1)..(387): unsure at all n locations
agctagaagtttatatgttaaatanaatcagttatataagtggagaaaccagtttatacaacaccgtagtggctagagtaaattgaaaattgatgatgtgtgaacttcagatatattttgtaaaatagttagctatattccccataatgataggattacttacgagttttgataaaaagcctattccgtatttgcttgatcatctgcccaccttccccaactggggaattaaaatgtgtgcatgcaagatgtaccatcactattatgtatgagacattatgtgtagcatagtgcatatctggaacccttatacttgcctctggatatgctaatacgatactgctgatataaccttatctgtaatctgtcttactaaaatttaaaata

SEQ ID NO: 230499 - DNA, 413 bp, Glycine max
  unsure (1)..(413): unsure at all n locations
gcttttggaggtctattngcataatacacctaggggttcttccctttatagtataccccttcatcaactcagttgcaatgagaatatgattgtgaacgacttgaccgggcacaaaagctgcttggctagtatgaacaatatcctgaatcacactccctagcctcctagtcaaaaaatattatatcactctataaaaagtagagcaacctgcaataggcctgtaatccttgacagtcttagcagtaatagatttaggaatgagtgtcacaagagtactattaaaaacctttaatagagttcctttctcgaaaaattcattcattgcagcaataaaatctttctttactatatgccagctatttttgaagaattgtgccctataaccatctatgccaggtgctttcatatcacca

SEQ ID NO: 230500 - DNA, 449 bp, Glycine max
  unsure (1)..(449): unsure at all n locations
atacttatattatgtgtgtgngtgtgtgtgtgtgcgtgcttatatttatttgtacgtgtttagaaatgtgataactcactccctatgtgttgtttatgttgggatcctatgataatctcgaaccttgtgttcgtatgaacagatggtttggtggatgactctaaagaacctcgtgctataagatgctgggacacaacactctgataggatgtgacatttgggcatgggtttctataatatttgcataatattatgaaaatgttactttatgttgntctgctgcttaacttgttttgggtcagaaatgttttcataaccgtatgtgataagttcttaatttgatgattaacatggatgtgaaccttttacccatgtgaactcttttatgtttagaaaataatctattgtatgtaattccgcactttcatgtatgttattatattaacatc

SEQ ID NO: 230501 - DNA, 413 bp, Glycine max
  unsure (1)..(413): unsure at all n locations
tagaaccctgtaagttntgaacattcacaaagagatctcaatctggagatcattgttgatgtgctagccaagataaggactattgattctatcttgaagaaggaaaacactgagaagtaagaagacaagcaagaaaagccttctaagaaggcaaaaaaggttaaacctactattgcaactgtgcaaaatgcaccaaaagttgaagctggtgagagaacccctgttaggccagtgaaggattccttgttcaacattgtgaatgtaaaacccctgttaggccagtgaaggattccttgttcaacattgtgaatataaaacccctgattattgatgtctcgacgactcatactctacgataatttacgggtgacancttactcaacttctcgttagtcagaacccttcactggtca

SEQ ID NO: 230502 - DNA, 444 bp, Glycine max
  unsure (1)..(444): unsure at all n locations
agctntacttattatctgtctcttccacaattactccaattaaacccaaatcttcatgtttataaaaggaataactgatgaatatagaagaatgataaacgcttcagcaggaggatactatgccaatggaaccacgaccaaagtaaagaaacctatagaagatgtagcaatgaaagaatgaggtcatgattgcaaccacacccctccaaaggaggttcccatagaagacatcaaagatgaatccctcaaacaataaacacaaatgaaagctatgatggaggctatgattgagaacgtaaccaaaagcatagtaaaacaacttcaaccgttgataccgctaaaacaaccaattttctcatgtgaagaatgtggaggtaaccaccataactcttactgtgtggaggaagtagccaaggaagccaaattcatgagagaacacactac

SEQ ID NO: 230503 - DNA, 356 bp, Glycine max
  unsure (1)..(356): unsure at all n locations
gatggaatacttacttgttggtgatgaacaatatcgcataacggaatcaaataatgcgaaaaaggatgaccctagggctgcaaattcatcaatcccgtgggtatggcttttgaaaggggggaaaagaagtttttgaacgtaaaaacgcccnccctttcgtcatttttatagtttggtgcaggggtggctcgcccaggcgagctaacctgcactttnntttttttgttgttcataatttcttttttgaggggaacattaaccaatgtccctcccttctcatggattagcattttgcctaacttgaacttacttaagttagaattaggcgttgattacttattctattattacccttt

SEQ ID NO: 230504 - DNA, 426 bp, Glycine max
agctagaggagttttttggtttatatattcacgtgtatttgcttggcatgtgttaaataatgttcgaagatatcattgataattctctctctccatttgggcgagcatgatgagaatttggaacttacagcagacgaagagattccgatgcctgaacacattgtttctctttgttgtgatgaataaaggattagacatgctgaagatgaggcattgggagtctcgatggaactgaaacatcatgtgctccaacaaactctggtggcgataacataatttgtgactgtcaattatcacccccatacatacaatcacccccttatgcacaacacggtgatgaacttcaaacacctaaaaattgacgcttggttgaaggatatactagagaactaatttgtatgccattggggaaatttgaacacacat

SEQ ID NO: 230505 - DNA, 449 bp, Glycine max
  unsure (1)..(449): unsure at all n locations
agcttaactatatagtttaacctcacattaatgcaacatataacactntctcacaccataggaagggactaaaaattgaaaaatgattaaaatcaattttagtgctagcaaaactaacaaatgacttatttttcccattgaaccttcttcatgggatctccaatcacaaaggttaagggtacaatcatttgcttgtttttaagtggcctaagtctcattcctctcgatgtttcaaaaaaagaatttcttcactaggggtttcagtcagaggatcggttgaattcattattgatttcacataaataaaatactctcatattttaagtaattgctttaccaaaatatctcttcattttttgacaatcgcaacgtacatatagaatatgcactttcctataaaggaacacattngctaagaaattttttacataatcaatctcatattttga

SEQ ID NO: 230506 - DNA, 442 bp, Glycine max
  unsure (1)..(442): unsure at all n locations
ntatgaagttntctggttntctaaaccttgaaaacttgtgctattcatccttttcattctcttctccctttgccaaaaagaattcgccaaggactaaccgcctgaattctttttgtgtctctcttctctcttttccaaaagaacaagggactaaccgcctgaattcttttgtgtttcccttctcccttgtcaaagaattcaaaacgacacagtctgagaattcttttgattcttcccattccctaatacaaaagcgttcaaaggtttaaccgcctgagaattcttttgtatccccattcacaaagtatcaaaggtgtaacagcctgagatctttgtcttaacacattggagggtacatcctttgtggtacaagtagagggtacatctacttgtgtttgactgagaacaagagagggtacatctcttgtggatcagttctagt

SEQ ID NO: 230507 - DNA, 264 bp, Glycine max
catgtttaccaaagaagtattactctatggtaatcgatttccaaaatgagtaatcgataccagaggaaaatgttttgaaaatgtttcaaattgaatttcaacgttccacttatatttctatagctgttgtccattacaatgatgtggtaatcgattaccagggcctttgaacattgaaattctgattcaaatgtgaagagtcacatcccttcacagaaaagccttgagtaatcgattaccagtgattgtttctgaatagatcat

SEQ ID NO: 230508 - DNA, 261 bp, Glycine max
agcttgatatgaggaagtgtagacaggtgaaacttcctgcttttattcgttgaccacagagtggtacctggagttatgtcgcggcggtcaggagaccttggggacgtcaggtggcgtgctattgccccaaaccaagctcgaccaatcctgacccaacccgggcatagtcaattagcgagaacctgtgatgtacctaaacaggtgagctcctgcagtccacagataacatgaacacagaccacatagcaacgaggattgcgc

SEQ ID NO: 230509 - DNA, 388 bp, Glycine max
  unsure (1)..(388): unsure at all n locations
gatatccctaataaaatgacatgaattttgtttcttaataaaatatctatagcgccatgtaactaatatgaaagtcacaagaggtgaagaataataaagagaaggttacaaaagggttgttgaaactgaggtttttcatttacttttctaatggccacaagtgggatgtaaaaagtttgatttttcgctttcgatccaacctcctgtttgcaccataattgttgaacataatgataacaatgcccaaccaaaagaatcagtgcgtgtgtgtgtnggagaaacaattgaaacaacttatcccacaccaaaccaaaggtgggtgtcatttgatcacatagtcatgcgccactatattccctcctttttattcttgngatctctcttcatg

SEQ ID NO: 230510 - DNA, 163 bp, Glycine max
  unsure (1)..(163): unsure at all n locations
agcttcattaaccagcttctagcacactctagatatcttctcanagatcccaacggttagattatggacaagtgtcttgtgaagttgcagaccaagtttcgagaagatccaacggttaatgaaggcttggaagcgttcttaccgaggcagcttcatgtagctt

SEQ ID NO: 230511 - DNA, 402 bp, Glycine max
  unsure (1)..(402): unsure at all n locations
gataagtatganaagggtttttcaaaaattgagtagctcatggttnttcacanaacatgtttaccaaagagtttttactctatggtaatcgattaccagattgttgtaatcgattaccagtggcaaaatgtttttgaaaaagttttcaaattgaatttacaacgttccaattaatttcaaaaagctgtaatcgattacaatgttttggtaatcgattaccagtgcctttgaacattgaaattcaaattcaaatgtgaagagtcgcatcctttcacataanagccttgtgtaatcgattaccagtgattgtttctgaatagatcaaaagatgtaactcttcanatggtttttgactttttcaaattagttntaaagttttctaannagtataactcttctaat

SEQ ID NO: 230512 - DNA, 458 bp, Glycine max
gggatggtcaatgtcatcatataaagcttatcatcgacctccggatcttgcttcagaggtgagtttggcggagacacagctacctgttcatgaaacaaagataaatagcctattttgaaaagaagaaacatatagtaaggacaatatgtacctgttgtgataaagacttgaccagatgtgttggccaaccaaggaaggtgtgaagtgcctgccccactaaggaaacctcattagtgggtacaggaactggagcatctacatctgtaacctccttcacactcacctttacttggtcaagcaacaaaggagcgttatgaacaacagtggatccctcataaactctcccgatggcaaccaggcaggcaggatctgtctttatgtacaagccgcacctgtcagagtcacctgtctcaggatcatttcctgagggatcaacacatactccctttgtgctcact

SEQ ID NO: 230513 - DNA, 315 bp, Glycine max
  unsure (1)..(315): unsure at all n locations
gcttgcttctcataagaggcatgctaagtgggtagagnttctacttctatcttcatatgccatcaaacataaaaaggggaatgggaatgtaatggctgatgctgtgtctaagatacatgctttacttgctatgcttgagactaaactgtttggtctcgagtctttgaaagtcatgtataatcatgaggtggactttgctgaaatttttgctgcatgtgataagttttctgaaactggtactataggcataatggagttttgttaaagcaaataaatttgtgtgcctaagtggtccattaaagagttgcttgtgag

SEQ ID NO: 230514 - DNA, 405 bp, Glycine max
  unsure (1)..(405): unsure at all n locations
cctgcacgcatgctagctagtagcccctagaatagaatgagcatgtgtttggaagtatgactganaatgttagttagcttgtcagattgattatgaaggaatgcattaactgtatcctggtgagagtgtgatccttaaattttgagagaaacgactatcatttagtactgatttttgcatgaatctttgaagtatggactgaatgcatgaaattgaggatgatgaaggccatgtttgattgtgatagccacttatccaaaatgttgaccatgtgcttgaatgaattatcccttgtacccagtttgagctgaatgcattattgattgattgaaccctgagcctatacagtgttatcttctactaccttgacttcggttggaggagagcatcatccacaggaagcat

SEQ ID NO: 230515 - DNA, 201 bp, Glycine max
gtggtggtcggcctaggaacatataccacaaagtctggcgataggtgcactatttttattcattgccagctggattaccaggttaaccaaggcatctgggttaccttcaagcttcatagtctcactggatgagatgaatccgaggctactacatgcactcctatagtgacaatagcgtgatttctggcactgaattgctgg

SEQ ID NO: 230516 - DNA, 468 bp, Glycine max
  unsure (1)..(468): unsure at all n locations
tgcaagctatgatggctttcagtgtgtttggacctgtttagaagtaagaaattatgtctgtgatctgaaagctataactattagcttatcggtaaacatggatgtggaaccaatcaccttttttgtttgtgcatcaatttccattcctaaatgtcatctctagtgattatttgggtgtttatgctacagtagttatctcattatgttagtttcatttggcctgatccatggataatattttgaatgtagttcctaggcaaaagtattgtgaatcattacacaaaactgtcaggagaaaaacaaacacagtgatggttggtaacgtggctattggtagcgagcatcctataagaattcagaccatgactacgactgacactaaggatgttgctgggacagttgaacagggtatacaactggtattctactttgcactaataacancttgcttcttgccaatatatactg

SEQ ID NO: 230517 - DNA, 453 bp, Glycine max
cacctgcggcatgcaagctagaaccttgaatcttgattcttgattcatgaaatcaaatttcctcttgaaccttgaagtgttcttgattcaatcttgaacatcttgaactcattctttgattatcatgaattgacctttgagctttttgtcatcacctttgttatcatcaaaacatctttgaatcaatcttgattcatcatgaggctttgcttctacataatacgcaaggccctgaggatgactttgttggctactttcgcttaaccaatggtttagggatgttcaatagaggttacgaggtgcttgacacctagtctcatcagaaagtattcataagcctgagctttgaattgagtgtcattgtgagtgacaatgacgtaagggaggccatacctgcatatgagttgtttccaagtgaacttctccacctcgttggttatgatttctcgtagt

SEQ ID NO: 230518 - DNA, 455 bp, Glycine max
  unsure (1)..(455): unsure at all n locations
tgtagaaactcttagaagctgtcctgtaatctgtcaccatangctatgctgtagctttcagtatgaattattttttgtactatctatcaattctcatatatatatatgcatctctcagcaaactaaggctgaggatcctttttgtgtgcttatttttgcactcaaacatttcaagtaatctaaattgattctttgcaatccttgtttattttcttaatctaagctcaatcaccttttttcataatttcaaagtgactcgtgttttatccttttgcaatttactcaattttgaatatctttcttattcttaaatacaggaaccaaaggtaaaataagggtataatcatccatgatttggtttcatatcacaagacataaatcgtgagccagtgaattttatttttcattaacaaacttcaattntgatgcattgctgaagttattgaagtccatga

SEQ ID NO: 230519 - DNA, 441 bp, Glycine max
agcttggaaggatgcttctatggaggaaaagaatgagggagagaaagagagaggggggagcacgaaattgaaggaataaaagagggagagaagtggaactttgaagtatgtctcacaagagtctcattcatcaaagttacaacaagtgttacacatgcttctatttatagactaggtagcttccttgagaagctttcttgagaagctagagcttagctacacacacccctctaataactaagctcacctccttgagaagtttccttgagaagattcctaaagaagctagagcttagctacacacaccccctataatagctaagctcacccccatgccaaaatacatgaaaatataaaaaaaaggtccctattacaaagactactcaagatgccctgaaatacaaggctaaaaccctatactactagaatggccaaaataca

SEQ ID NO: 230520 - DNA, 270 bp, Glycine max
tttgggagccattgcaatccttgcgtccggactctcagtcacttatgataggcgccgagtgatcccattactgcttcccctaagctctctgtcctttctatacgccgcataccatgcctagcgaactccttggagtagcctaccattgtcgtcaccgtaacactctgcgatgaaaggcgtgatgctttcagctgatggctctcctctcatgggacatccttcgcatgaagatagaatcgtgattcttcctatcttctagcgagggaacca

SEQ ID NO: 230521 - DNA, 350 bp, Glycine max
  unsure (1)..(350): unsure at all n locations
agctnttagcctatgtgggtgctcgcattattattctgaggtggagcaatcatgctcagctgaccgaggaggatcttctccttatcaatctaatgcaagggaagatgaagatccaatggattaacattcttgtttatatcatgttgaagacgaagaggatcggctcttataagtgtccctatgcagttttgatctccacgattcttgactatattggtgttgatacccaagaggaagtatttggttttgttgaggcaaagnttgaagtgaagacaaaagtcttgaagcacatggggtacatcacgattgaagaagatgggattggatggattgagaagaacacagatgat

SEQ ID NO: 230522 - DNA, 414 bp, Glycine max
tgagaagtgaaattgagaatggggtaaaactggagcaaactctcacctcacacaagtctataacattaattgatacttgctcaaactggatttacacctaaaattccaccgaatcaaaatatgactcctcaacacccaattttaccctagaaagggctctttgttcactatggtcatttgtctttctctctagcacagcccaaactttctcataagtcctaaatgacatttcaagctaggattaactcactctaacctccaaataccactaaatccagatatggccttccaactctcaaaaactcactcttttccactcataacaccatattctgactttctaacgctaaggtaactgtaccattcccttcatctctaccagttttccataagcaatttcagctcataaacatg

SEQ ID NO: 230523 - DNA, 450 bp, Glycine max
gcttgggctgttaactatataacagcacctttgttctagtttaggctccttcctctctctcttctctcctctctctcctgttttcgttattagttttaagcttttcttcttttagacactctttcgttttgcaattccagtttttacttttcgtttcagcaataaaatttcgctcttcaatctataattttgttttctattgattaatggaaggctaagtctccagtgttgttttctcttgaggatcaaacacagttctctctgagggtctattattactattaaattctggttcagttttcctcttcactaattactctgaatttggtgctattaattcatgcatgcttagtgcttgcattaatgtctctgcgtttaatttcccgtcatgtctaatgatcgtttatgattaaacggtgtatgtgtctcttaatcacataatgaatgcct

SEQ ID NO: 230524 - DNA, 466 bp, Glycine max
  unsure (1)..(466): unsure at all n locations
gctactaaagaaccaacccatcttgaagtatacattataatatgaagaatagagatcaaaataaattcaagataagtaactacctttggctgtctaatagtgacaggtgcaaatgtccgatagtgatatggggccttcttaaagcctactataaggctatccagtaatagtcctaaattaatttaagcatttaaccgtataaagaacaagagcagcaaggattgaactcttatacatgtggtcgttgaagctctgatatatctataaacaaagggactattattatgtatgtctataaacaacctagttacaataaaatgcaatcacaataaactcaagtgcaaatcattcatagcaatgacaaggacacanaataatcgataatgatacatcanggactcacaagtcaaaatgtcaaaccactaccctttgtagcatggagagctaaataaacattatcataatg

SEQ ID NO: 230525 - DNA, 453 bp, Glycine max
  unsure (1)..(453): unsure at all n locations
agctntagtcttctagtagttcattctactcctcttatctctaacatccttctcttgtcagcataactcgtntgccttctctgatcaatgtgcatcctatctccaatcaacctgacatatttgtggtttcttggactatattcggccctatcaaagtctgtcacccaccttacatcaacataaaatggatctacacttcctcccataaaaagcttcatagggagtgatgcctatgctagtgtgataactattattataagctaaatttataagggataaaaacttatcccaacttacaccttcatcaagaacacatactctaagcatgtcttcaaggttctagatgatcctctttgatcgactatccatgtgaggatgataagcagtgctaacacttagcttatacccaanagcttgctagactgctttccaaaatctaagatacctatctaa

SEQ ID NO: 230526 - DNA, 316 bp, Glycine max
  unsure (1)..(316): unsure at all n locations
tgaagagaaaaatctctagccataagaagtagtaaaaaacttaagggacaactagaatggtggcaacatgaagatggtcaccatgaacatgacattaagaaccacattgttacaacacactcagaatgaatttcatcaacaggatgagttcattntgaacattgtatctaaatttctagaaatgcaatcgagatattcttgatggatatggaaatcttgaagaaagatcttcaactctcatgaacaagtcatggtctaatacaatctagatcatggagaanatggagtttgtagtgaaacactgtctacttgacac

SEQ ID NO: 230527 - DNA, 332 bp, Glycine max
agcttaacatttatcacttcaggtgctggttctacttcacatggatttgatggggcctatgcacgttgaaagcctcggaagaaagatgtatgcctatgttgttgcggatgatttctccaaatttacctgggtcaactctatcagagagaaatcagaaacctttgaagcattcaaagaattgagtctaagactttacagagaagaggactgtgtcatcaaaagaatcaggagtgaccatggcagagaatttgaaaacagcaggttcactgaattctgcacatctgaaggcattactcatgagttctctgcagccattaccccacaacagaatg

SEQ ID NO: 230528 - DNA, 445 bp, Glycine max
tggttcgaggtacttacccgttgaagatcgaagaacgatgaataatgaatgaagaacgtcgaagaacagttgaaacctttgcgaaattcctcacggaaaacgttacggaaacgtttcggaagcgcctcggcttagattttcttcacggaaacaatttttccaagcaaattcgaaagagagagaagtgtcaaaggggctgaacccttttcttcttcacttcctcccctatttatagcaaaataggggaggtggttgccgcccagctcgcccaggcgagccaggttgcttcctccataagcaacaaccttctggaggaatattctggagggcccaagtgggcctgggtgctatttgcacccccatttatactaagtacacccctctgctgtttttggtgattctcttttccgaaatatacggaaacttacgaattatgtaacgatac

SEQ ID NO: 230529 - DNA, 390 bp, Glycine max
gatctctaagtcacctgcggcatgcagcttattggagaagcataagaagaatcacgatatcatcaagcaactcctcaagatacaactaaaggagaaggaagatagtctcggaaatgagagaagtcaacaaggtcgaggtaaaggttgaggtcgcggatgaggacaggttggatgtggcaataaaagatgaggttcacatttcatcaatagcaattacgagaaagaaaaaagctcaacaagagaacgtggaagaggctatagaagcacaaggtaggataaatctcacacccaatactataattgtcagaagattggccactacgcttcaaaatgaagatttgccaagaatagagttgaggaggagactaactatgtggagcaaaaagatgg

SEQ ID NO: 230530 - DNA, 470 bp, Glycine max
  unsure (1)..(470): unsure at all n locations
tttgtagtgggacaacgatacaaggattacgttataccttgatgcaatgacatatcccatttctgttatatccatccacttgtccacactaacctaaatcaaacaaacatacacatctaagttatttaaagtttgttcttaaaaaaaataacctaaacaacataccttggaaaacccatcaacaagtagggacaaccttaattgttcaaatctctctgtgccaccgaagaggttgatgtagtcatgcgaccatttgccaagttctttaatcaattcgttgcacaccaacgaccaagaatcttnccccatacctaataaagcggcaatggaccgatattcacagttaccgtccactttcacatccacaacgtcgtgaatgaaaccctgtataaatggcacatattgatccaacatcgggatgatccttgttggctttggcggttcagaagatgatgcactacatttcactg

SEQ ID NO: 230531 - DNA, 565 bp, Glycine max
  unsure (1)..(565): unsure at all n locations
tccaactcattcctttattttgaatacgcatttgatattntttannnaaaccggtgnttgtgcatcctctactcccctataaaaactgcccgcttgaaacctttatgaccccgggatatatgttattatagaacgcacaacgtgctacggcacatgcgttatttatcacgccactactaccctagtagtcaaacgtgaacggacgacatcgtatcggcggagatcttgtatgatcgactccacccctaactcgtggagctaccatactaatcctgacccgaaccacggacgacgattgatctgctaacccacacgagcaacatggtggacccaccgactaccggatttttacaattgacctccacatgctggagttgcacactaccaaactgctagactatcaaacaactggaagttcagcttggcngcaactactagacttccacgacctttccaacaacacctcccaggcctggctcggagacaccccttcacccccaccccttggtctagagagacacgcaggatctaacctttaccgctaagattattacataactttggc

SEQ ID NO: 230532 - DNA, 456 bp, Glycine max
gatccttatgtcactgctgctgcagctaacattaattcagcttctcgtatttacggacacatagacatcagttaaagtattgtcgttgaattggctcgtaggatcaagattcaatttccaagcgtctcgatatattaccggactcaatcagaccatctgagtaaaagttgttatccgttgaattggctcataagtcaacattcaacttcgagcgtctcgatatattacgggactcaatcagacattcgagtaaaaagatattgccgtttagaatggctcataggttcaacattcaatttcgagcgtctcgatatatttcgggactcaatcagacatccgagtaaaaaggtattggtcgttgagttggctcacaggttcaacattcaaattcgagcctctcgatatattacggcactcaatccgacatccaataaaaagttttgtcgttaaaatggc

SEQ ID NO: 230533 - DNA, 479 bp, Glycine max
ttactgaccctgactacggacactttagaataagcttaaccattctacgacaatagctttactcggatgtctgtttgagtcctcttatataacgatacgcacgaatgttattgtttaagcttgacccacttctcacgattataacgttttactccgatgtgcgatttgaactcgttatatatcgacacgctcgaaattgaattgttgagctttacgccctattcgacaacaataacgttttactcggatgtcctattgactgacataatgtattgggacgctcgaaacaattgtcaaccttttagccatttctacgacaatactactacacgtattccattgtatcacaatgtatgggacgcttttaatgatggtgaactttgaccaataacacgcgatacattctgcttgaggggatttgtccaacttggtagacctgtggtgagggtcctagaacgcctacttcatatagagttttg

SEQ ID NO: 230534 - DNA, 474 bp, Glycine max
  unsure (1)..(474): unsure at all n locations
agctatgtcaaactcgtactgcgtggatattttatgccgattactntattgtatgaaaggatgtacgattttcttccacctcctacactttatatacgtatatgtacccaaaaaaataagatgtaaaaaaaaaaaactatatatacacgtatttttcagacaatcttgttcggtgagtattcataacatgatgatattaattagctcacaaagatttgtttttcatgcacaagtcgaatgagaactttacttaagaataattaagtatctatcacttgattcaaccactcattaataaatgtataagtgtataacatatatatatttgagattatttttctcgcttgacnatccttaaaaagtagaagtataaaaaaaccctatgaaatttacatatctcattttctctccaagaaagaaaaagagagtgtaaagcatatgaanactgataaaagtaagtatcattcccatgat

SEQ ID NO: 230535 - DNA, 376 bp, Glycine max
  unsure (1)..(376): unsure at all n locations
ctaagctcgttgctcttctntattaagtaattatgtatagntgagtttcttataatgctattgatgtttatattacttaattatcgatttgtgctatgtgcaaattacaaagtaatccaagttgctctcactaaaatagttttactacaacaatagctatttaaaaggacactntctattgatgtgccccatgtgattggatgatagtataaaaactatgaaagtaaaacaaagctaaactcgttaagtatcatctgattcttgaagggaattttctaaatggttagttttgttaatactttatagtatagttntagtcacaaaaataaatgattctttgcatctactgcatggtttgacatgcanattcatttaa

SEQ ID NO: 230536 - DNA, 116 bp, Glycine max
  unsure (1)..(116): unsure at all n locations
tgtngttccggctgttatcaagtttcatgtggaccattatactcaattaagccgttcatccgcnattatcactattaagcgcatcaccagtcgtatacggtacaattctgcttaaa

SEQ ID NO: 230537 - DNA, 444 bp, Glycine max
  unsure (1)..(444): unsure at all n locations
agctntgaccaanatcaaatgataataactntttactcggatgtccgaatgaataccgtattatatcgagaggttcgaaattgacaacggaggctctgagaaaatccaaacgacaataactttttactcggatgtcagattgtgtcccatagtatatcgagatgctcgtaattgaaaccggatgctcgtagcaaattcaaacgacaataactttttactcggatgtccgaatgaatcccataatatatcgagacgctcgtaattgaaaacagaagctctgagcatattctaatgacaataactttttactcggatgtcagattgagtcccgtaatatatcgagacactcgtaattgaaacagaagctctgagaaaattctaacgacaactaacttttactcggatgtctgaatgaatcccgtatatattgagatgctagtattt

SEQ ID NO: 230538 - DNA, 426 bp, Glycine max
  unsure (1)..(426): unsure at all n locations
agcttatgcactgttaatgtaattatgaaattgatatgcccgaagaaacaccatttcctagttaaccatgcattaggtaccatgttcaattattttgtttttaagtgaaacgggtttatgatcccaacatggttggctcgtggtgcctaacacatgaaactaagaatgtagtgtgaagtttcacgcttcccccttttttgtttttgttttgtagaggaaaacgcaaggatgagcaaacatganaacaaatggtatgcaatttggcagatcaaaaagnttgttgaacgcatatgcatgatgatgccatgactcatgcaaaatgtgaggctggaatatgataacggacaaatgcaggaacgatatgttcattatgatgttatgaagagatgcttatgcgatgcatgatatgaatgcattntacggaca

SEQ ID NO: 230539 - DNA, 338 bp, Glycine max
ttcgagtgtctcgatatattatgttctctgtatcggacctccgaatgaaaagtgatgaccatttgaatttcttgagagctacctttgttcaatatcgtgcgtctcgatatattatgcgcctgaatcggacctccgagtgaaaagctatgaccatttgaatttctcgagagcttccgatgctcaatttcgagcgtcttgatatattatgcgcctgaatctgacctccgtgtgaaaagttatgaccattttaatttttcgagagcttccgttgatcaatctcgagcgtctctgactatgatgcgcctaaatcgacatccgagcgaaaagtatgaccattg

SEQ ID NO: 230540 - DNA, 443 bp, Glycine max
cgcagcttgttacgtgtctttctacagattaaagcatagtatgatgtgtatatgtcaatcagtagatatcttattgtgaagatcctagaatgcttgccttgaccgaaggtggtcatcaagtccacatagcctctggtctctaccatctcacttgtaaagtcaaggaatggaccggcatgaggatggacaatgttgggggagatgtctctggaaagttttccaatataggatatcaatagaactaccctggtcgataaggaccctatacaccatgaagtttggaataatgatggagacaaccacgaggtcgtcttggttgatggggttgatacccttgaagtccctatctgtaaagtgataggagggaaacttcgttgtagtggtgcgtcaacaaaattaatgttgatgtttctgatagcatatagatgacatttttgggactg

SEQ ID NO: 230541 - DNA, 426 bp, Glycine max
cttctggtaatcgattacaagccttgtgtaatcgattatacgctttaaattttaaattcaaaatttgcaaatttgtttctgaaatgaatctggccactggtaattgattataacctctggtaatcgattaacagagagtgaatatcatatttatgaaatctcaaaaacttttgaaaaatatcctttggccaaacctgtacatcatcaattaagaaactctttcttagattctaggaactaagttcatcaattatcttgaatatctggattattgacttggatcaaacgagaaaagcgtctatctttggcatcatcaaaacttcataaaacttcatatcatatttgcttctacaatgtataaatattacatacttatataattatggggttgaagttaagaagtataacaaaataatatcttcattc

SEQ ID NO: 230542 - DNA, 441 bp, Glycine max
  unsure (1)..(441): unsure at all n locations
agcttatccttatggcttgcctncggacttcaccctccgtgccaccccggaagatttaagccaagcccctactttcgaggggcaactcccaccttatgacgactatcccgggcaagacgatgaggaaggagatacccatcttggccccctgctccacctcaaagatccgtccccccatgaactaccccaactgaacataatccgccatatcccggcctcacccacacccgtaaaagaatctgttcccttcgcggaagataagggaaagattgaggcgcttgaagagaggttacgagcagtcgagggccttggcaattacccattctcggatttagcggatttatgtctcgtgcccaacatcgtcatccctcccaagttcaaagtaccagactntgacaaatacaaagggacaacatgtccaaaagggcatctccggatgta

SEQ ID NO: 230543 - DNA, 418 bp, Glycine max
  unsure (1)..(418): unsure at all n locations
ntacagcagaatttagtaatgacccactaacctagaattaaaataacttaatgccattaacctagggaattaaaacaaacttaatggctgagtgtaactgaaattgtggcaaccaaaagtcacccccaacagccaacaagtcagccaccatttggtctcccaaaaggctgatgcctaggttgccaattgggcccttattacaacttgaactaaagcccttttagttgattaacccaaaacatatttttggtcagccaactttacaaggattgtgccattatttagacaaacaaaacactctaaaattgaaataaagtggtgtcatttagtcctcctccatttgggccatgatacaactcacaaccttggactnttctccttgaaacttgngcttgtattcaaatagtatggacaacac

SEQ ID NO: 230544 - DNA, 305 bp, Glycine max
tactaacttgagccatttacgatataacctgtactccgatgtctatggtatccataatatatcgacacgctcgaaattgaatgttgaagctctgagccaattcaaacggtaatatacttttaatcagattgctgattgaatctcgaaatatatcgagacgctagaaattgaatgttgaagcttccgagcaatccaaacgacaataacttctttctacgatgtttgattgagttccgtaatatatcgagacgctcgaaattgaatgttaatctttgagccatctaacgataatacttttactcgat

SEQ ID NO: 230545 - DNA, 435 bp, Glycine max
  unsure (1)..(435): unsure at all n locations
tgagatgaggaagtgtagaagggtgaacttcctgcttttattcgttgaccacagagtggtacctggagatatgtcgcgggggtcaggagaccttgnggacgtcaggcggggtgctattgcccaaaaccaagcttgaccaatcccgacccaacccgggcatagtcagtcagtgagaacctgtgatgtacctaaacaggcgagctcctgacagtcaacagataaaagaaacaaagaccacaaagcaaggaggcttgtggtggctggccagctgtgaattatgtgtgatatatggttgtggcctctggtaatcgattaccaagggtgggtaatcgattacaaggcttataaatgaagacagaaggctaagatggtctctggtaatcgattaccaacgggtgtaatcgattaccaggcttgaaaacgaagtcaggaagc

SEQ ID NO: 230546 - DNA, 382 bp, Glycine max
  unsure (1)..(382): unsure at all n locations
agcttttaatggaagtcaagagcatgatattgctccgatnaccgtgactggtgagcaggtatatcagcgggttcaacacctgaacactgtatttgggaatacccaaaagaaggataaaagttagagttgcatatggaagaagaggtccattttctttgatcttccgtactggtgtgatcttgacgttagacattatattgatgttatgcatgtggagaaaaatgtttgtgacagtgtgattgggatgctccttaacattcaaggcaagacgaaggatggcttgaatacccgtcaagatctagctgatatgggtataagagcatagttgcatccaaggtctgatgggaagaaaatttacttgcccccagcctgccatactttg

SEQ ID NO: 230547 - DNA, 351 bp, Glycine max
  unsure (1)..(351): unsure at all n locations
tctactcatgtggcacggcggngccacttcctcttgttgtccctatcgcgagccttggactctgttcttcctttccgcgatacacttccgtatgtccacttgcgtgggtttataacccaacccgaacattctgccgccttctctggtgcttaccacgctggttctgccaccgttgttcttgcccaaacccattccgggctcgtagccgtaccccaacatcacccgggcaaccatcattgccgtaacggacaggcaactcgcccagagagggaatctacggaggcaatgtttactacctcaaaagattggaaggtcatttccaatgactactccgcggcttccacatatggc

SEQ ID NO: 230548 - DNA, 444 bp, Glycine max
  unsure (1)..(444): unsure at all n locations
agcttgctgccacggagttntccgactatgctcttgtgtggtggaacaagctacaaaaggagagagcaagaaatgaagagccaatggttgatacatggacagagatgaaaaagatcatgaggaagcggtatgtgccggctagttactcaagggacttgaaattcaagctccaaaaactaacccaaggcaacaagggggtaactatggctcgatttcttaatggatgtgctcatgattcaagcaaatattgaagaagatgaggaggtaactatggctcgatttcttaatggtttgactaatgatatccgtgatattgttgagctgcaggagtttgttgaaatggatgatttgcttcacaaagcaatccaagtggagcaacaattaaaaaggaagggagtggctaagaggagttttaccaactttgattcttctggttggaaacac

SEQ ID NO: 230549 - DNA, 307 bp, Glycine max
tctcgatatgttatgcgtctgaatcggacatgcgagtgaaatatttgaccatttttatattccgagagcttccgttgttcaatttctagcatctcgatacgctatgtgcctgaatcggacatgcgagtgaaaaggtatgaccatttgaatttctcgagagcttgcgctgttaaaattctagcgtcttgatacgctatgcgcctgcatcgaacatgcgagtgaaaagttatgaccatattaatttctcgagagatttcgttggtcaatttcgagcgtctcgatatgttatgtgcctgaatcggacatg

SEQ ID NO: 230550 - DNA, 460 bp, Glycine max
  unsure (1)..(460): unsure at all n locations
atccttatagtcacctgcggcatgcaagcttccctcgatcaagcctctcgccaaccaggtttcgttcatcacttcaattctcttagccgaaaacctaattggatgcggatttcgctccgtgatgaaaaaccttagttcatgtttgggatgggttggttattcggaaacgtttgtttagaaacataagcgattgtttattcaaaattaggtgaactgaattgacgcttgttggtttgttaggtgtgctctgattgctgtttgtgtggtgtgatgtggagtgagtgttttgcagttgacgacttgagggggagtggttattggttgtggaaatttagtttgttcgacaatgcttgtgttctttgtttntaatgtgttactgaaaggatgaaaggaagagntgattttggtatttcggacgtggatgcatctgcntancatttaacaacnaggaaatgatgat

SEQ ID NO: 230551 - DNA, 469 bp, Glycine max
  unsure (1)..(469): unsure at all n locations
agcttgcttgtggagcttctatggaggctggatctttgagcttcaatgaggtccttcaatggtgattnttcaccatggagatgcagcggaagacaaaggagaagaggtgagaggaggcgccatccattaaggaataagccatggaaaaaaagagcttcaccaccaagatgagccttggataagaagcttggaagaatgcttcaatggaggaaaagaaagagggagagaaagagagaggggggagcacgaaattgaaggaagaaaaagggagagaagttgaactttgagttgtgtctcacaagactctcattcatcaaagttacaacaagtgttacacatgcttctatttatagactaggtagcttccttgagaagctntcttgagaaaacttccttgagaagcttctntgagaaaacttncttgagaagctagagcttagctacacacacccctctcataactaagctc

SEQ ID NO: 230552 - DNA, 444 bp, Glycine max
  unsure (1)..(444): unsure at all n locations
ctgcagcttgaaagtgttgttttcatcttctcgcttagccaatctgctggcttagcgagcttccgctaagcgtaacactcatgggctaagcgcgaggaagactctggaagaagatgagctgtacaggttcgctaagcgcaccacttcatctcactaagcgcaccatttcagttcatccgctaagcgagaaaggcatgtgctaagccaaaatccacaaatgtgcgctaagcggtccataattgcgctaagcacacaagcacgaacaaggccacctatttaagcctgaaatcggattttagacagggagtttggactgggattcagagctttgcatgtctagagtttctagagagagaaaggtccaagttccagatagttttgagagatnttgttgtgtaaagatctgcagagaccagagcttgaagcacgagccaatttgagagc

SEQ ID NO: 230553 - DNA, 415 bp, Glycine max
  unsure (1)..(415): unsure at all n locations
ntgacgcagagctntcagtgctagagctngtctccaaggaaggaggtcttgaaacaatatatggaattttttattcgtgcccctgcaattcttgaagcagagctagaagttcaagtgttggctgattatcctataccttctagcagattgttgagttctgattcctctattaaagaccaaatggttagttaataacatagttgtctataggaagctttcagctntccttgttatgaatataagataaaaaaaaataagagtgctatgtgtgtgattatctaacttttgactaaattggaaatacgtgactgactcanattatagagtgtgatcatttctcaattctagttntaggttgctagtggttatntattccagaaccattagaatctataagattcatgtatgatgaatg

SEQ ID NO: 230554 - DNA, 439 bp, Glycine max
cgtgctagctagagggacaatattaaagagggcacacattattatgaacacactccacttgtccgaaaatgttagtcaaacgatgattcgttatatataataataaaagcaacgttttgattgcatgtttatagatgataaacgagtgaatagacaatttagtccctcagattgtaaccactctgtatattattccctgacttaaatattaattcataatagtctctaactttacctccgttatgcaaataagtccctgctgttaaaatctaatttcctccgtcagtcaaatatctatttggcaaacgtaagcatcccaatgtggcaggtttgagtccaagtcagcaatattatgtggcaaggcaaggatcgaattgaaaaactaggttaacaagacatcaaatatatggaaaccccatttccctttcactgtcttact

SEQ ID NO: 230555 - DNA, 468 bp, Glycine max
  unsure (1)..(468): unsure at all n locations
agctntgagaaaattcanacgacaataactntttactcggatgtctgattgagtcccgaaatatatcgagacgctcgaaattgaataccgaagcgctaagcaaattcaaacgacaaaaactttttactcggatgtctgattgagtcccgtaatatatcgaaaagctcgaatgtgaatgtagaagctctgagcaaattcaaacaacaataactttctactcggatgtgtgattgagtcccgtaatatatcgagacgctcgaaatggaataccgaagctctgagcaaattcaaacaacaataactntttactcggatgtccgattgagtcccgtaatatatcggaacgctcgaaattgaatgtcgaagctctgagcaaattcaaacgacaataactttttactccgatgtctgatngagtcccgtaatatatcgagacgctcgaaaatgaatgtctgagctctgagcaaa

SEQ ID NO: 230556 - DNA, 451 bp, Glycine max
  unsure (1)..(451): unsure at all n locations
actaagcttctacattcaatntggagctgttcgatatattacgggactcaatcggacttccgagttaaaagntattgtaggttgaatttgctcagggcttcggtattccatttgagcgtctcgatatattacgggactcaatcggacatccgagtaaaaagctattgctggtagaatttgctcagagcttccggattccatttcgagcagtctcgatatattacgggactcaatcagacatccgagtaaaaagttattgtggtttgaatttgctcagggcttctgtattccatgtcgagcgtctcgatgtattacgggactcaatcagacatccggagtaaaagttattggtcggtgaattagctcagagcttctgcattcaatttcgagcgtttcgatatattacgggactcaatcagacatccgagtaaaaagttatatgtcgttgaat

SEQ ID NO: 230557 - DNA, 459 bp, Glycine max
  unsure (1)..(459): unsure at all n locations
agcttcagaccatatcaacacataatctaggtatccaaaacccctcaattttaatggatttcaaggtttgagaagtgaaattgagaatggggtaaatttggagcaaactctcacctcacacaagtctataacatcaatttaaacttgctcaaactggatttacacctaaaattccaccgaatcaaaatttgactcctcaacacccaattttactctagaaatggctctttgttcactttggtcatttgtttttctctcttgcacagcccaagcttcctcataagtcctaaatgacatttcaaactaggaataactcactttaacctccaaataccactaaatccagatttggccttcaaactctcaaaaaaactcactctntttccactcataacaccatattctcactttctaaccctagngtaactctacccttcatcccntagcagttttcataag

SEQ ID NO: 230558 - DNA, 449 bp, Glycine max
  unsure (1)..(449): unsure at all n locations
tcattctacacttganatagaagatgagatagtttctcataagatgaagcttcctgatcagggaccttcgtctagtagttctgacttgcagcagcctcttatccctcttccatttccacctagagcaattccaaacaagaagatggaagagatggaaaatgagatctcggagaccttcangaaagagaggtgaacatacctctgctaaatgccatcaagcagattccaagatatgccaagtttctaaaggagctatgcacccacaaaaggaaactcaaaggtaatgaaaggattagcatgggcaataatgtgtcagcattgataggtaaatttgttcctcacattcctgagaaatgtaaggacctatgtactttctgtataccttgcattatngggaacagtaaatttgagaatgccatgctagatctagaagcatcagttagtatcat

SEQ ID NO: 230559 - DNA, 440 bp, Glycine max
  unsure (1)..(440): unsure at all n locations
agctntggccaatataattaaattaaaaagtcttttacaagatatttactctctggtaatcgattaccagaggatgtaatcgattaccagtggccaaaactgatttacaacagctattaaaatttgaattcaaaatttgtcctgtgtaatcgattacacatatatggtaatcgattaccagcagtttctgaacgttttaattcaaattttaaagattgtaatcgattacatatatactgtaatcgattaccagagcagatttttagaaaatattctcaacagtcacatctttttatgtggttcttgaatggctatcaaaggcctatatatatgtgacttgagacacgacattgctaagagtttttcagaacaaaaaggtcttatcctcttataaagcanaatcngtttatcctcttacaaattccttgtccaaattactt

SEQ ID NO: 230560 - DNA, 393 bp, Glycine max
  unsure (1)..(393): unsure at all n locations
tgccttcgagattcctcatgggcccttttggcgctaagcatgaattgtatgctgagcngaaatgcatgctaagtctgaaattgcccgctcagcgagagtgcgcgctaagattggattgcgcgttgaacgaactgtccaattcttccaacttttctttaagattttttcttccagattttacattaattttcctgtaaaacacttgaaattntcatcttttaacttctactaataaaaaattacaaagatattaattntttcgttacttcattaaaaacaatagtaaaatgaagaaattgtaatcattattaaccaaaattgactatcaaattaacttagattttgcagttatcatttatcatacaatagggtaanaaaatataaacatcaacg

SEQ ID NO: 230561 - DNA, 457 bp, Glycine max
  unsure (1)..(457): unsure at all n locations
agcttgtaggattatggngtacccatcacatgtggtactatgtggcggtcgggcgatggtgcacaacaagctttccacatccacaatgcgcgcagaaacccaccatcccctgttgcccacctccaactgagctcacgtactcccacgtagcccatatcctcgtttctctcaacaccgggtccccatcaatcctctcaagcttccacaacatccaagcaaaacaacattcaaacagcataagctatcacaaccaagaaaaacagagcaaaggcagaaaactctgctcaacacatcaaccaaaatcacagcttttctcacgtaaagaccacagtaacaattccttcgatccaattcgttaaccgttggatcgactccaaaattttactggaagtctatagtgcataagcctacattttgaccgttgggatctactagcanacatccagaactcattcta

SEQ ID NO: 230562 - DNA, 330 bp, Glycine max
  unsure (1)..(330): unsure at all n locations
acattgatgttggtatttattgtatgaggttgtatgccatttttgttttaagggtagcatttcttggtaaaactaactttccaaatgtttgccttcgcangaaatggccccgaggaagcttgtctcatagaggtccaggaaggacaaggcggccgaaggaactagttccgctcctgagtatgacagtcaccgctttatgagcgctgtacaccagcagcgcttcgaggccatcaaggggtggtcgtttctccgggagcgacgcgtccagctcanggacgacgagtatactgatttcctggaggaaatagggcgccggcggtggacatcact

SEQ ID NO: 230563 - DNA, 444 bp, Glycine max
  unsure (1)..(444): unsure at all n locations
agctntgagcatattgaaatgacaataactntatacacggatgtccggttgagtcccgtaatatatcgagacgctcaaaatttagatccgaagctctgagaaaattgaattgacaataactntatacacggatgtccgagtgagtgctgtaatatatcgagacgctccaaattgagaacggaaactcttagaaaattcacacgacaataactctttactcggatgcccgacagagtgtcgtaatatatcgagggatgctccaaatagactacgaaagctcgtatcaatattaagagacaataactctctactcggatgtccgagtgagtccgcgtatatatcgagacgctcaaatgttatatccgaagctctgagagaattgaattgacactcactttatactcggatgtctcggagagtcgtgtatatatccagacactccaa

SEQ ID NO: 230564 - DNA, 290 bp, Glycine max
gcgtctttatatattacgggactcaatcaaacatccctgtataaagttattggtggttgaatttgctacgaacttccattttcaatttcgagcgtctagatagggtaccggacccaatcggacagccgggtataaagttattgtcgttgaatatggtacgagcttccattatcaatttggagcgtctcgatatattacgggactcaatcggacatccgtgtataaagtaatttcgtttgaatttgctagagctttggatctcaattttcgggactcaatcagacatccga

SEQ ID NO: 230565 - DNA, 236 bp, Glycine max
tgatattattcatggcgtgaaggatagatatgatgctatcgctatccctcttgatcaaactttatgaggccttcccttggatttctcttactctggatacacctgcatggttctttctttcctcggtataacaggagcctcgattgtaaatcaaacacaaactttcctaattatctagataataaatgggatgggatgttacaatcatagtctctaacttgagagagtaaattaaa

SEQ ID NO: 230566 - DNA, 318 bp, Glycine max
taagcttaccagtccttgataaactcctagaagatgtaagcttgcatctctttgcactattgaccctatcacgtgtcatatcagatgcgtgagtgtgcatcttaattatcaatataaataggtaggtatgtaagtaaaatacctgtctacacattaaattaacgcaatgtggggaggaactgtttccttgcctgagaaggcattttctgaatccaaacgagaatggagacgattatcacttgtttcaacagagccatttctaatgattgtcgtgtcgaaattgcttttgtttcaataagtgacatattcattatctgc

SEQ ID NO: 230567 - DNA, 438 bp, Glycine max
agcttgtagcaccacgtcaccgtgccttgcctcttgagagcataaacaacttccattgcggtgatagtcttcctcctcttgtgctcgacgtacaggactgcgccgatgagaaagacccttatgacgccatggaggaacttgtccttttgtgtacaacagagctgctgtaggtaccccagctgtgcctcaagctgtacccaacccaccaaacactctccttgataccaagtggttgattgttacgcgctttggtgatgctcaaacgtaaaaaaagatgaaaatggttccattcaacattgttaagcctctaaatggcgatgtgtgggtggaagctaatgggcaacagtatttccctagccacattagtgcctttattctcaccaagatgaaagaaattgcagaagcatatctagggaagactgatgaaccatgtgagct

SEQ ID NO: 230568 - DNA, 413 bp, Glycine max
taaggagggaattccaggggtggaacatgctctattcaaagcatgattggtgggacgaagtttcacacaatgtgagggaattgactacaattaagtgtttttacctgttgtgaaaaacacttcaatcaaaatggttttggccttagttgcacaagaagacatggaattggaacaacttgatgtaaggatagctttcttacatattgagcttgaagaagaaacctacatgactcaagcagaaggttttgtcaaaatatgtgaagaaagaaaggtatgcttgctaaaaatgtccctttatggccttaagcattaataaaatggcttaaaaaggtatgagtatgactggtgtgtctacttgaagaatattgagcatgatgttattgtctacttactgctctatgtaaatgatatgc

SEQ ID NO: 230569 - DNA, 468 bp, Glycine max
  unsure (1)..(468): unsure at all n locations
atcctcttagtcacctgcggcatgccaagcttgctgatantagttttgccgacgaaaggatcgaagtggatctgagaagaggcaaatttgattatcctgctatgatgaataggaagccttgggaaaatggagaggataagaaggagggaggaacccatggtgtgactgtcgttcctacatggccaaatttcccaccagttcaataatatcaatacccagccaatatcaggccttctcattaccctatcagccaagaacacccaatcatccataaaggccacccttaaatcagccacaaaacccgcctgctacatatccgataccaaacaccacccttaacatgaaccanaacaccaaccagggaaggaattttccagaaaagaagcctgtagaattcaccccaattccagtgtcatatgctaacatactcttatatctactcaataatgcaatggtagccataatccc

SEQ ID NO: 230570 - DNA, 429 bp, Glycine max
  unsure (1)..(429): unsure at all n locations
gtgagaaagtgtggaagagtcagtcttnctacttttattcgttggcaacagagtggtacctggagatatgtcgtacgggtcaggagaccctggggacgtcaggtggggtgctatttgccaaaaccaatcttgaccaatcccgacccaacccgggcatagtcagtcagtgagaacctgtgatgtacctaaacaggcgagctcctggcagtcaaccgataaaagaacacagaccacaaatcaaggaggcttgtgtggtggctggccagctatgaattttgagtgatatatggaatatggcctctggtaatcgattaccaagggtgtgtaatcgattacgagggcttataaatgaagacaagaagttacgatggtctctggtaatcgattaccaagggtgtgtaatcgattactatgcctaaaaatgggatc

SEQ ID NO: 230571 - DNA, 481 bp, Glycine max
  unsure (1)..(481): unsure at all n locations
cacctgcggcatgcaagcttccatcacaactccaccttcttttgcacatattggatagtggaagggccactttgctaaaatccttgataaagcgcctataaaaccctgcatgaccaagaaaagaacaaacctctcgcacgcaagaggggtaaggcaattgtgaaataacagctataccttgttctaccatgaagtgacatttttcaaaattcagcacaaggttagtttcaatacatctactaagaactctatctagactatccaaacatgtatcaaaagaggattcataaacagtaaaatcatccataaacacctgtatgcaactctctaanaaatcattgaaaatgctaagcatacaccgctggaaggtaccaggggcgttgcattggccaaagggcatcctcctatagacaaaagtgccaaagggacaagtgaatgtggtcttttcttgatcctcangaagcaatatgaattgtaataa

SEQ ID NO: 230572 - DNA, 389 bp, Glycine max
  unsure (1)..(389): unsure at all n locations
atatatgtatgtgngtntatgtagcatgataccttggatatgcatgtatataacagagatacctcacaaaatatatatatgtatgtttaggtagcaagataccttggatatgcatgtatatagcaaaaatatctcacaaaacatatatatgtatgtttaggtagcaagataccttggatatgcatgtatatagcaaaaatatctcacaacatatatatatgtatgtttaggtagcaagataccttggacacacatgtatatagcaaaatacctcacaaaaatatacatatgtgtaggtagcaaaatacctcatggaaaaagaaaaagagataaataagaaaaaaaataattattagttgtctagctaaaaaaacaacatgctttgtgaa

SEQ ID NO: 230573 - DNA, 469 bp, Glycine max
  unsure (1)..(469): unsure at all n locations
agcttatgaaagcctatttgcaatgttatccnccaaatttcagtagcatctctactacaataccagttatgaaaacaatgcacgaattctaaactacaacacttggcagaagagtcaatttgtaaagttcatatagtaattcaattctaatccaaacataacgtattttatatgtattcatattccccaagagtctacttttcaaatataattttattttcatcaaacggtacgtgaatcaaacaaagtaaaaaactgtgtgaagtatgtcaaagctgaaatttgtaaaacagcatgtgtgcacaaactttcaacaccaaataatatagaaatgactctaagagcccatactcagggaggataacctcccaaaccannaatgacattaaagaanatagaaactctcaataccttgagagaattgaagtcttctagagttcaagaaaatgcanaacanaatggattgatg

SEQ ID NO: 230574 - DNA, 430 bp, Glycine max
  unsure (1)..(430): unsure at all n locations
ttatttaattnggacgaatctgcaccgtttaacatgactcttattaaaaagtagtagcatcaacatcaaattacattcaaaatttcaaatagtaatagtattatttatgtaagttttttttttctcactcagaatcacatgtatttcttactttttctcactcagaaaattgacctaataatcaatggcgtatccagaaagtttttccagtgggagcaaaaaatagtctaatattttttcaaataaaaaattatataagtttttctaaaaatggtaataaaaaattaaaaactataaaatttaaaaggataaagtgattgctcattaaagaatttggctagacagcagaatgacgtgattgctcattaaagaaatatcattccttcccttagaattttaattatcattaaaaatanataaagatagactc

SEQ ID NO: 230575 - DNA, 459 bp, Glycine max
  unsure (1)..(459): unsure at all n locations
catgctagcttncatcatcgtacgtgtgatctttgatttataggaaatcgtgtgcaaaataaagtcatggtgcagttatggtttggggtttagggtaaaacacttgcctgcgtgagtttttatacactatgagtgatttattcccagtttcagcttaacccgatgttttccctgaatgttcatttaaaagctaaatgttcacgtcctgcccttcattttcggntacaaggaagattaaccttggcatgggtatattgcttctctaagatatggtgctctcgcgaatgatttattcttctttgcaaaaagcatgtttgcctatttaggtgaaaaataaacccggtggaccattcggtcctgaaacataanttgtgggagacccatgatagattgctagcgctgtcatgtgtcttaatcatgagcttagacctcttaataatcgcctcctttattgcaata

SEQ ID NO: 230576 - DNA, 252 bp, Glycine max
tgaatgaagaacggtgaagaacatccacggaattgatcatggaaacattatagaagcattacagaagctcttcgacctagatttttcttcttttttctccttcttctcactaatttaagtgaaatatgcttactaaggatgttgaaccccttccctacaacccgccacacctatttatagcaaaatagggggaggagggtgcaacatagctcgcccgagtgaagttggtgcttctcctctaagttatttaat

SEQ ID NO: 230577 - DNA, 455 bp, Glycine max
  unsure (1)..(455): unsure at all n locations
cctgcggcatgctagctagctctcaatcataggaaanatcatagtatcaagaccaaccatctggaaataattcaggcattagattgttgtcaattgtcagttgttaaaaccattattgcttgtcatgatctcgttggtaaggatttctaatccaaggcagcattaattagaacatccattacattgacgaaatgaccttggtattaaattcaagagcagtgctatttcgtatgaaaaagtatttattttattggctatttgtgattaaaaaaatattactagtaatttgaagaaatcacggataaacttcgtgcagactttcttgtcttatacaaatagcaattttctaaattcaaaggcccattacatagtcagaagaatccactaatacatcaataaaataaaattattaaaaaaatcgctgttatactaaaaaatcattactattttgaact

SEQ ID NO: 230578 - DNA, 463 bp, Glycine max
  unsure (1)..(463): unsure at all n locations
gaaacatattccatatgccaaaaggggaaaataatattaacatatcattaacttctcacttgactcaacgaagactcaaataatgccaaatcaattcttatcataaaagtagtcagaacacaatggtatttaatttctttgttccatatctatatcttcatagcagcaaagcaagctaaacgacacacttctacttaatataattggcatcaacaagattaacagtaataaatgatcaaaagtttccacattntctctatcaaattcaaagaagtatggttgcatctttcacaaccatacatgcatttccaaattcaagagggcataagatccacgcagcataatatgaagatcacaccagataatgacacggccatgcattaatntcataagaaactgaaccacaccttatacaaaaaacaccgaaccaatgaatatttcatgacatagacaaggaacaaag

SEQ ID NO: 230579 - DNA, 452 bp, Glycine max
  unsure (1)..(452): unsure at all n locations
agcttcacaaccttagactatggtgtaggctactaccttggcccatctccaggaagaaaagataaaagactcccatcaaccctttcgacgatgatcactaatgctntctacttcaggtgcgccccctcctcgggttcccccttcgtcacccaaacctggtctcttgccgacaccaccaaaacatacatttgtcccattcaaacgactatcatcagaagacctcaccctgcaccgggataagggtctgtgttttaactatgatgagaaattcagccgcggtaacaagtgcacctccaaactcttcctcctcattgtcaacgacaatgacaattctcctcatgattngtcatctatgcagatggttgtgctgcagaacaacgtacctattaaccaatnggcaagtgcaccaattcgttcaagtagtaataaaaacggtaagaccgagtgtccag

SEQ ID NO: 230580 - DNA, 420 bp, Glycine max
  unsure (1)..(420): unsure at all n locations
ctatatagcgatgtggattattgagttcttctatgaataatgagctaataatgcagtgtcagttatctatgtcctccatcttggtgtactcgtttcttgcagctttcaccatagaagtaatgctcatctactttggcagtaaatgaaaaatgaaacatccacaaatgactccatggattgatcaacccaagttcagataggagttgacgtcatcttggggtttcttcatcaaaaacataagtcaagggtgatataagaactccactgcctctaatttgcatcatacgagtgtagtcaataggaaaccaagtacgagaatcacatncacatagtttttaatagacaagtcagaatagaaagcattgtatttagctcaaatataatgccacatgataagcaaaagcttttaatggattaaat

SEQ ID NO: 230581 - DNA, 439 bp, Glycine max
agcttctacttatgtggcagggcgggcttcctttactttcttgtctccaacgcgagctctgaccactgttcttccttcccgcggtgcttcttttcatgtccgcctgagtgggcttatagcctaaaccatacttcccacgatttccttgggtttttatcaggctagttatgccgccattgtctttgcctaaacccatcccgggttcataaccgttccccaacataactcgggccatcattaccgccgcatcggacagacaaggttgcccaaagagggagtccacggaggaaatgctgaccacctcgaaagactggaaagcggtttctaacgattcttctgcggcttccacataaggcatggaggatgggcagcttaccaagatatcttcctcgcctgacacgatgaccaagtgcccctccactacgaatttcagcttttg

SEQ ID NO: 230582 - DNA, 529 bp, Glycine max
  unsure (1)..(529): unsure at all n locations
naacgctttttctatttcttcngtngntcananncatttgttntcngtcngtgagnananaaaggnnanggnnangnnngttanggtttttnnantnnngagnnnggagnngnnggggatgatnttanaananaagaccctcacccaacaccnncattcttaccntttttnggagngnnangaatgaatngnngnngnnannnatgtganctacatttttgagttcggagctgtgttcatgattgcctaagagaggaccctcaaggcaatcctccattctcatccttttncggagccacatcaatgaattgcgttgtcattcatgtgtcctcctcttttgagtatggagttgtgttccatgatgtcctaagagaggaccctcaaggcaataatccattctcatccttttttggagccacatgaatgaattgagtcgtcattcattgtgactccacttcttgagttagagttgcgtgtcatgactatcttatagaggaccctttaggaattctacattgtattcgttttt

SEQ ID NO: 230583 - DNA, 457 bp, Glycine max
  unsure (1)..(457): unsure at all n locations
agcttccatggtgacccctacaaatttctctatatcctgcctaagatggtttttccaaaagtcgacttagaatctatagaatttaatataattnttctaattacaatcttagaatttaaaaaaacctacagtaatatttttttatcaaataaaaactcaccataatcgactatagaatttacaaatcatatttgataaaaatcgtctctcttcccaacatgatgatattttattactcaataaaattaattttaaattcatgatttatttggtgaaaaaaatcttataacttanaagagagtcactttttttccctaattataccatgcaataatattaaaaaattcaaatgaaatntgtaaataaattatatatgatgattgttttaatttctgacgatacgctaatcttaaattatttactntaccagaactacttaatatcanatatagataat

SEQ ID NO: 230584 - DNA, 365 bp, Glycine max
  unsure (1)..(365): unsure at all n locations
atttatntatatatatatatatatatatatatattatattatattcctttggcggatcaaaataagtaaaaaatatattgagccttgtggacgagattctatagggtaattngaagaaaaagatcattgtaaacagttgtagcatttgttgctagagaaatgattatttggactcaccaggttcactagagcaaacttggctttaactttttcagacagcttcaaattaattccatttttcattatcaaattgatatgaagcacatgatcaaatctttcagtttttattatagtacagagattagtttcacatgaatggatgttctttntaatataaccaatgatntttattagatatatgtttc

SEQ ID NO: 230585 - DNA, 457 bp, Glycine max
  unsure (1)..(457): unsure at all n locations
agctnganaggtattcatacctcacaaaatatatgtatgtttgtttaggtagcgaaaataccttagatatgcatgtatgtaatttaggtagcaaaaaaaatacctcacaaaatatatatgtgtatgtttaggtagcaagataccttggatatgcatgtatatagcaaaaatacctcacaaaaatatacatatgtttaggtagcaaaatacctcatgagaaaaaaacaaaaaagggtaaataaaaataaaattggttaactaaaaagccaacatgcttttaaaggaaatgaacttgccattcagaacacaaggattntgaagaaaaatgtgtatgcacctaaatggtgaatattgtgaaaantttcccgaacgcccaanatggacttagatgaatgcatgaattgatgaaagaacatgttttggaaacactggcgtgacttaaatgggaaaaatgaat

SEQ ID NO: 230586 - DNA, 429 bp, Glycine max
ccttctattacggacctatgaaactaagcttttttctttttatctaagcagattagaaatgttcacctaattaatttaaatttaatcacttgataatatattaaaattaatttatctgttttttacgttgaaattaatttatgtgtttgtttctatctttctcatgtaaattaaaatttgactccaaattgtttgtgcttttaattggccaatattagttttgtgttttaaatagtttttaattggtcaatgttgttagttttaatttattgttgtaattaataattaaatgcaaatatttgtatttaaatttggatttattattaattgtacttagatattagttgttctgtaattattttttatataacattgataaattattcatactcatattagttgtacttaatagtgattattcatacttaa

SEQ ID NO: 230587 - DNA, 420 bp, Glycine max
  unsure (1)..(420): unsure at all n locations
agcttgtggaagattgtggaaacctctagaatattctatagatgtgtgaaatcttctgaaaccttatggacgagtatagaagaatacggaatatagtagaagagtgtagagattcctagaatgtgtggagcattctagagaattaatctccaccctagaatacaagtaatttccatcattcattgtggaggtggagtagtataaataagagtaggagtcttcattcctaaccatccaagacaagagtgaatccacttcttagagtgagaaaactagaaagttagaaagcctctgtgagagagaagataaatagctggagaagtctctatccttaagcttgagtgagccatcatagaatgaatcaatttcgaaacacatccttgtaatctactatcattntgataatgaaagaatctcata

SEQ ID NO: 230588 - DNA, 394 bp, Glycine max
  unsure (1)..(394): unsure at all n locations
gggaagaagtgtacatggagattccacctggatatggtgccactaatggaggaaataaagtttgcagactaaagaaggtcctatacagtcttaagcagtcttctcgggcttggtttggtaagttcactcaagttatggtatctttggggtacaagcaaagccaaggtgaccatactcactttataaaacactcccaagatggaaaacttactttgctcttggtctatgtcgatgatataattattgcaggcgatgatgaacttgaaaaataaaacttaagggagaggttagctgcccaatttgagatgaaggatctcgggaagctaaagtacttcctcgagatagaggttgcacactctangcaagggatcttcatttctcagaanatatatac

SEQ ID NO: 230589 - DNA, 402 bp, Glycine max
agcttgtgtgtgcagaagtgatggtattcatacttagatgggtttgcgcttagatgtcattactaggtggaattcaacttttctgatgcttaagagtggccttgtatatcgatgtgctatttgtagtctttcatttgatgataggagctattcaagttgtcctactaatatagaatgggagagaggacaaacaatgtgtgattttctgcatcctttctttcaaatcacagagttgatatatgattcctcttacccaacatctaatttgtatttcatgcaagtgtggaaaattgaatgtttgttgcttcaaaatttgagtaatgaagatgagttgattagaaccataactattgatatgaaaacaaagttcgataaatattggagtgatatagcatgtgcttt

SEQ ID NO: 230590 - DNA, 514 bp, Glycine max
  unsure (1)..(514): unsure at all n locations
ntttccctaagatcattgcaggatcangngnacttcggcattgngtcananannggnanantnaagnngnggctcgccctatctataattgtatagatcgtgactatcatggctcacggaggtgcattaaccaaagtgccatgtgcagcacctgatagtggcactctatctcccacgaagaagcgcagaacagactcacgtcatggaggagagaggacctcgaatatattaggcaatggttgcggagaacatcaagaaactatgctttaagcataacactatcaagagtacagcgacactacaccagcatctatctacatagattaataggagcgttctagataagaatacagcgtggctatagctggggttacgaataacgacagcacgtaaccgtctacaatgtgatatcttaacacagcacgtgagacgactgatgtataaacatgtatgctataccgtgcctgtcggacgatggatatgttatggcctacacggtacatgtgacgaccag

SEQ ID NO: 230591 - DNA, 444 bp, Glycine max
  unsure (1)..(444): unsure at all n locations
agcttatatttatgaaatttatattaattattcaatttatttgtaaattagtatttgtcaaagttttagtttaaaaaatatatatttttaaattatacagagaaaaattatatttgtcaaaatctataggagaccgccttccaaaaaaaaaaatctataggagaccaagattattagaatatgagacagtaatgactgcaactaatgtgggttntgaagatgagaataaaagtaatcattaccattaaaatttattagaaactttgattataaactttgtttggaaaagagtaattttttggaggattaatatanaaaataaatggcataaactttgatggtgtgatattntaatttatattctagagcaaaaaatataataaaaattagaanaataaacatgatatatcaagtaattntgtgactgatggtataaatgttaaa

SEQ ID NO: 230592 - DNA, 464 bp, Glycine max
  unsure (1)..(464): unsure at all n locations
tctaatagttgtctgtgcaataatatcaagttcttttctgcatctgttcccctaccccaaaagttntctccgataaactgtaagtacgaatctcactatgtctggctaattcttgtgaaggcaccctcaaggggccatagttatcttcatttggaaaattcgaatatgatttagaacccgactgcttgtaaatagtgtttntttttcctttgcctgtttttcgaaaacatgggattggtaagcccgcataggtgtgcccttgatgaatgtttttgaaaaactatgaaggtcctttttggttaggctggtgcttggaggaaaataagatctacataagacccacaagtaagtgtgggcagtttgtgatcttcagtactcagcttaatattcagaacactaataaggacgttgttctttctctttttttataaaaaaaagagttacggttcatcatatttatattt

SEQ ID NO: 230593 - DNA, 501 bp, Glycine max
  unsure (1)..(501): unsure at all n locations
gatcttatagtcacctgcggcatgcaagcttgtcacatggaataatgtacatacaattcttatatttgtaaatcacttatatcatcattgtaattaatttcaatatcaattaagctttgataaagcacccaaacacaaaacttactatagtctgagttacaaatttttagggtgttacatacagcctagaaaggtaaacttttgagaaggccaggtaagttgcccttgtcaattttgtggtggtgtatattcccacttacacaatgcaattgatgggtgccacgacaaatttgtgataagtaggatatgttgggcattagtttatttggagtggaaatctagaggggagcctccatctggttaagtgggattctattattcanaagaagaggtctaggggttcgagtagctagacttcataatattgctttggttggaaagcttatttgggatattctccatagccctaacattgcttgtgtttagcttattcataataag

SEQ ID NO: 230594 - DNA, 516 bp, Glycine max
  unsure (1)..(516): unsure at all n locations
tgtttggttgttacatccatatcctagancttgtcacaaacccctgcttttggannattgcgcctatacacaaaatcgatgtttctttgaaatcatatgcccagggataagtgaggtgtgtataagagaaacaaaggaaggggatgtgttaaatatatataccttatttctaggagccaagccagtataatgatccaggaaacgaacaaagcaaccataatccattaagttacatatatagccctgctccatacccgatttatttagctatagaagaaaaacttaacacatgtcactgattagcaagagacaaaaagatcatgagactaatatataaaatgttgggagcggtcatagatgtttgacatcatcacttacatgcacaacggtagtaggatgtatctgattgatatctgcaggatctgctgaacatgttaataagagacttttgcagacaggatcaaatgtctccttaacatctacgtggattaaatgagacattaggtaataactgcg

SEQ ID NO: 230595 - DNA, 480 bp, Glycine max
  unsure (1)..(480): unsure at all n locations
atgctatcttaacanactcagaaatcaagtggtcataatattccgaaatatagggggagttttcgcacattcttatctatatacaattgtttgttgcttgcttgaatcttgatttcaggtattgcattgtcatcatcaaaaagggggagattgtatatgcaattgcctttggtgttttgatgatgatcatgatgatgaaattgatgcagatgggcttttcaagattaaattcaagacaatacttcaagattacaagtcacaacatcaagatggtcactagtaaattaggaagggaattcctaattgaattagcaaaaggtttggccaagtaatttaaattaanaagtgtttttcaaaggttttactctctggntaatcgataccagaggatgtaatcgattaccagtggccaaatatattttataacagctactaanattngaattcgaaatattagactgtgtaatcgattacacaatt

SEQ ID NO: 230596 - DNA, 449 bp, Glycine max
  unsure (1)..(449): unsure at all n locations
gagtagaaacatgggaccactcatttatttanaaaggaagtcttatccagtcaaggtctgagagaccatacaagtttcctaacgatttctaattatgtgggccattaagtctatcatatgctgacaatagccgagaagcccatgaatctcttcgggggtggagtaggcgtctgccatcgccttggccttggctaacaagcggngaagttcttgactcccgttcaaggtaagagcaaaccggtccatccacatggttgcctcttggtgtaaagagtcgatcacccttcctctagcctctttttccgcatatacttgagcatactcatccgcgattctatgctcgtgggccgtggctagacctaactcttctttggtactggcgatgatagctagcatgtnggtctccgtctcacataaacgctgagacaaagcttctttggaccttgaac

SEQ ID NO: 230597 - DNA, 471 bp, Glycine max
  unsure (1)..(471): unsure at all n locations
cacctccacgcatgctagctagtgatactattggatgggactcttccatttataccatcaagaagctgttttntttggattggatgattgctcttatctctcactacattagttgtagtgatattgccatccattggaatgaaagtccaactgattccttcaacccctgtaaatgccttcgccagggcgaccccttgtcccttttcctttttatcctttacctagaaagattgccccatattattcatgattatgttatacaaaaccaatgaaagcctttattatttggtaggtctaatgctcatcaagtctcccatctcttcattagtgacgaccttatcttagtggcaaaagcttatatctaaaaagataatgagataaataagaatatgcagctcttttctcatgtcttaagtcaaactattaatttacaaaaatcctttatctttcttctaaaagaggtaatgatac

SEQ ID NO: 230598 - DNA, 467 bp, Glycine max
  unsure (1)..(467): unsure at all n locations
tagctagtntacccccatgttgaattgcttacaatatgagctgttcatagcaccactaattgttctccttttgaagttgtttatggttttaacccactaactcctcttgatcttttgcctatgcctaatgtttctgtttttaagcataaaaaaggtcaagcaaaagcggactatgtgaagaagcttcatgagagagtcaaagatcaaattgagaggaaaaataaaagctatgctaaacaagccaacaaagagagaaagaaggttgtcttcgaacccggagaatgcgtttgggtgcacatgagaaaagaaaggtttccagaacacaggaaatcaaagcttcaaccaaagggagatggaccatttcaagtgcttgaaagaatcaatgacaatgcttacaaagttgagctgcccggtgagtataatgttagctccaccttcaatgtctctgatttatctctttttgatgc

SEQ ID NO: 230599 - DNA, 430 bp, Glycine max
  unsure (1)..(430): unsure at all n locations
tggcaagccagatgtcatcaatgaattaatttattcattagttattgcttgaaaatgacagctttcaatggtttctgatttgtctatagagtcagaacttaggtatttcatgtgttcacctatgatcaattttgtaattagtatggtagttgtaaagttaaagatctttccaaaacaacagaaacactatatagatcataatatttaaaacatggtaattaagcagggctcatttagataggtgtaataccaattacattagtgattcaatgattacctggggttaatgatagtatataaccattgacctattcgactggttcgttggttgaagctaatattgccctactgttgagaatngaggatcattgtgatgctgagataaatctgggaatggtgagttaactatagcattgattcgatcatcata

SEQ ID NO: 230600 - DNA, 447 bp, Glycine max
  unsure (1)..(447): unsure at all n locations
gcttgtcaagatgtggttaatgttgtgcagcgttatattgacacttcggatttctctgatgagttgaaagatagggaatctcaagctcagattgaccttgataagctatatccatgcagaggaaactatttggaggaaaagggtaagtattaaatggcagcgtcaaggagatcaaaatacaacttattttcacaaattatcacatattaggcatgcagctaagaggatgtcagttcttcaaagtggggatgttatgatggaatcccaagaagctctggatgtgcttggctttntctctaatatttatgggagacaataactgtgtccaattatctgatcagtagaatcattcttgcttcagtctcaagttaagacaactggttccttaccaatattccatctcgtaaagaggtgaagactattgtcttcatcatgaatgaggatgtg

SEQ ID NO: 230601 - DNA, 391 bp, Glycine max
  unsure (1)..(391): unsure at all n locations
tgtgcatccaataccatgatgaggatgtcccatatgttcttaatactggactgatccatttgcttccaaagtttcatggccttgcagatgaagacccgcacaaacatatgaaagaatttcatattgtctgctccaccatgaaacccccagatatccaagaggatcacatatttctgaaggcttttcctcattctttatagggagtggcaaaggactggatgtattaccttgctccaaggtccatcacgagctgggatgaccttaagagagtattcttagaaaaaaatttccctgcttccaggaccacaaccatcangaatgatatctcaggtattagacaactcagtggagagagcctgtatgaatactgtgagagaattaaanactatgt

SEQ ID NO: 230602 - DNA, 449 bp, Glycine max
  unsure (1)..(449): unsure at all n locations
agcttatataattatgtaaacattntataaaacttgttgtttttagcataaaaagagtgattgtttaagaaataacttanacaaacacattctaattcacagtataatatgtctttctccaattnttcagctttcaggagattgtccctttaaatgctggaaatgtgctggtattagaggataatgagcctgctgcaaaatggcttgctttaatcaaccaatcactcaatggttcttcagatttggcttctaaaggactaaaaccgaccgcgtcttttggaggcccattgttctcacaaaagccttctttgaagaagattaagagaactctcaagatactaaatggaaagaggctaagaagttgtaactgtgttcttgaaatggaaaggaaggctggtaaggatttctgttntcgctgccaagaatcaaacttcaattcagatgattct

SEQ ID NO: 230603 - DNA, 411 bp, Glycine max
  unsure (1)..(411): unsure at all n locations
ctaagtacataacaatgcaacatgtaaaagtcatgcatagagcctatctttnttaagatggcggatggattatttcaaaaatttctattactcaattaaatacataatttcaggcttctacattctcaaaagccagaagcctttcaattcaaaacagttcatcttacgaacatatgcaaaattcaaggctctatgatagatgcatcttaaattgatacctgagccaaatagcctcccaaggccgggccaatgattaaacctatgccccatactgcactgacctaaaagcaaatcacactttgaattattatcgtggaaatgtagttctaagaattggtgtaaaaagttggtgatgcttacagtagagagtcctagagctcggtgttcttctcgaaaaagtcagtggcatac

SEQ ID NO: 230604 - DNA, 447 bp, Glycine max
  unsure (1)..(447): unsure at all n locations
agcttataagaactaaatngcctaaatcatttcttaatatgcatgtgaattangaagcatcaacaagaatcaggccaaggctattgtgcaagcaatcaatggggcaaaacacaccaaaagattatgatgatggatgtctaanattctcacaaaggtaaacttatcactttcaaattgagctntcaaaactatcatgacatgtagaggaaaaacaaggatttcaaatcacaaaatgtcaagagacttttattttcaaaacaattacccatttcttgaacatatcctataattcanagaanattatgcaaagttgtacatgcaaacagaattgacctataatattaaactagaaacccaacanaactaacaaatttaacacaaacaaaactagcaaaacctaaaccaaagaacacttcccccccatacttaaacaacacattatcccca

SEQ ID NO: 230605 - DNA, 415 bp, Glycine max
  unsure (1)..(415): unsure at all n locations
tcatgatgaatcaagattgattcanagagtttcgatgataacttatatgatgacaaanagctcaaaagtcaagaacacttcatgttaacaaagatgatgacttcaagaatcaaagaatgaattcaagattgaatcaaaaacacttcaaggatcaaaaggaaatttgatttcaagaatcaagaatcaagtttcaagattcaagttccaagaatcaagatcaagattcaagactcaagattcaagaatcaagagaagattcaatcaagataagtattaaaaagttttttcaaaatctgtgtagcacattaatttttctcataaaccttttaccanagaagttttactctctggtaatcgattaccagattgttgtaatcgattaccagtagcgaaatggttttcanaaagctttcaa

SEQ ID NO: 230606 - DNA, 373 bp, Glycine max
agcttgtagggttaaagtctcatgattgtcacgtgctcgtgcaacaattgttagccgtgactatacgagacatcttgccaaacaaagtcaggttagccataactcgcttgtgctttttcttccttgctatatgtagcaaagtcattaatccagtcaagtttgatgagttggaaaatgaggccgcaattatactgtgccagttggagatgtattttccccctactttctttgacatcatgattcacttgattgtgtatctggtcagagaaatcaaatgttgtggtcctgtttatctaccgtggatgtacctggttgagtgatacatgaagatcttaaaggtatacaaagaatctatattgtccaaaagcatata

SEQ ID NO: 230607 - DNA, 435 bp, Glycine max
tatcgattgcaagtctttagagaagagtgtggaatctggattcttctggattgctcctttgtaactcactctatgaatctttcactcatcccattaatatcaaagatttcttctagataaacttatctagagcaatgtgtgtcacatgcaatttaagttcataaatggtgcagatcatttctatgttgctagtgtaggaaaaaaggtgttcataaacacacatggcgaaataaaaggatatattatgtatttaaattatattataatcaaatgacatattaaaaggtgtacctattgatgagttcttgaagcataaaaattcttcaatagtgtaaagactctacgtgtatccacatcgatactgacctctattcgtcaacaactctgacaagtaaaaaaataagaatagagaagtgattttgggatccattcaac

SEQ ID NO: 230608 - DNA, 431 bp, Glycine max
  unsure (1)..(431): unsure at all n locations
agcttgtcagcaatggattcacgtccttgggtcttacacagtagatgcagataatgattaaactcaacttattttggatgttggatattctaagtaaataatgaaccttagttgtgacaatttttctatagcactatacagataatgctaggtaacatacttagagctaacaatattataaattcagccattgcatttttgcagagacaaatataatgaggtggttctagtgacttatataacatcattacaaccaagcagcgatgcacaaatacaccaaaatgactagtatattcatattataagcgcctatgatacagatactcattgctgagatggctctcaatgtataatagcaatgttttcattctcttcttgaaggcacaatagcncaatgtatgttntgcatatcttctcatcaactctcaaag

SEQ ID NO: 230609 - DNA, 433 bp, Glycine max
  unsure (1)..(433): unsure at all n locations
tggagacctcgtanagaggacttgtcaagtctctgtgtatattgatggatgaaggagatgaggccatatatgtatctgttataaagaaactagtcattcatgccagcttagacaaaaaaaattaaatacttttcctgttcaaagcatcaatccgtattatgaatgttcttatcacatactgaattcctaaattatgcttatatgtaaggccctgatagaagtactttctcagaattcttccaaggagtgtgacccggactgtgctaatacacgtgaatctgatgtcaggtgatagtgtcatgtacttaaaacaaccatgtgatcctttcaatattcacgaacgcccaaattatgtatgcatcaaaatgatctatacatgcaacttgtatagtggttacctgctgataaattatcgcacataatctttcatcct

SEQ ID NO: 230610 - DNA, 412 bp, Glycine max
  unsure (1)..(412): unsure at all n locations
agctttacactacaatgttagagcatgatgagtcttttgcataaatgaaaatagaagatattgttaagtctgctgctgcaactactcaagatgagtttgtgttcaactgtcataccctaatttcgtccggggacctttgcttgatgacatgcgaccattctttggtcctcgtgaggtgcttggcacccatcattaagcgatttgtgaaattccaggacatgccgaanaaccaaaaaaatattgatgcagaatccgtaagtttccgtgacacaccggagatcaaatggaagcatcgttgcataattaagtgaggttccgtaacattccgtaagttaaaaaggggatgattatgtaatccgcaaggttccgtaacattacggaaagaaaacaagtatcgttacgaaattcgtag

SEQ ID NO: 230611 - DNA, 409 bp, Glycine max
  unsure (1)..(409): unsure at all n locations
tgtctcactccagtctccaatctncaacattaaataatttctatcttacaatcaactccttaaatatgcaaatcagcacaacagattcataatgtcattcttcagcaaaataaatctattcatgaactatattgattcacactcaccactcaaatatcatgtaatctatgatatagagtttggttctactgtaatgaatcttctctaacagctggaggcatcaatttaacagattcccatgtatcttccgcatcaacaacttagaactaacagcaatgtgtttgcttttataaacaatatctctacataattcatgtctaggagcacgcctcattgatcttaattgaaataagggatgtggtataacattactactatacaactctctcgctggatagacatgcttcca

SEQ ID NO: 230612 - DNA, 404 bp, Glycine max
  unsure (1)..(404): unsure at all n locations
agcttgagatgaggaagtgtagaatggtgaacttcctgcttntattcgctgaccacagagtggtacctggagatatgtcgcgggggtcaggagaccttgtggacgttaggtggggtgccattgccaaaaaccaagcttgaccaatcccgacccaacctgggcatagtcggtcagtgagaacctgtgatgtacctaaacaggcgagctcctggcagtcaacagattaaaggaacaaagaccacatagcaaggaggcttgtggtggctggccagctatgaacttgattgatatgtgggatatggcctcttgtaatcgattaccaagggttggtaatcgattacaaggcttaaaaatgaagacaggaggctaagatggtctctggtaatcgataccacggggtgaat

SEQ ID NO: 230613 - DNA, 394 bp, Glycine max
  unsure (1)..(394): unsure at all n locations
ctgagctcactggtgctgccccacaacgcttcacggaattngtcacggtcatgctctttcttgcgagccctcacggtttcttgttcaagggcatttgcagtaactgcattttcttctcgtaacccgacacactctttccaaacatctgtagcgaccaatttgaatttttctttggcaagtctcgcttttcctagttcggttttcagagctcggacttcttcatcctcctctggagcttcgaagttctcttcgttgataatctttaacttggcgagcaaatctaaacctcgtgtacgaactttcagccattcatgataaccaccaatgatgccattacgaatgcccctaagttctttatctttccttaacgggctnctccacgcctaatggactc

SEQ ID NO: 230614 - DNA, 311 bp, Glycine max
  unsure (1)..(311): unsure at all n locations
gcttatgctgcaaacatctacaatagacccnctcaacctcagcagcanaatctttcacataagaacaactatgacctctctagaaataggtacaatcccgggtggaggactcatcccaaccttagatggtctaatcattcacaacagcaaccgctgttacaacattctgctcacccccagactcatcatatagttgaggattgtccgcattctccctcgaacatctcgtgaggctaaagactatgcttgacttcccatgtgtatttacaccatagcctcattccttccttgcctaacattcatacatcgtc

SEQ ID NO: 230615 - DNA, 170 bp, Glycine max
caacaactcatgcattttgatgacagaaaataatatttgtgaattgaagtaaaagtatgatatatcctaattgaaaagcagtaaacgtgagcaaataagtgtgaaaacagtgatctaaaggcattgggtcgttctattgaacaagttgatgcgattaaagatgtttctct

SEQ ID NO: 230616 - DNA, 449 bp, Glycine max
  unsure (1)..(449): unsure at all n locations
agctntgtgaagacatcgtgtgtaaaggagcggttcaagttaatgcatactgcatttttttaaatattgtgaaagtttctatttacgcagccaagcttacactgttatacctattttcacaactgcataattaaatttagtcaaatttactttataattttgcataaagtactccagttttgtttagagtttaaattgctcacataaacttcattttttatattttcaaaatttactttaaatgttttaataaattgtgaaaaacttaaatagttcttaaaatgtgggtttgagcctcttaacctcaaaagttaacttatagggtgaggcttgtccttcacttatatactcattctatcttggccttatctctagccgatatgagacttatgttgtcttccaatagttctataatgaacaataattgtaaaaatagaaattataactaa

SEQ ID NO: 230617 - DNA, 411 bp, Glycine max
  unsure (1)..(411): unsure at all n locations
ngataagcgcgggtctgggagacgaaggtcaagtggtcgcgatatacgaatatgatgttccgagtacattggagttggtacgaccatgccctcctgatttccagctgggaaattggcgagtggaggaacgccccggcatttacgcaacgagcataatgtaaacctttacggttttaaaagctctatagttgggcctaggctttagagttttttccttttgttaaggctctgtgtcttttgtttttgaatatataatacaaggatctttcttcatctgttcctacatctctacccattctcattcatttgcatgtttacttctttatttctgaaacggcagatccgatgacgagtcccccgaaggtactaatacctgggacccgcttatcaacttcgagcaagaaacgaatc

SEQ ID NO: 230618 - DNA, 489 bp, Glycine max
  unsure (1)..(489): unsure at all n locations
cacctgcggcatgcaagcttctcatttgatccagcagaggaggaacattcttcctatttcactcaagttatacccacggaactctggcaccagagacttgatcattgccatcttgaaagaatgctaaacatgaaaaaaaggaaatatgcaaaagtaaattcgaagaagtttcaaatggaggaatgcaaatctgttagcactccaatgaatcaaaaggagaagtttagcaagaaagaaggtgttgataacattgatgaaggatattatgggagcttgattggatatctaatgtatctcacttcaacaaggtcaaacattctatttgctcaaaagaacaaaactgaaatttttgttgacaatcaagtagtcattgttattgcaaacaatcccgtgtgtcatgggaagactaaacatttcaacatcaagttctattatttgataaagatgcaacanaggggtgaagtgaacttaatttattgtaagtctaaa

SEQ ID NO: 230619 - DNA, 522 bp, Glycine max
ggctgattcatgtactgtactgaactataaaactaagcttgtcaagccccgagcctatacatgtggtgctcgggcttctttctgtaatgttgtccatggcggacatgccttcaattctgcacgcgatgtctaacatgggcacgtgaacgaagctctatgtaatttgacaacatcttcccttttcttaactcattggaacattgcattgaacgactaacgctacattttggctattgtagcaagcacatgcaccgcaagtgatgcactcattcatacatcgtacttgtggtgtgcgcaggtactggagacgtggtgtatgggcgagcggagcagatccaaaccacctgttacaaccttcatccattcatgaattccgcctatggcgccattaccaatgcacctaacctcttttcgtaacttatcggcttctccaccctaaagaaccttgtatattctcgaatctcgccgccaaatcctaacacgaaagagacagctttttcatccggcccctatgggaccccg

SEQ ID NO: 230620 - DNA, 467 bp, Glycine max
tagcttcatacggtggttacgttctgatactggcatcgctgcatttcctgtcaatggagaaggcggtgtttgtggaggttggtggctgatttcgagctgcgacatgcgatgaaggaggtcgtcgatcttggacgacatggagagttgggaggctgcgagcttggaaatgacgtcttctaagtggttagaggaagctttggattgagttgcgtccgccattgtagtgcaatgaaagaaccaatgttacacttggattttgaggaccaagcgcctccagaagtgcagagaagaagaagatggaagtagcgtatattctcattcctttgaacaccttattacaagctatttatacgacaaggttcttaacgaaatctagaaccttctaagaaaaacttctaacagaatcctaacaacattggtgtgacaccctctacccctcacatatatattaataaaggaataaaaat

SEQ ID NO: 230621 - DNA, 407 bp, Glycine max
  unsure (1)..(407): unsure at all n locations
ggtacgctaagcctcgcatctcaggctaagtgcatattctagaaaatttggtgttgcagaaagcgctaagcgtagcctgccgcactaagcctcggatgcttacgggattttacaacttcaagttgggcttatcgcgaggctaggctaaacgcttgggttntaaactcaaacatcatgttggcacgctaagcgcagctatgcgctaagcacatcatacgaatttcagtttttaaaaatctaaggcagaggccatttgggtgttacctttgaacccaaacctctgcaccttcttaccttgagcacttgtgtatattctgcttcttgtgtactgtttctctgcatctgcattgcttcatttcagaaataatccaagtaagttagcacatttctattttcaattttcattc

SEQ ID NO: 230622 - DNA, 407 bp, Glycine max
agcttttaaagaaaggcggagatggttatggatgacgagaaacgtctaacattaatcaaaacaatgaatgtggtgaattcttaaattctcatgcaatggtgaaagtaacagattttgaaaaagataataataaatgagcgagttcgatatggaactcttgaaagggataacaagtttcatgtagcatgggccaggctctgaagctagcaatgttgtttttgagtacaaatggcagcctagtggaagactagtcgatcttcatgaagcagagtttgatccttcagatgagttgctgttaaagatccatctgctccccatggagttcgacttttgatcgacgactatccttatgcttctgatgggctagagatatgggatgctatcaagtctaaaggatattgaaccta

SEQ ID NO: 230623 - DNA, 272 bp, Glycine max
  unsure (1)..(272): unsure at all n locations
ngtagggttaaagtctcacgatcgtcacgtgcttgtgcatcatttgtgagccatggctatacgacacatatagccctctaagtcctgttagcgacttctcggctgtgcgttggcttgcatgctccttgtatcgaagtctttgagcccaacctgtgtcatgaggaggaaaatgacgccgtaataatactgcgccatggggagatgaactttgtctctgcctactttgacagacatgattaactcgagtgagcatgtggtcggagaaatcaaat

SEQ ID NO: 230624 - DNA, 458 bp, Glycine max
  unsure (1)..(458): unsure at all n locations
agcttcctcggtgccatttcctgcgaaggcaaacattnggaaagttagttntaccaagaaatgctactcttaaaacaaaaatggcatacaacatacaaacatcaacgtaagtttagagtaaacttatgcacatacttctttacgaatgttcacttgcacaagacattcttataactaagaaaaatgcacccatgtacaatccaggcacttccgttacctagatcatttatatgtacttccaaggtgtatttgctacctacatcacatgcacttccttggctaaatttacatacatgcatactcaaagcatttggggtaccaagaattgcacatgtgcacattccggtatttctaatatttatgcatacacaaactntgtgatgaatcttggctatctacacaataaggtgatacatttcatgctttattcaagtggttttgctacctaaagccgcatg

SEQ ID NO: 230625 - DNA, 428 bp, Glycine max
ggcctcacagaggtccaggaaggacaaggcagccgatggaactatttccgctccggagtatgacagtcaccgctttatgagcgttgtacaccagcagcgcttcgaggccatcaagggatggtcgtttctccgggagcgacgcgtccagctcagggacgacgagtatactgatttccaggaggaaatagggcgccgacggtgggcatcactggttactcccatggccaagtttgatccagaaatagtccttgagttttatgccaatgcttggccaacagaggagggcgtgcgtgacatgagatcctatgtaaggggtcagtggatcccgtttgatgccgacgctatcggccaactcctatgatatccgttggtgttggaagagggccaggaatgtgagtatgggcagaggaggaaccggtctgatgggt

SEQ ID NO: 230626 - DNA, 412 bp, Glycine max
  unsure (1)..(412): unsure at all n locations
agcttgtttctctgtacacctacgntcctatacatctaaaactgtatctctatatacacacgcattgaaaaactctttctctctatatcgacatggtctatataaagcctctattccttttcaaagatttctttttcctttttcaatatacactcgtcgtttatacaaaaaatgtatttatatacactcattgctcacacacaagaatattttttcacacattgttgatatacaacatatcttatcacacatttattatatacaaaaactctnttcatgcattgtctatatacaaaaaataattcttcacgcattgtttatatacaaaaaacttcttctcttttgtttatatacagagatgacattatgctcacaacgcctctttctctttctatactcggtgtatcacaat

SEQ ID NO: 230627 - DNA, 555 bp, Glycine max
  unsure (1)..(555): unsure at all n locations
aatgatacggcgggtttatataattaatttgatttattaantnnnnnagncccggtgattgatcactcgagacgcccaatgatacaacgcgctgcaggatactgagagagaagtctaactttgagtccaattcgcgggtgagaccacagagaaccagcttgcagatgaagaagactgaaagcgtgagatggacctgtgagtgaacgggaggctttatagggaaaggagacattctcaccgcgtgtatgtcctcactacgtcattgtgtctggttcttgttgtaaaggaagccttccatctttggaaagcgtaatactccgcggagccttcctcgtaagtgctacatgccaatcccttttatctatgtgaagaggttctgtgtgttcactaggggcgcagcctacctgacgaggggatggcaacgcctgactcccgggtgcgtcttctcagatagggacacggcgcacgaccgtcacccaacactaaggtgaggaaaacgcgtactaacactccaagtcatgtacaagcgcgccccagtggagcggcggtggagcc

SEQ ID NO: 230628 - DNA, 456 bp, Glycine max
  unsure (1)..(456): unsure at all n locations
caagctttatttattatcaccatggacagaccataatatgcttggtagcagacatggcaatggatggcagatgatatcacattcaatcatagaaaacaaggtaatcttatatattctcaataattattgtttactcataatcattgtgtttcttattttactaatcacaggtatccaccttactgaaaaggaaacaattcatttatgcttgactgagattgagaatatgctacaagccaatagaaggagcttgcgagatnttccatccatgccatacccaataggatatgcacccaaccaacatcataataaactgatccataatgaaatggcatatgacaaagaaatgctagcagcagaattcaacacagcatactcattgctcacaggtattcacaaattataacatattttaatcagcaagtccttaatcatagtagcatatattactatttc

SEQ ID NO: 230629 - DNA, 414 bp, Glycine max
  unsure (1)..(414): unsure at all n locations
tgngcttaacgtagaatttccaattatattntataaaaataattgcaactccaataaaacaaatntaattatatattattattaacgtaatttctatttctactactcttaaaaacaatntaactatatattgttataaatcatgtggatacattntgtcacaatctaaacacgtcagtggcatcaatttttccttttcccatataatcccagaatttcaacaattagtcaacttgaatctcctattatagaggcattttcattcacacaccccagattgttggaaaaataaaataaacaataagcaagaaaaacacacacgtgcttttctcctaataatcacctcaagcgcaaccagggaggggatatccncaaaatgctccacaattaagagaacatgtgacattttcatga

SEQ ID NO: 230630 - DNA, 380 bp, Glycine max
ctgcaacttgagcatattaaacgacaataacgttttataagtatgttcgattgagtcccgtaatgtatcgaaacgttcaaaattgaatgctgatgctctcagcaaatttaaaagacaataacttttatctcgggtgtgtgattgactcccgtgatatattgacatgctcgaaaatgaatgttgatgctctgaacaaattcaaactacataactttttactccgatgtctgattgattcccgtaatatatcgaaacgctcgaaattgaataccgaaactctaagaaaatcaaacgacaataactctttactccgatggttgatgagtcccgtaatatatcgagatgcctcaaatcgaatgctgaagctctagctaattcaa

SEQ ID NO: 230631 - DNA, 284 bp, Glycine max
gacactctgagtaaaaaagttattatcgtttgaatttgctgagagcttcaacattcaatctcgagcgtctcgatgtattacgggacttaatcatacattcgaataaaaagttatcgtcgcttgaatttggtcagagcttccacattcagtttatagcgtctcgatatattacgggactcaatcagacatccgagtaataagttattgtcgttcgaaaattcttagagcttcggtattctatttctgagcgtctttgattattacgggacttatcagacatccga

SEQ ID NO: 230632 - DNA, 417 bp, Glycine max
agcttttcacccagctcacccaagcgagcaaggttgcttcctccagaagcaacaaccttctggaggaatcttctggagggcccaagtgggcctggttgctatttgcacccccatttttactaaatacaccccctgccctttcttggtgattcttttttcgtaaagttacggaaacttacgaatttcgtaacgatacttgttttctttctgtaatgttatggaaccttgcggattacataatcatcccctttttgacttacggaatgttacggaacttcactaattgtgcaacgatgcttccttttgatttccggtgtgtcacggaaccttacggattgagcatcaatatcttcttttgatttttggcacgctacggaaattcacaaattgcctaatgatgggtgccagcacctcaaa

SEQ ID NO: 230633 - DNA, 391 bp, Glycine max
ctgagccaaaatcatgactcaccataaaccttgtcccatggtgataatgccaatccttaccctcggaagcaaaaaacgaagagaaggaaaatttccaatcaaaggaaaaaggagaagggaaatttccaatcaaagaggaagcaaaaaaagggagagaaggaaaatttccaatcaaaggaaaaaagagaggaaaggaaattcccaatcaaagagtgggagaaagtaaaaaaggaagagagataaggaaagaaagctcctgatcaatgatcgaaagacaacagaagaaatatgcagaaaggtctttggaccagacaatatctgaacatatacagaattgtcaccaaatgaacaaaataagaaggaaaggaaaccatgacctaaagtagtcttc

SEQ ID NO: 230634 - DNA, 261 bp, Glycine max
gatccttaagtcacctgcggcatgcaagcttttattgtgaggattgaaaacatccctctatgattagaggatgaaccatctaattcttctcatcgagaagatgatgcctatgaagacgatgtgggaggaaggacgcctgacacgcttatggatatcacacatcataggcgatattacggtaagacacgagaggaatggtccgaccgagtgtccgtgaagatgcctacttttacagggacttgagatcccaacctgtatctt

SEQ ID NO: 230635 - DNA, 323 bp, Glycine max
tcttgcgtagccgctcttggtgctcagaacatcccaataacaaatgcctcttattactagctattctgaattctttagttcctaaatgtacaaccttcaaattgttgctcgttccactctttgttgtctgccaaagataaaaaaaaaaaaaagtaccttaggtacttcatcactatgtacgtaatgaaatatttatatattgttgccgatgaaaaaaaaaaccatgcagatcatagcaacacactaacaacagtaccagatatctcacatataacaacatcatacagtggtttcaacccagaggaaatcatgactacgaatag

SEQ ID NO: 230636 - DNA, 165 bp, Glycine max
ctgcacgcatgcaagcttgaatgcgtttagaccgacgtgacttatattcttatggtggtagctgtgatggtttcacattgtgggcccaagtgatggctagaaccactgtgttgctggcggaatactatgtcagcactggcagttccattattgtcacccaacgca

SEQ ID NO: 230637 - DNA, 336 bp, Glycine max
  unsure (1)..(336): unsure at all n locations
agcttgccttgccccttgatatattagagggactcatggtcactatgaatgacaaattccttgggataaaggtagtgttgccatgttttcaaagcccgtactaaggcatacaactccttatcataagttgaatagttaagggtaggaccacttaacttttcactaaaataagcaattggatggccttcttgcatcaacacagccccaatcccaacatttgaagcatcacactcaatttcaaaagatttttgaaagtgtggcaacgcaagtatggnggcattagttagctnttgcttaagaacattgaaagcttcttcttgtttctctccccatttg

SEQ ID NO: 230638 - DNA, 450 bp, Glycine max
  unsure (1)..(450): unsure at all n locations
agcttaccttgctcggcgggctcttgattacttgattgggtttaacatttcaccattactatggaggaagttaccaggttgccaatcagctggaagagttcaatctgctgcactttctcttatatgtgatagagaaatggaaattgatgaatttaaaccgaaggagtattggactgtggaggttcaaatgaaaaagaaagagctgagatcaaacaagaaccttacttttcctgctcacttgacccattttgattcaaaaaagttgaataagttttcaattacttctgataccgaggcaagagatattcgaagcaatataaactcagctgattttcatgttgttagcttgaaaaanaacaaaagtcgaagaaatcctccaacaccttatataacatcgacacttcagcaagatgctgcaaacaagttgcatttcactgcaagtcacacaat

SEQ ID NO: 230639 - DNA, 493 bp, Glycine max
  unsure (1)..(493): unsure at all n locations
gccatgattgaatcatctgacncggatcttgaagtcgttctgcagctgcgacttaactgccgaggttcaaccggttattgagctgcccggggtgttaaatgagatatggctacgtggagtacatgagctcacttggagtggctacatgggatggcgggtttatgcacaccttgtggatgtggaaaacttgttgtggaccattctccgaccgtcatctatttccacatgttatgggttccccatcatcctgcaagcttgatatgaagaagtgtataacggtgaaactttctgcttttatgtcgtgaccacacagagtgacctgcagatatccaacatggcgttatgagatcttggtgacacaatgtgcgtgctattggccataaccaatcttggacaatcgccactcacgccggccttaacagtaattggaacctgtgatttacctaaaagccaactcctggattctcctattataggacaccacacccccccg

SEQ ID NO: 230640 - DNA, 470 bp, Glycine max
  unsure (1)..(470): unsure at all n locations
agcttataaggtttgggaaatcctcacctcatgagctagcttttaggattgagttatgtttaatctaacttcaagatggaatcggagcttaccatggatatgatagtgagccatcttcaactgtccaaagatctacctggcctcacagctttcccaatgcaatatattaaaaaagttctacaagctccatgccctagatgtccaatcctatgcgtaaggggagtgttaagatcccacatcgactataaatatggccaaagtagaacaataatttttacctcatgagctagtttttgtgattgagttaggcccaacccaaattcaagatgaaataatatgctntactgaagtgttacctataccatgatcctctttgggtcttcttgaattgataaggaacatgaatccctcattgtctagggaaaaagaggggattctgatccacatatntgacgttcattgtcctcatg

SEQ ID NO: 230641 - DNA, 534 bp, Glycine max
  unsure (1)..(534): unsure at all n locations
tggaacattattgaaatcgatctcgtaccccgngatcctgtanaccatacttgancgcgtgcaagcttgaattgactgtggctgcagctgtaaactgcttactacttattgcaaagtactagggattttcgtaccgttggacctgtatcatacttgctgctattgcattacctcatatgtcaaggatgtgcacatttcttgatttgaacacatcatctataacatttggtataatatgaaccaggcttcgtgtgaaagcggcccttttcagtatgagcacaattgccataaagttatgtctactgacttaatctcaggcgactactcaaatgggatggattaagtgcaacattgatggtgcaacaaataagtgtctggggccttcagctagcgggggaatttttcgtaattctaggggtgctcttttggggtggttctaaaactgctagatacttcacatagcgtctatgcagagtngcaggnngatatttactattgaaaaacacaacgcagaggtccgattaattattgttn

SEQ ID NO: 230642 - DNA, 217 bp, Glycine max
agcttatcttatggatgcttgcgatatggctacttattataattccaagcaacttctgggcagtggaagtaaccgtgtttgtcaagcaaggcacaacaatggaaaggaacctgggccagaacttgcatataccaacagccctcctatggaactttgtggaggacaccattctcatttgtctccccatttacgaacgttactatgcaccattcatgcg

SEQ ID NO: 230643 - DNA, 284 bp, Glycine max
  unsure (1)..(284): unsure at all n locations
agctngtgaagattgatggggacccggtgttgatataaatgaggatatgggctacgtgggagtacgtgagctcagttggaggtgggcaacacgggatggtgggtttatgcgcgcattgtggatgtggaaaacttgttgtgcaccatcgcccgaccgccacctagtaccacatgtgatgggtaccccataatcctacaagcttgagatgaggaagtgtagaagggtgaaacttcctgcttttattcgttgaccacagagtggtacctggagatatgtcacagggg

SEQ ID NO: 230644 - DNA, 315 bp, Glycine max
  unsure (1)..(315): unsure at all n locations
agcttgtaatctattacacacatactgtaatcgattaccataggagttnttcacaaaacattctcaacagtcacatctttatatctgattcttaagtggccatcaaaggcttatatatatgtgactagagacactaattttatcataagttttcagatcaaaaaggtctaatcctcttaaaaagaaaaatccttttatcctcataccaattccttggccagaacactggtgactcaataaagaattatttgagtgctcaaattgttcaatctatctcttttaacagagatttcttcttttcttcctctcattctg

SEQ ID NO: 230645 - DNA, 387 bp, Glycine max
agcttcgtttaatccgcagacgaaattccgttcgcccaaccgattcctaactttccggttgttcaggaacgacgtcgcatcatcccgagttttgatcagatgggtgaggctccaccggcgaagcatatacccgcgtggctaccggctttgcccgatcctcacacgtatattcacacacccgtgtgggatgaaagaatctctgatcctcgcgaggataagattgaacaagcgaggcagcgtaggaaagctgagaggtcgttgttgagtttgcagaaacggttgttgctgcgtaatgggtcggtggaagcaagtgcaataacatcatcttcaccgaatagtgctgctttggatcctcaagtggttggtgaggatgataagggtgttgat

SEQ ID NO: 230646 - DNA, 302 bp, Glycine max
  unsure (1)..(302): unsure at all n locations
agcttcctcggggccatttcctgtgaatgcaaacatttggaaaggtagttttaccaagaaatgctactcttaaaacacaaatggcatacaacctcctttaataaacacaaacatcaatgtaaatttagaataaactcatgcacatactcccttacgaacgttcacttgcacaagatattctctaactaaaaaaaatgcacccacgcacaatcaaggcaccttcgtcacctagaatatttatatgtacttccgacgtgtatntagtacctacatcacatgtactttcttggctaaattacaca

SEQ ID NO: 230647 - DNA, 384 bp, Glycine max
  unsure (1)..(384): unsure at all n locations
agcnttgggttgcanttgggcgcctatntgaattccctacgctgtccctatatatatataaaccagccccacaatccttaatttacaaaatcacattcatacgtcattggggcatttcaccgagcacttggtgggcgcatgtttagacataaattgcaagagaatgggggcaatgtggcatgccccattgcttcagaatacaccataggcctaaggccttctcacacaaatccttaactcaacaaatcaagcataaaaagcaacccaaaactgccccacaagcatgagcatgttctcacaatttagagcaccaaaatgaacaaaatgcaccaacgaaaagcaaaaaactcaaggatngaatacttacttgttggagtgagtaga

SEQ ID NO: 230648 - DNA, 286 bp, Glycine max
agcttctttcacatgataataataccattccagagtttctatgtgcccactaatttaattacattgaattagagcttgaattacacaaaaatattacttcaatcagtacaacatccattaaccaaggcccgattttgtaggtgtataacaatgtcaattatgtacaaaagtcaagtaattaaattccctgtacgtaagggcattcatgagtgacatgaggctcatttgtgttgttattgtctttgaaaattattatatcttttgttcatttgttttcattatttat

SEQ ID NO: 230649 - DNA, 411 bp, Glycine max
tgcacgcatgcaagcttatatcaatttccttgctttcttttcttctcctacaagtgtttatggaaaagcttatcctaacagggtcagaagcataaacaacaaccttgaaacaatagtgataatcaaatgagagatgatacatagcagacaactcaaaaatagtgagtgactgagatatcatgttggttgagagcaactttaattcccttaaaataatttttcagaaaaaagcaacagttgcatcacaaattgtgaagttgaaggagctgatgtggcaaccaattatatgcaaactgttccttttataagattcaggtgcttatcaatgaaaaaggtaataagataaaacaacagcgtggaagagtgaatatggtgaaaacacaaaaatagtgtgctagatgtgggataact

SEQ ID NO: 230650 - DNA, 385 bp, Glycine max
agctgtgaaagatcatgctcatgttgaacaagagactagagagtgggttctcatcgatggactatttttatcagaacatcactatatggaaactcgctacacctctaatgccttcagacactcctgccttttctattgatctctcatcagaccttgattatcccggtgataactatttaatgaagctagatgaagatattgccgaactccatggggagaaaaagtaaaatctagagctagcgacatcatttgaggggaatccataaagcctaaagaaagcatcgattcatagggagttttatatttaaagttttaattctttctttccctgaagcttcttattttgtaatctaacacataatcgatgtgacaactcttatatgaa

SEQ ID NO: 230651 - DNA, 399 bp, Glycine max
gcttgtgtgatagaacaaggagcgcaatgaggtctttgttgcaagagcaccgaactgtttcaactgcctttggggtgataaagatacgtaatgcttctggtatgttgcgaacatacactatatttgcctgtaaagcataggaattgtctcatattttacaagataatgaatctatacgagttaatgagagagagcaactagaaccacgggaatgaaaaaataaaaaatataaaaagccacacaacacaagaataaattctccccttcgcaggtaaatatataaattatatatagagagagagaattattggacatgacagaaaatataactcaggtaaggatgattatatttcctccttgaacacacaatattgctattgaacaataactatataactg

SEQ ID NO: 230652 - DNA, 441 bp, Glycine max
  unsure (1)..(441): unsure at all n locations
agcttccttatgaagatntcctaaaaagctagagcttagttacacatacctctctaatggctaagctcaccttcttgagatgagaagctagagcttagctacacacctcctataatagctaagctgaccccatgaaaatacaaaaaaaaatccctactacaaagactacttaaaatgcctcgaaatacaaggctaaaaccctatactactagaatggccaaaatacaaggcccaaacgaaggaaaaacctattctaatatttacaaagataagctggctcatacttagcccatggactcgaaatctaccctaaggctcatgagaaccctagggcattcccttgaatctctggcccaatttacttggagtcttctatccaatgcccttgcggggtaggatggcatcacaagtaccctccacttgaactgatccacaagagat

SEQ ID NO: 230653 - DNA, 239 bp, Glycine max
agcttcaacatcagaccacttccagggtgctggatctacttcacatggatttgatggggcctatgcaagttgaaagccttggaggaaagaggtatgcctatgttggtgtggatgatttctccagatttacctgggtaaactgtatcagagagaaatcagaaacctttgaagtattcaaagagttgagtcttagacttcaaagagagaaagactgtgtcatcaagagaatcaggagtgac

SEQ ID NO: 230654 - DNA, 327 bp, Glycine max
  unsure (1)..(327): unsure at all n locations
agcttgccacccagctcgcccaggcaagctctgctcgcctatgcgagcaaggtggcttcctccagaagcaaccgtcttctggagggcccaagtgggcctggttgctatttgcatccccatttttactaaatacacccccaacttttttttgtgcttcttttttcgtaaagttacggaaacttatgaatttcgtaacgatacttgttttctttccgtaatgttacaaaaccttgcggatttcataatcatccattttntgacttacggaacattatggaatctcacgaattgtgcaacgatgcttcctttttgatttctggtatgtca

SEQ ID NO: 230655 - DNA, 331 bp, Glycine max
  unsure (1)..(331): unsure at all n locations
agcttaacatgtaaattaatcaatcacaccaatctatacaaacaagcattatcatggttgaaattcccaaacacaaccaatttgagttcacaagaaaaaccctcgttacctaagcttttaagagatccacacccaanaaggaaaagatgaagccttagagggagaatgaagttcacaagctcacaatgtcggcacnaataatttggtctccttcctctcttgtctntgccanaaaaaacaaatggagaagggttgaagcattttctcttttttcggataaggttgggaggttagagtgagtgaggaacaaattgagagaatcgatcgtggg

SEQ ID NO: 230656 - DNA, 357 bp, Glycine max
  unsure (1)..(357): unsure at all n locations
agctttgagcaaattcaaacgacaataactntattatcggatgtccaattgagtcccctaatatatcaaactgctccaaattgaaaatggaagctcgtagcaaatttaaacgagaataactttttactcaaatgtgcgattgagtcacgtaatatatcgagacgctctaaattgaaaacggaagctcatagcaaatgtaaaccgtaataacttttaactcggatgtccgattgagtcctgtgatatattgagacgctcaaaattgaaaacagaagctctgcgcaaattctaacaacaataactttttactcggttgtccgattgagtactggtatatgttgagacgctcgaaattga

SEQ ID NO: 230657 - DNA, 402 bp, Glycine max
agcttcatgatcctcagttatggctgtaaggaatttatcttggcaacaatagatcgtgcttagccaaggataagttgtcgcttactgatcaggctaaagcttagccgaattcatatcgaattgaagttagcttagcttatccttggccagcttagtggaccaaatcagcctcaaatgcaagggttgggggctaagcgcttgagactctacgcttagcgcatgaccaaagatgcgcttagcacgaagttggcgcttcgcaaaaggactgtttttcaataaatgttatataagttatttttcagtcccttcctcaacaaattgaaacccatatatctaacattcaaagataggttgatatactcctatgtatagattatgtagcaagttcccaatgatctaatg

SEQ ID NO: 230658 - DNA, 407 bp, Glycine max
  unsure (1)..(407): unsure at all n locations
agctataaacattaaaaagaggtttacataaattcacagatattcaaatatgggaataatacaggcacaataaccttttaattttataccaaaaggattacccacccgcataagctgttgaacaaaaagagtaatatcctttccaacaatatgaatcgatttgatgctactcccaataacatagccatctgtaacaggtacaacaggaatcgatttccaatgtcttcatttaccggctcagcctgtgagactgttgccatgttcgacgattccccatgtcatatccattntatgtaagtcggaactatcccatcacagataagatgagaatctatgtnctttacttgttgtcgtctcccatttgatagctgacacatagacaaaatatttccccacagagatagaca

SEQ ID NO: 230659 - DNA, 381 bp, Glycine max
  unsure (1)..(381): unsure at all n locations
agcttataggatggctgaagatcaacctcgcagagtcactcttgaggactactcaagctttactgtgccgcaattctttacaggtattgtgcagccagaggtgtaggcacacaacatcacatacccacattctttaattcagttgatacaatggaatttatttcatggtctacccaacgaggacccatatgcatatttgacaacatatattgagatatacaatactgtcaaaattgtcggtgtgccagaagacgcgctaagcttgttttcattttcactatccagtgaagccaagaaatggctacactcattcaagggcaacagtttgaagacttgngatgaggttgttgaaaaatttctgaaaaagtattttcctgagtc

SEQ ID NO: 230660 - DNA, 331 bp, Glycine max
agcttgcttggtagatagtcaaggcttggacacctactgtgggttggggcctggtatgctccctaatggggggatacggtgtcgtcacacaaatctacatcaaatatgttgtcgccttcaagctttcagcatagcattgttgttcctacttttaatcttccttgacaaccatgatatctcccatcaaggtggggactttcatcttgagatgtatggagatgatgactcctagctcgtttggtgttttcctgccaatcaaagcaaagtaggaggtatttgcaccaacaattaaatacctaattgtgaagctccttgagagatggccttgatc

SEQ ID NO: 230661 - DNA, 524 bp, Glycine max
  unsure (1)..(524): unsure at all n locations
gacacatttttgaaccgtctcgacccgngatctgtaagcctcctgcggcatgcaagcttgaaacctatagcataatcacttgcatcgcacattaactcaaattcttgcccctatctggtgttgtaattactggtgcaaacactaattntgttttcaaatcattaaatgctctcatacattcttcattgaacacaaaagcaacatctttattcaacaaattgctcaacagtttggctactttggagaaatcttttatgaatcgcctgtagaaccctgcatgtcctaagaaacttcttattcccttgacattcaggggaggaggtagtttctcaattacattgtccacctctttccctcttacttgaaatttatgccccaacactattccttcttgaaccatgaaatgacatnttctccaattgagaactagattagaatcttcacatctctgtatactctntcaaggttgataagcagccttcaaagatggcccaaaatagagaatcgtcatgaaacctcaatgt

SEQ ID NO: 230662 - DNA, 375 bp, Glycine max
agcttgcaagccaaatcgtaaaatgcttatacctgtatagaatcccaggcctcgaccgttagatcgtcaaatgattcaagatcgagtgatagagttacgagaaattgtgccaaacggagcaaaagtatttgcttgtttattctttcattcctaattttttggtaatttaaatatcttgttctgtcactgagttgtttttttttctttgatctctttttatgacttgacagtgtagcatagatgcacttttggaacggaccattaagcatatgcttttcttacaaagtgtgacaaagcatgctgacaagctgaaacaaacaggggagtctaatgtatgggacagtatccactattcactcccgtgccttctacctt

SEQ ID NO: 230663 - DNA, 422 bp, Glycine max
  unsure (1)..(422): unsure at all n locations
tgtgctagatggggtctaaccattctttttttggtgtacccctgatttgaagatggttgaacactagctttggtgcccacaaatcactttctgattagaaccttcttaacatttaaagatcttaatgctattctattttcatgcaattgggaaccagtcctttttaggaattntaccggcaacttttttttttgctcttttttgggggagggaaggactttggtaatcattgatgcagttccagcacaacaatgatgcttggttcagctaaaagttcattgaattttccagctaggtgtgagctagtatcagtttatataagaacttgtgtatacatttggagcatgccaaaaatggggttacttcaatgctcagtgctactattttaaagtgcanaccgcatcacgtgatgtaatctatga

SEQ ID NO: 230664 - DNA, 336 bp, Glycine max
aacaacactgtgacaaaaacaactgttagataatagcattcagataacgctaagaggtgatatctaatcgatacgaagctttcaaataatacttatgtaatcaagtgttatttggttgtcatcatcattcaacacttatttgaacaagagttttttaaattttagaagaaaataacatatggcattagctacacacagtggtttatatagtcattacaattttaggtttagtactcactatttcatctagctatcttgagtccctgtgttccctcgacccgataacctgcccctctaaacgcctcattcaaatgacatttaccacttactacacat

SEQ ID NO: 230665 - DNA, 216 bp, Glycine max
agcttatagattatataataaaagaacaatgacatttgaagagtctatacatgtttcctttgatgagtctaatgccattcttccaaggaaggattttttagatgatatttcagattccttagaagatacacatattcatggaaatgactcttaagaaaaagatgaaggaagcaatgaagattctcaagataatggagttagaacaaataatgaact

SEQ ID NO: 230666 - DNA, 273 bp, Glycine max
agcttatagagtatataataaaagaactatgactattgaagaatctattcatatttcctttgatgagtctaatgctatttctccgagaaaggatattttagatgatgttgcagaatctttagaacaaatgcatattcatggacaagattctaaaggaaaagggaaatgaagcaatgaagatcctccagaagaagccaaatcaaatgatgaacttccaaaagaatggaaagcttcaaaatatcatccccttgacaacattattggtgatatctc

SEQ ID NO: 230667 - DNA, 362 bp, Glycine max
  unsure (1)..(362): unsure at all n locations
agctnttaactcggaggtccgattcaagcgcataatatatcgagacgctcgaaattaaccaacggaagctctcgagaaattcaaatggtcataacttttaactcggaggtccgattcatgcgcataatatatcgagacgctcgaaattgaacaacggaagctctcgagaaattcaaatgttcataacttttcacacggaggtctgattcaggcgcataatatatcgagaccctcaaaatttaacaacggaagctctcgagaaataccaatggtcataactcttcactgggatgtccgattcaggcgcataatacattgagacgctccaaattgaacaaccgaagctctccacaattcaaatg

SEQ ID NO: 230668 - DNA, 396 bp, Glycine max
  unsure (1)..(396): unsure at all n locations
agctntataactngngtcanagctaccaggaatgagtatactcccatcaataaactcaaatgtgttcttagcacctaaggcgcgtctcataaaacgagcccatgcatggtaattagagccatttagcacaggagtgactgttacagacgaaggtccatctcctacatgaacataatacgggctggaaggatcttgcgatggatctgcaagaccacctccatgattgttgccggaaccacctggacgagccatcagagttacgcagatatggagctagacgctctgtgataccatgttaataaatgaatataaaagcaaggaaggagacaatatggagaaatgcattgacactcaattcatggaattacatcaggctgatgcttgttatttatatga

SEQ ID NO: 230669 - DNA, 442 bp, Glycine max
  unsure (1)..(442): unsure at all n locations
agcttaactataaagtttaacctcacattaatgcatcatataacactttctcacaccataggaagggactaaaaattgaaaaatgattaaaatcaattntagtgctagcaaaactaacaaatgacttatttttcccattgaaccttcttcatgggatctccaatcacaaaggttaaggttacaatcatttgcttgtttttaagtggcctaagtctcattcctctcgatgtttcaaaaaaagaatttcttcactaggggtttcagtcagaggatcggctgaattcattattgatttcacataaataaaatacttccatattttaagtaattgctttaccaaaatatctcttcattttttgacaatcgcaacgtacatatagaatatgcactttcctatnaaggaacacatttgctaagaaattttttacataatcaatctcat

SEQ ID NO: 230670 - DNA, 315 bp, Glycine max
  unsure (1)..(315): unsure at all n locations
agcttcctcggggccatttcctgtgaaggcaaactattggaaagttagttntaccaagaaatgctactcttaaaacacaaatggcatacaacctcctttaataaacacaaacatcaatgtaaatttagaataaactcatgcacatactcccttacgaacgttcacttgcacaagatattctcctaactaagaaaaatgcacccacgcacaatcaaggcaccttcgtcacctagattatttatatgtacttccgaggtgtattttgtacctacatcacaatgactttccttgcttaaattacacacacgcatactc

SEQ ID NO: 230671 - DNA, 428 bp, Glycine max
  unsure (1)..(428): unsure at all n locations
agcttagatatatgtaatgattaaattatgataatatttgataaataaaatgaatggttttaatgttaatataataatttattttagataaaataaattattatattaacatgagaaaacataaataaaattaaagaaaaaaataaaaaaaatagcaactaaaaaagggaaaaaatcacgtgtggttaaaatttaacaaaaaaacattatgatggtttgtatttcttaatttaatgaattattttggatcgatttangttcatattactcatatcgatgaacactctacataaaaattcaattcatataattaaaacttgaaaaataaaaatcatataattatagtatgatgagagaccaaaaatataattaatcaaaaataaatataaagggtattaccaatcactctcatgataattcttaatata

SEQ ID NO: 230672 - DNA, 217 bp, Glycine max
tggaaatagaattcagaaagatgtttaaacacaatgctacgactctttgaagcaaaacattagtaattaaataactctgcgtactcctacaacgttcatgcccaaaattttctacaaaaaatgcccccccccatcaggaccttcgcaccaatattattgactccaggggtttgtactccatccagcttccggctatatacacccctcctaaactttt

SEQ ID NO: 230673 - DNA, 469 bp, Glycine max
  unsure (1)..(469): unsure at all n locations
agctttatgtcataaataacaaaataaaaaccttatagtcctactagagattgaccctagaagagaatcgacactgcactaaactaccattatccaggccattggcagcaaggacagaaggaccaagctgaaccaaattcaacagtgagatgcctcataattataatgaaacacatatgacaaagtttaaaataaattcaattaaacacattttgagtttataggaaatttagtgcatgtttgtgggtagtttctgttcagttcgaacatgatgatgggtggagacttgcaagctntatttgggtgagtgttttagttgcctgatcatgatggacttctatggttntgtaactagtggtacgtgatcatttgtaaatattttacgcttaagtaagatataagtaaaattacacttgtatgtgggtcaattagtaaaaatatgctttttagcgtatgtgagtgcatcata

SEQ ID NO: 230674 - DNA, 415 bp, Glycine max
agctttattatgccctctcccctcggcagggatttcttcttcggcgaaggcgagatagttgttggcagtgatattattgaccagccctccgaaaccttctaccgagatgtcttgggccacatgggcctcgttcataacttttactagcagagcccgatgaggctcggagctcatgagtaactccaacagcgagaccctggccggagttttgttgagctgttcgataaccttgaattcgctctgctgaattatacggaggaactcactggcttcctctagcgacacctcctttttaccatcctttttctccggaagacctttcgccggaatatctttattcgaagcgtggggtgcttcaccatcttgttcctccaccacttttcctttccccttgatgttcgcgggttggactggt

SEQ ID NO: 230675 - DNA, 472 bp, Glycine max
  unsure (1)..(472): unsure at all n locations
ggatccttaagtcacctgcggcatgcaagcttctaaccaaaaggacataccttgaattaatttctttgatagcccctttgagcctatnttcccctttctttgttntgaagctcagtacaagccttaagtgaaaaaccatgatatcaccttacccttaaggaattttggaattgttttgggaataagctgggaataagtgtgggggggtatgtttcattgaaagatatgatttttggccatgcttaatgttttattttggccatgcttgatgtatatatatattgccttggtctttttttaatcttcaatttcgtactgttcaataaaaaaatacataaaaaatgaaaaataaatgaataattaaaaaaaaaatttagttcctgcaaattctgcaatttcgtacttttttcaaaaataangaagaagaagaagaagacgaagaagaagaagaaaagaagtgaagttgaataaa

SEQ ID NO: 230676 - DNA, 363 bp, Glycine max
  unsure (1)..(363): unsure at all n locations
agcttagctcttctttgcttatcctcggagtgagctatgacaaactctagcaccacttcttcaaggataggcttacgatctatgttcatcatggtggccttttcacattcctttagagattccagaacaaaatcttctagaatgtcttcaaattccttcgctgttaaggcaacaaatcttacatcctcaactangtttgttntatgttttttagcagataaagcctccacagaaactatgatgacttgttctatntttgaagcttacttcctttccaaggtctgatcaagtttttccttcttccttgatttagccaagggattcttattagcctttcccaaggcaacaacttcctttttactt

SEQ ID NO: 230677 - DNA, 228 bp, Glycine max
  unsure (1)..(228): unsure at all n locations
agctnttcgtcttacagacagcatanaagatagtttatacgcataaccactcgggtatttccgcccgtcagcgtgactcaaatgtgagtatgacagatcttgtgatcgcggaagatgacgtaaatctccgcgtgtcaacgggcttgtctgccgcgattgacgaacggcgcagaacacgacattagtctctgcgtgctatcaggcttttcgtcttacagacagcaaaaa

SEQ ID NO: 230678 - DNA, 344 bp, Glycine max
  unsure (1)..(344): unsure at all n locations
agcttcatttctcatattggaactgctgacacttatccaacatgaagataatgacgagaaatagcatggaatcgctcttaaagccatatcttctattccagaagaaagtgacaaagacgacttgaatgaaacacaataagatgatgagatttacttcttcgctaagagcttcaataccgttctaaggagtctaggaaatcaaagaagaacaaacttttatctcaagaaaaaaggagaagattcatcttatgttccacagtgctatgaatgtaatcaacctatacatctaagagttgattgccctagcttcaagaaaagaattggaaaattngacaggataacct

SEQ ID NO: 230679 - DNA, 298 bp, Glycine max
  unsure (1)..(298): unsure at all n locations
agcttagatgtatgacataactggatgttgctgagttattgtgagtcagactgagaccagattacctgttgggtttcgatgctccattntaaagaacgaacaacacacggttgttgcgtgtatgtggcgtttttaggggaacaaatattcttctactaatccttcagtgagggaagcaactagcatttggctatatagctcataacaagataacatgaaagaaaaagcaatacatttgggtagccttcatatgcttaattaataataatacccaatctatacttatatacataatata

SEQ ID NO: 230680 - DNA, 505 bp, Glycine max
  unsure (1)..(505): unsure at all n locations
ctgcatctttgaaatcatctcgacncgngatcctgatagccatctggagccggatcctctaatcacctgcggcatgcaagcttgatctttctttaagttccatcctatattcgttatgcattctatttctcaacactattattgtaaattaatattctcaaacatcatcatcttatttattgaataaggcatgcataagctaaccgaatggaaaactcagctatattggcacctctcatcctaaccggtcttaactacacaaccaaatatgaatcactcagagacaaataccacatcgaatgaatcagaggtctaataaccattcaagaaacttataattatgaagacctaatctatttctataaaactattcccactttccatccaaaagaggtagagatcttatccttcatngacccacaactgtaataatagattaataaggaatcttacattaataatctatattcgtcatattaagctctaatgcacataataatatgan

SEQ ID NO: 230681 - DNA, 278 bp, Glycine max
  unsure (1)..(278): unsure at all n locations
agctntatgttcaattgccccaatgacatctattcttcacatggaanaaggccaagaggcggacatgactttcagacgatggggcagaacattgacattgttcgcatacgctcgacatatatggcatttacttacatgggtgcagcaatcgctttccataacgagccaagaataacctgctctaaggatcttcctggccatagcatgcccattggcatgtgtgccaaatgaacccccgtggacttactcaatcatgtaggtcggctctatggcatcta

SEQ ID NO: 230682 - DNA, 361 bp, Glycine max
agcttcgttctcagatccctcttgttggactatgctcaatttagacagccctcctaggtttagacttacttaaactaagcttcatccttagatccctcttgttggacaactgctgtgcttagcacactgatcaatttggctctgtccagggtcacatcaaatgtgtgggaggtgggaatgaggttagaaaaggaaagaatgctccatgtctgagctagagtagtcatgttcttcctcaaaatcttcaaaggcttcccattagcattaagcccgaatcccctccctgggatacaaagcttagcagccaactcctgaggatcgggcctcacgagtgcaaatctggaatatgtacacaagttct

SEQ ID NO: 230683 - DNA, 389 bp, Glycine max
  unsure (1)..(389): unsure at all n locations
agctntacattactcctcatgcttctcaccatgtctaataaggttcgatttcttcattctaccacaccattctgatccggagaaccaggcatagtgtattgggcaacaatcccatgttcttgaagaaatttcgcaaatgaacctggtgcttgtccatcctctgtgtatctaccatagtattccccacctctatctgatctcacgatcttaatttgttttccacattgtttctcaacttcagccttaaaaactttaaaggcatctaaagcttcattcttagaatgaagtaagtagagatacatatatcgtgaataatcatttataaagcttatgaagtatttctgactatttgcgtccatgtctagacaacatatgtctgtatgtatgat

SEQ ID NO: 230684 - DNA, 438 bp, Glycine max
  unsure (1)..(438): unsure at all n locations
agcttatatatctcacacttacaccatggatgaatgtaacaaactaatataccaaatatttcattattactaaccaaaatctaaaggggtgtcgtgagtntctttaaaacaaaacattcaaagaaatcgttgaacgtcatttctcgaaaccaccaactccttaatatataataatattaacatataccattagccattattttttaatgtcaaagaaanttttcgtataaatatgccttgatgtgtcaattacttggaaaaagaaaagatctgcataaaaggaattactttctgcaattcaaaaagcttgcagtaacttattgaatccaatcataatatgcttcctatatatcaccatatcanacttttaaaaaacagttcataacatgcttttttaaatttggaaactattcttttatcatgacacatccttgacat

SEQ ID NO: 230685 - DNA, 439 bp, Glycine max
  unsure (1)..(439): unsure at all n locations
agcttcatagtattcctcttcaaaccatggagtatactttggagagggtggtggaaagggagaacgagcaaccctctttcctctatagctaggcaagcctcctttggttgtctccttcactttctctttctttgccttggtcttgggtgcagaggtcatgtgccttattgacttcatgtgtttgatcctttgttcacctattaatggaggttgaggatgaaaggtgacaatgattanggctttgagggggtgaagaatgagaaaaaaggatgtgtacaattgttgagggttcgtaaaagggttaggaatgtgacaaatgaggtttatgtttagtgaaaaagggtatttaaaacagaccaagttgtttttttgttctgccagatgtgtttagcttgggtaattgattatgaaatgtcataatctgttacgaatataccca

SEQ ID NO: 230686 - DNA, 465 bp, Glycine max
  unsure (1)..(465): unsure at all n locations
agctntactaattaanaaatgtactcttctaaggcttttacttatgttgttaagagaataaggagtagaagagaaacttaaccaaacgtaaaagtggaaattaaaatgcacagcggaaagtaaaagagtagggaagaaggagacaaacacacaagagtttttaaattggttcaacaacaacccgtgcctacatccaatccccaagcgacctacggtccttgagatttctttcaaccttgtaaaaatccttttacaagcaaagatccacaagggatgtaccctcccttgttctctttgaacctagtggatctaccctccactagaactgatccacaagagatgtaccctctcttgttctcagtcaaacccaagtagatgtaccctctacttgtaccacanaggatgtatcctccaatgtgttaagacaaagatctcatgcagtcaaacctttgatactttgtgaat

SEQ ID NO: 230687 - DNA, 439 bp, Glycine max
  unsure (1)..(439): unsure at all n locations
agcttagaaatatgttttaaatccaagcccataagtaaaatcaaatcaaatctagattagatgagataagataagatctagacgaaataatatctagatgagatcaaatctaaagtgtgtctagagaagataagatctaattctgtagaataaattagtctgccttcttcaagtccaagcccaattatggattcaagcccaagcccaattctagattcaagcccaatgcttcattaattgctgaaattatattaaaaacatcaaattagctgaatgggcctaaataataaaactgccgcataaatgtgacaattaagactaatcaatatttaaaatggtgcaaaaagggttaagacatatgagaanataatggcacatcacaacgtcgggccaaactgaaactgggaataaaatcacttatagtggataaaaactcaca

SEQ ID NO: 230688 - DNA, 416 bp, Glycine max
  unsure (1)..(416): unsure at all n locations
agctntgccgatttagtgttcgtcggcgaaactgtcaaagtgggtttgagaagaggcattattgattgtctcactttgacaagtaaaaagcctgnggcaaatggagagaatgagaaggaggaaggaacccatgttctggctgccattcctacatggccaaatttcccacctgcttaacaatgtcattactcacccgatatcagctctcctcgttacccaccacccaatcgtccacaaaggccatcaataaatcagccacaaagcctgccttccgcacaaccaattccaaacaccacctttagcacaaaccanaacaccaaccaaggaaggaattttgcagcananaagcttgtagaattcaccccaattccagtgacctatgctaacttgctcccatatctactcgataattcaat

SEQ ID NO: 230689 - DNA, 391 bp, Glycine max
  unsure (1)..(391): unsure at all n locations
gcttgcatgcttgctaagatgcattntgaagaatcataccaagaaaagtattacaatttataatctgaggcttgcacatcatgtcatgttgacatgagaagcatatataattgaacaagaaggaacataaattgtgtttattttattgaatacataccaagaataccagtataatatgaaagcggaacatcggtgtgctcaatgttgaaaagtatttgagttggggacaccaagctgaattcttcccattntgtagatccccacactaaagcacctttcttgaatctgggtgccagatttaggactattacactccataccctgtaatggctgatgtacacaacggtagagttagaccagccaaatttatgatcccaagagtatntcaaac

SEQ ID NO: 230690 - DNA, 415 bp, Glycine max
  unsure (1)..(415): unsure at all n locations
agctagagtatcattccaaatgtatggcttcaattacctgctaaaggcaacaggcacaattccagctctatattcagcaatttgcaagaaggcaggttcagccatatcaaagtgttgcagaggagggttgcaccaacccccattgttgttaggcaaagaacggtttggggggcagaagttagtggcagttacagtaatggagccaggtttgcaccatcttgggtcatcatcacatctcatttcatagcaagatccacagcttaagccattgttgaacaaagcagtgcttatagccacagtgtcagttccatagccctggctatacaaatttccatacccacatgctccacctgcatgtatanaatacanagcataaacatacaactcatcacttaactttcataaacacactcta

SEQ ID NO: 230691 - DNA, 363 bp, Glycine max
  unsure (1)..(363): unsure at all n locations
agcttatccttatggcttgcctccggacttcactccctgtgccactctggaagatttaagccaagcccctactttcgaggggcaactccccccttatgacgactatcccgggcaagacgatgaggaaggagatacccatcttggccgcctgctccacctcaaagatccgtccccacatgaactaccccaaccgaacatagtccgccatatcccggcctcaccctcacccgtaaaagaatttgttcccttcgcggaagataagggaaagattgaggcgctcgaagagaggttaagagcagtcgagggccttggcaattacccattctcggacttagcagatntatgtctcgtgcccaatatcgt

SEQ ID NO: 230692 - DNA, 265 bp, Glycine max
  unsure (1)..(265): unsure at all n locations
agcttgagctcactgttcctgccccacaaagcttcatganaattgttacggccatgctcttccttgcgagccctcttggtctcttgttccaaagccttggtggtaactatatttatacctcttagttnggcattctcctttcggatcttaaaagctgctgatttgaacctttctttgactatttgggcttgctcgagttctgccctaagggcctgcacctcttcgtatttcttcggtgcctcaacttcctcccttatagtggttc

SEQ ID NO: 230693 - DNA, 342 bp, Glycine max
  unsure (1)..(342): unsure at all n locations
agctatgattctaagaatgaaatagataaagattactttgtaatgactaaattgatcaaagatgtactcccgagacatatgataaangatgtatatagtgataagaataaggccttttaaatttaattttgagaattaattttgctgccgcatattttattcaatagtttcggttatcacaagtactcagacacttgtttaaaacatctgcaagaacctataaattaacacaggagcctcgtatgcaaaatgcttttgaatgggaaatatatgttaagatttacagagttgttgtatttataaagtgactcatgaatatataagtctttttaacttttctat

SEQ ID NO: 230694 - DNA, 421 bp, Glycine max
  unsure (1)..(421): unsure at all n locations
acacgttaactcgcttntgatctctatgaatctgctgcaaatcaactatcaagacgtcaacgattgcgcgagttgcttaaacaatcccaatcagctcctcttaccgaggaagaacagataataactatttatactggaacgaatggttatcttgattcattataaatgggacacgtaaggaaatttcttgttgagttacgtgcttacttaaacacgaataaacctcaattcaaagaaatcatatcttctaccaagacattcactggggaagcagaagtccttttgaaggaagctattcaagaacagatggaactctttttactacaggaacaggtagaagaaaattgattaatcgtttaataactctataatgtcactttcaaattcttatacattagatcttttaatatctctttatttc

SEQ ID NO: 230695 - DNA, 426 bp, Glycine max
agcttggagtagaaagaggaaacaaacatggaaccttgttgcagaatgatcaagtcatgcttaagttgaaaaattaaaggaccatttcgttgctcgaaacattcttgaagatcattccagattgctttatcagaagaacaatgtaacactactaaaataagtagtttcaatgactgaagttaactacattcctttcaaacccgttgttattttttaaccggcggtattttggttaataaaagaaatagttcaaagacgatgaatgataaacccgttgttattttttaacgggtggcattttggtgaataaaagacacatatcaaagaccgtgattttctaaacccgtctgtgaatgacgcgagtctttatttttattgtgactactcaactcgtgtcataagtagccttcgcgtggacttcctcac

SEQ ID NO: 230696 - DNA, 383 bp, Glycine max
atcttatctatttctccatcacccggtccctttaatttaaatcaagtgatgcattactaatgagattattacatattttgaggtaatcatgttaagaatagtcataagagtctatatattacttattgttgctaggtaactgactctattgttggatcaagtatcctcagaataattaagacagggggttgaattaattgttcctaaacctttactaattaaaaattactcttctaaagcttttactaaattgttaagagaatgacgagtagaagataaacttaatagaaaataaaagctcaaattaaatgcacagcggacagaaaagagtatggaagaatgagacacacaagagtttttatactggttcggcaacaacccgt

SEQ ID NO: 230697 - DNA, 359 bp, Glycine max
agcttcctcttattagtgcacagctccttcaagaatttggcatattttggaattttctttattgcatccagcagaggtatgtttacctctacttttctgaatgtctccaagatctctttctctgcctcttccatttttttgttggaaactgctcttggagggaatggaagaggagggatgtgctgcttctgcaaattaccagtggaagattcacctgcacagaaattgttaggtaaatttttgtcatcacctttttctggagtagagtgaagtttggcagattcatttgtagatgaggaaggtgctatgggttgaggtccttgacactgctttcccgacctcaatgaaatggcactgac

SEQ ID NO: 230698 - DNA, 392 bp, Glycine max
agcttatttaggcaatatagacctcagccttagacacaaatgacacagtgctcctaacaacaccacactattggacacctgtactactgacatattccctcaacagaaattgtaattccattctaacagaatacacgatctcatcattacaaaggattctgatcctaacaacctaatggacatagtcctcccacccttgaggcttccttcccatacccttgggcctgtggtcataatcattatggtgcaaattggtatcatatcccaaaaccagcacacacatggatttttaagattacaaactaaaacttcatttaggcatttcaccaaacacataacttacaacccattttgcaaaaaaaaaaaaaaagagggagagagagtataaaacg

SEQ ID NO: 230699 - DNA, 410 bp, Glycine max
tgcagctttgagcaattcaaatggtcataacttttttcggaggtccgattcaggcgcataatatataaagacgctcgaaatttcacaacggaagctctcgagaaattcaaatggacataacttttaactcggatgtccgatttatgcgcatcacatatagagacgctcgaaattgaacaatagaagctctcgagaaattcaaatggtcataacgtttaactcggaggtccgattcaggcgcataatatatcgagacgctcgaaattgaacaaaggaagctctcgagaaattcagatggtcataacatttaactcggatgtccaatttaggcgcataatatatcgagacgcttgaaattgaacaacggaagctctcgagaaattcaaatggacataacttttaactcggat

SEQ ID NO: 230700 - DNA, 436 bp, Glycine max
  unsure (1)..(436): unsure at all n locations
agcttgataagttgatgacgaattgccacaaataatataattctttgataagaccgaatgtttcacacaagaaccaagagaggcactcttttaactgtgtataatatgaaatttcatcaaaactgccaacaaagtgtttaaggagtctatttataactcctactaataacccttgtagaagcaaagcttccaagcttattttgatgatgccaaagactcaagtcaagaatcaagattcaagaatcaaagagtaattcaatcaagaatcaagattcaagtgaagattcaagaagaagactcaagatatgcaagaacttcaagaaaagcatcaagataagtataaaaagatcttttcaaagaaaagaggataacacaatttgtccaaagaattttcanagaaaaacctttaccagagttttactctctggtatcgata

SEQ ID NO: 230701 - DNA, 401 bp, Glycine max
agcttctacctacatagcatatgttcaccacacattaactcgcatttctttctcggtttctgatgcaaaatacattatatgctgtatgtgatcggctccatgccagtgatccacgtttacaatgacgatcaaatttgaaacaacggatctcattttcacttcgcacattctttttttacgataaaaatggtgcttattcaataattactacatcacacattcattcgttaggattggatcgatgctacggaaatcgaatctgaaaagacgaataacaagcgcagaaagttgcagaagcattgcaaaacgtttatgatccagtttgtgattaagttagggttggaattgtgggaaaaaagaggtggagatggagaagaagggaaaacgtaccacggttgatg

SEQ ID NO: 230702 - DNA, 343 bp, Glycine max
agctttgtactactccaaccaaccttggtacgttcctcccctaactaattacctctcttctcttcttatttgcactcaatcactcatatatatgcctgtgctgtcattccttgtttgcaatgctctaatatatgctctaaatcatcacttgtgtcatgtaatctacactactcactatgctattaagatatcaccttctactcttgatatatctcgtatagttgtattccttgtcttattctactaataaaagatagacagcgtgcaagaacacatatgggtttatatttcttggttagttagctatacttgaatttttgaaacggaaccttaacatgccatc

SEQ ID NO: 230703 - DNA, 338 bp, Glycine max
  unsure (1)..(338): unsure at all n locations
agcttagccacaggtcctttgtgctaaggattcaaggttggagaggaanaagagagtgaaatgagagtgtctaattatgtggttcagtttgggttaatttaagtatatgactcttcctcttctttatatgcacatcccatcacttcctatattcaactactttgttctcatcactcaagacccacttatctcaacctaaatactctaaaacttactattcacacccaatacaatattttcgcatatgtaaacataaacatacatattagcatcacacaccatcatctcataataattagttaattataaacacttatactaaatataattcctcaatg

SEQ ID NO: 230704 - DNA, 180 bp, Glycine max
ttctcgataagaccgattgtttcactacaagaacctagagaggcactctcttaactgtgtataatatgaaatttcatccaaactgtcaactaagtgtttaaggagtgtatttataacttctactaataaccccttgtagaagctaagcttccaatcttaatttgatgatgccaaagactc

SEQ ID NO: 230705 - DNA, 397 bp, Glycine max
  unsure (1)..(397): unsure at all n locations
agctataaacttcacagatgagaggagaagcaaaatatttataggaaatggtgaggggtctacacacaagagtaaaagaaagggagagctttatgcacaaaatcagagtgaatagaaatggcttaagtgtttatcctttcacggtttttagtcaatatgatcggagccaaaaatccctccttgtgcctttgaattttcagctatatatgactctccaccaacaaggtatgagagttntattttcttttcctttatgatgtatatataagagccttgaaattggttcagaaagaggtgtattcanattggttaaagaaatcaagttaactaaaatctggaagttaatgacttaattacgatgtcaatcacatacatgtgagaactaattattcattat

SEQ ID NO: 230706 - DNA, 331 bp, Glycine max
  unsure (1)..(331): unsure at all n locations
tatttctttgagataatacttaaaataatattttttttaanaaatactaacttctaaattttgtatttattctctttntatccttacacatttatntaaatttctttntaatcttttctatttttttattatatatgatattgatataatatatacataatttatgtggttttattcttattttatatactttataaataaaaagctacaagtgcttaanattgatttaaaactaatattataaatattacaaaatatatttttatcacaaaaatcaaataaaattttgtataaaagcattacataaatatatcccattatgntattatat

SEQ ID NO: 230707 - DNA, 432 bp, Glycine max
  unsure (1)..(432): unsure at all n locations
agcttagattgaatccaaagctagattgataaggcaaaaggacactcaaagaagatgctgagagtagtgttttaaaacccaaaccgaaccgataggtcagattggtccaagataaagcctttcgattgtagcttatcaccagaaagaattttccagtaataatttctagagaagaaaagaaggagaaggtggaatggcttggttccaattcttcatcccaaggaaccttatcatcacaaggataataggtatgacttaattccgaatctccaaaaacatatcaggaaaccaagcttcaagagatgctggaagagactaagaatttcctgagataaaatcttctaccttagcttccaacaagctacgtaattgatatggaatattacaaagattcacaacanaatcactattagaaaataatggtttaacatc

SEQ ID NO: 230708 - DNA, 538 bp, Glycine max
  unsure (1)..(538): unsure at all n locations
cgccgtggattgacgcccattganacgcgcgatcctgagagttcgattgcctgtccgcacgctgggagctctaaaacacctgcagcatgcattctattggtggagagaacaattatattatacttatataattctgagaaatacttaaatatattttattaaaaatactcacttctaaatcttgcatctattctctccgtatccctaacgcatttatttaaattttgtttgttagtctctttctatttttttatcatgatatgatatctgatataaatagtataactcaagtttgatggtggcgtccatctctttatatttaatcatacttatattanaatgaaaaatgcctacagacgtgcttatanatatgattctaacaacttactattattaaatattacacaaatttatgtttatcacaaacatcaaatataattttgggtaaaagcctgacataaatatatccattatgtattattattttggaattttcaacttcagaattaaggaaagctccttttaacgtatgtaactn

SEQ ID NO: 230709 - DNA, 521 bp, Glycine max
  unsure (1)..(521): unsure at all n locations
ggagtgcgttgagaccgatagagagacgngannttttggagatgatgtccnttcgagcnacctntaaatnnacagcggctgcaagcccattctagatcctggagtggacacgttctttttgacagacctacttgagcagacctcttaaacgaagcgtaatccctagagccctcttgttggacaactgctcgtgcctaacctatgagaacaatgggtctgttcaaagtcacatacaatggtgtggaggcggtcctcacgctagagaacgatagagtgcttcctgttttgagttaagtactcacgatcttcctcgacatccttgaagggcaaccttttctttaaacccggatccccactctgggatccgcaagctaatgactatctccagatgattcggcctctccaaagtaaatctggtgtatatcacgatatatcccactctgcgcgatccagaggtatttaaaaggggtgcaaaatactcatgaacttctttaaagaccttcccacccctgtctagggcc

SEQ ID NO: 230710 - DNA, 304 bp, Glycine max
taccttgctctgcgggctctcgaatactattattgggttcaacatctcaccattattatgtgttgatgttaccatattgccaaacaactggaatagttcaatctcgctgcactttctcttatctgtgatagagaaatggatattgtagaatcttaacccgcagcaccttggactgtggacgttcaactgaaaaagatagatctgtaatcaaacaagaaccctacttttcctgctcacttgacccattttgtattcaaaaagttgaatatagtttcaattacttctgatcccgaggcaagagata

SEQ ID NO: 230711 - DNA, 519 bp, Glycine max
  unsure (1)..(519): unsure at all n locations
cgcgatgcttgaaanccnattcgnacacgnngatnctttagagtcgatctccatgccagcancctnatnnntgtnatggaatanctacaccttactttctatcctataagattgacgtatgttattttaacttcaagatggaatctgagcttaccatggattagatagtgagacatcttctactgtccaaagatctacctggcctcacagctgtccctatgcagtgtaataaaaaagtctctacagctccatgcacctaaaggcctatactatgtcgtaaagggagcgttacgaacccatctcgactataaatatgggccacagttcacaacactctctacctcatgtactaattctgtgatcgagccttggcccacccacttcaaatgaaataatatgtttactgatgtgtactcaacccatatccttgtatgagctacttatttatatcgacatgattcctcactgccagtaaaagaggggatctgaccaattttgacgacattgactccggacacg

SEQ ID NO: 230712 - DNA, 440 bp, Glycine max
  unsure (1)..(440): unsure at all n locations
atctctgagtcacctgcggcatgcaagcttgtgattcctcaatacatccttattaattgtttaattcttacttcttaaatgtacgttatatacttgttataggaaccttataattctaagtatatattagtgtagtatggtgttctgccttaattgcatangtagtatggttggttgtgatttcttgttcttagtgatgctaatactctatagttggatgactcatatcaagttatatttcataaggaatactcttttgatcgtaccttctaattctagtgcaacctatntttttttgtgtngcgtgcttaagtcaaataaattgagttcacttgaaagcctaagtataattattctatngtatagactacatcaaacaatnggatactgatgttttatacaatcagtgattgtatgtctcatatagtgacattgggcat

SEQ ID NO: 230713 - DNA, 270 bp, Glycine max
gaaaacatgtgctattcattcttggcatctcttcctcctttgccaaaaagaattcttcaaggactaaccgcctgaattctttttgagtctctcttctccctttttcaaaagaacaaaggactaaccgcctgaattcttttgtgtctcccttctcccttgtcaaagaattcaaaatgacacagtctgagaattcttttgattctttcctttcccttatacaaaagtgttcaaaggactataccgctgagaattctttcgtatccccattca

SEQ ID NO: 230714 - DNA, 373 bp, Glycine max
  unsure (1)..(373): unsure at all n locations
acattcaataattactggtaatctattaccatatatgtgtaatcgattacacagtgcanattttgaattcaaattntaatagctattgtaaatcatttttggccattggtaatcgattacatcctctggtaatcgattaccagagagtaaatctcttgaaaaagactttttaacttaaatttcttggccaaaccttttgctacttcagttaggaattcccttcctatntaatatacccttcctaagaatctagagactgtcttgatcatnncatctgaatatncttaatttctttggcttgaataaagctttgagaacatatgatcctttggcatatcaaaacattcagcttgattccgtgctacaatctccc

SEQ ID NO: 230715 - DNA, 448 bp, Glycine max
  unsure (1)..(448): unsure at all n locations
gcttattccattatagtcttagtcttgctgcttctcacttaaaatacctttataaatagttgctaaggttcctgacctatgtcctcttatccccatgggcttttcttcactatctcttttaaaaatttacattgttctcatttctagtacgaagagcaatgatagtatccatatggtagaattgtttaattggaaaaatcaaggaatacttcaacctagtacattgagggaaacaagacataaagcaaccgcgcttaatgaatcatttagggatttccttaagtatgttgttcttgcattaaaatcctttttcccactattttagccctctaaaaatgccgacattataggaataacctttttccaagatggagtatggaaactatgacttangcatatttgacaataactaaagaattgcanagtggctacacacgtcaaacgtgac

SEQ ID NO: 230716 - DNA, 338 bp, Glycine max
  unsure (1)..(338): unsure at all n locations
agctntggagtttccaagtgccaattcgtcttcttcttttgtccagtcttcttctggcttcaattcattagagggctttccttctgtgtccagcatcttgggatgttcccagcctttgatgacagctttccaggttctgctatccagtgatttgaggaaggccaccatccttgctttccagtattcatagttggttccatccagaattggtggtctgttcacttgtcctccttcttttctcatgttcatcagaaattatctccctagatctcactcagtgatttcgagtgcctgctctgataccaattgaaattctgatactggggacagatgtcgta

SEQ ID NO: 230717 - DNA, 465 bp, Glycine max
  unsure (1)..(465): unsure at all n locations
tgctgtatgctagctatcatgatttcatttgtattcctcanaatgtattctttgatatccttaataaaatgacatgaatttgtttccttaaaaaaaatttctatagtgccatgtaactaatatgaaagtcacaagaggtaaagaatagtaaagagaaggttaaaaagtggttgttgaaactgaggtttttcacaagaggtttttcattaaagcacaaaaggtgcagtatttgcttgcagtaactagcagaaaacttgtattatactctntggcacttctcatagtttttttttctctttaggttcaactttaaaataagattaaacaggaatccgaacaatttatgttatggaaagcttcacgtgaaaaagaagttctccaggtaaatgcaaatgacaagatttctgctcaactntctagtaactntcttagtttattatctatttatctattatattactatat

SEQ ID NO: 230718 - DNA, 437 bp, Glycine max
  unsure (1)..(437): unsure at all n locations
atctctgagtcacctgcggcatgcaagctnttcgattcattctatgtacccgtagtggtccacattgtgtttcgtgcatntttattctcgttntgtttactttttataccccctgttgacgtgcttaagccattttacttaagtcgtttctcgctcaacttaaaagtaaaataaatttccaccgaacgtttgaattgtattatccattaacttcgggtaaaataaattccgaccgttcggtcatgtngtaaccacgttgganatcanaaagaggtaaaaaataatataataatcaaaaagacatcttttagtaaaataaagcggaaaatcaatcggacgttntctctttgggagttctcattcttaatcgaattggataataactaaagtgaaactaaggctataatcaactcgcctagtcaagctcgtccacaaaa

SEQ ID NO: 230719 - DNA, 290 bp, Glycine max
  unsure (1)..(290): unsure at all n locations
agccaaaaaagaagagaagaaaattttccattcaaaggaaaaggagaagaanatttcccattcaagaaccagagaaagaaaattttccatcaaggaaaaaaaggaagccaagaaatttcccattcaagagtgggagaaagaaaaaaagaaaagaaaggaaattcccaacccaagaatgggagaaagtaaaaagaagaaagctcctgatcgaaagaaaacagaagaaatgtgcagagaggtctttggaccggacaatatctgaacaatacagaattgtcaccaaatgaacg

SEQ ID NO: 230720 - DNA, 252 bp, Glycine max
  unsure (1)..(252): unsure at all n locations
gttagctntgttcgtcaatgcttngaccttccaccaccatctgcatagaattagattattattattatattntaattntaagccttgtatttggctatgttttatgacatttgaatacttagtatttcttttcatatttacttagtatgactgaacatgatgattatatttacttgcttttggttggttatggttatgtgtgttaaactttattatttttatgatatatatgtctagtgatatgtacttaca

SEQ ID NO: 230721 - DNA, 502 bp, Glycine max
tatagaacgctcaagcttgagaaagtccttctgattctgtttatacattcttgacttgataacatgagatgaaatacagagattggacctcctgttagttgttatcaatgaatagcttaaacacttgtgcttgagtgaaacagtagccatgagactgtggtttgagctactttccttgaatctgtcttatgattaacctcatctaattgtattgttcacattttgttctcctttttgtctagttgcatattctgtgaaaacaagggataggtacacattgcttcatctttctcatcatgcaatcaatgaattttgatgcatacacccctatacataatcactgcatgttttaccacttgaggacaagtgagttgttatcttttgctcgaggacaagcaaaactgtaaatttgggggagttgttagtcgatgaatacgactaactttcgtgtataaaacatgtggttgttttgtaatactaaaagtactctctgttaaatatt

SEQ ID NO: 230722 - DNA, 437 bp, Glycine max
  unsure (1)..(437): unsure at all n locations
tgcacgcatgcaagctatataccctagcaactcanaatctaggtatccataacccctcaatttaatggattttcaaggtttgagaagtgaaaatgagaatggggtaaatttggagcaaactctcacctcacacaagtctataacatcaatctacacttgctcaaactggttttacgcctaatattctgtcgaatcaaaatttgactcctcaacacccaattntaccctagaaatggctcatgcctctactttggtcattagctttctctcttgacagnccaactntctcataagtataaatgacatttcanactaggaataactccctttaacctccaaataccactaaattcagatttggccttcaactctcaaagcttcactctttttcactcaaacaccatattctactttctaaccctaggtaaccctaccct

SEQ ID NO: 230723 - DNA, 273 bp, Glycine max
accttgaaaacttgtgctattcattcttgtcatctgttctccctctgccaaaaagaattctcaaggactaaccgcctgaattctttttgagtctctcttctccctttttcaaaagaacaaacgactaaccgcctgaattcttttgtgtctcccttctcccttgtcaaagaattcaaaatgacacagtctgagaattcttttgattctttcctttcccttatacaaaagtgttcaaaggactaacccgctgagaattctttcgtatccccattc

SEQ ID NO: 230724 - DNA, 347 bp, Glycine max
  unsure (1)..(347): unsure at all n locations
agcttgttcgcacatcgttcgcgtgtatgatatccattccacaaggtttgaagtagaggagaccttcaatcctataacgcaatgtggcgaacaaaagtgggcagttaacttgaatggtcatcattgtcaatgcggaaggtattttgcgcttcactatccatgttcacacattattgcaacttgtggttacgtgaacattaactactaccaatatatagatgttgttacacaaatgagcacatcttataagcttactctgcacaatggtgaccacttgggaatgaagcggctattnctncttctgatgacgcatgaacacttatccctgacccaactacaattcatgc

SEQ ID NO: 230725 - DNA, 338 bp, Glycine max
  unsure (1)..(338): unsure at all n locations
tgcaattagaaatgttagtcagtagacaaatggattgagaaagataagcttgaaccataactcggtgagagtgtgaactcaattattgagagaacgactagcatagagcaatgactnttgtttcaatctctgaattttagaatgaaatgcataaatatggatatgatgaaggccattattgttttgaaagccacttgaccaaaaagcttacctgtttataaatgataatatcatttgcacccttctgtgaattgaattgtaatggtcaaattgaaccttaagctttgagaatgctatctctatttaccttgcttatgttttaattgagttaagacaac

SEQ ID NO: 230726 - DNA, 367 bp, Glycine max
  unsure (1)..(367): unsure at all n locations
agcttcaagaatgtgaagtagctgctggacggccataactaagaccataacatcacttgaataaaagaagccaagtctattgtagtcttctgatttctgtgtattgtaatcaagtgatgttatactagtaagtctttctcagggttggctcaatcgacacaatccaaactaacaatgtatttacttcgagtctgattagatctagagaatcttatngtatctacttggaaaagtaaaatattcaattttcctaaaatcagtcgcttgcaaaagccacaaagaagagacgcganaaagtgtttgttcaacaatcatatcaattgataaatccggggtgattggttaaatgaacttgccatatcaattc

SEQ ID NO: 230727 - DNA, 394 bp, Glycine max
cgaccgtcgtttgtccaattaaaatatgacacgtgtatcattgtttcttttccacgtcctcttttttttttttattctgaaaaaaaggagaccgacgcgtcaccaccctctccgaccactggtcggagctccggtcatcatagaaaacaacctctgtttctctccaagtcaaagaccacactgctttccttgaacccaaagtactttcaagtccactcgctcttctcccagaccgatgacaaccgcacctacaccttactcatcatcgacattgcttttgtcttcattcgcatctacaagaacaccgcatcagattctcctacaacaacaaccaccacttcgccccactctcgttgaatgaatgcaattcacttcacaacacaactcaccgagg

SEQ ID NO: 230728 - DNA, 575 bp, Glycine max
  unsure (1)..(575): unsure at all n locations
tttactttgtcgagactctaatttactttaattcatntttntgaannnaannnnagcctatgancctgaaccttgaccggatcttaagcgactgagctgcaacttctatctattagaattatgaagtttctaatgctgaaatcatgggattaagaaggccatgaccaatccctattctattatttaacaaaaattcctaatgaaggtgagccctttgagggtgcattgattgatgattggaaattctatatttctgtgcctgatgcccgccggttggtttgaccacccaaatggatacgaccggaacgcttcttgcgcgacattgagctttgaaaccgcatcctccataccttattgtccgcatttactcccttaaacttcaaaccttgcttangtttctgaagaatatctcatagacgagtgggccttacataaagagttacataatgttggacacacactgctagatatcgcttgcttaaacactgccacgaatgccccatggctataccttatcatgttcccttttccttaacactttacaacgctcttattatgcacctatgtcaatcaan

SEQ ID NO: 230729 - DNA, 171 bp, Glycine max
cttattcaatttgctatattgtgagtacgaagcgtcgctatgtgtatattgttctatacgaaatttcagggctggcttctttaatggttgtaatcgagatttctctgttgaatgaaaagacatcacccactggggtggttgacttttgttagctataaaatgaacacccta

SEQ ID NO: 230730 - DNA, 398 bp, Glycine max
  unsure (1)..(398): unsure at all n locations
actaagctatgctgcaatattacaatagacctcctcaacctcatcagcttaatcaaccacagcagaacaattatgacctttccagcaacagatacaaccctggatggaggaatcaccctaacctcagatggtctagccctcagcaacaacagcagcctgctcctttcttccaaaatgctgctggcccaagcagaccatacattcctccaccaatccaacaacagcaacaaccccagaaacagccaacagttgaggcccctccacaaccttccctcgaagaacttgtgaggcaaatgactatgcagaacatgcagttttagcaagagaccagagcctncatttagagcttaaccaatcagatgggacaattggctatccaattgaatcaacaacagtcc

SEQ ID NO: 230731 - DNA, 436 bp, Glycine max
  unsure (1)..(436): unsure at all n locations
attntaccccactataacctataaaagagtatgatatggttttccattaaattattgtggtcgatactcaaccccaaatgatctcattccaatcagatttntactttgctaccaataagaattgctgaacccatttgatttagggtgtaatttttctgatactaggatgcataaaattgcgctccataattagtancactttctcttatgatttgtatatgaacatattctntcttttaattccttacactaggacacgtagtaacatttgtctttattatttaagaaattaaacgagtacaccataaatttattattttgcaattcttggacgactataacaacgcgtacattatcatggtaactaagaaatattgngtcgataatcacaaatgaatcactaacaaacacactatgactggcctctcaccgaaan

SEQ ID NO: 230732 - DNA, 267 bp, Glycine max
cttatcaattaaaaacttttgtcgatgatcttctaaataattttgcattctagtaataaagccatcattattctgaacagcagaaaagcattacagccattagcaagaacttctcacataatataaatgagaaaaaaaatagaaatacctctttacgaaatgtcttggtaaagagagacagaaactcgccataaagggacacatacacagactgagcatccataggcttaaaaccccctagtaagtcagcaacatcactttgctgac

SEQ ID NO: 230733 - DNA, 280 bp, Glycine max
  unsure (1)..(280): unsure at all n locations
agccttcaattttgaatatttagaggtacgggtgcgtttatattgatctcctacaaagctttctgatgttcctttgcttaaacttatattgcatgttatttctttcgcagagaaggtcgaacaacacactaaagctttgatttttatctcaacaaaacgacgatttttatcaccgtaggtgcatagacccataaacggaacccgtcttctgctaaagatgcgattttaacatcacatgtcttcatttgtccacctgtcttctgcatttnttcttttcgtt

SEQ ID NO: 230734 - DNA, 422 bp, Glycine max
taccaacctctcttctccaccctcaacttgaataggagacttcatctccacaatgctcacaaagacatataagcacaattgttaatgacaccatcaagcacttctttgatcaatgactatagtcacaaatggttggggaactagtttagtcctctatttcaagtcctccatcctcaccctaattgcaatgtttgagagaagcttcaccaacctttcttctccatcctcaattgaacaaggactccacctttatgatgctcacaaagatgtatgagcacaattgttagtggcaccatcgattacatggatttgagctttttgcatgtgttgttgtgatgacatcttccttatgtttaatctaaaaattgcttatcgggtgttttggtcttacgaacatttgaacttttgacgagtgtaattat

SEQ ID NO: 230735 - DNA, 523 bp, Glycine max
  unsure (1)..(523): unsure at all n locations
tcccacccactccatttnattgtataaacatattngnaacnnnnnnnnancacgatatgaacttgancncgttaccaannnacgcagcagcaacngcanccnnaaaaaagagcgcggtattaggtgaaaaaaacacctcgataaacttcatccttctttccaaaaccattaggcaccgagatngaagctcaagcgagattcctgattccttaatttccagctagaaagaaattaaaaagaaacccctgattattaaatatagactagatcgctcaccgaagaganataccaaacaaccttgaaggaactacgaacctctttcagggatgactatcctataacttatgatgcaacatcgggtgtcaaatcagctagttattttcttctccactgactaattaccaacattccaaaaaactaactaactctaatctaaacaactgactgattgttataagttaataatggtattaataaaactgaccgacactaatatacaaagtagaatccaataacccattcg

SEQ ID NO: 230736 - DNA, 451 bp, Glycine max
  unsure (1)..(451): unsure at all n locations
gaagaagaagaagttcanagagattcaaggcttgtaaaggattgtattggattgttagaaagattgattaaaaatgcaaaacaaagccttgcttttatagactcttcatgtctggtcaagagaaccatttagaagagttatgacttttagaaaaacttataaccaatttgaaaaagtcaaaaaccatttgaagagttacatctttttgattattcagaaacaatcattggtaatcgattaccaaatcagtgtaatcgattacacaaagcttttaagtgaaatgatgtgactcttcacatttgaatttgaatttcaacgttcaaaggcactggtaatcgattaccaaaacatggtaatcgattacagctttttgaaatcaattggaacgttgtaaattcatttgaaaattttttcanatccattttactactgggtaatcgatacaataatc

SEQ ID NO: 230737 - DNA, 449 bp, Glycine max
  unsure (1)..(449): unsure at all n locations
tcattagatgttgcatttcagtatcacttcctcttatggaagaactatatgcacttcttgcattgtatatttgtttgatggtcgtacaactattggcattgtgctccttcagagtcagcagaatgtttcttggtttgaccattgacttcatcatatcaacaataagtgtcttttcagctctagtcaatcgcccgacatatggatgtccaactaatgacttggctaattcatgattatgaatctcacaaatcaacttcaccatccagccttgtcctccaaccactggcttgccaagaagcttgaagggacacccacatttcctaatcccaatgtctcttctaacaaattctttcttcttacacctatactcgccactcctttcacagccaattaacacaaacaaagtccttcctctactacctgtgttngtgtcagaccttacaatcact

SEQ ID NO: 230738 - DNA, 473 bp, Glycine max
  unsure (1)..(473): unsure at all n locations
atctctaagcacctgcggctgcagcttttatccaaacactctcttggtggtgaagtttctccttccatggcttattccctagtggatggcgcctcctcttacctcttctcctttatctttcgctacatctccatggtggaaaatcaccatcgaaggacctcattgaagctcaaagatccaacctccatagaagcttctcaagcaagcttccatcacttttctttactctaaccatgatgatgaatgatgtaatacanatatcatatgttttagaagacacaacacangataacaaccaatacanattccacttaaggggagtaggcatgtaaaagtctaaaaatcttcaaaacttctttaacatttgccttgagaggtngttcaccatattgctgatctcattgtactccccctatctctaacaatctcccttttttttggcttgatgatgccaaacttaaatatgacattga

SEQ ID NO: 230739 - DNA, 425 bp, Glycine max
  unsure (1)..(425): unsure at all n locations
tgtcanacctgataaaagtttcaaaacaaatatcaagcatagatgtatgaggacttcaaggaattaggtgtcatcaattagccattcaacgcagatatctttctaattaacttctgacctcaatatagaaattgatttgtaagtttgcacaggtttcttgcaaaatggcataaagaacttggacgattaatcaaaattagaagagggtaaataaaatatgtctagaaaattacagaaggattaaaaatttgaatattctttgttaacaaaaatgaagaaaaaagattcacggatggttgtaaatatatctatctattcagaataatttaacacccagaaaagatcaagacacacagaagctaattctaaaaaattttcaagaaatggatgtgacaaaacatagaatatttccattccccttttct

SEQ ID NO: 230740 - DNA, 261 bp, Glycine max
atacttagactatcctaaaaaatgatagctctttcaattggaaacccaagattgctaaccagacctttaagtcagatcccatcctttattgcttctattagagcatgcactctacctttgtagtggataaaaccacaatgggctaaagagtttccttccaactatcaagagagttgccaatcatgaatgcgtaccttgtcatagttctccttgcatccaaatctacagcatagtcaaaatctaaataaccaacaagagcac

SEQ ID NO: 230741 - DNA, 451 bp, Glycine max
  unsure (1)..(451): unsure at all n locations
ctcagcttataagcaagcttccaacaagtggtatcagagcacaagagcttcaagtaggtgcttcttanacctccactaattntcagctntactttctcctncattgttgnttcttcgtttctctccatgtatctcctcacgtgtcttgtgctgaatgttgttaacataattntttagaagttccaccgattaagcttgctatagaagctagatttgattttctatggttcanattccttgttcttgttcttgacccatgaattgtgttgagtttaggttcctttgagttttatattgtcaatttttttggctgaaacctaaaccataaaattcttagaaaaacattaaagtagaagaaaacctcaaaaatctagaatgacatattcacctattgtagttttgtcatanaagtcatgtctagtcatgaaacacgtcacgtacgattccttat

SEQ ID NO: 230742 - DNA, 218 bp, Glycine max
  unsure (1)..(218): unsure at all n locations
agtcatcaagagattattatatgtgaccatggcatgaatntacttatcaatcatataatctatctttcaatatcttctttcatctctttcaacactttcaatagatctttctgatctatntctcttcatctttctaaaaggttttgttcaaacactttctcttccaaaaaaagttctttggtcaaaacttgggctattcatattttttattctcttct

SEQ ID NO: 230743 - DNA, 247 bp, Glycine max
cagcatagaacacaaaagcatgattgattagagaaatatctttatatacatcagctggtctgttagaaagacccaacatctttacctactgctgaaattttacttatttgccattttactatttttagcctacacttagtataattttgttgcaaatcatcaattattaatgtttctttcaacaatgccttatttctgaatttaaccctgtcttagactagttccctgagttcgatacttggattca

SEQ ID NO: 230744 - DNA, 394 bp, Glycine max
  unsure (1)..(394): unsure at all n locations
agcttctttgagaaaacttccttgagaagctagagcttagctacacacacccctctcataactaagctcacctccttgagaagcttccttaagaagattcctaaagaagctagagcttagctacacatacctctctaatagctaagctcacctccttgagatgagaagctagagcttagctacacaccccctataatagctaagctcacccccatgacanaaaacatgaaaataacaaaaaagtccttattacaaagacaactcanaaatgccccganatacaaggctaaaaccctatactactagaatggcaaaatacaggcctagacgaatganaacctattctatattacaaagatagcgggctctacttacccatgggtcgaatctacct

SEQ ID NO: 230745 - DNA, 423 bp, Glycine max
  unsure (1)..(423): unsure at all n locations
ntatgaacatattaatgggattcttcctctatcaactttcatgacctcaatcatcttcttagtagaatcaagtgggtattgatgtcaatctgtgattgagcatttttaatttagtagttctctattattcttagcttatttgacctctctctgactcttattttctcaccttaactcagttttggtcttaggaaaataattggggctaattaataattgtttcttattttcggattttgtgcttacttgatctatntgccttgtgtaggatttgtacaatactatagaactctgaatggagtatatgagtagtccctgaaaagctatggaaaagtgctacaatcttgtcagaaataagcttacgccaattctaccattttgagggtcatttaaggctnggaagtaagagcctgtgcacatgga

SEQ ID NO: 230746 - DNA, 388 bp, Glycine max
  unsure (1)..(388): unsure at all n locations
agcttcctcggggccattgtctgcgaatgcaaacattnggaaagttagttttaccaagaaatgctactcttaaaacaaaaatggcacacaacctcctccaataaacacaaacatcaatgtaaatttagagcanactcatggacatacttccttatgaacattcactcgcacaagatattcttctacctaaaaaaatgcacccatgcgcaatcaaggcacctttgttacctagacttatttatgtgtacttccaaggtgtatttgctacctacatcacatgcaacttctttggctaaattacatacatgcatactcaaagcatcttggctaccaaaaattgcacacgtgcacattcttgtatttctaatacctatgcatatacaaactt

SEQ ID NO: 230747 - DNA, 284 bp, Glycine max
agcttctcggtggcctcgctgttcgcatgtataacatgttactctgctaatgcattcttctagttggtgatgtgatttatcattaggcaaggattttaggtttaattattacgaaattgttgattacttgctttaatgtttatgtttcatcatggtggattaatgtaaaagcaagatcacctgtttatattatttgatttgagttaacaatttatttactgggaattttactattggtgttcataagttgtatacctagtcctagatgttaaccgggcattctt

SEQ ID NO: 230748 - DNA, 368 bp, Glycine max
taatgggtaaatagtgttcacaaaagaacaagtacgatttattaatttacgatctaccataaaaaaaataagtaatctatgatccagaattttgaacggaaaaaaacacctaagattcgcgatgaaccaaaaagtaaattaaaactttggatattgtaatacttgaaagataacattacattctttagtactatcaagttttaaattatggagaaatagtagaaagagataattctattcttgacgtgcacgcgtaggcgtaacactcttgaaagagttctttaatagtatatgttttggtacatatgggaaatgaacaaccaaagcacacgttctttaacatatgtttatcaagaattccatatcta

SEQ ID NO: 230749 - DNA, 289 bp, Glycine max
agcttctcctttgctccctataactgattgcagttctcgagagtgttggacctctttttagcattagggtggaaattagataccgagctattacagagagggtcggagtttcgcctattgtatagaagatggtggaaaatatacttaggtggtttgggcatgtacagagaagaccggaagactctgtattgaagatgagtgacctgatggagagaatgcacacacttcgatgcagatgaagacccacaaagactattcgagaggctatcaagaacgatctcgaacttaa

SEQ ID NO: 230750 - DNA, 362 bp, Glycine max
  unsure (1)..(362): unsure at all n locations
agctnggatngatttggtctgacgagggatcgatgtttattaatttaggctacgacatagaacacaagagcatgattgattagagaaatatatttatatgcatcagcttgtttatttgaaagacccaacatttctacctactactgttacttttacttaccttgcattntatagtttttagcataaaagtttagtttaaattctgtttgaaattatcaatcatacatgttctctcaacaatgcttcatttctgaacttaacttaggctaacattagttccttgtgttcgatactcngattcnatccatttaatttttaaatacttgacaatccagtgtgctttccggcaaaccgaatttccc

SEQ ID NO: 230751 - DNA, 232 bp, Glycine max
tcgaatgacgaagtgtataacggtgaaactttttgcttttattctttgaccacatagtggtacctatagatatgtcgcgggggtcaagagaccttggggacgtcatgtggggtgctattgcccaaaaccaagcttgacccatctcgaccccacccgggcatagtcagatcgtgagaacctgtgatgtacctaagcaggcgagcatctagcaatcaacagatatatggaacta

SEQ ID NO: 230752 - DNA, 308 bp, Glycine max
  unsure (1)..(308): unsure at all n locations
agcttctcaaggatgtgagcttacttatgagaggtgtgtgtgtagctaagctctaacttctcaaggaagttntctcaaagaagcttctcaaggagagtttctcaagatagcttctcaaggaagctacctagtctataaatagaagcatgttgtacactcgttgtaactttgatgaatgagagtcctgtgagacacaactcanagttcaacttcttctcctttttgctccttcgatttcgtgctcccccctctctctttctctccctctgtctttttcaccattgaagcattctctccaagcttttatc

SEQ ID NO: 230753 - DNA, 245 bp, Glycine max
tgtgaggatcgatggagacccggcgttgagagatactaggatatgagctacgtgggagtacgtgagctcagttggaggtggactaccggcgatggagggattatgtgcgcattgtggatgtggaaaacttgttgtacaccatggatcgaacgccacctagtgccacatgtgatgggtgccccattattctactagctagacatgaggaagtggtgaagggtgaaacttcctacttatattggtca

SEQ ID NO: 230754 - DNA, 157 bp, Glycine max
  unsure (1)..(157): unsure at all n locations
agtcaaacgacaataactnttgactcggatgtccgattgggtccggtaggatatcgagacgctcgtaattgaaaacggaagctctgagaaacatcaaacaacaataactnttaactcggatgtctgatggagccctgtaatatatcgagacgctcaa

SEQ ID NO: 230755 - DNA, 412 bp, Glycine max
ctatttcaattacgagcgtctcgatatattacgggattcaatctgacattcgagtaaaaagctatcgtcatttgattttcctgagagcttcagttgtcaatttcgagcatctcgatatactacacgacacaatcggacatccgagtcaaaagttattgtcgtctgatttttcttagagctttagttcttaatttcgagcgtctcgatatactaccggatacaatcggacatccaagtcaaaagttattgttgtttgaattttctcagagcttctgttttcaattacgagcgtctccatatattgcgggactcaatcgggaatccgagtaaaaaggtattgtcgtttgatctttcttagagcttcaagttttaatttcgagcgtctcgatatactacgggacacaatcggaca

SEQ ID NO: 230756 - DNA, 322 bp, Glycine max
  unsure (1)..(322): unsure at all n locations
agctntgagaaaaatcanacgacaataagtnttatctcggatgtcctattaagccctgtaatatatcgagacgctcgaagttgaaaacggaagctctaagaanagtccaacaacaataacttttaactcgaatgtccgattgagtcccgtaatatatcgaaacgctcgtaatttaaaacagaagctctgagcaaaatcaaacgacaaatacttttaactccgatgttcgattgagccctataatacatcgagacgctcgatatgaaaacgggagctcttaagaaagtcaaacgacaataacgtttgactcggatgtccgatt

SEQ ID NO: 230757 - DNA, 310 bp, Glycine max
  unsure (1)..(310): unsure at all n locations
tctatcctcaattacgagggtctcgatatattacgagactcaatcggacattcgagtcanaagttattgtcggttgactgttcttagaggttccgttttcaatttcgagcgtctcgatatattacacggctcaatcggacatccgagttaaaagttattgtcgtttgatatttctcagaacttcccgtttcaattacgagcgtctcgatatccttcgggactcaatccgacactcgagtcagaagttctagtcgattgaatntactcagagcttctggtttcaattacgagcgtctcgatatattacgag

SEQ ID NO: 230758 - DNA, 333 bp, Glycine max
  unsure (1)..(333): unsure at all n locations
agcttagaacaataaacttggccttctcttaattgtctntgggcttggcgaccacgatcaacaaagtactttcggcacctactatatgttgacttgaccaatgctgttattggaatgttgcgacaatctttcaacacctttttcacacattctgataggttgttttcatgtgaccatatcgtcgtccagatgtatcgtaagccatgctccatttntctttngaaatgcgatcaatccatcttgctatggctggagtcaatngacgaaatttttctaagttttgatcaaacacatgcttgcaaggagtgtacgctgcatcaanattgtatcatc

SEQ ID NO: 230759 - DNA, 429 bp, Glycine max
  unsure (1)..(429): unsure at all n locations
tctccccaattntctatatatagggggagaagtgaagtgaanatgggttcagccccttacgcacttctctctctttcgaatttgcttggaaaaattgtttccgtgaagaaaattcaagccgaggcgcttccgaaacgtttccgtaacgtttccgtgaggaatttcgcgaaggtttcgaccgttctttgacgttcttcattcgttcttcgatcttcaacgggtaagtacctcgaaccaagcttttcgattcattctatgtacccgtggtggtccacattgtgtttcgtgtatttttattctcatttcatttactttttatacccccttttgacgttccacatctttgtcaacgtgaaactggaagtaacaaggacatcaacaattctaaatatgtttggcagtagacgaagcagtgatgtgactcgattc

SEQ ID NO: 230760 - DNA, 254 bp, Glycine max
  unsure (1)..(254): unsure at all n locations
agctntgcgaaaagctngccgctggagctgacccattaactgccctaactcctttagactagtggtccctaggctcttgaccttgacttgatagaacctttttttaagtgaaggcatttgacttgatcacatngtttactaaagtgagcaaaaatcggtgcgaatcaaaactctaacatttatcatgggtggaattgatgaatgcatgaagatatgcatatgacacagatgcgtattatgaatacgggagcccg

SEQ ID NO: 230761 - DNA, 412 bp, Glycine max
  unsure (1)..(412): unsure at all n locations
tgatgacaanaactcaaagtcaagatcacttcatgataaccaagatgatgacattcaagaatgagttcaagaatgagtccagaacacttcaagggatcagaggaattttgatttccagaattcagaatcaagattcaagaataatccagatccagatccacgactcaaagattcaagaattaagagaagacttaatcaaaataagtattaaaaagtttttcaaaacattgagtagcacaagaagttttcacaaaatcattaccaacgagttttaatctctggtaatcgattaccagattatagtaatcgattaccagtgggttaaaacattaatattttcacaattcaaaatgaagagtcatatctattgatgtgcntatcgatatcagcgactggatgtcaaaaaatcatt

SEQ ID NO: 230762 - DNA, 377 bp, Glycine max
  unsure (1)..(377): unsure at all n locations
ctgcagcttaacttcggctgtgcatactggtgaataattgtggcacagtagaacttgaataatcctccagggttactcttcttagctcttcagccatgattggatcttcaacaggttctatatgagaatgccctacaataggaaaactagaagatgccttggaagatcaaggttcttcttctggagttgctgttgcttctaaatactgcaaaaaaaattttgattctctctgaattacgccttctacaagtggcattaatctccaaatcattgggaatcaaatcacctgcagtagatcttctttgcatacaagaaaacagaacaacaattatccagttcanaagaacaatgaatgtacggtaactaaaatatgaact

SEQ ID NO: 230763 - DNA, 372 bp, Glycine max
  unsure (1)..(372): unsure at all n locations
gagaagtgaagtagaatatggttcagccccttaggcacatctctctctctcgaaatagctgaggaaaattagttccgtgaagaaaatacaagccgaggcacttccgtaacgtttncgtgagtaattacgcgaagattctcgaccgttcttcaagattcatcgttcgttcttcgttttcttgagtcttcaacgggtaagtacctcacaccaagctttttaattcattctatgtacccgtggtggtccacattntggttcatgtatttntattctcgctttcatttaactcttatacccccttttgacgtgcttaagccatttatttaagtcattcctcgcttaatctaaaaataaaataaatntccaccgatc

SEQ ID NO: 230764 - DNA, 390 bp, Glycine max
  unsure (1)..(390): unsure at all n locations
agcttactntaagtatttctaatatttctgttgtgggaattcttttgtatntttttaaagcagattcccattcttttatactttnttttaaacaagttagaacctattacttccaaagccagtggaaggccagaagcataagttactgcacgttgcaagacctccacgtaatttggatcagctttttcctttttaaaagctttccatgtaagtaactgaagagcatcgttctcatccaattccttcacctcatatgttgtaataacttgatgaggtgctagcaattgtttgtcccgagttgtgatgatgaatttgctgccgggaccaaaccaatctggtctaccaacaattgcctgtaattgctcgtgcttgtcaacatcgtctagaatc

SEQ ID NO: 230765 - DNA, 472 bp, Glycine max
  unsure (1)..(472): unsure at all n locations
ngaggaatcttacggaatcgctagagatgtcactatctctactgtactacacacgtgagttcgcttagaggtaagtgatgcgtctatcgcaattggggttcaaatgaacagttctctagcttgctctatcaagtttaacgattaaagcactcgtccatgctaaaaatcctaactatacatacaaatgggtgatcaagccacaagcatgtaaaaatcagttggatagaagccatgaacacataacaacaacattaaatagatagtgaaagaatattacatcaaagattcaacagaacttcccaaccaagaggtttagccttccattacaagtaatgagctttcaatacaaaggatatatcttgagggaataaaatggctaaaaatggatgaggatgtcntccttcacctctacaacnctaatcttactcctctaacctagactctcttggtggcttcgttctgtcgctctact

SEQ ID NO: 230766 - DNA, 411 bp, Glycine max
  unsure (1)..(411): unsure at all n locations
agctngtatatttcattntcatctgatacattatctacaaagaaagagtaagagcttggaagaaccaaaataaagcagttctttcatgacaatgactgaaggtatattttgattctattttccgcatttgttaatgacttgtgtttcatttttgttgtttgtaacatcacaggtttgatattttagtcttacaaggattccaaaggttaacttaatttgccatttttttatcacattaattcatctccgataataagtgaaaggacaatgatgtgggcaaagtgaaagggtggagaaaattaaagctttgtctgaagtagctactntgtatgggtggtacatagaagatgggtaagtgttctttaaaattagatgaattgcctttttttgagtccatgcttttgttcacat

SEQ ID NO: 230767 - DNA, 379 bp, Glycine max
  unsure (1)..(379): unsure at all n locations
tctatgatcaatcaagattataaagtggtgccctanaagatactgtctccattntttaacagcaatggtgattgtagcgagttcacgaacataagttgaagaagaaagtaacttgcggcaaaactgcttgctaaaaaaagctatcgggtgtcttccttgggacagcaccgcacctatacccgaacctgaggcatctgtctccaccacgaaaggtttcgtgaagtcaggcaatgctaagactggagaatgtgtcatagcatgcttcaatttgttgaaggcaacatcagcttccacggtccagtggaactcttccttggtcaacagacttgtaagtggtgttgccaacgttgcgtagctccttataaatcttcgataaaag

SEQ ID NO: 230768 - DNA, 239 bp, Glycine max
  unsure (1)..(239): unsure at all n locations
agcttaacctctataaaagtttcttctcttatggtctcanatatagccacttcttgtgctaacttaccaacttgaatatctagacttttagatgctcgttgagtagattcaattgtttctttgaattgcatcaacaaattatccaaattagaacttctttcttctggatattgattgtangggtgtaactcttgctcccactgataattttccatggagtagctcttgtcaacctgaat

SEQ ID NO: 230769 - DNA, 403 bp, Glycine max
  unsure (1)..(403): unsure at all n locations
tacccaanaactcgtnctcgntgtttgctaatttcgttggggattccatgcgacggagaccgcgcnacctccttctcgtctccttactctccattctcaccttcgcttcattctccctctacctctctcgcaatgccatttccacttggcgcccctactccgacctcagaaaattaaacgccgtcaccaaccacctcgtccttcacaacagaaacaaaaacaacatcttcaacaatcaattctcacgccaaacacggcgggtgtnctccatcaaggacaccttattatccaccgtctccgttctcatccccgactgggagattctcgtcatcgtcgcgccaaacacgcccttantcctctgcgacacaccccacttgctcttcccaacaatgccagctctccg

SEQ ID NO: 230770 - DNA, 168 bp, Glycine max
  unsure (1)..(168): unsure at all n locations
atttgtgcccctgctattctagaagcatggccaaaagtncaagtgctggctgattatcctgtaccttctagcatattggtgaggtttgattcctctattgaagaccaaacggttagttaataacatagtcgtctatatgatgctctcagctttccttcttatgaatat

SEQ ID NO: 230771 - DNA, 347 bp, Glycine max
  unsure (1)..(347): unsure at all n locations
agcttgtattattgttctaccagcatattaaaaccatcaattntctttaaagttggagaaaaattgaaattntataaatatttaattgtaatcattcttttattatctatctaatcacttaaattcaatttttgatttggaatctcttttgtctatatcaaacaatctcaatctttgttcattcctcatatactttcattcctattcattcatatcaaccaaacacaccttaaagagaaccagctcttcaacgttcctactcagagagaggtatatcctatcctttctttatttcccatcatccggtgattaagtgagaagtaattttacattgngcttttgtcctc

SEQ ID NO: 230772 - DNA, 432 bp, Glycine max
  unsure (1)..(432): unsure at all n locations
taactgaatggagtcggtgttggagaggagttcttcgttatcttcttggtgttgngaccatctagtatgctcataatgtaacattatgttttctataatgattgattaagtgttctaattaaatctgtagagtaactaaatttaatttgcgtgtcgtaatttgcggcgtttatagttaatgcttttgctatgcttatgctcatgcttaaaccttattttacgcgtgaataatacgttntaaagtggttggaccgacgtaagtgggccttgactgataaggatgagatgagtgagtttacaaagtgaaaatgtgagattacaaggaatacgaagagtcacacactcaacatacagggatttaaatctgaaccagatcacaaacactctcattcctcctcaagacaactcacaatcagagaatgtgagtcactg

SEQ ID NO: 230773 - DNA, 310 bp, Glycine max
  unsure (1)..(310): unsure at all n locations
agctttgatgatgttgtcttcaccgatgaaaggatcaaagtangtctaaaaagaggcaaatctgatcatcatgctttgatacatgccaaaaaaaactagggcaaatgaagagggtgagaatgagggagaagcccatgctgtggctgccattcctatacagccatgtttcccaccaacccaacaatgtcattactcagccaataacanaaccttcttcttacccaccgtctagttatccacagaggtcatccctaaatcaaccacaaagtctgtctaccgcacttccaatgacgaacaccacctttagcac

SEQ ID NO: 230774 - DNA, 261 bp, Glycine max
tatgtcattctcgctttaagaatagtatcccactggtaaaactaactttccaaatgtttgccttcgcaggaaatggccccgaagaagcttgcctcatagaggtccactaaggacaacgcagcacaacgaactatttccgctccggagtatgatagtcaccgctgtatgagcgcggtacaccacccagcgcttcgaagccatcaaggggtggtcgtttcttcgggagcgacgcgttccactcatggacgacgagtatactga

SEQ ID NO: 230775 - DNA, 328 bp, Glycine max
  unsure (1)..(328): unsure at all n locations
agctngtagaatggctagacatgatacatgtcatggtttggtttggttcaaggataaaaagggatgccccacattatttccatgacacaaatgcaaaaatgacgatttggaaattttatgcaaaactggttatgcatgcacctatgcggacactcaagtgtcaaattnttatggtcatgtgatgctagggctcaagaattcatttctctantttagtcaacccaacgtttccaaaatatgttcttttatcaatttgtgcattcatccgagtccattttgggcgtctgggaaaatcttcacagcattcacccttcaggtgtatacacat

SEQ ID NO: 230776 - DNA, 443 bp, Glycine max
  unsure (1)..(443): unsure at all n locations
ntagcttcttaaggagagtttctcacagaagcttctcaaggaagttttcttaagaaagcttctcaaggaagttacctagtctataaataaaagcatgtgtaacacttgttataactttgatgaatgagagtcttgtaagacacaactcanagttcaacttctctccctttttcttccttcaatttcgtgctccctcctctctttcttttagcaaatgctcacccccccctctaaaatttaattggattgggcttcttccaattcaattaaatntattttcaaccacacacatcaaatattcacttaatgcatgccaaattagaaaactacccctaatacaaaaaactagtctaggtgccctacaatacaagagatgaaaaatcttacatttctagggtaccttaactatattgtggagccctaaatacacggccaaaaataat

SEQ ID NO: 230777 - DNA, 193 bp, Glycine max
  unsure (1)..(193): unsure at all n locations
ctaagcttaacaatttcaagggagaaattccgaaggagctagcacatctttaagaccttcgctagtcttatctccatgaagaccgttaactggaaagaataccaacagaaatgggcacactggaaaatctttcgcactttgtataaatcaatcattttgatantctcttaaatcagagtacactatttatatc

SEQ ID NO: 230778 - DNA, 339 bp, Glycine max
  unsure (1)..(339): unsure at all n locations
tagtcaatttttnttctattaatttcaaaaagtnggcattttttaccatcaaactaatatcttcatttaactntcttttttttatgaaatatactntacataataataataatgaaggtcgattgtattatctaaagagattgtttggntgaaaaaagaagataatattatngttttacatttttcaaaaacataaatatccagggaatagtttatttaattatttaattattaaaaacctaaaataacaataatgagatgaaaactggcttcatatttggctataagtatgtggcagcagcagaggcaataaagttaggaaagcccttgaccccttct

SEQ ID NO: 230779 - DNA, 437 bp, Glycine max
  unsure (1)..(437): unsure at all n locations
cagtagagcaatgaaagtagaaaatctttctttcacatttagagatccatggagagatgaaagggagtgtatttttgggagaaaaataaaaagaaatgtgagtgccttagtaaataaaggaagtggaaatagcacaagccctatttttaccgccaacttgggtcacttttgaatggtgaacccgacacagtagtgggcgagttttagagacgtagaaagaggcaaatgatatatatacctcccttttccttttttttaatgaatttncttaaatatccttctcaatttattttctttattacgtttctgcttacctnccttnctctacctctctctnnttctctgcagaaaccaagccattgttgtcacgacataacatagctgatgtcgcangaaaaggattctcgagagttttggngaaaaaggattcatgttat

SEQ ID NO: 230780 - DNA, 90 bp, Glycine max
  unsure (1)..(90): unsure at all n locations
ttaggaganaccatacaaactaaggtagttcctaaacaaaaatctatggcgatactagtacagcttacatgaacagtattaatatactat

SEQ ID NO: 230781 - DNA, 144 bp, Glycine max
agctccatgatgatgaatcaagtatgattcaagtttgtttgatgatgacaaaaagcccaaaagaatgatgtcaagattgagtcagcaggttcaagatcaagattaaagaaaatacttcaagaagactcaagattcaggagaaga

SEQ ID NO: 230782 - DNA, 425 bp, Glycine max
  unsure (1)..(425): unsure at all n locations
accaatcccgacccaacccgngcatagtcagtcagtgagaatctgtgacgactanacaggcgnagctctgcagtaaccgataaagaacaagaccacaagcaggaggcttgtgtgtggctggccactatgatcttgagtgatattggatatggctctgtaatcgataaaaagggtgtgaatcgatacaaggcttaaaatggngcaggaagtgagatggctctgtaatcgattaccaagngngaatnataccancttataaaanacacccatctgaggggctttggtatcatcaccatactgctaccttctacccaacttacagctctgntacctttacatttttcttcttatacacacccaattcagatccctgctttcctgcgtctaacctcccccctcccaccaccactctccctccctcccct

SEQ ID NO: 230783 - DNA, 377 bp, Glycine max
  unsure (1)..(377): unsure at all n locations
agcttgcaagtgtaacaaccaaaagtgtacagtatcaatactcataactttgataagntagtgaaaacttgatggttgccaagaactagatgtattattgaggtcgagataatttgcaatattagagtttttggtggccgataccgatgatgttggaggtgatgagaaataatttgtattcgatggggttgagcttttaatctactcacagagaatccttaggttttaaatcactaacattncctcttcgtgagtgaccactgcggtgtttacctcatgactntggtacaggcgcgagggtctaccattcaacgtggtggcaatgatgagaacaaccacgagcagtagagcaaccaaaccttcaagtcgtaccacca

SEQ ID NO: 230784 - DNA, 158 bp, Glycine max
  unsure (1)..(158): unsure at all n locations
agctnganaggtggtactatagaggattacaaggttgtaaactaatataatcgtgcatattaactacaactgcannttaatttataagggaannattgtaattgactctatgctttgccatcttaggacaacaacgtggatgaagatcttaatgatga

SEQ ID NO: 230785 - DNA, 223 bp, Glycine max
  unsure (1)..(223): unsure at all n locations
tgtcctctgccaaccaattntccaacagatttttcttgttctgtttcacaaccaaccgcgataattctaatgattcagaggcatttcagctttccctttgtaaaaagggtcaaaatactgaacagaggaggagttgcccagcttgcacaggaacactcttgcacgtaaaggagataatcggcaccttaacattataactaattgaccaaacaaaaggacacca

SEQ ID NO: 230786 - DNA, 263 bp, Glycine max
  unsure (1)..(263): unsure at all n locations
agcttttacaaaagagnttctactctctggaatctattaccagnttactgtaatcgattaccaatagaaaattngttntcaaaagctttcaaactgaatttacaacgttccaattaatttcaaaatggtgtaatcgattacaagattttggtaatcgattaccagtgtgtttgaacgttgaaattcaaattcaattgtgaagagtcacaccctttcacaaaaatgctttgtgtaatcgattacaatggattgtgaatcgatta

SEQ ID NO: 230787 - DNA, 416 bp, Glycine max
  unsure (1)..(416): unsure at all n locations
tccatcatcatggttatcatctctctctccatcatctgttgcgctacttgagctgccagatctctccatctttaagcgtattctttgaaagattcattatctatcttgaacatattctatagttgcattctatntggagccctattagagttatattgatattgcctaatgaaggcagccattaagtcattccaagaaccgacccgggaaggttccagattggtataccaagtaataattgccacaacaagaatntnctggaagaaatgcatcaacaacttttcatctttcgcatatgcgctcattgtcctataatacatattcaagtgattctctgggcaagtagttcccttgtacttatcgaaatctggaccttgaacttctgaggataaccacatctggtaccaagaacaact

SEQ ID NO: 230788 - DNA, 177 bp, Glycine max
  unsure (1)..(177): unsure at all n locations
agctttttggagtagaaacatgggtctctactcattttatttcaaatataaaggctgtatctagncaagggctgagagaccatacaagtttcctagcgacttctaattatgtgggccattaagtctatcatatgttgacaatagccgagaagcccatgaatctctttggggcggagt

SEQ ID NO: 230789 - DNA, 258 bp, Glycine max
  unsure (1)..(258): unsure at all n locations
tgctctaaattacattgatgttcgtatttatgggaggatgttgtatgtcattcttgntctttaagagtagtgtcccactggtaaaactaactgtccaaatggttgccttctcatgaaatggctccgaggaagctcggctccaagaggtccaggaaagacatggcagcccaaggaactacgttcgctcccgagtatgatagtcacccgctttatgagtgctgtacaccaaccccncctcttaagccatcaaaggatggt

SEQ ID NO: 230790 - DNA, 52 bp, Glycine max
  unsure (1)..(52): unsure at all n locations
ctaagctgtatataagctgaaccaatttatgcaatanacacaagttgagttt

SEQ ID NO: 230791 - DNA, 92 bp, Glycine max
  unsure (1)..(92): unsure at all n locations
gcttcggaattcaaggtctaaactttctatggangccgactcggcgcaaattatcgagacactcgaaatagacaattcagctctcagaatat

SEQ ID NO: 230792 - DNA, 442 bp, Glycine max
  unsure (1)..(442): unsure at all n locations
taagaaaaagatggcctcagcaaattccttatttccagaagggtattctatcaatagacctncaatctttaatggagagggttaccacaactggaaaacccgaatgcaaatttttattgaggcaatagatctaaatatctgggaagccatagaaatagggccttatatacccaccacagtagaaagagtttcaatagatggtagttcatcaagtgaaagcataaccatagaaaaatctaaagatagatggtctgaagaggatagaaaatgagtacaacacaacctaaaagccaaaaacataataacatctgccctatgaatggatgagtatttcanagtttcaaattgaagagtgctaacgaaatgtgggacactcttcgataacacatgaaggaactacagatgtaaaaagatctangataaatgcactaactcatgagta

SEQ ID NO: 230793 - DNA, 351 bp, Glycine max
  unsure (1)..(351): unsure at all n locations
ctgcagcttatgtaagtcaatttaggaggcatctcggataggatcttttccgtgcatatttgcgcanaatctcttgaactaggaagatgttgtccatcatctttctgttcttaatgaaggcagtttgagtttccccaataatagtctcaagcactggggctatgcggttgaccaaaattttagacataatcttgtataacaaattacaataagatatgggtctaaaatgggtaacctgggagggctaatcatgcttaggaataagtgcaataatagcatggttgatctgctntannaattttctagttgtaaagaattcattaaccgcctcaaagatatcatcaccaatga

SEQ ID NO: 230794 - DNA, 396 bp, Glycine max
  unsure (1)..(396): unsure at all n locations
tgtctgatatgccttttataggctttgaaagtgccgagaaatgagttgtgttttctgcattttttggaaaacgtgatgaactcgctaagcgagaatgctgcgctaagtgagttcatcaatactcattgtatataagctttatctgaagaactcgccaagcgcacttactgcgctaagcgagttcattccttaaggatgaacattcatcctcttgctgaactacctgtggctaaacccaggtaacttaaccattnttttttgtgataggcgcatgctaagctgagcattcctgagccaagcacaattggttggactgtagcaatttctgctaagcggctcttctgtgtcgctaagcccaatgtcgtttttgtgaaggccccgctcagcgaatatgtc

SEQ ID NO: 230795 - DNA, 356 bp, Glycine max
  unsure (1)..(356): unsure at all n locations
agcttatgcatnngaaagtggtttgatcaatntctcagatactttatttaaaagaaaagcgtatgatgnaacaatttgagttacagtatcacgtaaactaagattatcattcaggatctgttttctcatccatgccttgcacagttggttggtcatgactcatgatatgattgtaccttntaggaatgataggtttttgatataaatggccggtaagactcccttagtgaattgaaaaagtatctgatccatggcatgttagaatgtgtttacaaccattggtgccaatgatggcngaaataacaatgcatggttaatgaatgggattttnggatgcttgaaagcttacaatcata

SEQ ID NO: 230796 - DNA, 458 bp, Glycine max
  unsure (1)..(458): unsure at all n locations
ctgctacttcatcctgacaganataaatctgatggtgcagtggctgctttcaagttgattggtgaagctaacagagtgttgagtgaccaaacaaagcgtgctttgtatgacttaaagtttggagttcctgtgggaaatacagcagctaaggttccacctcgtcacccaaatggaaatgcttccgggatgggatgtgatggcactgcaagaaattatcataacagtctttcttcacaataccaagcttggaattcatatcatcggactgataatcagacattctggacatgttgccctcattgtaatactagatatcaatatgtcataaccattntaaatcataccatacgctgtcaacattgttctaaatnctttacagctcatgatatggggaaccacaacgtgtcaccaggatattggtcaccatttaataaccagaaagagcctccaaacatgca

SEQ ID NO: 230797 - DNA, 307 bp, Glycine max
  unsure (1)..(307): unsure at all n locations
atatcatgaaactaccctacacctagagaacagggtagaggcagagaactctacccaaaacacattcaaattccacagctttccttactcatataccccagtaacattctcttcgttccgattcgttaaccgctggatcgccttgaaagttctactagaggttcctagtacataaatctacattttgaccgttgggatctgctaaaaacggcctggaacccgaaatgtactattcttcccatgactagcaatgcacaagcnatttctgcacatgtngaaaaattctgtgcacaatcaacaagcattt

SEQ ID NO: 230798 - DNA, 336 bp, Glycine max
gatgaggaagtgttgaagggtgaaactctctgctcttattgttgaccacagagtggtacctggagatatgtcgcgggggtcatgagaccttggggacgtcacgtggggcgctattgcccaaaaccaagcttgaccaatcccgacccaacccgggcatagtccgtcagtgagaacctgtgatgtacctaagcaggcgagctcctggcagtcaacagatcaaaggagaacaagaccaccaagccaggaggcttgtggtggctggccagctgtgaattttgtgtaatatgtggattgtggcctccggtaatcgattaccaaacgtgagtaatcgattac

SEQ ID NO: 230799 - DNA, 329 bp, Glycine max
  unsure (1)..(329): unsure at all n locations
gtcacctgaggctgcaagctgcacaagatatttnntttgccgacattgttgcaatttttatttatgtgncagcaacgccggccaataatagttttagtacgatcaagcacattctcctttttgatttcgctcagtaataggtttaccatcgaggtcgcctggggtatttcgtgggaactcaaccgccgttgtgtttcggttgacattggccatccttgatagaagaggcaaagaaaaatatagccgaccatggcggcagaaaaaattctcgacaaacttggattaaaaacaattctagccgacatcggccaagaacgattaccggtcgc

SEQ ID NO: 230800 - DNA, 423 bp, Glycine max
  unsure (1)..(423): unsure at all n locations
aagcttacaagatgatgccgatcgaactcgttctaaccgacatcatgcttatttcgttcacggattgaattgcaaacttaatagccgacattgagcacattttttaacaactctctctggcggataataatttttttacggcagaggaaggtttcttgttttggtgttgcataaaaaatttacaatgtacgccggctatgtttttttgtgcgagctcaaccgacgttatgtttctgccataccggcatgttgccatttattctgncaggacaacatttgcccatcttgacaaaaaaatattattcaccgatattgataagaaaaatgacagtcgaccgtggcccggaaagatgaccgatcgacgtctaaaaaagacgctacacacgatgatgccgatcgaacatatcctaaccgacatcatgg

SEQ ID NO: 230801 - DNA, 475 bp, Glycine max
  unsure (1)..(475): unsure at all n locations
acctgaggcatgaagcttgaggattatggngtacccatcacatgtggtactaggtggtggtcgggcaatggtgcacaacaagttttccacatccacaaatcgcgcataaacccaccatcccctgttgcccacctccaactgagctcacgtactcccacgtagcccatatcctcgtttctctcaacaccgggtccccatcaatcctcccaatctttccccaacatccaagtaactcaacattcaaacaacacaaaccatcacagccaagaaaacagggcataggcagaaaattctgcccaaaacaccaaccaaaatcacagctgttctcacttataggccccangaacaattccttcgttccaattctttataccgtggatcgaactccaaactttactggaagtctctagtacataagcctacantttgaccgttgggatctactagcaaacatgcagaactcattctacattac

SEQ ID NO: 230802 - DNA, 425 bp, Glycine max
  unsure (1)..(425): unsure at all n locations
tggctagacatgatacatgtcagggtttggtttggttcatagattataatggatgccccacattattttcatgacacaaaatgcaaaaaaatgatgatttggaaactttatgcaaaactggtcatgcatgcacctatgcggacactcaagtgtcaaatttttatggtcatgtgatgctagggctcangattcatttcctctattttaatcaacccaatgtttccaaaatatgttcttttatcaatntgtgcattcatccgagtccatttctggcgtccggggaaatttcacagcattcacccttcaggtgtagacacattttccaaaaattggttatgatcaatgaactttcttttggaaatcgtctctcttcaaaagcatgtcgttctttagctagacaacttattttctttttttctccttct

SEQ ID NO: 230803 - DNA, 329 bp, Glycine max
  unsure (1)..(329): unsure at all n locations
agctnntacatcaaatttagtaatgatccaataactctagaattaaaagaacttaaagccactaacctagggaattaaaagaacttaatggccgagtgtaactaaaattgtggcaaccaaaagtcaccttcagcagccatcaagccagccaccatttggtctcccaaaaggctgatgcctaggttgccaattgggcccttattacaacttgaaccaaaccaaactaaagccttttagttgattaacccacaacatatttttggtcagccaactttacaaggattgagccattatttagacaaactanacactctanaaatgagacaaag

SEQ ID NO: 230804 - DNA, 483 bp, Glycine max
  unsure (1)..(483): unsure at all n locations
nggagtntncagngccaaancgnnctcttccttagttcagtcttcttccggcttcaattcataaatgggctttgcttctgtgtgcagcattttgggaagttcccagactttgatgacagctcttcaggttctgctatccaatgatttgaagaaggccatcattcttgctttccagtattcataagtggcttcatcaagaattggtggtctgatcactggtccgtcttctttctccatgttcatcagaatttatcttcccagatctcactctgtgatttcgagtgttggctctgataccaattgaaattctgataccacgggacagatgtcgtacaggatgttacgacatcacgcttcataacatgcacctntatgtgtgtcccgatgaacagcataaacaacgtataacacaacgagaaattgtttactcacgtcggtgctatctccactacatctagtggcttcacaccatcgacgagaacg

SEQ ID NO: 230805 - DNA, 270 bp, Glycine max
  unsure (1)..(270): unsure at all n locations
agctngcatctgcccaaacctcttttctcattgcaccatcatcgcccttaacaccaaagctatcatcctaatccatgtcgccaccacatcgaaccatccttgtgtcttcgcgttntaatttttttgttgtcattaacttccctattttattttatttttagtggaacttgggtgagtttaatatactatagtttctttgattaatagtccaccacatgtaaagttttgaaagcattcgtaacttatgatattggtaccaaatcttagact

SEQ ID NO: 230806 - DNA, 367 bp, Glycine max
agagaggtgcaagtaaggaagcaagtgaagttggatatttcgattggaaagtacaatgataaggtgttttgtgatgttgtttctatggaggccaaccacttactcttggggagaccatggcaatttgataagacggataatcatgatggtttcaccaacaagatccctttcacgtattaaggaaaaaaagatagtgctcaaaccattgagtccacaagaagtgtgtgaggatcaaagaataatgagagagaaaattcttcctacaagagagaacatgagaaagagagctaaacacttgagagttcaaaagtgacgacaataagagggaaacacaagagaggaaaaagatgagtgaaacacttgaagt

SEQ ID NO: 230807 - DNA, 382 bp, Glycine max
  unsure (1)..(382): unsure at all n locations
agcttaccttgaatacagtacgttgcacagcgcgtcaacagccaataaggcacaatgaccctaggtggcgatggtgccacgacaatgtaccctaggttgcgggggtgccgcgaacaatacgcgacgcagaggtagtggagccgtgacaatgtacccttccttttgcggagctgacagtggtgcgacggagattgacctcaacaggagacaccgactaatagcacaataattttcagacactgaggacgatgagtacgcgtgttcaattatcgcgcaagggggacatatatatatgaaaccatgttaacgacgatgtatttctanacccgtctttgacagtcgatatgtctacaacggtgtttacaaatacaccgtctttgat

SEQ ID NO: 230808 - DNA, 403 bp, Glycine max
  unsure (1)..(403): unsure at all n locations
tttgattgctctggtagagttcccaaacgtcaaagagaatgagaagggattgaagcctncattctgtactgtcttcgtgcaattntgttccctctctccgtggatattagtaaatcccaacagtgaaggtgtgtggaattgaatcgtgaccaacatatcaaaattttacgacaatccaatggttaacgagttcaggatcgtagttttaccgagacagttttggatttctgcgggaaaagaaaaggctacgatgcgaactgtatttctctcagctccgacatgatttcgaaattcccaatggtgaaagtgttcataattgagttgcgaacttggtatttaaatttcacgacgatccaacggtgaatgagtctgagattgtcatttctctgagatagatttggtg

SEQ ID NO: 230809 - DNA, 301 bp, Glycine max
gcttctatataagctgaacccatttatcaataaacacaagttgagtgttattcagaaaattagagtttatctcttttatcttagtgagagtgattctcctaaattcttgagtgattcaagaacaccctggctgtatcaaaggactttcacaacctttgtgtgttgccctcgctggaaagagtgattctttccttcctttcatcttcacccttgttctttcaaatcacaattccagaaaattcacccctgcccagaaatatctcgtggccataactcccattttacgcactcaaattaagtg

SEQ ID NO: 230810 - DNA, 416 bp, Glycine max
  unsure (1)..(416): unsure at all n locations
tcctctaccgtanaananatattatcggccagcgtntttaacaagaattgcgcaatgtcggcagaanaatatcagtcgtggctatataacgaccgatgtcaggtatttttgtttcaattcaatccctgaataatttttggatattgtccaatacgaaatgttcgatcggcgtcatcaggtgatgcttgctttttattttagacctgctggatcggtcatctttcctggccgacatcgactatcattctttttatcagtgtcggtgaataatgttttttggccgacgtgggctgatgtttttctagccgagtaaatgagaacacgccactgtcggccgaaacacagcttctgttgagctcgcacganaaaacaaagccgacctacattgtaagttttgtaggcgacaccgaacaaca

SEQ ID NO: 230811 - DNA, 410 bp, Glycine max
  unsure (1)..(410): unsure at all n locations
agcttgtaggattatggggtacccatcacatgtggtactaagtggcggtcgggcgatggtgcacaacaagttttctacatccacaaatcgcgcataaacccaccatcccctgttgcccacctccaactgagctcacgtactcccacgtagcccatatcctcgtttctctcaacaccgggtccccatcaatcctcccaagcttccccaacatccaagtaattcaacattcaagcaacacaaactatcacagccaataaaacagggcaaaggcagaaaactctgcccaaaacaccaaccaaaatcacagattntctcacttaaagaccccagtaacaattccttcgttccagttcgttaaccgttggatggactcgaaatattactggaagtctctagtacataagcctaca

SEQ ID NO: 230812 - DNA, 382 bp, Glycine max
gatgcaacatatggagaggttaatgaaacaacgagatgatgcgctccatgagagggtggatcaaatggagaatagagatcataatgaagaagaaaggaggagaagagggaatgatggtgttcctagacaaaaccgaattgatggtattaaactcaacattcctccatttaaaggaaagaatgatccggaggcctacttggagtgggagatgaaaatagagcatgttttctcatgccacaactatgaggaggaccagaacgtgaagcttgccgccacagagttttccgactatgctcttgtgtggtggaacaagctacaaaaggagagagcaagacatgaagagccaatggttgatacatggacggagatgaacaagatcatg

SEQ ID NO: 230813 - DNA, 116 bp, Glycine max
  unsure (1)..(116): unsure at all n locations
agcttatcataatctattacatagctcnttttgagacaatgnagtgatttttaggagtctctactntaatcgattacttctctcttaaaatgtgcttcagaagtgatcacaacttt

SEQ ID NO: 230814 - DNA, 462 bp, Glycine max
  unsure (1)..(462): unsure at all n locations
tgtaatgtggctgcgttatcaaagaaatcatggttnttcttggaattcaaagcacttaagggtattatgagagcactcactatatccctttttacttatgaggcaaccaatctttcatagatttcccaaatttttatttacgataaaagaacaacaacacaaaggatctttttgtgggttctcattctatttccactttcattttcaattgttttttccaacaattttcaactgtgtgctgcttgtttttacaagaaatccctgcataagatatttacaaacatttctctcccccaaatttggaaaaaaatttccttaaaccgcaagtaacgctcttctattccctaaggtaaagtgaacataaattcattctagttcaagtgttcaagaacataattcattcacttgtattaagctcagagggggattcatcattcatcacacacaaatgttggttttttg

SEQ ID NO: 230815 - DNA, 284 bp, Glycine max
  unsure (1)..(284): unsure at all n locations
agcttcaagagatcatccnctcgacaacattattggtgatatctcanaaggggtaacaactagacactctcttaaagatttatgcaataatatggcttttgtatccatgattgaacctaaaaatataaaagaagccataatagatcataattggatcattgccatgcaagaagaactaaaccaatttgaaagaaacaatgtgtggaaattagtagaaaaacctgaaaattatcctgtcataggaacaaaatgggtttttagaaataaattagatgaacatggta

SEQ ID NO: 230816 - DNA, 415 bp, Glycine max
  unsure (1)..(415): unsure at all n locations
gctgaaccatnttatcaataaacacaagttgagttttattcagaaaattagagtttatctcttttatcttagtgagagtgattctgctaaattcttgagtgattcaagaacaccttggctgtatcaaaggactttcacaacctttgtgtgttgccctcgctggaaagagtgattctttccttcctttcatcttcacccttgttctttcaaaccacaattccagaaaatccacctctgcccagaattatctcgtggccataactcccattntacgcactcaaattaagtgattcttgagcctaaattgactttcaaaacgagacctttcacctcgttttggaataacctcatttggagccctgtagcttcagttattgccatttctatatttctggtcagccaccacttaacctac

SEQ ID NO: 230817 - DNA, 196 bp, Glycine max
  unsure (1)..(196): unsure at all n locations
ctttctcgtcaattctagcatttcactcacacttacctactanagaaactgaagtagcaactgatctcattattcaacaacaacaagaggcaaggaaaaggtagactactctcctgcacaagtaaaaatgtgagcatctcttatatgcatagcaaaaacaaacccttttatagcacgaattatcctcactatattt

SEQ ID NO: 230818 - DNA, 501 bp, Glycine max
  unsure (1)..(501): unsure at all n locations
cgcgtttggccatcattagtgacactatagatactcagcttgcgccatgagacaccgatccatgtgangcttcatgttcttgctgtgattacgagatggaattgagtgcccttcccaaacatacctctccttggtttatctcaaaaaccctatatctgccatgcttaactggaaatggcgagatgccatggtgaagaagaacgttatgatgttcacattaaaaatttcctagcgaaagacgaaatatgctgattattaatgttgggctcatttatgcttgcgtttatttttattatctaagtacttattgtcatgcgatattttcaataattaacacggggggggagatgaatattaagacatatcttgagtagatagtcattttcgcccctggatgtgaagaacgttaacacaattgtcttcttatgtgacacgtacgctctntcattcacacgtacgcaaatataatcacccctagcatgataccttcttctctcacan

SEQ ID NO: 230819 - DNA, 509 bp, Glycine max
  unsure (1)..(509): unsure at all n locations
ttattgggccctttgtcgcgtgatcttgagacacctgcggcatgcatctatctcatggagcatacgagctgcaagaactacatgctatatcaactccgacggaatgaactgcaacccatctgaagttctatagtagcttacctactgtaagaccaggcgttgtattctttctcctactcaagggcttttgtcccgaaagagaacaatcacggttttggcatgataggttgtaacgacgctgccctggggagcgattgaanttgctctcatagactacattgaataagagtcgatctcccttcagctatataatctctcgggcgaccctacgaggctcatccatccgcgtttgccttgtgagcctcgcacacgcggatgaacacttctggtgcatctcaagagctgccaactaaggtcaccttgtgaatgcgatcttaacgctgtacaccctggtctccataagaggtccatcttcaagtcgtacactaagtcgtcttggagctcgattc

SEQ ID NO: 230820 - DNA, 320 bp, Glycine max
  unsure (1)..(320): unsure at all n locations
ccttaccgcctcaataaacataggctaatcagcaggccaatacccaataataagtaaaagttgcaactccgaatgaaacattaaaatctatgtgaatcanaatgcagaaagaaaataaagtagtctgattaccctcttgaagagcctcgatggttgactgcaaatcatggcggtctttgtctaggctagacattttctttctgcaatatttattatgaaaagttattttgatataccccagaaataaatatattaaaattcccgagaaccatcaaagaaaggagatgaagagctgacagaagatcaaattccgtcagaat

SEQ ID NO: 230821 - DNA, 377 bp, Glycine max
  unsure (1)..(377): unsure at all n locations
tgatattgtcacagaatacacttgaggcacctcctccatttcatccaccccacttgaattctagtcgcgcattagttaaaaaggtgtatatttttacagcattgaggagaaataataatcaagggaataatcattctattttcaaaataataattgttacagctgtcatgaattactagtagttagttagagggggtaagaaaataaatatgaaagactgacagagggaggagaataatatatgtaagaagagttggcctctcanagagctaagttaggattgatgcagctcttgctacttcatngtatttgataaagaactatccaacgaagaaaagtttgacttatgtgagctcaaattggatggactaatcact

SEQ ID NO: 230822 - DNA, 173 bp, Glycine max
  unsure (1)..(173): unsure at all n locations
ggcaccactggttactcccatggccaagtttgatccagaaatagtccttgagttntacgccaatgcttggccaacagaggagggcgtgcgtgacatgagatcctgggttaggggtcagtggatcccgttcgatgccgatgctatcagccagcttctgngatatccgatggtat

SEQ ID NO: 230823 - DNA, 112 bp, Glycine max
  unsure (1)..(112): unsure at all n locations
ctgaaaatatctaanaatctcaccaaataaaggtccttctccttcttggaaggtaccacaggatatggtacttccatactttcggtcacaactttatcacctctactcctct

SEQ ID NO: 230824 - DNA, 213 bp, Glycine max
  unsure (1)..(213): unsure at all n locations
agcacttcacaaacttgcctaattaacttgaaattgagagaaaacgattattaaacacacaaaatggaagtattaagtatttattacctatctttaacaanaagtatttacaacactacaaaataaccataaattggaggagtgtgatacaattcacacaagtgttatacacaacagttagtcgtattcatcgactaacagttatggtataca

SEQ ID NO: 230825 - DNA, 412 bp, Glycine max
acgtgcatttgtgtgcaatacacaattccttgtacaccacaacaaaatggtgtatcagaaaggcggaataaaactttaatggatatagttacgagtatgttaatcaattagactttatccgtatcctctgggatgtataccttgaaaactgccttgtagttgctgaacaaggttcctagtaaggtagttccaaagacaccttttgaactgtggacaaataggatacctaatataaggcacctgcatgtttggggttgccaggcagaaataaggatttataatccgcacgaaagaaaattggatgcaagaacaatcagtggatatttcattggttatcaaaaaaaaaaaaagttaacagggtatatgtctgattggtctaatcatagtatgagaactttcaaaactggaaatg

SEQ ID NO: 230826 - DNA, 451 bp, Glycine max
  unsure (1)..(451): unsure at all n locations
tttttgttcactttctatctcatattttnnaccatctgatgtctgactttacggatctagccctgttcagtaattacgcgaatatgttttattgcttttgcaaacggaaaattggccaataagatgggaaaacattttgtttatatccattgttaagaataatagctcctattgggctcatgtaacaaacgagggttagactgaagaattttcctttgtgtattatcaatatgtctaacgacatacatgacaaaaaggtgaacgtaagaataatgtcaggagccatgtgcactaacacatcccagtatgaaacttcatgagaaccactcttagtgactgcccccacaactcttgcgatgtgtatgtctacgtgaggggaacaaatatgataaatggtggattcgagggatcttaatttttatcttctttagtcgacgtgtatatttattcg

SEQ ID NO: 230827 - DNA, 444 bp, Glycine max
  unsure (1)..(444): unsure at all n locations
tgcttcttgaatatcatgataagtagagttgaaggcacaaatccttgaagggttttggtgaatcctttctccagaaggttatgtctatagtcgtggaacagtagaagatatatgtagtctcttgtttatataaacttctccccccaaacactcttatgaaaaagaaataaaagagataaaatgaattgagtttttctatataaaaaaagttaaaattaacttacgcacataagtgaagttctcttgttttcagntcattttatttcttattttgttttcctaatttatccaaatatcaaagtgtattggtagaagaaagactcagttgctctcatatcanagctaatggaaataatagagttctgcctccacttacatgactaattaatgcaactatntttattctaaataatcataatttagaatattcttttatggtttatg

SEQ ID NO: 230828 - DNA, 433 bp, Glycine max
tctaagcacctgcagctgcagcttgaggattatggggtacccatcacatgtggtactaggtggcggtcgggcgatggtgcacaacaagttttccacatccacaaatcgcgcataaacccaccatcctctattgcccacctttaactgagctcacgtactcccacgtagcccatatcctcgtttctctcaacaccgggtccccatcaatccttccaagctccctcaacatgcaggtaatacaatattcagacagcacatactatcatcaccaagaaaatatggcaaaggcagataactctgcccaaaacaccaaccaagatcacagtttttctcacttaaagaccccagtaacaattccttcattccaggttcgtaaccgttggatcgactcgaaaattttactggaagtctctagtacataagcctacatttt

SEQ ID NO: 230829 - DNA, 471 bp, Glycine max
  unsure (1)..(471): unsure at all n locations
tggaagcttagagaaagctcgaagatggtttgtcttttacatgctcaactcctttgagtggcatttgtgttggttgttatagtgaatgttgcattttagtccatatcatatcttttgtgcatcatgcatcattatgagtaagtgagaagaacatttctaaagttagaaaagtctcttcagaaggcaacactctttgttttaatcgattacaaccttatcataattgattacacaagttttcttaagcttgcagagttatgtcttgtattagtttaatcaattagagccttattgtaattgattacacaattgtttttgagaaaatgattgatttattcacgagtctttgctttaatcgattatgttgtgatataatcgattagttctctttctataagtgtttcagaactgaacaagaacactttaattgactacttngagtatctagtcgattaaattggtcttgagcta

SEQ ID NO: 230830 - DNA, 575 bp, Glycine max
  unsure (1)..(575): unsure at all n locations
aacccttcatttttcgcattcttcgctattattcctgttnnccnnaattcatattgtgatcttgaaacctcagatcgagatctctaagcacctcagcatcaactttccgtttagcctctctttaaagatctatcggtcttaaactgggaaatcgctctcctgccttaaataatgcaaaaactactacggcttccgattacgataacaatgagggagaaacccatgctgtgactgacatttctatattgcaagtctccaccaagccatcatagtcattactcttccaatatcatcccatatccttaccaccacccattattcacaaaggccgatcctaaatgtaacctacaaacccacctaccacacaaccaatgctaatcaccctctttatcactaaccaaaacaccaaccaaaaggaattttgatcatatagcctgtaagatccacccgaaattccggcgtatatgcttacttgggttcatatctactcaataattcaatggatcactatccctgtaaggttccaacctcccttctccatgaaacatctgacacacatgtctattcttgaggcc

SEQ ID NO: 230831 - DNA, 470 bp, Glycine max
  unsure (1)..(470): unsure at all n locations
cgagatccttaagtcacctgacgcatgcaagcttgaagggaccactcacatttttactcccagtatctcttctaacaaattctttcttcctacacctatactgaccgctcctttcacaaccaattaacacaaatgaactccttcctccactaccagtctgtgtgtcagaccttataatgactgcaacaaatctattttcatgagcaactgatcgagcccactgcaaaacatcatctcgggtatcaaacacctacaacgtaacccaaaacaatttagttttctacaacacattcattntatcaaatcactcacaataacgaacattattacctaagaagtattaaacgcatccgaacaatcaacatgtggttcgttcacaccacatnctttgtcatttgatcatccatatcaacttcttctgacttatattgcatacatcatcgacttcgtcatctaaaacaaaaaatttt

SEQ ID NO: 230832 - DNA, 321 bp, Glycine max
gcatgtgaacacttgtctgaactctgatgaatgaaagtcttgtgagacacacactcaaagtccaacttctctccctttttcttccttcaatttcgtgctaccccctctctctatctctcactctgtcttttcctacattgaagcatactctccacgcttcttatccaaggctcatcttggtggtgaagctacttcttccatggcttattacttaatggatggcgcctacccttacctattgtactttgtcttccgctgcatctccatggtggaaaatgaccatctaaggaccccattgaagctcaaagattcagcctccat

SEQ ID NO: 230833 - DNA, 371 bp, Glycine max
  unsure (1)..(371): unsure at all n locations
tgcgctngttntanattcccaggatcatgagcaactaggtgcgttctactataaaaaatgatcaaatagcaggcagaaatttaaaaggtactacgttgcctcctagtagcgcttctttaacgtcttgagctggacgcatgatggcttgtaggtcatggacctaatactttgcttacctttggctttggacttggtcgcctgctggtcggccatgtgtcgtaggcaacgctctaacctttttgcggatgagctgaggtgaactctataggtgatggcggtgcgtctgttgccgctgccggccatccacaggctgctgtggtgtttcgccctgcgcctgcctggagacgcagtacttcttgatgaaagctcga

SEQ ID NO: 230834 - DNA, 362 bp, Glycine max
  unsure (1)..(362): unsure at all n locations
tgtccttggtttagacatgattggtacatgatttgngacttgtatgattcaatttaggcaaaattggatgagggaaagagtggttttcgaaatctgcactctatgcagaattttgttgctgaaatgtgcagcacaatnttgtacaagagtagaaaaatgcttgtgtatggctggctatgaaaagggtagtacatatgtggttatggacattntctatcagatcccaacggtcaaaatgtagacttatgtactagggacttccagtaaaattttcaagtcgatccaacggtgaacgaaagaaatgttactggggtctttaagtgagaaaaagctgtgattattggtgtgagttttgggcagag

SEQ ID NO: 230835 - DNA, 347 bp, Glycine max
  unsure (1)..(347): unsure at all n locations
acattaatattgattaggtaaccagtgactcagcgagtaagggtctctttcgcgaacttagtggagggtgaactaactcccttgccaataccaccaataaaaacacgaaaggcaatatgaacaaacttttaaaaataattctaaaagtaaaagtaactttttaataaataaaaagtttatataaattccgagagagagagagagaaactnanagaaaaaacggagttaaacattacaggttaaaaaaaagtcctaatccagaagcagagtggaatactgaaatgtattaagaaccaaacaaatagcaacttgcctttgcacatacaggaggttcaacatgacataat

SEQ ID NO: 230836 - DNA, 508 bp, Glycine max
  unsure (1)..(508): unsure at all n locations
gattgccatctttagcgccttagatctcagctatttgcttgaaagtcaaatacttctaaagaataaattaattgatggaatacatatttaaagactaatataataaccgtggatgtatattntaagaattaagtgaattggttacttgagaaaaaaagggagaaaactatatttggtccccccattaattttcaacacattaatgaattccggttcccggtttagtcatatgttagcattcccggttgaacttgatgtaatcaatttgaaattttaagtggatttggtcaacgaaaataggatgaagttattaagaacaatttcaaccagtacagtacttaagacttgagaagtagaatttggtgatgatatatgtatttacccgaagtggttctctgatattaaacgattgtaaagcttaaatttagntcttcctgtcagtaccaaaccaaacgaatagtttccgacacaaaatatatgcacaattttttaattaactctttatgat

SEQ ID NO: 230837 - DNA, 317 bp, Glycine max
agcgtctcaatatattacgggactcaatcagacatccgagtaaaaagttatcttcgtttgaattagctctgaggttcagaattcaatttcgagcgtctagatatattacgggactcaatcagacatccgagcaaaaagttattgtcgtttgaattagctcagaacttcataattcaatttcgatcgtctcaatatatttcgggactcaatcagacatctgagtaaaaaaggtatggcgtttgaatttgctgagagcttcaacattcaatttcaagcgtctcgatctattacgggactcaatcagacattcgagtaaa

SEQ ID NO: 230838 - DNA, 361 bp, Glycine max
ggtgtctcattggacttgatatcacttcaaattatagaccctacagataatattacccttactaggaataaaaaactaggtgatggactgaatgtgaaccaaaataccccacaacacagtattcctatttgtctccaaaggtgagcctaggtggaattgggccttatacacttgactaaactactaagccttttattgataacccaaacatattttggtcgccactttacaggatgggccatattagacaactaaacacttaaatgaacaaggggcattatctctcatggctaacaataactgattttcttaaatgctgatcaaatatgcacatgtgaagtctgttctgtacctgaaactc

SEQ ID NO: 230839 - DNA, 535 bp, Glycine max
  unsure (1)..(535): unsure at all n locations
taattacttcttatcggggtactatctatattgtaaaatataannnntnnaattttgatgaacttgaagcggatctaagcactgagctgcaactcatatatcctatttgatttgagagattaatggttaattcaatctaaaatttaaaatatcaagcatttaaatatattgaccccactgtcatctttgactgccagaaggggggttggaaggttcacaataaattagcttgattcataactttgaaataccaaagcaattaccaactcgcatgattcttatttccctggattaatataattgtttgactatcatacttgccatgaaaacagtcacgtttttattcttgctttaaaaatattgggatcacaactatttctattaatatttttgccctcttaccaaataaaaaagatatcttgcttgtgctttggtaacaagaaaatatattatactcttgttgcgtgtgaacgtgaatgcccccataagtatttaactcattgacacactggattattatataatccactcttct

SEQ ID NO: 230840 - DNA, 452 bp, Glycine max
  unsure (1)..(452): unsure at all n locations
agatgaaaggaatagctggtgggcatgacattgttcctcagcatgtgcatataatgcaccaaagcctgctctgagtagcaacaatgaacacaacctctaatcaatgcctttgaaaccaaaacattatgattttgcacgtttgccaaaactgaagctgccaaattaatgcatgaaagggttgaacatgcacttataaattgattcaccaagaagcaatcttgggtggtattagtcttgatcatggaggcatataccgattctagtgattntgggctgaaacatctctttatgtggcccagaattgtgtctttgagagtgagtgtgtacattgcagtgttgaacaatgtgttctggaatcgactatntacatnttgattaaatctggtattctcagctaataagcatcgcatttaacaagtggttaagagcggcaacgatataaatctctaaat

SEQ ID NO: 230841 - DNA, 585 bp, Glycine max
  unsure (1)..(585): unsure at all n locations
cctcattacactntcaacgcgancataatatgttgtgagcttgtgaataatannnntnntagtacnngngtagtgaggcatgagcnctggattcttccatctatctgcacgcatgccagctngagactatgattctacttgctcaagagatcttatagatgtgttccctcttgtattgtggcttgagtttagtggtaagagacccttttctttcccctctcatcttctattttcatttgttcgtccatgagcactatcgggaagtaataaaattgaccattctctaggtcttgatgtgctttatgctgggtttttggtggtctggatggtgtgcatgatgcacaacggttgtgtgagtaggagaatagctttatcctggacctaaagcccctcaatcccctttctttcttcttctcataaacatgtcttgattttgtaaggtatcgaagcttaaccttctttacttatgctggtgtgaaccttgtctcgctccttatagctctctaacttgacgttcttccgaaatgacaattagttagggttcatgtatccattgagtgcttgtccacatctcacctcactgcg

SEQ ID NO: 230842 - DNA, 580 bp, Glycine max
  unsure (1)..(580): unsure at all n locations
gtagagccacatacantctcctcatnctcaactcacgcttntnngnnnaanattntnncnnnnaccccccccggccctcgtattcatgcantgcagacacacannanantcaancnnttgacgtatgagtccctttcttccactcctactccataaagagttctggtgtcaggtgcatatcaaaacggatanggcaacttgggcatttcaaatccctgccaaaccagataaaacttcacggatttaagcactattggaaaacccagcgccacatatatcaatccttgccatcagtgataacctgcctagaaaacagtatatcacaaactcctacaacacaataataatgggaacagcgaacctcacatacgctttaccaagaatgtgaaatggctagcacgtaacgatatccgcattttaaatatcctgcagcatatagctgtgaagcatgccttaccgaaagatctgagactgcctatgtcgtggcctgctcccaacgaaagcttccaattaacatcactgctgaaagaatactggccgccattaataaagattattacagctgtcaaagtgaatcacg

SEQ ID NO: 230843 - DNA, 394 bp, Glycine max
  unsure (1)..(394): unsure at all n locations
cttataatcgattaccacaagttttttaaactttntataacatcctctagaaatttgaatttaaattctaaagcttgcaatcaattacaacttgtgtgtaatcgattaccagacatgagaattcaaatttcaaatctgaagagtcacaactcttcagaaactaactgtgtgatcgattacaacaattatgtaatcaattaccagcaaggaattgtcgaacataactcccaagagtcacaactgttcaagaagttttgaatggctatcaaggtctataaataggtgacttgngacatgaaattctgaaaaagagaatttcctgacaaattgtctatcctctcaaaccaaattgcttatactctcaaaagaattcttgtcaaacacttcaaattaa

SEQ ID NO: 230844 - DNA, 478 bp, Glycine max
  unsure (1)..(478): unsure at all n locations
ctaagcttgaaaaaatgtttgagggtagaaaacatcaggtcttgaacttctgtgtgaatttttgggtgaatttctcaaccccttctctacaatcaccagcaactcgcttagcaccttctttgattccagatccaacttcaagggcacttagctgcaactcactggctgacttgcctacctttgagatggcagcttctccaaattcttcagcctgttttcctgttntgcatgccccattcctcacatttgatattaatcgggaaaccatgtgaatgattntatcaagggtatctctagactttcctctgatatctgcagccatttgtttgagcttgtccaataagctctcggccctgtcaactgttccttgaaccgagacctgctctgaggcattaagccatgtcacttcagccgaggcctncttgcggaggtcatcatcaactaccactnntgattccatgcctctccaacgatctct

SEQ ID NO: 230845 - DNA, 343 bp, Glycine max
  unsure (1)..(343): unsure at all n locations
tgagatcatctgagtcacctgacgctgcaagctttatttatttcatacagttaccgttgtaatcggacaaaattgtagctattcttttttagatatggaaaaataaaacactagtggtaaagctagtgtgttggttgaatgttttctcatgatgcagaaattattaattgattntggcatccatataaaaggagaaacaaaacatagagaaagtcaacacagatcaagggggctgtattctgatttatcttacactctattaaagcatagtaggacatagttgaagtttcaaagggacgtcatataacatgaaccgcgtcaaaatcattatgttattatgcat

SEQ ID NO: 230846 - DNA, 279 bp, Glycine max
tacttttcgtaatgctgctacttgcacgggaccctatctaagcacattatcacaaattgtgaaacactacgatgtgattgcatcctaattaaatctgacttcatctttttacaatctagttcacatatgatctcatcaggacggctccacaagaataaattacttacttacaaagcgcatgtctagttttcccatttatgtttcacaataacttcatattatgaatccaacaaaatgtatttatgctttttgcaccacattatgattgatgaatgttat

SEQ ID NO: 230847 - DNA, 293 bp, Glycine max
acactgctcactatcgatggcgatgttctacgtttctatattattattattattattattattcagctatctagataaaatgaatatcaattgtatctaagttaatcgtctaagctttttacaagatcaaggaattattctatgcaataaaataattgtcttacttaaaagaaagtgttaatagtgttgatacattggagcaatcattgaaaatttgcaaacatggattaactaaactcctctttttctcttatggatgaaatggataaaggtctatttccagggatgtcact

SEQ ID NO: 230848 - DNA, 427 bp, Glycine max
tgagtgttacccgttgaaggttgtgttatctcccagcaataactgtaccggaagattggttgctccttgtgattgttatgtagtttaatatgtgagtaattatcatatgcaacatgcacctgcgtgtgctttgtacattgctggtcttcaccctatttataagaataataagagacaaagatttttttaaaagctatctataacacgcccatgtgtcttgatctgataagtcaatatatgctacgtaaaaaatactatataattaattctgctgcattatgaaactattggaaattaattaacaaaatgtggtcattcatcattttgtttgagcctctcacaatccttatcacacgttgcttgaaatctgttcagtgcttatttagtctgcccattatacatttatatatacagagaagcctaattg

SEQ ID NO: 230849 - DNA, 472 bp, Glycine max
  unsure (1)..(472): unsure at all n locations
taatggcttctttagattctntgtctntcanaagttttttcatgtatagattattccaagatcatgatgaagacgaagtcaatttgtgtctcatgacagaatctgatgagaataacaaagaagattctataatgaagaaatggtacatagacagtggatgttctaagcacatgacgggtgatgtatccaaattcacaaccatttcccccaagaaaagtggacatgttacatatggtgacaacaacaagggcaaaattattggagtaggtaaaataggaacgagttcttctactcctattgaaaatgtgttacttgtagaaggtttgaaacatagtctattaagtgttagtcaattatgtgataaaggatataaagtatctttcgattctgaanaatgtgttattaagcatgagcttgacaaagatattgaacatatacgttttagagaaaataatgtctacatgattgatct

SEQ ID NO: 230850 - DNA, 316 bp, Glycine max
cgacaatacatttcactcggaagtccgatttgagtccgaaatatatcgagacgctcgaaatttaaaaccgaagctactagcacattccaacaacaataacatttcacttggaagtctggttgagtcccgctatatataccggacgcctggaaattaaaaccgaagatcggagcaaatctgaacgacaataacttctcaatcagaagtctgattgagtccagtaatatatcgagacgcttgaatttaaaaccgacacttgaagcaaattcgaacaacaataacatttcactcggaagtccgattgagtcccgtcata

SEQ ID NO: 230851 - DNA, 329 bp, Glycine max
  unsure (1)..(329): unsure at all n locations
agcttcanacttcattccatccagtcactttctcttttcttcactttccatggcctctctaaagcactcaaattctctatcatctgttaggatcacatactcattaggagaatacctcttagaaaggtgtctctcccagttggacctcctaagttgaacttgaggtgattcggtagcctcaccgagaatttcatcttgtgacatgtcatgctcctcttcatcatcatcatcaataggaacatatacctcatctccaggttgttggacaccaacatcattctgaacatcaatattcaaattctgaataggcggctaaactagttgaaaat

SEQ ID NO: 230852 - DNA, 276 bp, Glycine max
  unsure (1)..(276): unsure at all n locations
agctngcgctcattataatgagatggagggagaatctgccaagacgtcatacactatatttatcatcacctgaatatttatataatgtgcccccttgattcttttgatagggacaaaaatgtatgaattgaaatcaatacattatatntaatctcattggtttttacttgctttccctgatcagcacccatccttgagagatcagcncgagaaataaagactcatcctcataccctatgatctacaatagttatgtttgccatatgtttctcattg

SEQ ID NO: 230853 - DNA, 458 bp, Glycine max
  unsure (1)..(458): unsure at all n locations
tgtcatctagcacattatatagtggatacgtactgcaaaaagcctgcatatatggttttttaatgcattccaacttgcattgcaaccatttgagggaccctttcatcaaagatatgaaattattgacactcaaggggtcggcatctcccactccatgtaccttgatttaacttaaaactcaaggatcaccacacttttattgtagcagctgaaatccatagcatgattttttttcttagtgatgctgcaaccctttactatatgaacccatataatataagtatcatttttttttcagtaacagtgacttgtatgtcattatgaatgagtggttataatatatgggaaatcatcaaaatgaacttgaggcaggaaatgaggaacatgatgatcaaatcaaanagggaattcattgctnntattacaaactaaaacatcatggtctggcttaactctta

SEQ ID NO: 230854 - DNA, 262 bp, Glycine max
  unsure (1)..(262): unsure at all n locations
catgcaagctnntcatttcatatttcgaccatctcgaatattaccggactcatccggacttccgtgtataaacttattgtcaattcaatnttctcagagcttcggatcaaaattttgagcatcttgatatattacgggactcatttagacatccgagtaaaaatttattgtcgttagaatttgatacgagcttccgttttcaatttggagcatctcgagataaaatgagaccctctgtcgggcatcccgaaaaaacgttatt

SEQ ID NO: 230855 - DNA, 386 bp, Glycine max
  unsure (1)..(386): unsure at all n locations
ctgagcaaatcgaaatgacaataactntatactcggatgtccggttgagtcccgtaagatatcgagacgctcaaaatttatatccgaagctctgagaaaattgaattgacaataactttatacacggatgtccggttgagtcctgtaatatatcgagacgctgcaaaatgaaaacggaagctcgtaggaaattcaaacgacaataactttttacttggatgtccgactgaatcgggtaatatatcgagacgctcaaaattgagactagaagctttgagcaaattgaaatgacaataactctatacacggatgtccggttgagtcccgtaatatatcgagacgctctcaatttagatccgaagctctgagaaaatcgaattgacaat

SEQ ID NO: 230856 - DNA, 125 bp, Glycine max
tgtgagcatagtttccaaacccttataggaaaataggcgatcgctccagtgctagttttgcttaacctgagagaaccctctgaggcgtattgtgatgcatcaaagatgggcttaggacgactgtt

SEQ ID NO: 230857 - DNA, 356 bp, Glycine max
  unsure (1)..(356): unsure at all n locations
ataaggtctcgattcaagaggtggattcaacggaggaagagcatatcacctgtacttaccaaaatntggagttggcacatgtcagagtggacgtgggtaacgtgcgctcctaaacttcacatgttggactgatagtgacctttgttagaaggacaagaggggggacttgtgtaacaccctaaaatatcgcttattataaatcaatatttaatatatntatcgnngttattgattatatgattgacttgaatgagtttaggtatggtgtgaattaatcatgtgtgaatttcttgatgtgaatgtcgagttatgtggagtttattgacctaagttgaaatatgagaattaaatttacc

SEQ ID NO: 230858 - DNA, 410 bp, Glycine max
  unsure (1)..(410): unsure at all n locations
tgctatataaagatctacatataaatgtcctctctgttacanatacattctttctactcatgtgtacagaataattttttatctttatgtgtgtcttggaagaaagaaagaaggagacaaatcaaattactccattggttgctgcgttaaagatttaagactatcaaagccaagttatgaatgaactttgtgattttcatcaaatgaatgatatttttcctgtttgttcaaatggcaatttattctttatcgctagatctangaccttacgttatggtgggacaatcaatttataaaatacaaactaataattattattatgaacagagtgacacattacggataggtggtttaaatatacaaaattagaggggacacaatatacatatccactatatttatatgtactt

SEQ ID NO: 230859 - DNA, 495 bp, Glycine max
  unsure (1)..(495): unsure at all n locations
ntgacccgtgagctcggctcctntcatgcanctgcggcatgaagcnttgcttcctattcttctctgattnntcttttcttgctgncagatgccctttgtgtttcaactttattctttaaacaattacacattctctctctttggctaataatccgttgggattacacggttctccaatttttttatttaatggaaaaaagaacctttcagcacgtaaaggctgtttttctttttaccccacccacatccactttacaatgcttatcattagatttgacatgccacatctaggagcttcttatacattaccttttttgcttggaaatacacctccttttctatattatcctcctattcaaagataacaccttccacttactgactccatctttttttttgtttgtatgtaccgatactcacaccccctacctttcttttgtcctttcaacatacattttcttttcttttattcacatacatcctacctgctacacc

SEQ ID NO: 230860 - DNA, 541 bp, Glycine max
  unsure (1)..(541): unsure at all n locations
cggccgccncnnnnctactcctttgaangcgatactatagacactcaagcttggctctagccatcagaaaccatctcattctcaacttcattcatcttgtagtaggtatctcgatcaagtgagtgctttggtggcttcaaccatttgagatggtgatcttctaaataatctatacccaatttcaaggtactggtccttataatcactacacaattggcaagtagcattgaagaaccgacccaaaataaggggaatttccgaatcttttcactatcaatgacaacaaagtncgcagggaaagtanattgctgaccctgactagaacatcatctatcatgccatacagcctcgtaatagaacgaactgccaacctgcatgtgtcattcttcttggaatatatttaactctctaattctcctgcacactgcgagaggcatcaaatatatgttgggctctaagtcaatgacggctttaccaactgacactggaccatacagccctcgattgtacatctccctgatcctatgttaagcggacgacc

SEQ ID NO: 230861 - DNA, 204 bp, Glycine max
  unsure (1)..(204): unsure at all n locations
tacattcctgggaatggttttacaaaacttatatcaaaagtggtaatgtgatattcccaagtccacattcccaggaagcttgctcaacacaccttgaaacaagaaccacccaaatgttcaaaacttacctaccaatttccaacagactcaaatcanacagacaaatgcagcaatttgcaataattaatttacctttaaacgatg

SEQ ID NO: 230862 - DNA, 420 bp, Glycine max
  unsure (1)..(420): unsure at all n locations
gcttgagcactgagtgaagcttctgtgaatattactacatatatttcttgcatgatactattctncatatgtaattcttcagtgctgcatctaaactcactcacaatatcttcaaagaaacatttatatacatcctgaattattgaaacttgagtatgtgcatcctctatatcatccttaagcttctgaatgggttggaacaaatttttctgtgtcagttggtgctgtgaacaattttccacagaagcagaaagctgggaagatagactcttaaattcctttttcttatctgatagtgtgtccttcagttgatgattctccgattgtaagaagtccaatctatcctttaaactgctaagagattcaatggtttcactgaatggatgtactttctcattttcatcaacggattcattcaat

SEQ ID NO: 230863 - DNA, 332 bp, Glycine max
  unsure (1)..(332): unsure at all n locations
agctagaggaaacccttcgcattgtaccttttatttcccgcaaaacccaaaactgtctcagaaaactatgatcctggatttgttaaccgctggattatattcgaattgngatatgttgttagaaattcaattgcacaaactttcactgttgggatttgcaagataatatttgtggagggagaaaaatgaatcacatgaagatagtgcaagtggagacttcaattccttctcattctctcntaacgttggggaccctatcagagcaaccagaggaatctcaagaacttgttatagatgtctctattcgctgcggaagacatgtgaacccgctt

SEQ ID NO: 230864 - DNA, 374 bp, Glycine max
cttgagaggaatactagagaagctagagcttatttacatacacctctctaatagctaagcgcacctccttgagatgagaagctagagcttatctacgcatcccctataatatctatgctcacccccatgccaaaatacatgaaaatacaaaaaaagtccctactacaaagactactcaaaatgccttgaaatacaaggctaaaaccctatactactagaatggccaaaataaaaggcccacaagaaggaagaacctattataatatttacaaagataagcaggctcatacttagccaatgggcccgaaatctacctcaaggctcatgagaaccctatggccttcccttggatctctggcccaatctacttggag

SEQ ID NO: 230865 - DNA, 347 bp, Glycine max
  unsure (1)..(347): unsure at all n locations
agcttgtatgctngcactagttctttggctntacacactaactcagacaaaatggtgacccaatatgcttctcagttcaagaaaaccatggntacattcatcattgacttttggacaaggaattcagggaagtaacaactagttgcaagtaaaacttacatattcttaggaaagaaatgagcttgtacccttggaatagatctatcttctacccaaatgagaattttgagagcagctctagtggcattggattacatgtgtcaatcgnagaccagacatgacacataacccacaccgtaggaaataacatcaagcataaatacaggagggagttgatgttttatttt

SEQ ID NO: 230866 - DNA, 451 bp, Glycine max
  unsure (1)..(451): unsure at all n locations
ntgagctctgttatgaatccaagtaaaatgaaaaaattttaaactttaaagcaatagctttgaattcagtcattaagagagaagtgagaaaagaattattgcttgaaatgattattgtttctgaagaaaaaggcaaagctagtaagaaggcattgaacaaaagggaggattgttagtttgtcacagtgaagcacctgaacttttaaagtatattcactgtatttaacgagaaatttaaggaaaaattattacgtagttntggattaccactcgtttatgttaatgtgagaccgataaaagttttttaaattatgaaaaaataattaataacacttgattaattttatgctctacttcttagatgatttattttattttgcgtaatcggactaaaaatcactgccctaaataaacacgtctgaatcaatgaactcccaattaattagaatac

SEQ ID NO: 230867 - DNA, 261 bp, Glycine max
  unsure (1)..(261): unsure at all n locations
agctagacgaaagtagttgagtaatatatcatacttcaagagnaaaaattactcaacctatanttgtgagtcatgatngaaatgagaatttgacaaaagtatcgaattactcgagtaacataataataagtatggttttcacaagaatttgtgcaataattaaataattaatagtaaattagatattgacgcgtgcaatgcatagattaagaaatatgtaaatcgtatgattagaattagaattatttaaataaataaatc

SEQ ID NO: 230868 - DNA, 296 bp, Glycine max
  unsure (1)..(296): unsure at all n locations
ctgactcacaatattggtgtctatacaactgatgttgtttgtggttatacaacattnggttttaccaaaaaccgatgtcggttatcacaaaacaacatcaattntttagtaaaaatcgatgttgttgtatgactgctaacattggttttggtaaaaatcgatgttgatatgaagatatatgactttctttatatttcttactatataacatcagtctcttaaaaaatcaatgttgtcatttttatgttaacatcgatgttaacagtattacttttaacgtccgtactctttacatc

SEQ ID NO: 230869 - DNA, 88 bp, Glycine max
agctcgtaatggtaagataagagcatcacacagtcttctaataagtataagaaaaactataagtataaaataaagtagatgtacccta

SEQ ID NO: 230870 - DNA, 443 bp, Glycine max
gagatcattcttctccacgtaaggcgtgtagggagactcaaaccctataacgggatgcgtcggctcaaagggctctcaaaagaagtaatgccaggatatgccatgtggctagaggcctataataacataattgcctaaaccatttccaacaatgcatgtgacacttgacacatatccaagtaactctcaattgctctcttttacacaagcactaggtgtctatcctctcgaaaacatatatccttctcctttactctaacgtcgaatattgaatccttactcttcttcctccttcatgatcttccatttgctttctaccaggtgatccttctctctttttctcgaattttattctttactctcctcttaccgtccattttatcttctattctaccctttctcgctttcttttttcttcttatttcatctctctctcctctgcc

SEQ ID NO: 230871 - DNA, 424 bp, Glycine max
  unsure (1)..(424): unsure at all n locations
cgcatgcaagcttattgatgttattgcttaatttattggtaatttgttgcgtcttttgacctatgtcattttcttctccggccacaggtatgccaggaatgactgcttatgctggtttctttgaggtaggttctcccaaaaaaggagacactgttttcgtttcagctgcctctggtgctgttggtcaacttgttggccaatttgctaagttgactggttgctatgttgttggaagtgctggaagtaaagagaagggatttgtttaattattgttggtatatgtccctggataaacgaataatcagcttaaatgttggatatttattctactgcttaaaatactattattttgaattaacctaattacaataacagccaccanagccttttctataatgtagagttgaattggcccaattatatt

SEQ ID NO: 230872 - DNA, 131 bp, Glycine max
  unsure (1)..(131): unsure at all n locations
agctcgaaggtgttgaaatctcattcttccaaattcttttctcacaaataatctgtctcaatntagccaatgaatacctttattatgattgctgcgctttcccacctgagaaattcatatttccctaattc

SEQ ID NO: 230873 - DNA, 260 bp, Glycine max
  unsure (1)..(260): unsure at all n locations
tctatataagctgcaaccatttatcaataaactcaagttgagttttattcacaaaattagagtttatctcttttatcttagtgagagtgattctgctcaattctcgagtgatgtaagaacaccctggctgtgtctaatgactgtcacgaccttcgtgtgttgtcctaactggagagagtgataatatgcttccttttatcgtcaccctcgttgcttttaacctcaatttcacaaaatncacctctgcccataattatttc

SEQ ID NO: 230874 - DNA, 348 bp, Glycine max
  unsure (1)..(348): unsure at all n locations
agctntaactagttttctcttgcttatacttgaacctatcttggacgcacaagttcgtagaaattgtttttgagaaaactattntattaagcttctgagcaattcctacatttaaaccagcttttgtgaatatccaattttcactatgttggtcttagcatagttatttctcaattgttgaaaaatggttttcgataaagtattgaagatttttcttttaatagactattttgactaagcgtcaaaatataatcttttggcttattgtacaatgatagaagaaatgaagatttgaaaagcatcaagacaatagaaggtatcaacggtggagattgaagatataagtca

SEQ ID NO: 230875 - DNA, 309 bp, Glycine max
  unsure (1)..(309): unsure at all n locations
tggaatanaatntataaaggaatgattaattgtctaagtgttgagctcatattgacctagcgtctaaaggacacatttttcaatggcaacttagttagtgcattacatgtgcttcttaacgattagcgcccaacatatggataatattactctaaaagtaggcttaatactcaatttgctcccttagtttattagattattttaagtgctcaattaggtcccttagttttgagtatgaaattgggtccttctgtcttttgagtatgcaacaaanaatctctcagtcaatggcgcagaggcaccatcgga

SEQ ID NO: 230876 - DNA, 453 bp, Glycine max
  unsure (1)..(453): unsure at all n locations
ttctagctgttctgctttctaaacttggtctgtagatattttccttgactctgttttttacaaaaaaatatattgttttagctcttattgtcttttacattaaggcttatgcaaaggtgtctggtgcacctgcctctagtctatcaactgtagatgttagtgcagaggatttctatggtaaaggctatgatgacagcgataggcgcatccctgacatgacaattatcaccaagcagcttgggattcaacaaaaattcttttaaatatatgtatttttcagcagaattttaacattgctcttaatgtgtattcttctgggtttcagcttggaagccaaagacacttcttgaagaactgttagatgtaaccctcctatatcaacaccagacatattctcgngctatcgaaagagaactttcaaaaccgtcagaatgactactaattctcttggag

SEQ ID NO: 230877 - DNA, 440 bp, Glycine max
acctcagctgcaacttaagaaggccaactcctttttatttattcagcttaataagtggctttgtcgtgcttacgcgcttatcgcaactctgaaccgcttaacgctcattaatggatttcgacttaacgcgtgcttgtactgaagtctgcactatttggagacacttatctaacataaatacacaactcatccttcttccaaattctttcctccgcgcttcagccataagatgtgtctgcgctcacgcggatggcatctgctaagccacacattaattggctctacgcgaaagaggtgaataatcaacaccctcacaaacctcgctctaattaaccttgaatctgagagataatgattattaaacacacatgatggacatactaagtatttattaccttcctttacagaaagtaattacaatactgcataacaaccattaa

SEQ ID NO: 230878 - DNA, 439 bp, Glycine max
gcggatatggtcttcactggcaaaaggatcaaagagggtctgaatagaggcaaatttttttatcttgctttgataaaaacgggcaaataaagagggtgaggatgaaggagaaacccatgctatgactgccattcctatacagccaagtttcccaccaacccaacaatgtcattactcagccaataacaaaccttctccttccccaccacccaattatccacaaaggccatccctaaatcaaccacaaagcctgtctaccacacaaccaatgctaaacaccacctttagtacgaaccaaaacaccaaccaaaaaggaattttgtagcaaaaagcctgtatgattcaccccaaatttcagtgtcatatgctaaacttgctctcgtatctactcgataattcaatggtagccataacccctgcttggtttccttaatctcca

SEQ ID NO: 230879 - DNA, 449 bp, Glycine max
tcgagtcctctctatagtctatccaaaaaattattatgaatattgcttcttgttactggatgagttctctgaacaattttgtatctctctaatagtaatttttctgaaacttaaatttggttcgtatgtcgcacttcctctccgtttttcttatagagaaagctttgtatgaagttcggtcaattttacgtcatttggtattgtgaaatattcactatgaatatggtttttaaataattaaattttgattgaatgagaaattttacagaagtaatgtaatatttcgcacaaatttaaaattctccaataaattttgtttggatattttaagcaactattttgttaaatactgaataactcgtaacagggtatttgaattgccagatatagtgcgcatttggatgtaaataataaaatgcagagttgcactcttctttttgtcccaaccc

SEQ ID NO: 230880 - DNA, 413 bp, Glycine max
ttactcacacaatgaattgaaagacttatgttgatagatcatagaagaaatatccagaggggcatttcatagtgataatctaaacaggggtttaacaattcgctggaattagtcaagacaaccttatgctgacttactttgcatgcagttacccattttaaccatatttgaaagaatagttttacctgaactatgctgacggttgcatatgtcacatggtccgagaaatctcctccaggtggcgaaacagcaccaacaattgtcacactacctgtacgttcagggcctcctagacattctaccttcccagcacgttcatagaaagaggctaagcgtgcgacatagtatgcaagatatccactatctgcaggcatttctgcctgtggaagacacaattacatcaaaatacattg

SEQ ID NO: 230881 - DNA, 453 bp, Glycine max
  unsure (1)..(453): unsure at all n locations
tagaaagatgaanataaggaggtcatccacttatgagagaaacaaatttggtgagaacaaaggttgttgtcttattaaaagcaagacaatattttcgcaaatgtttaactctaagccactcctagctttcacaagcaaaaatttgaatgattacaatgattcactcaaagagtgaatagatagttaagcttgaatacaatgaaggatataaaatgtcttctattttttccttccttaaatttcaaatgttagtgattcaaataaagaaagatataatttaaatttgaaaagtgagatcatgcacttccctttgtggctaacagagactttagtacctatgttggacgtcatttgtgaggatataaaatgagtgtgtaagtaatgttatgtctagtgaatgtaagcaagaacaactcagtgtgtaatgttcgaactcggcaagtgcaccggatc

SEQ ID NO: 230882 - DNA, 435 bp, Glycine max
gtgatcttcgccatgtgtgctcgagaagactgtatgcttaattatcaatctagctcgtagattatatttaattatttaacttaatccttatatgttctaaagaactaatttgattctcacagccttacaattaaatcaatttgatctctaaatcattaacttagtaatcaaatctttaaaagttcgattatgaaatcgactctgctttatcataaataaagaaaacttccttctcaagacaaacaaaagtcctttctaagatgatttatcacacaaatatatatgtatatatatatatatatatacttgtttttttttcttttttaaaattataataactcggatccgtgcacccgtttgctaaatacatatcgttgctaacatattccagcactttgaatgccaactcttgtcgatcacctgacgaggatctat

SEQ ID NO: 230883 - DNA, 313 bp, Glycine max
cacattttcaaagttggtgcatgatctcttgcatacttgataaatattgaatgagtgtccacacacgcacaatcaatacaggtataggttcttctcatattagatacaattgaggttatctttaatcctttatgtgcatgttgaatgagtgtccaaacactgttgatgcatacctaccccgcaagggcattggatagaagactcccagaagatagggccagagatgcaagagaatgccctatggtctcatgagccttatggtcaattactggcccatgggctaagtatgaacccactctatcttaaggcatat

SEQ ID NO: 230884 - DNA, 429 bp, Glycine max
  unsure (1)..(429): unsure at all n locations
ttacttcttgaatcttaggatgcagaatatgtgattcaacctctntttttttctttccaaactctattgcaaaccttccattcaaagattntgtatcctttaaagccatgatacagtttggtgttgaggttgggatggacaaacacatctagttgagtctaaatagaaggccttaaaggaaaaatccactttattgattgctattcaattagcctcatcaaacgtatatcaagtccggtgaagagatctatcaatctgataggctccttagtgagctgcataatctttctctattccagacatatagtcatatccttgatagacaatgactcaggcacctcataagcctctcccacatgcttaagtctgtcctcatccattatagtagattgtgaaacatcaatgatatactcattagctttagtcatt

SEQ ID NO: 230885 - DNA, 437 bp, Glycine max
  unsure (1)..(437): unsure at all n locations
ggaccctacancacctgcagctgcaagctcggaaaagaaaaggtttttatttttattacaaaaggcgctcataacctgcgaaagaaataaatagtcttgttagctcttcttaattatatataaaacaagttctccctttagtttgagctggtcttaaatagagagataatgaatttttagtgtaagttaagaggtgttaagcgctaactggtcttaaatagacagataatgaatttttagtctaagtaataggtgttaagtgctaacataaatcttctatctctaagagggtctcgcttcgaggtgtgtgaatacttgatatatataaagtgaaagtctgcacacattgctttaaagatcgtcataaatcacctacaacgatttgtaaaattatttatatataatatataatttatttcttcacgcttatcagaaat

SEQ ID NO: 230886 - DNA, 448 bp, Glycine max
cgcagacattacaatattgactaactgtgcgtgaggacaatcatcccatgctaaacgatgaagcatgagcagtatttaattatgttaagataagacaccaccacattgggttgcatgaaacctaatgtagtgtgttaagaccatgttaaaacagaactaacccatttggcatgatgggcattagcaactctgttgaatttatgcaagtgtatgataagcactactactaccatgaaagtaaccgctatttaatctctgtcactgtaagctacatggtcagagtgccaaagccataagaaaaaaaacctataaaagcttatctctacacttgttcatcttcaacagaattaaagtattatcaatccgttacctttacgcatcaatctagaagaaaagaagaatcataatgcccagcaatataacaggacttgacattcctcaatagtaa

SEQ ID NO: 230887 - DNA, 448 bp, Glycine max
tcttataataaaatctatgagataatgtgtatttttaatttttataaagacaaagagatatgaaaataatttaaatcttttctttttttatttataaaggctcaagcccatatctctttagcattataaatagaaacatctacatgaggccaaatgcatcaaacacaaattagaaaagtccgggtctagttttagacctgaaaagtaaagagagaatttgctctttagagcttcattcatcagagttgatagcagagattgatctcggtgtggatatacgacacgtagagtctttacactattgaagaaaaaaatttttgcttaaagaacgcgcatccgggtacacaaatctatttttctttatttattatagttgtatattttgaatgcaaaatatatcctactctttcagttgcaagtgttaggaatatttctatgtaactatcaa

SEQ ID NO: 230888 - DNA, 420 bp, Glycine max
  unsure (1)..(420): unsure at all n locations
nccttgagagactntcttgagaagcttccttgagaaaattcttatagaagctagagcttanctacacacacctctctgataactaagcttgcctcctttaaatgagaagctagagcttaactcacaccccctataatatctaagctcacctccatgccagaatacatctaaatataaaaaaagtccctactacaaagactagtcaaaatgccctaaaatacaaggctaaaaccctatattactagaatggccaaaatacaagcccaaaagaagaaaaaacctattctaatatttacaaagaagagtggacccaatcttggcccatggactcaataatttgatgatatacaaccattgattggccgcttcgagatatttggcaccctttgttgacaatatgtgaggtcccgagacgtgccg

SEQ ID NO: 230889 - DNA, 451 bp, Glycine max
  unsure (1)..(451): unsure at all n locations
agctttntatgttcctagttgttgtaaaaacttaatttctgtttctaaactcgcaccttcgggattttattttaattctacagactttggttttaatttactaaataaatatgaaattattggttgtggtcaattggttgatggtctttattcgattgaattgaaaagcgacactacttataattctatgcatgtntctgttgggttaaaacgatgtattgtgaatgaagattcctctatgttgtggcaccggagattaggacatgtctctattgagagaatcaagtgattagtaaatgaaggagtacttagtactttggattntgctgcatttgagacttgtgtagatggcattaagggtaagcacactaacaagtctaaaaagggtgcaaagaggagttctaatctattagaaatcatacatacagacatatgttgtccagacatggat

SEQ ID NO: 230890 - DNA, 462 bp, Glycine max
ggctacattgatgcatcttggctatagcatctttgatttatgcacttaaattttggaggcttaagtttgctatcaaaggagaagatggtgagaggactaccctatattaaccaccctgatcaaccctgtgaaggatgtttacttgagaagcaatttagagtgagttttccaaaggagtaaaacccaaaagctaagaagccactcaagctaatatatggtcacgtctgtgggccaatcaagccaagctcaccaggtaaaaataattatttcctccttttgattgatggtttttcaagataaacataagtctatttcttaaagaaaaaatcagaagacttttccgcctttaagaagtttaaagctgtagtggagaaagaaaaaggtcaaaaggtcaaagccatgaggtttgaccgaggaggagaatttacttccaaagagtttcgagagttttgtgaagataat

SEQ ID NO: 230891 - DNA, 392 bp, Glycine max
  unsure (1)..(392): unsure at all n locations
ttggcacgaaccncaatactcaatactctatctttcaatctcctctccacatcattcaatatctgtcaaccctttctacacgaatttcgtgattcatctcccttcattttcctaaaagtttgtgcgcaacactttctcattccagaaaagtctcgtgacgcaaaacttgtgacattcatctgtttcattctctgctctctttgccaaaagaatagaaggaccaaccggctgaattctttagtgtctctctcctccctttgccaaaagaacaaaggactaactgcctgaatcctttgtgtctctcttctccttacaaaagactcaaaggactaactagctgagaatcctttcgactctctccttccgcctaaacaaaagatctcacaggacta

SEQ ID NO: 230892 - DNA, 335 bp, Glycine max
actcaagctttgcgaaacgcttgtcgttggagctgacccatcaactgccttatactctttatactggtgatccttacgctcttgaccttgacttgataaaacctctttttaagcgaaggcgtatgacttgatcccatgttttactaaagtgaaacaaaatctatcgcgaatcaaaactccgacatctatcatgggtggaatggttgaatgcatgaataatgcatatgacacagatgctatttatgaataatgggagctcggcaaattgactccttttagaacaatgtcttgcgtagcacaatgcccacctatgatttataaagtgacacaaaccc

SEQ ID NO: 230893 - DNA, 226 bp, Glycine max
aacgcgagatagcactcatccaaaacgaccttcattctcttatcgcgagaatggcgttacaacgcgccttcatggacatgaaaccctagtctgaagcctgacttacaaaaaatgaagggcaaggctggaagagagctctgggatagccgcctgagttcgaaaagagaaatactcaatggcgcataacagagcgaaggagccgaactttgatctgttaccaaaaatt

SEQ ID NO: 230894 - DNA, 448 bp, Glycine max
  unsure (1)..(448): unsure at all n locations
agcttgctncgaaagcttctatggaggctatttcttttatcttcaatgaagtcctttaatggtggaattcaaccatggagatgcagcggaagataaaggagaagaggtagggggaggtgccatccactagggaataagccatggaaggaggagcttcaccaccaagagagtgtcttggataagaagcttagagaggaagcttgaatgaaggaaaaaaatgagaaagagagagggggcacaaaattgaaggagaaaaagaggcagagaggctgaactntgaagtgtctctcacaagtttcacattcatcaaacttaccacaagtgttacacaagcttctatntatagcctacgtagcttccctgagaaaattctttgagaagcttccttgcgaagctagtgttacacccctcaatagctaagctcaccccatgccataaacatgaaagg

SEQ ID NO: 230895 - DNA, 461 bp, Glycine max
ctataaaactaagcttcgtcacagatccctcatgtaagactacacccgatttagatagccctcttatgtttagactaacttaaactgagtttcatccgcagatccctcatgtaagactagactcagctcaagtagcttacgaaagtgtagcctaatttagcctaagcttcgtccgcagatccctcatgtaagattaagtttcgatcctgcttgaatcaagttctaaggcaacagtacattttccaatgctaaagtcgcctaactgtgcacacaaatgggtgatcagaccaaaagcatacaaacattaagcattgaaggaagcattgaacacagaaaacaaaatcaattagatattaggtatttacattaactgttcattagaaatccccaactaaggtgtgtagccagccattacaaagaaaccctaacaataaatgagattaaaagtagaatataatagt

SEQ ID NO: 230896 - DNA, 346 bp, Glycine max
  unsure (1)..(346): unsure at all n locations
tgcaagctntgagcaaaaacagacgacaagaactttttacttttacgtctgatcgagccccgcaatacatcgagacgctcgaaactgaatgctgaacctacgagccaattccaacgacaataacattctactcggacggctgagagagtccngtaatatatcgagacccccgaaattgaatgctcaacctatgagccaattcaaaggacaatacctttgtactcggaggcctaattgggccccgaatatatcgagacgctccaaattgaatgtggaagctctgagccaatacaaaccacaataactttttactcggatgactgatagagccccgcaatataacgag

SEQ ID NO: 230897 - DNA, 441 bp, Glycine max
ctaagctaaacatcattccgagcgttcgtatattacgagactcattcagacattctagtattaagttattgtcgcatgaattggcttacagcttaaacattcaactttgagcgtctctttatattacaggactcaatcagacatccgagtaaaaagttattgctgtttgaattggctcagaggttcaacattcaattttgagcgtctcgatatattacgggactcaatcagacatccgagtaaaaagttaatgtcgtttgaattggcttagaggttcaacattcaatttcgagcgtctcgatatattatgggacccattcagacatccgagtaaaaagttattgttgtttaaattggctcataggttctacattcaattgcgagcgtcttgatatattacggaactcaatcagacattcgagtaaaaagatattgttgctt

SEQ ID NO: 230898 - DNA, 385 bp, Glycine max
  unsure (1)..(385): unsure at all n locations
acctgcagctgccacntccaagaagagagatactatttgttttgtctggcgcgcnaagccacgtctcctctctgttattacaaattttatctacggggaaattcaattaaatttgaaagttaaaggggcccggtattggctataataatccggtcgaagcgatgcagggaaatgtcaagcataactgcattgaaaccacatgacaaagctcttctcaaaatgacagcaaatctactaagtgttctagatcatggacattcaaaggaatctggattcatgagtcaaaactcagcattcaaacatactatgtgaatgacagttccaataaaatcgaaacataatcataaacatttgtagatgacgcattgtacttccgcaagacaat

SEQ ID NO: 230899 - DNA, 378 bp, Glycine max
ctgaagcttgagcggctgcaacagcacaaggctagtaatttatgtagagtttggctgcgtgaccttctccctgataagacacattctgtaccgtatccattctctttcgtacatagagatggaggctgggggcaacgtaatttacttctcatttgaccctggatgccagcgagatcggctacacatatcggccagatctcgctaggaatttgagccatccctactcctgcctgctaagataaagaccgcccgcacaccactatctgtatcattattctcaccatgcattacatgcgaacactgtctatcgttagatcagacactacaaggaactttattactgacctatggtttcgttgcacgaacatttatgctttt

SEQ ID NO: 230900 - DNA, 398 bp, Glycine max
acctgagctgcagctgccaggagcgacgttctttttgccatttgcccactcgcaagccacatttactaactcgcgcttagcgagccaatctcgctaagcgagcccttagaatctgaaatgtcaaggagccttaaaacactatagttggcggaacctaagggaggagctgaacacatagccaagagagaacgcaaagcatcacaaacaagcctccaagagagcttaggttagaggagtgagattagggttctagaggttgaaagagacatcctcaaccatccttagtcatcttcttccctcaaaatctattctttgtgctgaaagtttattactttaatggaaggctaaacctctggctggggagatttgctgaacctttgatgtaaaacttccttact

SEQ ID NO: 230901 - DNA, 297 bp, Glycine max
cgacaaacctgtaactcttgcacctatcaatgttatcaccttcgacacctgacaacacttgtccaagcttgagggctcaacaagctcacgaccctcctacttgacaaggctctacccttgacactagacaatctctttcgccaacaagctggctcaaaacttggggggcttatgtattgtttagggtccacaaaatggatgtggcaagtgacgtggcactccattgtgcacgtcaaccctgcatgtcaacccttacacatgacaaggacggttcgcccattacagccgggctaataa

SEQ ID NO: 230902 - DNA, 461 bp, Glycine max
  unsure (1)..(461): unsure at all n locations
agcttgttgttaaacttccttgatcatgttgtcttgaaattttagtgcttgctgccttgttctagatctgtttgatgagcaattttccttgagtattttatgcaaaaaatgagttctttgagtgttaaaacataaggtcagccttaaatttcacttaaatcaaagttttctagcaaaagttaagaataaaacaagttttagaacattgtactggataaaatctatcatgaaaataatctggcagtgagaaatgtatggtctggttttattaaattttttacctcaaaaatgagttttttaggtgtgaaaatgtagggtagcatataagatttgtgaaaaaccgattcccagagcatcgagagcactgagaataagttaggagcaaaactntgtaaaattgagtgacagggtcatttaagatagtaaacaacttaacattggaaaccatgcatctggataaa

SEQ ID NO: 230903 - DNA, 438 bp, Glycine max
  unsure (1)..(438): unsure at all n locations
tnacaaaagggttggccccatattttctatacttgtagcactcactcattgagttggtgaggaaccatgttccttcatgggaagatgcctaggaaatgagttttcagaccttaccttacttcaacatactaaacaccactaatacatatgtttttgttttttttacaggtgttgaggaaaaaagcccagagtttcaagaacctcgggatttgaggtcaaatccttttcaagggggagggaatgatgcaatcataccccgcaagggcattggatagaaaactccaagtagattgggccagagatgcaagagaaggccctatggttcttatgagccttagggtagatttcgggcccatgggctaagtacgagcccacttatctttgtaaatattagattaaggtttcattnattttgggccttgtattttgggctccata

SEQ ID NO: 230904 - DNA, 449 bp, Glycine max
  unsure (1)..(449): unsure at all n locations
cttgcaaaaacacttgggtttgcaacagattgtttcatattgttaccacacttgacgatcaccaccaacgntcctggcaaacactgcattaaaaattctgccttcttctgaaagcgaggtgggccatactggattaagtactgcagcaaaggaatagcatctgcagctgctattgactgagctcttgaaacttctgctggacatgctgaccaagcttgcctaagcaggaaaagtgcatccaaggcagcttcctgagtagcctcagagcctgtctttaaggacgtaaccaaatggggaatgctaagtgttgctggttcagttgctctcagtcttgggaagttgctaaatagagaatctaaggctttaagatactcatcgttcacagatccagtagcccataagtccttctcaatatcagctaatatatcccatgataaatgttaggctat

SEQ ID NO: 230905 - DNA, 301 bp, Glycine max
taagagaacatttctaagaaaaactttatataccctaataccacccaatgaatctcttccgactatagatacttatctacgactgatgggtctcacactgtcaagcaatctgacaatattgcaaatgtcatgtcgaactattaactttattacatcacttatggcatcgatacacttgagatttagagcacaacatgacttgactaaaatcaattagaccctctcggtcaactgaatgtcatattcacgttcttaaagaaatatgacacaatcatatcacactacatacttcctttctcta

SEQ ID NO: 230906 - DNA, 418 bp, Glycine max
gaaactcagcttcatagaaaatagcattttcacctcttcattcgcgatatcactccctaaaaggtccatcttcccttgttgcagccatggagatttctcttatgcaaacaggttcatgaagacctttatccttaaagatccttacgatctccttacgatctgtcagccaatcgcttgcactattcattagtctatcaatagagaacttctgacaacaaacagtggtaatgcattggaaacatataaagttcctatctccaaattctagccatttgcatctagacttttggaaccaaacaacctcatactagaataaaatattctccaactccttccacaaatcatgttgccgttcttcaagaaaatcattaggccttctactcagacttctatgtttcctccttatactcctatgaat

SEQ ID NO: 230907 - DNA, 446 bp, Glycine max
  unsure (1)..(446): unsure at all n locations
agctagctctanatcgtctgtcttgnctatcannaccatataaccatgcatccgctgtcttggttcatcaaatctcatggattcttcttttcttctcatagcttgtcacatatcaattagattaagactagtaatttgatacgttgatccattaaaagatccttcttgatgtacctccatgtggagcttgtaggccttggatcttcttcatcaatggagtcttttactacttgaagatcaatgatagcaaaatggaggaggaaaggtgattggagactccacttcaaggaaaagatgagtcaagaacaagctcaccaccatatgaagccatgtgatanggtttgaaggtatgaaagatgagtggagggagagggagagaatgggcactaaatttatgtctcatatgaagtctgaactctaaagtgtaatttctcaaatgatcaaag

SEQ ID NO: 230908 - DNA, 386 bp, Glycine max
  unsure (1)..(386): unsure at all n locations
nttanagttgtcaatgagaattttggcaatatggtagtacttgagtatcattattcgtgatgagtatcattttctccacttttagagtgtgcatatgaatttggttgtatccgcagtaggtgtccagaaagcttagtacttgaaacctgtgcgctccatcgactagcctgttgatactaggcagagggtatgcatcctatggacacgccctgttcagatcaatgtagtcagtgcatattttacgttggcctttttgaccatgacggagttggcgagccaagagaaatacataacttctctaatgaatttggctatgaggagcttgtccatctcttcggtgatcgttttgcatcattcttctcctatcttcctcttcttctatgata

SEQ ID NO: 230909 - DNA, 340 bp, Glycine max
  unsure (1)..(340): unsure at all n locations
agcttatgtaattgaaccttataaatagcatttaaaattccctaattaatgagaaggtcatgcaaagtaattattatttttgagatggatgaatcttaatgggatttctcttgattaattctttgtctatgaagaaaaaaaatcttgatattctctctggagttcttatntttgtaatggtacatgacatccatgtttaattaaactcccatcgttgcctgatttctttgcagctggccttcccttggacagcatcctttatcttggaggaccgaacattgcctcataaatttacaacaaggaatatgcaaatgctccgatatgtggngcagaaaaatgg

SEQ ID NO: 230910 - DNA, 474 bp, Glycine max
  unsure (1)..(474): unsure at all n locations
ctatgatactcagcttaagttggtggttgaagctattggaaactacgaatgaattggatgacacataacagttgttgaaggatcaaaagatagaacaggtaaatcatccctaacacccatccaatgctaccaacatccctatctagatgcttgcctgacatatgtaatttgtaaatataaataagaaaataatgttagttggttagttaggcagctattagttatgaaccttagcgtaggatttagtcacaggcctagacacggaagacttctttcaacctatagtgaaagcaaaaaacagactgtccttgacagagcccctcctaaactaacacacgttntagttagagtgagaatcttatctaaaaattaccctaattaataaaataagaaaagacaaagacatatgatgaattaaatagttcaagatttagatatgataatcctaatttgtggccatatcactattgttag

SEQ ID NO: 230911 - DNA, 477 bp, Glycine max
actataccaaactcaagcttctaagaattgaacgcgttgtgtgagcttattagtatacattatcatttttatgaatactgaaattcataataaaatcgagtctaatttttatatacaacttttaatatacgctaattttatttctaagaaggtgttgtcttataactatatacaggatattctaaaacgaagaattaaatgaatgtgaatggaacacagtattgttgatgaggcgacgatcgacaaaagagagtgtccacggaggagaaggcatgcatatgccttttttgccttttgcgaagagaagtcagcgcttccaacttccatcacaaacagtacaaattaagtggtggagaatccaactgttcttagtggaacacattcacgctattgcggttgccactcgagggtttaacaattctaaacagtcacgatcctagaccataaatataaagctaatatcatatttaagaacac

SEQ ID NO: 230912 - DNA, 291 bp, Glycine max
caacacgaatactatgacctccccagcaacaggttcaatcccagatagaggagtcatcccaaccgtagatggccgaagccttcacaacaacacgaacaacaacaaccttaatttacaaaagctgttggcccacagagaccaaacaatgctcccgccaaccagcaacaacaacaacaacaacaacccgagaaacagtcaacaggtaaagcccgctcgcaacctacccttgaaaactcgcgaggcacaagactatgccaaacatgcaatctcaccaagagaccagaacctcca

SEQ ID NO: 230913 - DNA, 447 bp, Glycine max
tgcttgtggagattctatggaggctggatctttgagctttttgatgtcctttaatggtgattttccaccatggagatgcagcggaagacaaaggagaagaggtaagaggcggcgccatccactagggaataagccatggaagaaggagcttcatcaccaagatgagccttggataagaagcttggagaggatgcttcaatggaggaaaaaaaagagggagagaaagagagaggggggagcacgaaattgaaggaagaaaaagggagagaagttgaactttgagttgtgtctcacaagactctcattcatcaaagttacaacaagtgttacacatgcttctatttatagactaggtagcttccttgacaagctttcttgagaaaatttccttgagaagcttctttgagaaaacttccttgagaggctagagcttagctacacacaccc

SEQ ID NO: 230914 - DNA, 459 bp, Glycine max
  unsure (1)..(459): unsure at all n locations
agcccanaagaacaaaagagcctgaancatttccaaatatgcatgtgaatcaggacgcatcaacaagaatcaagccaaggctattgtgcaagcaatcaatggggcaaaacacaccaaatgattataatgatggatggctcaaattctcacaaatagtaaatcatcactgtcaaatcgagctctcataactatcatgacatgcagagaagaatcaaggatttcaagtcacaaaatgtcaagaacttttatcttcaaaacaattacccatttctcgaatatatcctataattcaaagaaaaacatgcaaagtcgcacgtgcacacgaaattgacccgaaatatgaaactgaaaatccgacgaaactaacaacaattatcaaataacactacttacaaattaacaagaccaacaaactagcataatcaaagaacacgtccccgccatacttaaacaacacat

SEQ ID NO: 230915 - DNA, 443 bp, Glycine max
agccagtctgatgcagcagtaatgatggcccgagttatgttggggaacggttacgaacccggaatgggtttgggcaaagacaacggcggcataactagcttgataaatgccaacggaaattgtgggaagtatggtttaggctataaacccactcaggcggatatgaagagaagcatcgcgggaaggaaaagcagtggccaaagctcgcagttgagacaagaaagtaaaggaagcccgccctgccacataagtagaagctttataagcgcgggtctgggagacgaaggtcaagtggtcgcgatatacgaagatgatgttccgagtacattggatttggtacgaccatgccctcctgatttccagctgggaaattggcgagtggaggaacgccccgacatttacgcaacgagcataatgtaaacctttaccgtttaaaagctcta

SEQ ID NO: 230916 - DNA, 445 bp, Glycine max
  unsure (1)..(445): unsure at all n locations
gaagaagtatagcaatactggagaatgttgttggttgattgataaagacttanattttattcatgggtcaaggagttgtacaactgatggagatatattacacttaggtagatatgcttttgaaaatgagaatgagataaatgtttattttcatcatgaagtagatccaattttataagaagtcccatggatgttgtacttggaatgtgatccaattccaaaagttgttgagaatgaggatgatttagatgatgtacctgttgctggccatgaagaaggtaagctttaattcatttgtacttggtccgacatggttaccataattagttaatatgactaacttttacttgatcaccattgatgcagatgttggtgctggtgatcacagggatgctggtgggcagagggatggtggtgatcataaggatactgatgcttgtgagca

SEQ ID NO: 230917 - DNA, 408 bp, Glycine max
aataatccatccatgctcagatcaatgatggtctaatcactgatgagaaactatcaaaccttgaggatgactttgcaaatatgcagattggtccatttgtcgcacccaagatagacaaagtaaaacagtctgactaaactcctcctcagtctagagaatcatcaagtcaacaactctagactaaggatcggaaacttgtcaacaatcatcctcaagattagatcattggagatctgactaaagaagtcaaaaccagatcatcattcaaagatctttttgctatgcacttgtgtctaaaattgaacctaagacgatagatgaagctctgatcgataatgaatggcataatacaatgaaagaagaactccaccagttcaccacagatgatgttacacacttgttccaact

SEQ ID NO: 230918 - DNA, 441 bp, Glycine max
  unsure (1)..(441): unsure at all n locations
ttcataagtganatcaggtgcagccatttctcttagagtcctctcacgaggtggatgttgagccatattttcagaatgttcaaaatcagaatgctcaaaattataatgctcaaaatcaggatgttcaaaatcaccaaccacagaatgctcaaactcaccaataacagaatgcttaggatgctcaaaaggtacaaaatgtccagggtaatcaagatgcacactatgcctaaataatctatgaaatgtcctatctatttcaggatcaaagggttgtaagtcacttggattgcctctagtcatgcactatatgcagcagttcatgtgtttctcagatagggcaaaagaggtgggttaaaactacagctatactcaaacaatatccaaatgagctgaaattntgtgagcaaatctgtaaaatcatgaaaagatagcacacaaatt

SEQ ID NO: 230919 - DNA, 417 bp, Glycine max
  unsure (1)..(417): unsure at all n locations
ccagaccaatgctggtcttggaggcgccgcncgcagcaaacacaatcaatgacaaacattccatccacacgccctggagcgctataatacacgcccggagtagatctcccagagcctgaaaggtccactcaatagaaccatccgcctggggatgacaagccgaatagagccccagccctggccccaaagcgccaggcagacacgtccacaaacgcgaggacaaccccgggcccctgcctgataccacactggaaggaatcccacgcaaccccactacctcgctgaatacaaccccaccgacaactccatcttacattccacgtggaccggaatacacgagcagatctggcgagtcgagcgactcaaacccacacaacatcgagcgcacgaaccgtactgggcacacagaacaaaata

SEQ ID NO: 230920 - DNA, 440 bp, Glycine max
tgcagaggatgcttcaatggaggataagattgagagagagtatgagagaggggggagcacgaaattgaaggaagaaaaagggagagaagttgaactttgagttgtgtctcacaagactctcattcatcaaagttaccacaagtgttacacatgcttctatttatagactaggtagcttccttgagaaactttcttgagaaaacttccttgagaaacttctttgagaaaacttccttgagaagctagagcttagctacacacaaccctctaataactaagctcacctccttgaaaagcttccttgagaagattcctaaagaagctagagcttagctacacacacttctctaatagctaagctcacctccttgagatgagaagctagaacttagctacacaacctctataatagctaagctcacccccatgacaaaatacat

SEQ ID NO: 230921 - DNA, 423 bp, Glycine max
  unsure (1)..(423): unsure at all n locations
tgttaagtnnntttctttcgatcaaagcagagtatggtgtatctgcatcaacaagtaaatatcttattgtgacgttcttagagaattggccttgaccaacagtggtcattacgtccacgtagcctcaggtctctactctttcgcctgccaagccaacgagtggaccgactttaggatggacagtgtcacgggagaacctcagtctctggaaagttgttcaatataggatatcataggagcttccctggtcaatgagaaccttggacaccataaaattgcaatgatgatggagacaaccatgtggtcgtcctggttgatggggagatacccttgacgacctatcccggaaagtgtaggagggagactttttgtgatggtctttgacaaatgatgtaatgttccaatgggtgaaaatgcattttt

SEQ ID NO: 230922 - DNA, 369 bp, Glycine max
acctccaatctcagctatgaaccgcagcacttgctcttgatatttcatatctatcaccgaagagcattctattgcgactgttctgttttacgaaattgatcactctctcgatatttaaaaattcactaaaacgatcataacaactgcactgcctaagctccactacaagttgataaaacttgttcaattattaaacaagcctgctaacgatcctaacctaatggtgaatacccttcaagctctttatgagattgctaccagagacttattcaaggagcaaaaaactcctgaacagctaaaggaggatggtttggctcaacagaatccttctgcaagtctactctttgagaatgccattcagatgcctga

SEQ ID NO: 230923 - DNA, 442 bp, Glycine max
tataaaactcagctcgtatttccttgaagcatttcttagctcataaatattctgcttgggaagaaggagataagctataaacacaacaatatacagattgtcgaacgctgattccattcgcgaagtgaattacaccaattggttatccaatgtggacatggttaaaaaagcatctggaaaatggaagatgtgcttggattacaccaacctaaacaaagtgtgttccaatgatgcctaccctctgcttaacattgacagactaattgatggggcatgtgggttcacggtgctcaatttcttatatgcctactcacgctataatcaaatcaagatgtatctacccaaccaagtaaagacaacatttgtcattgatagggctaattgtttctataatgtaatgactctttgaggctatcctccctatgaaaggactagtcaccag

SEQ ID NO: 230924 - DNA, 73 bp, Glycine max
cccaccaaccccgacacacgcaaaattgagttagagaaaacaacgggagccccaccagacccaaaccaaccac

SEQ ID NO: 230925 - DNA, 430 bp, Glycine max
  unsure (1)..(430): unsure at all n locations
tgtctatntaatagggtttggtcaagaggtcatacacacgattatcattcttatcttttttgacatcctatccttagagagaggtagggagaaagctaaagggtactctcaagagagtgtgtgttcatatggaagaccaacttgcataactctaaaaagcgattggtcatcttgaattcaaatacgttttcgctttgatttcttaatgattaacatgattgattcgggattgatagatttagttccaatagtttggactttcttctcaggttagctgcgaatctagggaggttgaatagattccttcaaaaaatttatttcataatatcttaattcaattaaaatgtccccttttgattaatcaaagttttctcaaaagcttgttacaaagtttatcacaaccaagaaaacaatgaaatcaatatcatat

SEQ ID NO: 230926 - DNA, 444 bp, Glycine max
  unsure (1)..(444): unsure at all n locations
gctntattcaagacanagaaattaaagatattcaagatggatgatcaagacagtctatagagtcttagaaagggtatattaaataggaagggaattccaattgaagtagcaaaaagtttggccaataatttttaagttaaaaagtctttttcaacaaatttactctctggtaatcgattaccagaggatgtaatcgattaccagtggccaaaactaatttacaacagctactaaaatttgaattcaaaatttgcactgtgtaatcgattacacatatatggtaattgattaccagtagtttccgaacgttttaattcaaaatttaaagattgtaatcgattacatatatactgtaatcgattaccagagcagattttagaanatattctaacaatcacatctttttgtgtggtcttgaatggctatcaaggcctatatatatgt

SEQ ID NO: 230927 - DNA, 458 bp, Glycine max
  unsure (1)..(458): unsure at all n locations
ntgccaatntgtctgcaacttgattggcttctctcanaatatatatggtttcgtataatgtggccctcgttagcatggactggatcgatagcctagacaatattaaagcacaggcaccgattgcaacatccttgagctaataattacacaagtttagagtcagaataaactctaattctcttgtgcatgtcctcgtgacaaagccatttcaagaccaatcataatagttttcagttttgcaatcaacactgtacaaccttctagatttgacacgaagtcgcagatgaaagcacaatgaagaattgtcactctaatttggaatcagcacaatccctgaaaaggtggaatagtgattcctcattctcatcatagtgagtacacatatttgatgggctcaaccctaaccgcatcctcccggagttagtaagcacgcattcatggctcactttccaaataaa

SEQ ID NO: 230928 - DNA, 371 bp, Glycine max
aatataattaattgaagataattactatgatgctaaattctaaagaaatgttgaaaataaaaaatgaatgaaattaaaatattctaaaaacgccacaacagttaaagaagaggagactagaaaagaataggatataataagaagagaagcgatgtgaattcttcatagaaaaggaacaaactgtaacgttaaacatgtcacagacaaaaatacgttccatagaccatacagttgagaaactaaataagaatagtggctaaaagataagaacagagtcttattgtgagtgaagtatatgatctatataaaaaataaagaaatacatataatcaagctccaatatcttaaacctatataaaagatatgactaa

SEQ ID NO: 230929 - DNA, 454 bp, Glycine max
  unsure (1)..(454): unsure at all n locations
aatacaaactcaagcctactcaattntcgcggatcgaagctcataagacggcagcgtatactataaatcgagcnccaaccaacgctgactcaaagacaccttttgagtcattcaacggtgggaaaccaagtttgcgacatacacgcacctggagatgcccgtctgaagtaagaatttataatccacaagagaagacactggaccctaagactattactgggtatttcatcggacatgctgaaaggtctaaagggtattagttctatagcccatcccacaacactaagattgtggaatcaaggagcgcacaggttcttaaaatgactttatcggcgggagagacaatttcagaacatttacttcgaaagagaacactatgaaactgaaccatctaggacaagtcataggttggtacacattcccacccctcaaggtaacatgggtgatagacaac

SEQ ID NO: 230930 - DNA, 399 bp, Glycine max
  unsure (1)..(399): unsure at all n locations
agcttaacaaaaggcatgcgaagtgggtggtattcctatagcaattttcttatgttatcaaacataaaaagggaaaaggtaatattgtagccgatgctctttctcggcgtcatgcattactttctatgcttgaaacaaaattgattggtcttgaatgtctgaaaagcatgtatgaaaatgatgaaacttttggagaaattttaaaaattgtgaaaaattttcagaatatggtttctttagacatgaaggctttcttttcaaagaaaacaaattgtgtgtgcctaaatgttctactagaaattntcttgtttgtgaagcacatgaaggaggtttanatgggcattttggggtccaaaagactctagaaacattacaagaacatntttattggcctcatat

SEQ ID NO: 230931 - DNA, 389 bp, Glycine max
  unsure (1)..(389): unsure at all n locations
ctatacaatactcaacgcttgagaaaattanacaacaataactttttactcggatgtctgattgagtcatgtaatatttcgagacgctcgaaattgaatacggaagctctgagcaaattcaaacgacaataactttttactcggatgtctgattgaatcccataatatatcgacaagctcgaaatagaatcttgatgctctgagcaaattcaaacgacaataactctttactcggatgtctgattgagtcctgtaatatatcgagacgcttgaaattgaataccgaagctctgagcaaattcaaacgacaataactttttactcggatgtctgattgaatcccataatatatcgacaagctcgagatagaatcttgatgctttgagcaa

SEQ ID NO: 230932 - DNA, 448 bp, Glycine max
  unsure (1)..(448): unsure at all n locations
agctttacatggcaatggtcagatagtactataaccattcttggcataaaacaaaaggaacanaattccttgcaattttcattttctgtaatagaactgattattttataaaagtatataaccagaggattgcctgatgcacaaagctcccaaccttgaggttcaacatgttagactgatactaagtttctaagaagtagggatggccatgctcacctcaacaaactctcccaaggctgccctgacctgacctctccgtttccatgcctcaccagccaatggattaaattgtatagcctaatacatacaacatgtaaaccacttacatatagaagaaataccatatctctatatacacctgttcagcagtgttcattcaaccaccttngtaaaatcagctatagcagcatcaagttccctctggaatgcatatgctgtacctctttct

SEQ ID NO: 230933 - DNA, 444 bp, Glycine max
gtgcaccatcgcccgaccgccacctagtaccacatgtgatgggtcctctataattctacaagcttgagatgaggaagtgttgaaaggtgaaactctctgcttttattgttgaccacagagtggcacctgtagatatgtcgcgggggtcaggagaccttgtggacgtcaggtggggtgctattgcccaaaaccaagcttgaccaatcccgacccaacccgggcatagtcggtcagagagaacctgtgatgtacctaaacaggcgagctcctggcagtcaacagataaaatgaaaacaagaccacaaagcaaggaggcttgtggtggctggccagctgtgaatcttgtgtaatatgtggatggaggcctctggtaatcgattaccaagggtgggtaatccattacaaggcttataattgagggcaggaagataagatggtctctgg

SEQ ID NO: 230934 - DNA, 195 bp, Glycine max
tgactctctatcttaatcttaccctcgacatggcatagttgatcgaagcttattcgtgacaataatagaagatctttttctcagctgtccaaagactactcacacatttccattgaatttctgtagtgtcctctaggctttgcacagcgaagataggtcaagtaagcacaaaatctgaaatttagcaacaattct

SEQ ID NO: 230935 - DNA, 449 bp, Glycine max
  unsure (1)..(449): unsure at all n locations
ctcagcttagcttctaaggaagttttctcaaagaagcttctcaaggaagttttctcaagaaagcttctcaaggaagctacctagtctataaatagaagcatgtgtaacacttgttgtaactttgatgaatgagagtcttgtgagacatacttcaaagttccacttctctccctcttttattccttcaatttcgtgctcccccctctctctttctatccctctttcttttcctccattgaagcatccttccaagcttcttatccaagactcatcttggtggtgaagctccttcttccatggcttattccctagtggatggcgcctcctctcacctcttctcctttgtcttccgctgcatctccatggtggaaaatcaccattaaaggacctcattgaagctcanagatccagcctccatagaagcctaacaagcaagcttccatcagaaa

SEQ ID NO: 230936 - DNA, 343 bp, Glycine max
gcagcttgataggcattcgagtttttgttatgtctatcgacactcccgagagattccgacgtttaattcccagcgcatcgacatattataagcctgaatcggacatccgtgtgacaagctatgaccatttgaatttctatagagattccgatgctcaattgcgagtggatccctacattataaacctgaatcggaccttactggtaaaagttatgaccattcgaatttctcgagagcttctgctgtccaatttcgactgtcactatatgtgatgcgccaaaattggacattcccagtaaatggtatgagcatttgaatttctgaagagcattccatgcttact

SEQ ID NO: 230937 - DNA, 466 bp, Glycine max
  unsure (1)..(466): unsure at all n locations
ttacggacctatgaaactcaagcttaatgttcttaagcaaagctaactaatgtctctatactttcgttgccaaactntcaaagatcttgtgaaattgagtgtgatgcttcaaatgttgggattggggctgcgttgatgcaagaaggccatccaattgcttattttattgaaaagttaagtggtcctacccttaactattcaacttatgataaggagttgtatgccttactacgggctttgaaaacatggcaacactacctttatcccaaggaatatgtcattcatagtgaccatgagtccctcaacatatcatggggcaaggcaagcttaacaaaaggcatgcgacgtgggtggaatccctacagcaattcccttatgttatcacacataaaaagggaaatggtatattgtatccgatgctctttctcggcgtcatgcattactatctatgcttgtatcaaaattg

SEQ ID NO: 230938 - DNA, 416 bp, Glycine max
  unsure (1)..(416): unsure at all n locations
cttcaacatcagaccacttctattggtgttgtaactacttcacatggactcgatggggcctatgcaagttgaaagccttggaggaaagaggtatgcctatgttgttgtggatgatttctccagatttacctgtgtcaactttatcagagagaaatcagacacctttgaagtattcaaagagttgagtctaagacttcaaagagaaaaagactgtgtcatcaagagaattaggagtgaccatggcagagagtttgaaaacagcaagtttattgaattctgcacatctgaaggcatcactcatgagttctctgcanccntcacaccacaacaaaatggcatatttgaaaggaaaaacaggactttgcaagaagctgctaaggtcatgcttcatgccaaagaacttccctataatcttt

SEQ ID NO: 230939 - DNA, 417 bp, Glycine max
tgagatgaggaagtgttgaagggtgaaactttctgcttttattgttgactcacagagtggtacctggagatatgtcgcgggggtcaggagatattggggacgtcaggtggggtgctattgcccaaaaccaagcttgaccaatcccgacccaacccgggcatagtcggtcagtgagaacctgtgatgtacctaagcaggcgagctcctggcagtcaacagataaaaggaacaaagaccacaaagcaaggaggcttgtggtggctggccagctgtgaaacttgattgatatgtgagatatggtctctggtaatcgattaccaagggtgggtaatcgattacaaggcttaaaaatgaagacagggggctaagatggtctctggtaatcgattaccaggggatgtaatcgattaccaggct

SEQ ID NO: 230940 - DNA, 437 bp, Glycine max
  unsure (1)..(437): unsure at all n locations
agctttttntgttcgatgttgtctaaatatttacaatgcagntcggctaggtttcttcgtgcgaactgaaccgaagttgtgtttcggccgactggcatgttctcattttgtcggccaggaaaacattagcccacctcggcataaaaaacatgattcaccgatattgacaggaaaagaaaaatgctagccgacgtcggccaggagagatgaccgaccgaggtctgaaaaagaagcatgaccggatgactccggtcgaacatttcctaacagatatcatccaagtattattcagggattgaatagaaaaaacaatagccgacatcggtagttaaatagccgtgactgatatttttcggccgacattgcgcaatttcttttacaaacgctggccgttacagtaaaagatgtnttgctgtttgggtgtccctataaaattt

SEQ ID NO: 230941 - DNA, 432 bp, Glycine max
  unsure (1)..(432): unsure at all n locations
ttgactncggtgtatgcgtgaagcccattatatatcgagttactcgacatgaacaacgaaagctatcgagaaattcaaatggtgaatacatttcactcgcttgtccagttctggcgcataatatattgagacggtagaagttgaacacggaagcccttggctaattcaattggccataacttttgactcgggtttatgtgtgaggcccaagatatatcgagacgctcgaaaatgaatagcagaagctctcgagatattcaaatggtcattacttttcagtcagatgttcgatgccggcgcataatatatcgagacactagaaattgaatacggaagctctcgggaaattcaaacaacccaaacttttgactcaggtgtatgtgtgaggcccgtgatatatcgagacgctcgaaaaatgaacaacaaaagctc

SEQ ID NO: 230942 - DNA, 464 bp, Glycine max
  unsure (1)..(464): unsure at all n locations
cagcttacgccactctcagtgcgtttatttattaatngagctcgnacacgtactcagcatgttgcttaaatctaccgaaattgtacaattaattgttcttaactacgtatagattcgaatgtaatgtaacaccaaagcgtttatgaagtcagtcaaaactggttggatcactgatgtaggaataagtaaaccaaactagctaggcagtgcctaccatttaatgaggattgccttattaatgtacatagatatttctagtttcggatgaccatgtgcatgttcaaaactagtttatgaaaaatcaaacatcactttccagattaactactttgcactaatggaagacaaaaactatatttaacttcggctactttagtttctaggaagtacgataattgtggggagagacaaagacgaaagtagaggctttcgaggctctatcacttcaattgtcctacgcgcac

SEQ ID NO: 230943 - DNA, 414 bp, Glycine max
ccttgcactgtcaaagagagaatctatatattaaaaaggtgtatcactgacgaacaacgcaatatgtaaactatattataggatgaataatgtatcgggtgcatgtttcctattatactctctactttttattatctttttacaaatctttttattctctacaaacaaaatattaaatgaaaaaacaaatacactctatgttttaaaatgtaaaatgggttttcaatatttcctatatttaactagtacaaagctcaagaaacatgcgtcatcgaatattaaaattaatcttgcaggaatattgactctagtaaggagtaaagggatatgtaatgctttcgttccctctgaggtcaaactaaacattgcataaaatacttctagtaaaaataagttttgtgaacacgatacgat

SEQ ID NO: 230944 - DNA, 428 bp, Glycine max
  unsure (1)..(428): unsure at all n locations
gttgaattctggntgttcctggtgcggagatgatggtacagcgggtgaaccagaagcggaagtttcttttggtgaggaagccatggaaaaacagagcgtttggaatgatttcgtaaatctcagaaaactattgggaaatgctggagaaaacacgaatgccaagcagatataaatttgaatgaagaatgtagaggggcgtgtgaagcaacggtcgaatttgctttgtggtgaacgtgctattaatgttaagtgattcgtttgggcacgttcagattgcagtagctgctataattcctctagcaaacaaatgcccagcttgcccctcagttnttcaaactgattngcatccaaagcctttgtgaanatatctgctatttgttcctcagtgtcaacatgcttcagtgtgatcactttatcatcaacaagat

SEQ ID NO: 230945 - DNA, 439 bp, Glycine max
tcaaggatttcaaattccgcttgacaaaaaataaattaggtgttattgttatctaataaagaaaatcaaagaagaaaactaaaatgcctgaatatcctcccatatcaaatccttctgagcagcagggacttccttccaggtctcgtatgtcacgtcgaccttatcacgagcgacaatccctaaatatgttcttgatttcttcttgtggggaccgtcagccttgccaatcgtaggatcgacgtggaccactggtctctttgccccacgtggtctagtgaccaaggatcgtagccgtgtggctttgcgtgttcacttcaacgtagacgaagacgctgatggtactacatgaggaggaggatgatgaggaggccatgcacgtggagtatccatggtcctataaagagaaaaacttgagttagttaatattatcaaaaaacac

SEQ ID NO: 230946 - DNA, 411 bp, Glycine max
  unsure (1)..(411): unsure at all n locations
cacattagcttcaagtaggtgctccttaaacctcccattaatttttttctttaccttctcttccattgttgnttcttcatttttctccatgtgtctcctcacatgtcttgttctaaatgttgntatcatgattctttagagtttccatcgattaaactcgctgtagaaactagatttgattttctatggttcaaatttcttgttcttgttcttgaaccatgaattgtgttgagtttaagttcctttgagttttgtcttgttattttttgtggatgaaacctaaaccataagattattacaaaaatattaaagtagaagaaaacctcaaaaatctagagtgacttgttcacctatcgtagttttgtcatagaagtcatgtctagtcatgaaactcgtcacataagatttctt

SEQ ID NO: 230947 - DNA, 431 bp, Glycine max
  unsure (1)..(431): unsure at all n locations
ntcatctagccaagattatacaaaggtgttataagagaacctaacggtttctaattatgtgggccatcaaatctatcatgtgttgacagtaattgattagcacatgaatctcctcgggggcagtacacacatcggccatggcttttgctttggctaatagacgcgggaggtcttgacttccattcaaggtcaaggcgaacctatccatccacatagtcgcttcttgatgcaatgcatcaatcaccctccctcttgcttcttttttagcgtacacttgtgcaaaatcctccactagcttttgttcatgggccacagactggttcaactcttccttgtattgccctatgatagctagcatgctttgctctgtggcttccaagtgttgagccaaactcctcttggatcttgcgcacgcagctaactcttctttt

SEQ ID NO: 230948 - DNA, 480 bp, Glycine max
  unsure (1)..(480): unsure at all n locations
gctngaganacattaatagaattatatttgtctatatttcaagtacactatttaacattttttctctaaaattaaacttaatgggcttctagagcaaaagagagtttttcaacttcaaccaaataaagaaacttcaaagcattgttctttgtttgtggtaactttaattacaaagcatacacatatataattaaatttcaattaagaaaaatcaaattacctcttcaaacaatgtaacataaaagataaaacaaaccacaaaaaataatcatgaaaggaagagataaatttatttccaaccacacatatcaaatattcatttaatgaatgtgaaattacaaaactacccctaatacaaaaactagtctaggtgccctaaaatacaagggctgaaaaatcctacatttctagggtaccttacctatattatggatccctanatataaggcccaaaaataatgaaaccttaatctaataagt

SEQ ID NO: 230949 - DNA, 452 bp, Glycine max
  unsure (1)..(452): unsure at all n locations
gggttacctccttcttcactacatcaagaatcactgggttgagtcttctttgtggntgtcttactgatttagccccatcctttaaatttattcaatgcatacatgtggatgggctaataccaggaatgtccaccaaggtgcagcctatagcctttttatgcttcttgagaactaataacagcttctcctcttgctcatcagcaagggaggcagatataattaatgggaaacttttgctataatccaagtaagcatattttaaatttgatggtagaggcttcaattctggtgtggccggctggatagtggtagaaagagatggtttctcaacctgtacctcataaagaaagtcagaagtatgtgtacttcctgaaacatggntagttctatctgactttataaaatcaatctcaagagggtaaacatcagacatgtaatcaatatcaaaatca

SEQ ID NO: 230950 - DNA, 425 bp, Glycine max
  unsure (1)..(425): unsure at all n locations
agcttgaggaatgcaatggcttgtgttatttgtgttgtctgaagaccaacaattgtgtatatatatagtttgtaagattctgtggaaactcaattcccagagaaagtgactgtcaatggatggagggcatacgcatgagatatcacatggtgttgtcttcggtccaactatgaaggataagttgtgaagacttgcgtaaccccaccttatcatacattaattggccagcatatagcctccacatgtaaccaaatgagacgtgcctcagtgaaacgtaacgtctattcaagcattatttggtattccatatttttgtaaacatgctctgggcatgttctggaagggtaattctggctgatgaattataaagcagcggatagcgagaggtcatatatcattntaattatctctgatgcctgacatct

SEQ ID NO: 230951 - DNA, 316 bp, Glycine max
  unsure (1)..(316): unsure at all n locations
tgagaacagagtaganaggctcgaaggagatgagagcttgatcgagacgtgttataggggtctccccaacccactttggtcgctccagcttcccttcttcgtactcacccatttgcaccgacgcagaggcggtggtgtcggacgccgccgcgtgaaccgcccagggccgccctctcggcggccggtgtgtggcgacggcggtggcattgcctttggcggagatgagtgcacagaggttctgaagtggcgaagacagagccattgttgtgttccgttactgtgggtgcaagtgacaacaaaaaagacatggctatgt

SEQ ID NO: 230952 - DNA, 436 bp, Glycine max
  unsure (1)..(436): unsure at all n locations
cacatggagtcctcgacaaatggtgcagacaaccatgttggtctttttgtgncattggactagaaggnctctggatgacgatatggagactaaagcatcctcggtcgataagcatcgagtcttcaacaaagagtgcagacaaccatgttggtctctatgaagaatcgccataggagcttgtaagccatggaccttcttcatcaatggagaccattgcttcttgatatttaatggctgcggaatggagaagaagaagagctgagaggagacgcctcttcatgaataagatgagcctagaagaacctcaccaccataggaagccatggataagagcttgaatgcatgagaagatgactggagggagagggagagaacgggcacgaaattttgtgcctcatatgactgctacactttgaacggtaattctcaaatgatc

SEQ ID NO: 230953 - DNA, 448 bp, Glycine max
  unsure (1)..(448): unsure at all n locations
ccgcagctgcaacttggaacaantaaagacctgcgtttacagtatgacacgtataactcattaactcatcccttanaattataattgaaggacaaaactcatagcatccagttcgtgcttttagtgttctccaattaaatgatagagtttcatctcagtaatttctttaataaatgtctgcatacaaattacgaagatgaaactctaattatgattagagaacaaaataaaaaatacctatagaaatcctttcacacacaaacttaatgccattcaatagaacacaaaaagtctagatattgtggcttatctaacatcctcaacatgtctcttagcttgttcaataatctctgaaaacactttgtatatgttcttgcgaatgaaaaggttgccttgtttcgcgctggctgaagactatgaagagttctctgtttcgttgccactatgc

SEQ ID NO: 230954 - DNA, 467 bp, Glycine max
  unsure (1)..(467): unsure at all n locations
ctcaagctgggaaggatgcttcaatggagganaagaaagagggagagaatgagagagatgtgagcacgaaattgaaggaataaaagagggggagaagtagaactttgaagtgtgtctcataagactttcattcatcaaagttacaacaagtgttacacatgcttctatttatagactaggtagcttccttgagaagctttcttgagaaaacttccttgagaagcttctttgagaaaacttccttgagaagctagagcttagctacacacacacctctcataactaagctcacctccttgagaagcttccttaagaagattcctaaagaagctagagcttagctacaaatacctctctaatagctaagctcacctccttgagatgagaagctagaacttagctacacaccccctataatagctaagctcacccccatgacaaaaaatatgaaaatacaacaaaaaaag

SEQ ID NO: 230955 - DNA, 307 bp, Glycine max
  unsure (1)..(307): unsure at all n locations
tagactgggctgtacccgagactgaggactgtcgatattttttaggttgaccaacacccattctccaacctgtaacttgcggtcacgacggtgtctgtccgtgatagctatcataccattctgggtcttctgtaccttttgtctaaataacgaatatatggatactggctggctgagtaaatcatctactgcatcatccttttatgtgcccgtcacgtactgtgtaaagcattgcgatntgcggtcaaatgttacctttaacggtgtctaccccgtggccgaatgagtggatgtattgtatgaccac

SEQ ID NO: 230956 - DNA, 413 bp, Glycine max
cagcatgcagcttctctggttacctcatttatgcttttgcgtttatgatctgcctttgaatgctatggtaggtcatatcctttcctatctggtgtgatttttgtaattcttaagactgacaaattacagtcgtgcttgtaatttattttgagaaattaaacatatgcatgaagattcatgtgattcacgcggatcatcaatcttaattgtaattgggtgaaattttgtgtaagtaattgatactttactcaggaaggttgtcaaggatttttctgcattgcttgattctcaaggcactcaggtacttcagaattaatgcattttttttgtcttgctatcgcatttgtaatgcataatcactctcactggttggaaggttgtctaaaatctaacaattgtctgcagcttggaca

SEQ ID NO: 230957 - DNA, 305 bp, Glycine max
tggggtcctgcggggaagggtaacccctattccggacccgcgcccatgcttaaattcttaccagtcggttgggcttcgttcttggaaaaaaaaggatattttttttcctttttaaaaataaaggcgagatggaccatttagacctcaagtgctgtgttctatctggtacaggggaaggagaaagaattgaaagtgattatcatacctgttgtaatctatttcaatttaaacaaatctctcttaattttttacttttgatttccatctgaatctaacaacatgtaatccattctataagatcaaaa

SEQ ID NO: 230958 - DNA, 394 bp, Glycine max
tgagctgcagctcggtggggagatgattttcagtttccataagagaccagatacaacactattacttgtttgcatctcgtattcaagccacatgggtcactattataatgcaaagattaatggcgaggttgttcaagtgcatggaagaaaaatggtgtgtctactgaggaaagatcattataaggcgtgattggcatggaccaagcttcatttgacttgaagtgtaaccaagatgaggtaggtgaaggagagagtgcacggtggtcaaagcctaagtttctggatgaggaaggtgtgagggtttatctagtggttaatgagaaccttatcattaacggtcttgttgaaactgttgcgcaagatacattgggtattgatactttaagccacatca

SEQ ID NO: 230959 - DNA, 416 bp, Glycine max
  unsure (1)..(416): unsure at all n locations
tcatcctcatttggcggcagttgccctcgtatttggaaattcttgtacggggtcatctagtctagctccttcttttctccgaccataacttccttagtgtctattgtgggagtctgaagtgtctcctggataacagtcttgagatgcccggttttcttggcgctcgataagctttgaagagaaatgtatgcttctaatggntgtcctncctgtgggtttgtagtaccattttacaacatttggaaattgtcgatgagttttagcacggtggtagcacttaagcaatgtggcctccttatctaatatctgttggcaacctgtccctggacacgatgtgaatcctatgtcaccattgaagctttttagccccatttttgtgcttcttcacactgcatgaacactcgactctgcctgtt

SEQ ID NO: 230960 - DNA, 462 bp, Glycine max
agcctgtgtgaagagatagacaccataatattataaatcttttggaatgggctatcctctaagcgcagatcctgcgctaagcgctcagtcttgctatggctaagcgcacaaacccctgattggttggctaaatagttcagctaagcgcaaatcactacactaagccccacatctttgcgataattgaactttaacctgtgggcttagcatggatgatacgctaagcgccacttcttctctgtaaacatttcattgtagtagcgctaagcacactatcctatgctaagccccagatccattctgtaacttgagcttttaagctgggcttagctggccaggaggcactaagcgccaatctcttacgaattttgaactcttggaagttcgcttagcgtgcctgtcgtgctaagcctgaactactctctgtaaattgaagcttgatgttatgttaagcctcacatc

SEQ ID NO: 230961 - DNA, 449 bp, Glycine max
  unsure (1)..(449): unsure at all n locations
tattctntcctctgcactcctaatgttgttaaagtccccattatcacaccacagaccccctgngttagaggccttcaactgccttaattcatcccataacactttcttcccagcaaggtcacaaggggcatacacatttacaatcagcaacctctgattgttgatgatgcatctcccttcaagcattaaaaagctcctacctttctccctcctacttacttcaaaagtggaattattccacatacatagtagaccacccgcaacttgcacagaagggatataatcccactgaacagtcgaatccccccatatggcatgacaaatgtttttattaacattctcccttttagtctcttgaatgcacacaatgtccaccttgtgttttgaaataagtcttcttatagcagtccacttaacccccctccccatatctctagaattataggaaa

SEQ ID NO: 230962 - DNA, 401 bp, Glycine max
  unsure (1)..(401): unsure at all n locations
ttcaagcacgtgctccttaaacctccataatttttgctttaccttctcttccactagtgtttcttcatttgtttctccatgtatctcctcacatgtcttgtgctaaatgttattaacatgattctttagagtttccaccgattaaacttgctatagaagctaaatttgattttctatggctcacatctcttgttcttgttcttgaacaatgaattgtgttgattttaagtcctttgagtcttgtcttgtattttttgtggctgacacctaaaccataaaattcttacaaaaatattaaagtatataaaaaccttcaaaatctacagtgacttgttcaccctattgagtttngtcatagaaagcatgtctagtcatgaaacttgcacataggattcttatgt

SEQ ID NO: 230963 - DNA, 428 bp, Glycine max
tgcatacaaaattctccttgcctgacacttcataaccttctggttgggtcatatagatgtcttcctctaaatccccatgcaagaatgcagttttaacatctaactactccaagtgaagattctctacagctactatgctcagaataactctgatggtagtcatctttacaactggagagaagatctctgtgaaatcaattccttgtttctgctgaaaccctttcaccacaagtctcgccttgtatcttcttctacctttagattcttcctttagcctatagacccacctattctgtaacgccttctttccttctggcaatttagttaaagaccacgtcttattcttctgaagggatgccatctcatctttcatcgctagctcccactcaatagtgtcattcccctgtgtagcctcattgaaacattct

SEQ ID NO: 230964 - DNA, 279 bp, Glycine max
  unsure (1)..(279): unsure at all n locations
acaccaccatctcgcaacaccacccacgacccaacacatgtggcgcgggccattgaaacacgaagaacgacttcccaacatgggggacgcgcctccgcagtaattatcaactgatggagggggcgggctctattttttcttttctctcttaagtgaaaccgtgcgctccaaatgcttcccacaaaccttctcaaagcgaatcctctcgtgctgcaccacgaatctcccctgcttaggatgcctgcgaacatccccacaccncacatcacaatccttgcc

SEQ ID NO: 230965 - DNA, 286 bp, Glycine max
acgtgacctatgaatactcagcttagaactatttctcactttcaccacgttatttgttttatgatctccgagtgagagaatgctcctccatgggatagtgaaatgaaactcattccttttttttttttggttggaacctatgtggacccccgaggaaaaccttaaaattctaggaacctctaatacaaggtttcggtgcgacttacacaaaaacccgcgtagaaaatggtattttgagtatttgggttaaatatataaattggaactttcttaggatttctttttg

SEQ ID NO: 230966 - DNA, 447 bp, Glycine max
  unsure (1)..(447): unsure at all n locations
agctagctaaggaggaatccgttatcattcttccaggttcaatcataaattatgctacactntaagatattattttgcatctttagaatcaattgacacaattnttaatgtaaaatttgaggctaaaattaattcagtcacacttctgagttatgttcaataattcaaaataaattatcaagatcaattactcaacttcaaaacaaaaaggatgattctatgttgatgttcatctatcaataaatttttgtccttccaattaaaggtccaatagggagaaaaggaaattctaaaaacaaagaatgttgacctttgaacaacagcaaggtgaagggaaatgctggaattttgttttttctaaaatggggtagtactctacttttaaaattaccaaagtattatattggttggtttaaaacattacctctatgatataagtcagatttc

SEQ ID NO: 230967 - DNA, 453 bp, Glycine max
  unsure (1)..(453): unsure at all n locations
ntaagtgaaacaccatgatctcaccttaaccttaaggaattttggagttttggaattgttttgggaataagtctggggggttttgttggataacatatttcgttggctatgtttcatgatgtattttgggccatacttgatgtacattgtatactggttaaatgttggacatgctgaatgatatgctatttctcagatgctacagttcaaaaaaaaattagttgaatcaattcgaaaaaaaaagaaaaagaaaagaaataaagttgagtgaataagatcttaaatggaaaaagaatgatgagactcttggctttactctttgcgtttaaattntatctttaggttttcttattttttcttaatatgcacttattccccattactcctctattccttngggatttagctatctattccatatttttccctacctttgtctttggcccattacaa

SEQ ID NO: 230968 - DNA, 240 bp, Glycine max
ccattttaggcaaatggtgtgagactcaatttgattcgggatttagtgtaattcatttgaaagttaattgagctataacttgggagtgaagttgctcaatttacctcatttaattcactctcagcctaaaatccttaattgggggtttgaccctaatttggttgtgggttgaactgcttggtatcatgatgtcatattggactgagattgatggcaatgataggaatgggttcaactcct

SEQ ID NO: 230969 - DNA, 415 bp, Glycine max
  unsure (1)..(415): unsure at all n locations
ngatgttacgctaagcctcgcatctcaggctaagcgcatattttataaagatttttggtgccgccaaaagcgctaagtgcagcctgccgcactacgccccatatgcttaagggattttacaacttcaagatggacttatcgcgaggctaggctaagcgctagtgttctaaactcaaacgtcacgttggcatgctaagcgcaactgtccactaagcgcaccatacaaatttcagtttttaaaaatcatacgcagaggcatttgggttgctacctttgcacctaaacctctgcaccctctcatctttgagcaatcttttactttttgctatgtgtgtaaagcttttcttgacaatttttgcttcatttcaaagaccatctcacgaagttagcatacttctatttttacatttcatgc

SEQ ID NO: 230970 - DNA, 467 bp, Glycine max
  unsure (1)..(467): unsure at all n locations
agctnttgctaagccgtcaatacccaggttttgaactcttaaactatattataaaaaaacctatttaaagtcatgggtctcaagtattacccctaggacaattctcattcttggatgaagatctcaagcacacctcattcctccattgaaatattgataatgattgaatggaagaagagacatgatactaaaacaccctctatcagcagcttctacaatgaaagagaaataaaactttggaagttaatttttaaaatgctctcagatgataggacacaaggggttccaactttcataggaaaaattgcttactacagtattctcattgattgattcattgctgtgctggtaaaataatataaaatggataaaatttaaagtcactctacaagttactccactgagatctgatatgtgccaaacttcagttgttttcggactaaaatggtagcacttatcctttaatt

SEQ ID NO: 230971 - DNA, 441 bp, Glycine max
actcaagctcgacaagccggcttgtttaactaataataataataataatatttataataattacaactttattttatcaaatcctatcttatccagattttattctatctagattttattttatttcatttatgggtttggacttaaaatagatttgtaagctttggggctgaagacctatataacagcaccaaggttttagtttagggagttttttttcggagagaagaataattctaggattctagaatttcagtttttattactgttcatgcacactgttcacgtagaataaaattcattttctgcaaatcatctctaatccatacattttttaatattatgcgtcttttattttcttttgatatactttgcgctctaacgactggaattcaatatgattttatttatcgattattttcggatttgtacattacttat

SEQ ID NO: 230972 - DNA, 461 bp, Glycine max
  unsure (1)..(461): unsure at all n locations
agcttccatcgagtggtaatcaagccacattatcttttattangtgctccttaaacctccattaacctccattgttgcttcttcatttttctccatgtatttcatctcatgtcttgcgttgaatgttgttaacatgattctttataatttccaccaattaaactttctatagaagctagatttgatttcctatggttcaaatttcttggtcttgttcttgaatcataaattgtattgagtttaagttccgttgattcttatcttggctatttttgtggctcaaacttaaaccttaaaattcttacaacaacattaaagtagaagaaaacctcacaaatctagagtgacatgttcacctattgtagttttttcatagaagtcatgtctagtcttgaaacttgtcacataagaattcttatgctgcgttgaaatttaattctcttatttctttgtctaactca

SEQ ID NO: 230973 - DNA, 456 bp, Glycine max
  unsure (1)..(456): unsure at all n locations
ctaagctttacaattaaattttgtatncggttcaacttctgatagggtttgtcagatttgcattcattaccagagcgattcttatatagtaaaaacaaaattaaatatagtacgcataacaaaaatatatttaagcatatatatatttatcaacaattttgaaaaaaaaaacaaaccaattattatgtttagtcagagtgttaacctggttgttgtttagtgtaggtgcccgatatacttggtcatctgccgtttgtagatgctgctccttctatctgacaattaacaattgcttcttacagatcagtaagttaagagaagagatctcaacagtttgtaaaaaaaattaatttataagggaaacccctgatatgtttttttttttggaaagcaaaccccggatatgtactaaccaaagcaaccataactttagaattacacctttcatacttgaat

SEQ ID NO: 230974 - DNA, 348 bp, Glycine max
  unsure (1)..(348): unsure at all n locations
actcaagctgtacgaactnccactgtgcaagatattttgaatattctttactccacagagaatgtgcctatatgtacaaatctatactaattatatggggccaatgtaacgcagtagatgattttgagtttctcgtaaatggtgaataaaagtcaggtttgggcatttatggacaggctgtaacctatttatcatggagggcattggctattagtgccgaaataagttttaacaagcattctttagttattcaactatatatacctctatcgctcctgaagactacaatgaaaacaatattgttaatagttcggtggacttgaaaagacccattgaggttatattttg

SEQ ID NO: 230975 - DNA, 434 bp, Glycine max
  unsure (1)..(434): unsure at all n locations
ttgagaagaggtcgttataagctttcttgagattcttncttgagaagctagagcttatctactcacacctcttctagcactaagttcacctttttgagaaacttccttgagaagatttctagagaagctagagcttaggtacacacacggctctaatagctaagctcacctcgctgagatgaaaagctagagtttagctacacacaccctttataatagctacgcttacccctgtgccagaatacatgaaaatacaaaaaagtccgcactacagaaatgcgctaaatacaaggctgaaaacctatactactagaatggccaacatacaacgcccaaaagaaaatagtggacccaacattggcccatgagctctaaaatctaccttgaggctcatgataactctaaggcctttgtaacgactctagccaatcctc

SEQ ID NO: 230976 - DNA, 190 bp, Glycine max
actaagcttagctgatcttccctcttctctggttaatgaaaactcttttacttctctttcggcgcatgtcgatgatatagttctaacagggaatgatataatggctatcaatcgtattaccatatttctggaccaaaccttcaagaataaagatcttggcactatcaaaattttactttgcattcaagtt

SEQ ID NO: 230977 - DNA, 435 bp, Glycine max
  unsure (1)..(435): unsure at all n locations
agcttctacttatgaggcagggctggtctttttcactntcttgnctccaacgcgagccttgaccattgctcttccttcccgagatgcttcttttcatgtccgcctgagtgagcttatagcctaaaccatacttcccacgagtttcttgggtatttatcaagctagttatgtcgcccgttgtctttgcctaaacccatcccgggttcataaccggtccccaacataactcgggccatcattactgctgcatcggatagacaaggctgcccagagagggagtccacggatgaaatgctgaccacctcataagattggaaagcggctcctaacgattcttctgcggcttccacataaggcatagaggataggcagcttaccactatgtcttccttcgctgacacgatgaccaagtgcccctccactaccaattttaac

SEQ ID NO: 230978 - DNA, 308 bp, Glycine max
  unsure (1)..(308): unsure at all n locations
ngacttatgaatngattatagccttatgattctttggatattatccaattcgattaagaaaggaaaatcccaaagataaacgtccgattgatttttttgatttattttactaaacgaaatttgtgattattatattattatttctcctctttttggattaaacgtggttacggtatgaccgaacggtcagatatccatttaacagatatttaaagatgttataattcaaatgatcggcgaaaatctattttatttttttgattatgcgagaaagtgacttaaatatatgactaaagcacgtctaaaac

SEQ ID NO: 230979 - DNA, 346 bp, Glycine max
aacattgtatcctttaaaagcaaaacaacgtcaatttcttaatggcagggaagactctgaaagctgaacagctagaataggtgcacacagatgtttgggggccaaccccaagaaaattgttggaaactcacgctattatgtcatctttatcgacgactctactataaaggtatgggtttatttcttaaaaaataaatctgatgtgttttctgtgtctaaaaggtggaaagcagaagttaacatcacacacgtctaaaggttaacagtctgaaatctgataatggtgcggagtatgatagtcaagagtttatatacttctgttcacaacatgacatcataatgatca

SEQ ID NO: 230980 - DNA, 446 bp, Glycine max
  unsure (1)..(446): unsure at all n locations
tgaccatcctgccattatgaaaaaattgcatactaaacttattataatcagncaaaacaggacccaaggacttcaaccattgcacacccaatatgacattagctccggcgatggacaacacatataaatcaactataaatgattgcatctgaaggtcaatggtgatggcctcgcagacagtgtggcattcgagatgctgaccatttcctaccatgacccgtaatggtgttgtcgtgcgacagggaagacccaactgagccacgagctactcctggatgaaattgtgggtgctcccaccatcaatgagcaccagaatggggttgtcggcgatgttcccaacgagccggagtgtttctggtgcgacatgacccggaaaggaattgaggcttatttgggtcggtgggtcgggtatgtctattatgctgaggaatcggtcgtgtgggtct

SEQ ID NO: 230981 - DNA, 332 bp, Glycine max
tgacagtgatgatactagttcccaaaccgatgaagagctgtggccttacatgaagtcaaagaatgacacactcccctgtttctacaaagcttattcccacctgagaaagaaaaactgggtagtgaggtcaggagctcagtatggcgcagatttcgttgtctatcgtcaccatccagctcgggtccattcggagtatggtgtgcttgtttatcagatgaggaagataaagatctaaatggaaggttgagagtatggtctgatgttcattgcacaactcgacttcttagaggccttagcaaaaatcttattggttgtgtatgtcaatagaaatg

SEQ ID NO: 230982 - DNA, 430 bp, Glycine max
tcaagacatggcaagaatggttgtccctaggacctggaatgtaacttacttaacgccttactatagttagaatcgggtaatgtactctttttcctacttcagtattttcccacttataaaaaaataacggttttgttgaagaggttttaacgagacacacctaagtatccatgtaaaaggatgatcccttctaaagttaaatcatcaatgcaatccttttacatcgcctgatttacatattttcttatcgttttactagtccatttaataacatgcatcaccttacgaaaacaagaggtcgaatctgaacatctgattttttttcaaggttgaatttgaacctcggctttttaagtcaacgggaggtcaaaactgaaccttggcttcttcaagcaaacaacaggtcaaattcgaaccttagccttttcaa

SEQ ID NO: 230983 - DNA, 455 bp, Glycine max
  unsure (1)..(455): unsure at all n locations
agctntgcggatttggtcttcgccagtgaaaggatcgatgtgggtcctaaaagaggcaaatttgatcatcctactaagacgactgagaaaactggggcaaatgaagagggtgagaaagagggagaaacccatgctgtgactgccattcctatacggccaagtttcccaccaaacccaacaatgtcattactcagccaataacaaaccttctccttacccaccacccaggtatccacaaaggccatccctaaatctaccacaaagtctgtctaccgcactttcaatgacgaacaccacctttagcacaaaccaaaaacaccaaccaagaagtgaattttgcagcgagaaagcctgtagaattcaccccaattccagtgtcctatgctgacttgctcccatatctacttgataattcaatggtagccataaccctagccaaggggtcatcaacctca

SEQ ID NO: 230984 - DNA, 440 bp, Glycine max
tactcaagcttctagccaaatggacttaccttgaattaattccttcgatattctcttttgagccttgttttcttttccttgttttgaagctcactacaagccttaagtgaaaaaaccatgatatcaccatatccttaaggaattttggagctctggaattgttttgggaataagtgtggggggtttttgtttcattggataacatgttttgttggctatgcttcatgatgtattttgggccatacttgatgcacattgtatattggttaaatgttggacatgctgaatgagatgttcgttctcaaaggctacagaaaaataatattaataataattataataaatatatgtgaaaagaataagaaaagcaatatagttgagtgaatgagatcataaattgcgacagaatgatgagactcttggtcctattcattatgtgt

SEQ ID NO: 230985 - DNA, 425 bp, Glycine max
  unsure (1)..(425): unsure at all n locations
agcttgnagaaccgctggacatgatatatgttaaggtgtttgcntaaccagcgcgtcacggataaaggaatatctcacattacttccatgacacgcgtgcaacaatgatgattcataaattgtatgcaaaactcgtcatgcatgcacctatgtggacactcaagcatcaagttctgtggtcatgtgacactatggctcaagattcatttttcctatttaagtcaatccagtgtttccaaaacatgctcttttatcaattcatgcattcatccgagtccattttgggtgttcgggaaaattttcacagcattcacccttcacgtgtatacatattttntcaacaaaacactgttgtgctttgatcagtgaatcttttcaaagaaagaggtggagattattctttttaaagcatcttgcttttaatc

SEQ ID NO: 230986 - DNA, 447 bp, Glycine max
tttaagtaaatatccaacgttccaattgatgtcaaaatggttttatcgatttctagatattggtaatcgattaccagtgtatctgaacattgaaattcacaatcaattgtgaagagtcatatcctttcataaaaagctttgtgtaatcgattacatggttttggtaatcgattaccagtgacaagttttgaatgaaaagtcaagagatgtaactcttccaatggttttcaggtttttttcaaggttataactcttccaatggttttcttgaccacacatgaagagtctataaaagcatgaccttgacttgcattttaattaacttttccaatttacttttgaatatttttttcttcttcttcttttgccaaaagctttctgagtgttctggtatctaaactttgattcaccaaaaacaaaagcgtgttattcatctttatatatcct

SEQ ID NO: 230987 - DNA, 424 bp, Glycine max
  unsure (1)..(424): unsure at all n locations
agcttggcanacatagctgacacagacaggatatcttctttatatataagcataatatcatctgcgaaagccaaatgagatagctgaaatttgcccagccgggatgatacttaaaattggcatcatccttgaagctgctcatatctctggaaaagcactccaaacagagcacacacagaaaatgagagagaggatccccttgtctaagaccccgctaccttttgaagtgaccataaatggattcatcgactgccacactaaaggaagtggaagaaacacattccatgatccaagtacagaactgggctgggaagccaatggacttaagcatccaatccaagaattcccaagacatggaatcatcagctgtatgcaagtcaactttcaagacgcatctcggagaggatcttttccggaccatatt

SEQ ID NO: 230988 - DNA, 430 bp, Glycine max
  unsure (1)..(430): unsure at all n locations
acacactcaagctgataagtgtacgtctaagacaagtttcatatctcttacaaattgcatagcttactctatctaacaaagatntttcctctatcaaactnttaaataatggaaacccaaaggtgtatattagatcaattgttcaattttctgatttgaattaataattttaacttttaattattccacaacaatgcaagcacatttgaattcttcactttgttagccctactggattcataaaattatgttttaaacatcaggacaatctaaataccccgaatggaagagagaggaggaaaatacgcagactttgttaccattaaagtgattttaagacatcttctatagcaacggttgtacgcggtacaaaataattctgggttgtcagagtaaagtatataaaattattgcacaaaaataattaatt

SEQ ID NO: 230989 - DNA, 457 bp, Glycine max
  unsure (1)..(457): unsure at all n locations
ctcaagctnntaaaggataagggagacgntatttgagttactaaaaatgtttcaaatgcttggtaatcganggcctaaggtggtaatcgattataggttcagatagagagtaaggctttctgtcttcattgaaataattgattgcccaagttggtaatcggttgcacgatatgctaatcgattatcatgcatgctaaatcaaaattttccagaattaaacatgctaaaatggactttatgaatgttaaatgttacagaatacaaaacacatgtacaaacaaacaagctaactaaagataaatgcataactatatgaatgagttctccctaatcggctcaagttagattagacttacttagaatgccacgttcattatgagagtggacgaacctatcccttgctaaaagtttaatgatgatatcagctantcgcgaatctatatcaacaaactctata

SEQ ID NO: 230990 - DNA, 429 bp, Glycine max
caaccttctttacagcaaagagaagagtaatttttaggattgaagaaacacaagcagtgatgaagtcttctccacctttagaacctcacaatgactcacatactcacctcaagctctcacgatgacttcctcttcaagctccattccttgcaagtcttcccacagcaaaatctctcaaaactctttggactcggacccttctctctctagaatctctcacatgcaaaagatcttcgagagaatggccaaaatcccctccaaaatctcatttcaagcttaaataggcggctttgattgtgccagcgcgcttagcgcaactctagaccgcttagggcgcatcagtgaatttcggcttagcgcgcatctcctagctcaacggatggacccaagcggtgcactcaccgagatgaacacccactcagcgaacac

SEQ ID NO: 230991 - DNA, 251 bp, Glycine max
gccagagtgcaatacaaaacaatcacaaccaaagacatgatgatgtgagatgtgaggacatcagccattgaataagccagatggagtccgcgttaagaaggggcataaaaaagacgatcaaaatgtagcatggagtgttaacagcgacagcccaaaaaagtaggggattagacttcacatcgttgctcgaagaagggacagcaacactcaacgactaggcagaccgcagcaaagacatcgaagagaggaag

SEQ ID NO: 230992 - DNA, 447 bp, Glycine max
  unsure (1)..(447): unsure at all n locations
acctatgaatactaagcttctggctcacattttgatgtcttcgtaatctactaatattatatcagngctatacatttagctggcaaaacgccaataatatgtttactctaaagtctaagttgattatttaagtgtgtatttgctggaagttggaaaccatgggaatcactctatatattaatgtgtgtgaaaaaattggttggattatttatttgttaatcaacaacaattaattatttagaattttttaaaaatattaaatatatcaattataaacatcattaacaattattgactagttagtgaaggcacaattaacccacgtggtgtagctcaagtggctagtagcttgtgttctttaaacatattataggaaaatatntgtggagagagaaattgtcccataactgacattctactttgtcatggattaatctcatgattttc

SEQ ID NO: 230993 - DNA, 404 bp, Glycine max
  unsure (1)..(404): unsure at all n locations
cccacttcatcannagggatagcacctgacatctcaaacaaacaaatcacacgtaacaagacaattattgttgttgcatgaatacctcacccactcaagtgtatcacacaattatggcttttctctaatgaaacactcttgcctcttaccactctaacttccctcggagttctaggcaattcagaagattatggccacaacaaagaacaatccaccaatatgtgtaaagcaaggctagagagacaatgaaaaggttcaccaagaaaaacgctaacaatgtttttatgcacaaatgaaggaaataacattcagaacttaagaactcaagtgacaatccttcatgcaaccaatatattaccttatagagatttttcgtaaagacttcaagcataaccattagccca

SEQ ID NO: 230994 - DNA, 442 bp, Glycine max
  unsure (1)..(442): unsure at all n locations
ctgagcaaattcaaacgacaataactggttacttcgatgttcgattgagtcccataatatatcgagacgctcgaaatttaaaatagaaggtctgagcaaattctaacgataataacattttacttagatgtccgattgagtcctgtaaaatatcgagacgctcaaaattgaaaaaagaagctctgagaaaattcaaactacattaacattttactcggatgtgctattgagtcctgtaatatatcgagacgctcgaaatttaaaacaaaagctccgagaaaattcaaatgacaataactttntactccgatgtccaattgagtcccataatatatcgagacgctcaaaatttaaaacagaagctcatagcanattcaaacgacaataacattttactcgtttgtccgattgagtcctcgtaaatatcgagacactccaaatt

SEQ ID NO: 230995 - DNA, 431 bp, Glycine max
tgtacttaacttgttacaaatatccgagttccatttcatattagagttgtgagatttcatgaaatatataaattcgatcgaatatgttatatttaacccgattcatttacatcgctattcgattatatgtaaagctatctattagattgttatcacgttaatattagaagaattattattactagaaaattgtaaaaaatattaaaagggagtacaattatataaagtgtgtatcagatcaaatggattcgataaatctgataattcagatcaaactaattaaattagtttgggctgattggataattggttcgttctactctaattatgaaccaaactgaatataattgtgctcagttctcaaagtaatatattgttacattgaactaagctggtgacttgatctattgttttgtaactttagattaata

SEQ ID NO: 230996 - DNA, 340 bp, Glycine max
actcatcacacgaacatccgattcaggcgcataacatattaagaagcccgaaagtgaaatacgcatggcctccagacattcaaaagtgcataacttgccacacaaaagtccgaggcaagcgcataatacaacgagaagcccgagatgaacaccagaagctctcgacatatatcaatgggcataactagtcacaaggaaaaaccgagtctggcgcaccacatatcgacacgctctaaattgaaaaccggaagctctccagaaagttcaaaagtcataacatcgctccacggaagtcacatcctggcgcacaacatatcgagacactcgaaatagaacaacg

SEQ ID NO: 230997 - DNA, 315 bp, Glycine max
cgaccgtaggaatttctccactgtattccgtgtgacaagttacgaccatttgtatttttcgatagcattcgtggctcaaattcgagcggttcgatatattatgcgcctgaatcggacattcgggtgacaagttatgaccattcgaatatgtcgaaatgcttcgctgttataatggcagcgtcttgatttatatagcgcctgaaacagacatactgtgtacaagccatggtcataagtatgtatcgagagcattccttgtttaatttcaagcgtgtcgaaatctactgtgctgaagtctgcactaccatgacaagg

SEQ ID NO: 230998 - DNA, 479 bp, Glycine max
  unsure (1)..(479): unsure at all n locations
agctttcaacanatgtcttcacaaataatcatcacacagcaganacttatcaagactacccatcatatctccccaaaccccatacctacgaaaatcaaaggagaaagaagtccacccaaacctgaattttcgaagtcccactcgtagccatgcacttcacgactccaaaaatactctcctttcgcgatttggagcagaaatgatggccaaaggttgaagctttgtttggagcttcaatggagaatgagggagaagaaaatggcaacgtgagggagagagagagctgtctganaaaagtgtgggggctgagtgaagagagagaaaagctttttggttctaaataaaagggttttctctttctctattattttattcaagctctgccacgtgtccctatttgagtggagcanaagggcccactttcccttttgattggtgacccatactcagccacaaaagtgagaaaaatctgacctttg

SEQ ID NO: 230999 - DNA, 451 bp, Glycine max
  unsure (1)..(451): unsure at all n locations
tggaagctntgcttccacagtcatcacaagacaaaacaacatacatcaatcattaattattaacttgataacatccaggaccaaacaacatacatcaatcattgttaacttcataacgttggtttttcaattaaacagaccaaatatttgaattcaccaaaaatagatgtctattccttaaacttagaaagaaaagaacgcacctcaggaaatgtttcagcgctacacaattgcaaggaaataagcaggattgttagtaggattaacaatgcctttttaaagccacttccaacttttggagatgatattgccacttcaaacaaccctttaaaatgtggatcagagctatcagtttgagaacataatgaacaaaattataattgcattttaattgttccagtatatatttttattagtagttaatataattagaaaagctaacaattacagc

SEQ ID NO: 231000 - DNA, 472 bp, Glycine max
  unsure (1)..(472): unsure at all n locations
agcttgttcgaagatcctcgagacgttataagaggggccaatctttcagaanagactttcaagaagtttttgaagatttctctagatgagaactataacctgcatcctttcgagttcaaccattcccacttctgcaccgtggggttggttacctggtgggagaaatattatttgagccgttcagttggagacactactatcatgatctccagacttgagagtggctntacacaaccaacggtcgagaatatccgctcaaaccttcaagctcgaggtattaaattacttttgactttccaaattgatatgtatnttttgccttttctaatattcttattttaggcaaaacaatcataacaaagaaaagcaccgaaacgtctcgagctgatgtgagacccaagaaacccactgtggtgaagatccaagaatggaaacaagaagagaaggtaactcttctgaactttatctttac

SEQ ID NO: 231001 - DNA, 452 bp, Glycine max
  unsure (1)..(452): unsure at all n locations
ggcacctcaagaacaacatcttgtattccatatgcaatcactatagaaagttaattcataagaagattgaggttgaagacattacatcttccatatgaagccacacatactaagatttcatcaaaagattgatgtgtaagcattcttagatgaaaccaagttgaaatttaaaattgtctatgagaagatctggtgtgcaacatcagaatggaagactgaagccattatgcaatctaaccttggatagaacaccaacagactaataactgttccttcaatttctatttatgatgcaaactaatttagaatgctttgtgaagatgtgttaagcatgatgaagctatgttatttcagaaagccatttcagttgtacttcatcaaaaggatttgcttcagcatagatcttttctcagttaacattagaatcaccatttngatgtatctttagaaag

SEQ ID NO: 231002 - DNA, 471 bp, Glycine max
  unsure (1)..(471): unsure at all n locations
agctngcttgtggggcttctatggaggctgtatctttgttcttcaatgaagtcctttaatggtgaatttccaccatggagatgcagcggaagacaaatgagaagatgtgagaggaggcgccctccactatggaataagccatggaagaaggagcttcaccatcaagataagccttggataagaagctttgagaggatgctttactggaggaaaagacagagggagagaaagagagaggggggagcacgaaattgaatgaagaaaaagggagagaagttgaactttgagttgtgtctcacaagactctcattcatcaaagttgcaataagtggtacacatgcttctatctatagactaggtagctccctctagaagctgtcttgagaaaacttcctttagaagcttctttaagaaaactctcttgagaagctagagcttagctacacatacccctctcataactaagctcac

SEQ ID NO: 231003 - DNA, 449 bp, Glycine max
ggtccactactatcttgaacttagtgttggatgtggccattcttagacacctacccttatcccaatctagaaaaccctattctagcatgcctttagaaattcatgcatacactaacaacatgtaaaacacacaatgttaacaacttacttttaccatgaatgcttcaaaaaatgaagtttagaaggtgtgagtcgcacaaacttattcttagaactttttcttttctcttaaaagtgagaacataaggtcattatttatagagaaaatagttataaccgctgtaatcgattatatcaaagaagtaatcgattagattatcattttaatcgattaatgtgttcttcccaacattggaaagctttcaagaacaatataattgattagattattcatgtaatcgattgaagtgttcttgatcacttattgttagtcgggtaatacgactaac

SEQ ID NO: 231004 - DNA, 476 bp, Glycine max
  unsure (1)..(476): unsure at all n locations
agcttangctntntaagaatctatttagttaaatatgttaggtttgagtttataataaaacctattaagcttgataaataggtctatttattcatttatatataataaaaaattaatatacatgtattatactttaatatttaatatcttaataagttaataatttatatcataaataaaataaatatttgagataaaaagcctcttaatagttaataggtcatatcaggtttttaaaaaggtcaaaccaaacttaaaaaaagtctttgataggataataggttaggtcaaaccttaattnttataataggtcaaacctatttacacagagtctaacatgccttgtatattctcacccctattcttaagtttcaatgtttgaacttaaaaanaaaaacaatattcataatatttgcttccaatcatggaaacttagagagagatattcacaacaaaacacttattgcacaatagtc

SEQ ID NO: 231005 - DNA, 450 bp, Glycine max
ggtcacaaaaccaaacaaaagatattgattgttcccgttagttgttctcattctctttctccctttgctttaatacatgttgatatttggggtccctgttcaaccacttctatacatggtcataaatattttcttactattgttgatgatcatactagatttgtttgggttttaccaatgtcttctaaagctgaaactcaatctcttttacaaggttttattaaatctgctgaaaggcaatttgatacaaaagttaaagttatttgctcaaataatggtgatgaatttatcattagtcatttctttcaagccactggtattattcatcaaacaacatgtgttgaaactccccaacaaaatgggattggcgaaaaaaaacatcaacatttacttaatgtaacttaagccctcttgtttaatctaaccttccaaacattttttggtcctatg

SEQ ID NO: 231006 - DNA, 170 bp, Glycine max
  unsure (1)..(170): unsure at all n locations
agcttctacttatgtggcatggcnggcttctcttactttcttggctccaacacgagctnagaccacagatccttcttcccgcgatgctatttttcatgtccgcctgagtgggcttataacctaaaccatacttccaacggtttccttgagtatctatcacgctagttatg

SEQ ID NO: 231007 - DNA, 442 bp, Glycine max
  unsure (1)..(442): unsure at all n locations
tagcgcaacagggcgcttagctcaacacacaataatggcttatcgcacagatgagcttatccttattacaaaggaaaacttacaaaatcaaagtggcgcttagccgtacaggtccaacttagcgctgaacaaaaattctcaaaaccctaaatgtcataacattggtcccacttcgatgactccatatggccttgtaatggagcggtcagctaactggagggtcatgcatgtaggcattatctctatctctccaagtcgttggcatatgcaaagaggcattaaactgataccagctcccaagtctatgagagctntgcctatagcaatctcactaatagaacacagtatcgtgacaactccaggatctttatgctngggtggaagaatgcattgaatcacagcactagagttaccttccacaataattatgtcactatggatg

SEQ ID NO: 231008 - DNA, 471 bp, Glycine max
ctccccccctagaataattgcctcagaccttaacttacacagcctgcagctgcaacatataccgataaacgactttaattttatccctcgacacccaccttcaaccttgtttcccttaccttgttctgaagcacactacaagccttaagtgaacaaccctgatatcaccatatccttaacagaattgtagcagcttttcgtaattgatttgtggaataacgtgtggcggggtcttatgctacataggacaaacttgtctccttggctatgcttcatgatatattttgagccatacttgatgtacattgcatattgcttaaatgcttgacatactgaatgaaatgttgtttctcacaggctatatagtcaaaaaaaaaaaatttctaaaaaacaaaaagaaaagcaattaagctgagtgaacacgatcttaaatcgcacaagaatgatgaaactctcggttctactcttcat

SEQ ID NO: 231009 - DNA, 289 bp, Glycine max
ttcaaaggcgtctactcatctctctttcaccgtcatcaaactctacgccataaaaccggcataaccaacattacataggaagagtatgccacgatggagccgatgatccactatacaaccattccatcaatattgagatcttaaaaataaattacacactgtactttctaacgcgagtttatctctgcgattaagaaatacgtccatcaaaaaaataagaagggacgacaagccctctgcaagttgttagcgatctccctcaacaatcgtattaggcccaacgctaggg

SEQ ID NO: 231010 - DNA, 452 bp, Glycine max
agcttgtgccggccggcaagaatactgctgtgaagaagactaataaagaacacgaaccgcgggagggagaatactgctgaccaagatacaacaatgaagaaggcgaaaaaggtgagttgggtgcacagaccatgaaggagaatgagcgcgaaagaagaaactttctttaaaaaaatttattaactcttgatttttaaacgaagggcatttttgtaagttcaatgaattgctgggtgcaccagcaattttgctgggtgcacctagcaacaacccagaaaaggggttctaaaagtacaactggacagcttctacaacggatgtagatagaatttatgggaatgtaaatagtaaataaatgcaagaaaattattaaaataaaaacaaaataagttagaaaatgaagaggtgagaaagagtgagcaatggactattacaggctcagtaaccatggg

SEQ ID NO: 231011 - DNA, 438 bp, Glycine max
tggagagggtgcttcaatggaggaaaagattgagagagagttagagagatcggcgagcacaacaatgaaggatgaaaagagggagagaagttgaactttgaagtttgtctcacaagactctcattcatcaaagttacaacaagtgttacacatgcttctatttatagactacgtagcttccttgagaagctttcttgagaaaacttccttgagaagcttctttgagagaactttcttgagaagctagagcttagctacacaccccccctaattactaagctcacctccttgagaagattcctaaagaagttagagcttagctacgcacacctctctaatagctaagctcacctccttgagatgagaagctagagcttagctacacaccccctataatagctaagttcaccctcataaaaaatacatgagaatacaaaa

SEQ ID NO: 231012 - DNA, 470 bp, Glycine max
  unsure (1)..(470): unsure at all n locations
agcttgtaagattatggaagacctatcacatgtggtactaggcggcggtcgagcgatggtgcgaaacgattttccacatccacaaatcacgtataacccaccatcctctgttgcccacctccaactgagctcacgtgctcccacgtaacccttattcttgttcctctcaacgccggggccccatcaatcctcccaagcttccacaacatccaggtaatttcacattcaatcatcatagactaacaaaaccaagcaaaatatggcaaaggcagaaaactctacccaaaacacaactcanaatcacagcttgtcacatacaaataccccagtaacattttcttcgttcaattcgttaaacgttggatcgactcgaaaattttactggaagtctctagtacataagtctacattcttaccgttgggatctgctagcaaatgttcataaccccatatgtactacccttttcaca

SEQ ID NO: 231013 - DNA, 443 bp, Glycine max
tcactataatattataatatcatcataattatttattacttcttataactcatacacatcacacaataataatatttgcatgatacaaacatatatatgtatatgtatatagtaaattaaactacattgtttttaatcaaaggatttctttaacaattaatttaatattacatcaaaagaaattaccactagacattaaccttacaattttctttaatttattattctagtattacaataattatatacacataacatgttgatcatcgtcgtagaaaaattagaataagataataatttgtataaaataagtcattgaataatattatgtaaaatataatttacgttaataaaaagagcttaattttcctaatgggttcacactcaacacaagaacacatcaatttcatagcaatttctcattgggacatcaactgattcat

SEQ ID NO: 231014 - DNA, 443 bp, Glycine max
  unsure (1)..(443): unsure at all n locations
agctntaggatggatgcttgaaatgtaactttatttgctttctttctctagtccatactaatatcttttcttaacctcacttgactntttttatgtttttcttttgtatcattgctttaggtatgcttatgttgttgcatctactcttcatggtgttcgtaacatattacacaaggacttcatgattcangttcaataaggttctctcttttatttntattnttttctgatggccagtattaataagtaaattatacaaggacttcatgttaatatgtaatagtgaataagcttagaacaatatttaagaattggtatcatacactactactagacctcctcaagtaaaacacattagtcccgtatagccatttaaatgaccaatagtagtagtctagataaaaaatctaataagtacgagataaaatanaatanatcaaact

SEQ ID NO: 231015 - DNA, 441 bp, Glycine max
tattatgtttgggaatgccatcaatgatttgaatccattgttattgcattataatattgatttcaacatggtatttgtttagaaattatcatataatatttactctagtgtatggtattagtgaattaattgtggtaagttattattagtgttttgtgattatatgtaaagtagtgtgattttgggttatttaatatttttcatttccaaatctaattagcgttgtgattgatttcaaattgatagttgaaatattaatttatatgtttatattgatgtgtttggaaaacttgaaatcaaaaatatttttttgagataattctctaatttaaggactactaggttgtgatttctagggatgatatagatatgcaatttctggattttgatatatatgtaaaaattgtgtaacattaaatctaactaaattgtctagtattt

SEQ ID NO: 231016 - DNA, 432 bp, Glycine max
  unsure (1)..(432): unsure at all n locations
tgagcagccctgctcctgtggcaaaaaanaagaagaaagtattctctatgagatgaatgaatatgatgaattgaaaatcacgttgtgatacagggcagatacattttgagatccattccagtcaagcaacaaattacaaatattgggtgctgaaaatgttaattaaatagcgtgtgacgtagaaaggtatgaacatagtgcaggcgagcaaagtggagataaattaagtagataaacaatgacaagggtggtatctgtaaatcaattaatctctgttcggagggggtaccgtttttgcgaggcttgaggcgagcagagagagaaagccagacacgcctgaggggaaaaaacatgttggcccaaatctccataaggttgtttggtgatgtgttgttgatcnttttncttctcctnctnctcctctgcccaagt

SEQ ID NO: 231017 - DNA, 433 bp, Glycine max
  unsure (1)..(433): unsure at all n locations
aaactaactggctaaattctcctttcattccttgatacatctgctctgtgatctgcttcctagtaatagcaataaccaatcaatctacagcttactaaatcaggaatgccaaaaagntaatttcttatccttattattagatcaatatactcgagcaaaaattttgggaacaatgtgagataagatcaaatgcataatgattttgagtaatgaaaattttcttttaattcttttgcattccaaaaattctccaagttattaaattaactgtttttcttaaagctacttctacaccaccaccaagggattaattctaccaagttcctacactgtaccaatgacattttgccacacaagttggtgacactaatagagctagccttcatgaaaatactgtactaatctaacaagttatgtgactaattaggaataa

SEQ ID NO: 231018 - DNA, 453 bp, Glycine max
gagctattatatatgcctttataggatatccacttggaatcaaggagtacaagctttggaggatggaaccgggtgaaccaaagtgtatcctctacagagatgtaatttatgttgaaaccagaatagctatgaagcacgctagcaattaaggcaacaacttagacattaatgaagttgaggtggagctaccaactcaaagaggtcaagtcgaggaaacaaataatgatcaacaactttaaactgtagttaatgattacaacttggctaaagacaaagttagaagaaacattgtgcctcctatgagatatgaacaagctaatctaatctaccttgctttgacaatcgctgaagagattcaagctactgaacctagaaacttcaaagaagcctcgaacaacaaggaaagtgaagaatggatctcagccatggaagaacacattatttctcttgaga

SEQ ID NO: 231019 - DNA, 439 bp, Glycine max
tgaatctgactaccctcctgatacacttcggaaaagggttcttcaactagagaaatcaaagggagatagaaagagaagtggagaatttattaaacgccctcaatcaaagaggccaaggccgaatgagagacgtttttcactccattcatctggtggtaacgttgcttcaactgttgttttgggtaggcaggttccccctgttagggcaccatatgcagcaaatcctgataggtatccccatgatggcacaatcacatatgattatcaagttcctggtcaatctatatacactgcagcatctaatgctcctccttctaactatggtcgttatatgggtactagtactagtttgcaatcctcacaccaaccatacttgtgagttttttttccatccaatcattagtggaaagactacagacttgagaaggatcaactcatt

SEQ ID NO: 231020 - DNA, 299 bp, Glycine max
aaaagcaagaaagagactttttttattataaaaaacaatccaaaagccccttgaaaccaaaacatatctacccacaccccataataaccaaaataactccctaaaaacaattaccgaagcaagaaaccacaccatatatccaacatcgaaccacaatactactaaataaagaataatataaagggtgtaacaacatcgacctcgtcgaaagcccctggggggaaaaagactggtaaagagctaaacatctcgagggatgtaaagtctcaattcatcaggacctgacttgatgggctcac

SEQ ID NO: 231021 - DNA, 294 bp, Glycine max
accaaacacacaccccaacacaaacccccaccacaaaccaccaaccaacctagccacgcaaagaacaacaaaaaaccacacaatctccacccaaccaaccaacaacacccacaaaaaaccacaaccaaaacacacccaaaataacaccaaacagcttcactacacaacaaagacccacccaacataccacttaacacccccactcacccctcaaaaaccatccaacaaacaaataaaaccacccaaacaacacaacacacacaaaaacactacaatattaaaaaaacaaccaac

SEQ ID NO: 231022 - DNA, 362 bp, Glycine max
tgctagctatcatcgccaagaaccaagaagagctagccatggcccacgagcatagaatcgcggatgagtatgctcaagtatatgcggaaaaagaggctagaggaagggtgatcgactctttacaccaagaagcaaccatgtggatggaccgggttgctcttaccttgaacgggagtaaagaacttccccgcttgtagccaaggccaaggcaatggcaaacacctactccacccccgaagagaaccatgggcttctcggctattgtcagcatatgaaagacctaatgcgccacatcattaaaaatcgttaagagacctgaatggtctctcagaccctgacaagataccacttccttttttttg

SEQ ID NO: 231023 - DNA, 241 bp, Glycine max
gcacaacaagcttttcacatccacaatgcgcgcataaacccaccatcccctgtgcccacctccagctgagctcacgtactcccacgtagcccatatcctcgtttttgttaacaccgggtccccatcaattcctttaaactttcacaacatccaagcaaaacaacattcaaacagcacaagctatccagccaagcaaaacaagcagggcagaaaacttgtcacacataaccaaatacagctt

SEQ ID NO: 231024 - DNA, 388 bp, Glycine max
  unsure (1)..(388): unsure at all n locations
aatcgactgcagctgcagctgaacgcaagaagatgttggagattgtttcnaagaagtgctggctattacatgcctaactcctttgagtggcatttggattggtggtaactagattgtctcattttaccacatatgatatcttgctttccattgagcatcatcatagtgtgagtgaagaaaaatttcttagttacaaaattttcttcaaaggaaaaaactctctattttaatcgattatagagttgttctaatcaattacaacacgctgtctgaagcttaataagttaagtctcgcatcgattaaatagattacacttgtgttcgagacaatgactattatctcaggagtccttactttaatcatgtctaggtggagtaattaattact

SEQ ID NO: 231025 - DNA, 340 bp, Glycine max
gaaaaagggttcagccccttatgcacttatctctctttcaaatttgccgggaaaaactgtttccctgaagaatatccaagccgaggcgcttccgaaacgtttccttgaggatatttgcgaagggttcgaccgttcttcgacgctcttacttcgttcttcatcgttcttccatcctcaacgggtaagtacctcgaaccaagcttttctatacattctatgtacccgcggtggtccacaatggagttcgagcattcgattcttgtttcatttactattgatactccatcttgacgtgcttaaaccatttatttaaagcctttttcgcttaacctacaaaaaa

SEQ ID NO: 231026 - DNA, 369 bp, Glycine max
  unsure (1)..(369): unsure at all n locations
cataatattgnagcccatgtcacacatttgctaaaacataatcagcatatgtttacatgtgattttcaacaacaaagaactcttaaacatagagatgtaacagcccatcataagcttttaagccttcaaatccacaatgggattggaactgaacttagcatactaactttctgcattaagactaaagagttctctcaatacatcntttttactctgatactacccatgttgttgagatttcacatccactatagatattatgaccaatatagtccttataaggtttggacagtctttacctttcaagtcagttttgtgggagttgagttaagccctaagcccaaattctaaaatgatattagtgtctat

SEQ ID NO: 231027 - DNA, 365 bp, Glycine max
  unsure (1)..(365): unsure at all n locations
actctgcataggacaaaactttggcttgttagaagcaaaagtagctgtgcaatgatcctgcaacgtttctccctccatttttccccctcctatgctcatgccccctcctttattatcactcttcagcctgagcgtggggctcatctcattttacgcaaactctagaatgcactntttagtctaaataaggcttcttcatttgaggcgtgtttgcaattttagttttcctattcctgctagtttcttatgtagacgatagatctgaaccttcacttcaaatctatttccaagatcaatatatacctgttntgcctaagttactggtgtaattactcctccttatataaactttatcatgtttgaat

SEQ ID NO: 231028 - DNA, 439 bp, Glycine max
  unsure (1)..(439): unsure at all n locations
tgcaagctgaatgaggaagtgtagaagggtgattcttcctgcttttattcgttgaccacagagtggtacctggagatatgtcgcgggggtcaagagaccttggggacgtcaggtggggtgctattgcccaaaaccaagcttgaccaatcccgacccaacccgggcatagtcagtcagtgagaacctgtgatgtacctaagcaggcgagctcctgacagtcaacagataaaaggaactaagaccacanagcaaggaggcttgtgtggtggctggccagctgtgaactttgattgatatatgggatatggcctctggtaatcgattaccaagggtgggtaatcgattacaaggcttaaaaatgaagacatgaggctaagatggcctctggtaatcgattaccaaggggtgtaatcgattaccagacttataatgggactgg

SEQ ID NO: 231029 - DNA, 401 bp, Glycine max
  unsure (1)..(401): unsure at all n locations
attccaattaaacatatacgaataattaaaaaaaatattcctaaaacacaataccaaatggtagtacatatcactagtcatatatcattaagaattaagttaaagcacataatcataaacaaccaagagcaagtcaatataatcatcatgttcaatcatactaagcaagtattaaaagaaatactaagtaatcaaatgtcataaaaacatagccaaatacaagtcttaaaaacaaaatataattataatctaaatttattatcagagaatcaaaacttaattctaagtaacaaaaattagttgtgaacacatacatggtaactcattacttatctcaattattntagaatatcaaatataatntgacananatccaatcatgtcaaatcatacataaatgg

SEQ ID NO: 231030 - DNA, 299 bp, Glycine max
aatggattacacacaacagacacgctggtaatctattaaattgtgccttgttttcactcaaaatcagaagttgatataagtaatcgattaaacgcaggtgtaattatttaaatatgcaagaaaaactctccctaaggcctttgtaatcgattaaaacaaaacccaaagccaaaagaagtctaaaccacatcatgtaatcaataaaacaaagtcgcaataacaaacaacagaacacaaggccagaaaaagctctataccacaacatgtaatcgattaatacgtagcagtagtcgattaaa

SEQ ID NO: 231031 - DNA, 388 bp, Glycine max
  unsure (1)..(388): unsure at all n locations
ctttataaacaagtgagcttttggtcgaatggcttggatatacacaataatggccttcattatatccatatttatgccattcattcttaaattccaaaattgatacaaaaatcataactttatgctagtcgttctctccacaattaagttcacactctcaccgcgttatggttcaagcttttctcttctaaccaatctgcctactaactaacatttctaatcgngatcctactttcttggtctttctcatctaacatacatgctcattacaaactcatgatttcacacatccttcacccttcatgcaatcaatcacaacaccaattacaacacaaataataatgttgcactcatactcagataatcaagcaattgtcaatatgcttaa

SEQ ID NO: 231032 - DNA, 419 bp, Glycine max
  unsure (1)..(419): unsure at all n locations
gcatccaaggattctaaaactgcactcactcctgaagatattggggcttagtaactggactgtttacttcaaaaatgtctcatcacgaggaacataaaaacttgaacttctcttctcatatgatgggtctgtaaaacaacaaaaaatggacaatagttaaaatacaaaaaaaaaaaaccgtgttaactttgcatgttcaaaactttcagtctttccaccacaataagtagtataaaaaaatgaacaatcaattgattaaagctatgaattggttaaattcagattaaatccagtcttagttaaaaactaattaacttgtggaaatataactaattagcttgcagagtaaagtacaaaatatttaaacaaaaatcaaagaatgtgaactatacgatattatnttatctgatatctactct

SEQ ID NO: 231033 - DNA, 394 bp, Glycine max
taaattaattatgttagaatatgcctagtggttgtaaaaccttgccatttatttaatgtatgtacaacacaggacagagaccctgaatattttggtggctccttactacttagttttataattagttttatcgctaattgtctctctgctttggttttggctgtatttccttttcttggttgagaccttattcagatcccattaacacttcactttctttcgtggaaaaatattctggcaaaaaaaaaaacatttataaaaagtatgaactatgtagattagcatctttccaatatcacatctcatgttaaaaaatcagctcttatctcagtcttgactatcgaagtgtacctttcaattcgaaacttattgaatagttcctaatccgattctg

SEQ ID NO: 231034 - DNA, 264 bp, Glycine max
tgaactagggatggcatatggccccgctgagccctggaatgaaaaccaagaagcccgaaggaaaacacgaccaaacaagttttgagggctttataggcagcatagtgagctcaactctgagaggtgaaagaatcatatgggcaaaggatgatctggaagaaagctaaagcttgccttggtcgaaaaaaatctgcccaacattaaagtagactgaaggaatatgggccatcatgatgaggcaagagaactaaatcagcggaactc

SEQ ID NO: 231035 - DNA, 304 bp, Glycine max
aataatatgcccaagggatcctatcttaatttttccaaaagtacacattctttgattgataaaagaaagagtgttcttattagtctgaccaacacttgtctaagtgcctaaaagatcctcccatgtttttttggtaaccaaaatatatcaagaaaaccaagacataactagaaatttgtaatgccctagatgagatttgaaagctgttcttggaatggctagcttgcgcattcttatatggtgacatcccgccctcaaatctattttggagaaatacacagctctcaataattcatccaacaat

SEQ ID NO: 231036 - DNA, 387 bp, Glycine max
aatttgcttagcactagacaagactaaaccaaatggatggtctgactataaatagcacaatgtccattcagaattttataacctgataataaaataagagattatatgtaaccttcccaccactccttattattcttaaaaacattttatgactatctttatttgaaaatgaaaaattacaactttcctctgttcccctccaaacacttccatccaaacataactgtccactaggggcatgtataatcagacaaggtaaagataccaaaaccatactgaagatagacataatcattaattaacaaatctgaatgaagtcaaagcagaactatgagatgttagattctggaaatctgaaaaaaaccatttctttaaactaaaaaaaac

SEQ ID NO: 231037 - DNA, 228 bp, Glycine max
  unsure (1)..(228): unsure at all n locations
aagaaacaccagccctggatgacccatgcataataaccggctataagccacagaattaatgtaacacaaaagctagaatattgatcccatattcaccaccatgggaaatggaaaaacatactnagtgcctgagccgcaaacaatctctcacgataaaccttattcaacaacccctttacaaaatctacggcatcaaccgataaagaaggccaaagagcctcatcaaaa

SEQ ID NO: 231038 - DNA, 375 bp, Glycine max
  unsure (1)..(375): unsure at all n locations
gctgaacctttatttttttccaagttgagttttattcagaaaattagagtttatctcttttatcttagtgagagtgattctcctaaattcttgagtgattcaagaacaccctggctgtatcaaaagactttcacaacctttgtgtgttgccctcgctggaaagagagattctttccttcctttcatcttcacccttggtctttcaaatcacaattccagaaaattcacccctgcccagaattatctcgtggccataacttccattttacgcacttcaaataagtgattcttgagcctanatngaatttcaaaacgatacctttcacctcgtgttgaatcacctcatttggagccctgtactctcagtattgcatt

SEQ ID NO: 231039 - DNA, 359 bp, Glycine max
ctcctctaatgactatggcatcatttctggcgctaaactgctgggagttggaagccatcttctcaattaaatttctggcttcagcaggagttatgtctccaaaggctcccccactggcagcatctatcatacttctctccataatactgagtccttcataaaatattggagaagaaactgttctgaaatctgatggtgggggcaactggcacatagtttcttaaatctctcccagaactcatacaggctctctccactgagttgtctaatacctgagatattcttcctgatggctgtggtcctggaaacagggaaaaatttttctaagaatactcttttaaggtcatcccactcttgat

SEQ ID NO: 231040 - DNA, 245 bp, Glycine max
tccttatctatcaccccctctaaaaccaaatgaacttcctctaaatatatgtcggatgaaaataacacaacaaataatcagacttcaaacataataccactaatatctagaaatatatatcacggtgttacagcaatgaccctgatggatggcccttgcgtgggacaatagagcggctaaagagctttaacatcttcgaggggatgtttaggatctttaatccatccatggtctttgtactagat

SEQ ID NO: 231041 - DNA, 439 bp, Glycine max
  unsure (1)..(439): unsure at all n locations
gctacccacactattaggcacaccacttttcttacctatcaatggtaagaaaatgacatcggcagaaatgcagttgagaagagaaaggggcccatgctttacttgtgatgacaagatttcccctagccatcgttatcctgataagcaatatttttttccacagtgcgaagaagaggatgaacctgcattacaaccaaatccaccatacgaggttgagacagctggtgaccccagtttgcaagaccaccatttgtcttataatgctttaaaaggctcatcacgtcttatgacaatgaagtttcaaggatcaataaatggattgcgagtggagattctactanatagggggagttcagataacttcctccagcctagaatagctcaatgcctgaagttacctggagaaccaatttctatattgcacggtttggttggaaat

SEQ ID NO: 231042 - DNA, 409 bp, Glycine max
agctggctaatgtactctaaatgaaataatgtttgatatattaataaaaccctatatatattatcatgaaggttctaagaatttgtaaataaaaggttaatttccactttaagccaagttaccacattaagtcaagagattcaaaaataggtgattcaattgtttaatatgatcgtcaatgcattataagtggaatacacaagttctatcaacaccgtacaaagcgagcactcttatgtccttattttaatttggtttgagggtgcttgcaaagaagtgatgaatctcaaagagtgtggcacaatgcatgttttataaaagggatgattttttctatttttcagaaatttagtttcaaaaagtgttaaaatttaccacttctagaaagatagttcgaaaatatgttaat

SEQ ID NO: 231043 - DNA, 459 bp, Glycine max
  unsure (1)..(459): unsure at all n locations
agcttccttaagaagatggctagagaatctttatcttanctacacacacccctctaatagctaagctcacccccatgccaaaatacatgaaaatacaaaaaattcccaactacaaagactactcaaaatgccctgaaatacaagactaaaaccctatactactagaatggccaaaatacaaggttcaaaaagaagaaaaaaacctattctaatatttacaaagaagagtggacccaaccttggctcatgggttcaaaaatataccctaagtttcatgagaaccctagggccttttttagcagctctagcccaatcctcttagagtcttctatccaatacccttggngggtaggattgcatcatcccctcccccttggaaaggatttgacctcaaatcccgaggttcttgatactctgggctccttccctcgacacctgtaaaaagaatanaagcatata

SEQ ID NO: 231044 - DNA, 390 bp, Glycine max
  unsure (1)..(390): unsure at all n locations
agcttattctatgggatgtaccaagctcactttgatcacnaaattcaagtctatctagtttatcaccacctaatagattttgtttctcaagttcatgtaatcctctttcactaacatgacctaatctcaaatgccaaagttttgttttatcaatcaatgtattactagctaccgatgcatgtccaacaatagtggaaccttcaagaataaacaagccattacttttattcttgttacccttagctatgattaaagatccatttgaaatcttacgaacgccatttaaaattctagttgaatatcctagatcatcaaacatgtttatggaaataagaattcttttgagttctggaatgaccttactttntcagaaatactctctatataaac

SEQ ID NO: 231045 - DNA, 441 bp, Glycine max
  unsure (1)..(441): unsure at all n locations
agctngagtctcaggtgtagaacctgtcttttcatttttaacaganaatgtacaatntacttattgtctcaacatggaaactaaacaacaattgatataactntcttcacagataaccagcaattgtgattatgaatcaaaaacagtgaaagaaaacttcaaaattacatgataccctgtcaaggtttctgatcaaccaaacttggttgctaaagctttgccttttgacaagatttatcagagaaggaaaaggaagaaccgagtttaaactatcagtgtcaaatatattatgcttagataataaataatttagcatttgcaggtcactatcatctgttagtatgggggtttctgataataattcttgacttgctatttcttaggagtggtacataactcctatntctgcagcttatggaagttatctctgtaaacatatta

SEQ ID NO: 231046 - DNA, 310 bp, Glycine max
taaaatggcccttgtattcactcaaaaccagaagttgaaataagtaatcgcttaaacgccggtggaattatttaaatatgcaagaaaaacttcccctaaggcctttgtaatcgattaaaacaaaacccaaagccaaaagaagtcataaaccacatcatgtaatcaattaagacaaagtcgtaataaaaaacaacagaacaaaaggccagaaaaagctttaaaccaaaacatgtaatcgattaataccgaaccatagtcgattaaaatagaaaattttgaaccataacatccatagtgcataaatgggaat

SEQ ID NO: 231047 - DNA, 285 bp, Glycine max
accacacaagatataatacacatcagcggacataaaccgacaagaagaagcacagcagcaaatgaccaccttgagccaaaggagtccgcctagtacctgatcaagaaccaaacataactcgggagagtcatgtcaacaccgagtgcaacccatcgaattacgaaaaagtcacaaagaaaaaacatgccccgccccgggagcagagagatataagaatcccaaacacaaataagtgcaaggactgcacagaagagcattgtaaaagcatccggttgaacccgacat

SEQ ID NO: 231048 - DNA, 242 bp, Glycine max
  unsure (1)..(242): unsure at all n locations
caacatccagaaaaaagttttgccgttgaattgccagaaggtcacattcatttcagcgctcatatattacggactcatcaaaattcaagtaaacgttattgtcgnttgaattggcttcaaaagttcaacattcaatttcgagcgtctcgatatgttatgggactcaatcagacatcccagctaaaagctattgtcgttgaatttgtcagagattaacattcatttcgaacgtcttgatatat

SEQ ID NO: 231049 - DNA, 365 bp, Glycine max
ctgcaatcgactaccattgaggtgtaatccattaccagcaacaaaactcttgaaattcaatttgaagagtcatgacccttcaaaatataactacgtaatcgattaccaggtgaagaattttagaaaaaagattttgaaaagacacatctcttcaaaccattttgaaaaggcacgaaaggcctatatatatgtgtgtctaacttcaaaaagtaagagagagatattctaagagaacttaattgccaaatgctctctcaacaactctggggcaaacacttgcaaatctattgagaattcatttatgaactttaatttgtatcaaccactcttaaggagagaaatcattctgttcatctcttaaactc

SEQ ID NO: 231050 - DNA, 357 bp, Glycine max
attaaaaggctcaggtttggagaacttacccgttgagaacgaagaaccgacgatgaacggggggatacggagggaaaccttcacgaatttgcttacggaaacatctcggaagcgtaacagagcaccttggcttggattttctttcaggaaacaattttttcacccaaaacagcgggtgaagaccgaagattacgaagaacgaacgatgaatgtcgaagactgttgaaaatcttcgcgtaattacccacagaaacgttagggaagcgcctcggcttggattttcttacgggacaattttctcagcaactcaaagaatcgacgtgcaagaagctgaccctttcctcttattcctcccct

SEQ ID NO: 231051 - DNA, 316 bp, Glycine max
tttctcctcctttcttctcaaaaatttatctgatatgggtcaaactcctttttgacttctaagtagtagccaaacattttcgggtcctgtcaaggtgattcctttaaaggtgactttttctagatctttttggcaattgaaactttcagcctggtaaattaagggattgctatctcggtaaaacattattttatttcacaatttttctattctttctctttgcaattaggtaccaacttcactcgataaaaacccattaacaaaccacacagagtgaccaaagttgcaattaccaaaagttcaattatcaaatctg

SEQ ID NO: 231052 - DNA, 313 bp, Glycine max
cggcgggccaaggggcacaacgattcttcggattcaccaatcatgtataacccaccatccgctggtgcccacccccaactgaactcaagtactcccacgtagccccttatccatcgttcctctcaacgcccgggtcccatcaatcctcccaagcttcacaacatccaggtaattccacatccaatcatcatggactaacaaaaccaagcaaaacagggcaaatgcagaaaactttgcccaaaacacaactcagaatcacagcttttcacatacaattaccctagtaacatttccttcggtccaattcgttaac

SEQ ID NO: 231053 - DNA, 297 bp, Glycine max
  unsure (1)..(297): unsure at all n locations
agcttaggaacagtgaggcgatttttatctatttgcaaagggacattgngtgtgagggtcgcactatcatatccttttccaaggccatcgtgcatgttccgtgatcacatactacatacaaccctataataggcataataatagcccgaggctcttcacctaatggatatgcaatagcttcaacacaaaaaccattcgtgctcaaacgtgcacctaaaaattgtatattggccttgaccggggtgagtgctgctatggctttgggacaaacaactttgatggctttttaacctcttg

SEQ ID NO: 231054 - DNA, 349 bp, Glycine max
acaaagcctcttctcatgtgcgcctgaatgggcttataacctaaaccatacttactacgatttccttgggattctatcacgcccattatgccaccattgtctttgcctaaacccatccccgggttcataaccgtaccccaacaaaacttcggccatcattaccgcccatcggacagacaaagtcccccatagagggagtccacggacgaacagctgaccacctcaaaacaccagaaagcgggttctaacgaattcttctgcggcttccacataaggcatggaggatggcatcttaccagaaaattctcgctgacacaaaccaacgcccctccatccaatttaacttcgg

SEQ ID NO: 231055 - DNA, 359 bp, Glycine max
gagaagccatccttaccctcggagcaaaaataaaaaggaataatgtgaaggaaaatttccaattcaaggaaaaaggaaaggaaattcccaatcaaagaatgggagaaagcaaatagataagaaagaaaattcccaatctacgaatgggtgaaagaaaaaaagagagatagtaaaaagaagaaagctcctggtcagagaaaccagacaaaatgtgccgagaggtccttggaccaaacaatatctgaacaatacagaattgtcaccaaatgaataaaaaagagggaaaggaaaccacgacctaaaatggtctcccctctttattgccaaccaaaatcttgtgcgctcctgactaaacaaaa

SEQ ID NO: 231056 - DNA, 292 bp, Glycine max
gtagtgctccctaaacctccattaatttttttgctttaccttctcttccattgttgtctcttcatctttctccatgaatttcctcacatgtcttgcgctaaatgttggtatcatgattctttatagttccaccgatttaacttgctatagaagctaaatttgactttctatggatcaaatttcttgctcttgtacttgaaccatgaattgtgttgagtttacgctactttgaacattgacttgtatttctcgagtctgaaacctaaaccataaaatcttacaaaaatattaa

SEQ ID NO: 231057 - DNA, 397 bp, Glycine max
ctttttatctttgaggatcagctcagagtctcagaatgtaacttgaataaataagttcatttgaaacagttgaaccatttgttgctaaaaaacttgattatctttgattcactggattcactccggcagagctggctctaacaatttaacaaagtctttcagccattattgacaatgatattatatccggtacatgatcaagtctctcaacattttatctgtacaaatattggcttcacgtgaagatgatcccattcgaaatatcaataaaaaatggatgactggacattccaaaattcctaggatcaactatcgttctgaaacataaagacaaacacacttttttcattatcaaaagttgaaacatattctcttgacatattgagggaaaattctt

SEQ ID NO: 231058 - DNA, 375 bp, Glycine max
  unsure (1)..(375): unsure at all n locations
atgccccaccttatctccatgacataaatgcaaaaagatgattggaacttatgcaaaatgtcatcctgccctatgcgacacttaaccgtaaatttttattgcatgtgatgctagggctcaggattcatttcctctattttagtcaacccaatgtttccaaaatatgctcttttatcaatttgtgcattcatcctagtccatttcgggcgcccggngaaatttacagcattcacccttcaggtgtagacaccattttcaaaaattggttatgatcaatgaatttttttcatagaaaagtttggaaatcatctctttcaaaagcatgtcggttnttagctagacaacttattttctctttttccacccttttcttac

SEQ ID NO: 231059 - DNA, 428 bp, Glycine max
gatccttaagcacctgaggcttgcagcttcaaaatgctagtaagtgcacacctttattcttatataataggaatcaaactcacattcattgaaaattaaaaaataagtctatttctttcccaatgatcaacctaagttatgatgtgtactcctgtgatccacaaacaagatgctgttacagttttatgttgggggaagcatacttattgcgtaaagagactaaagaaatatgccttatagatataccacaaaaaacgctattgagttaggggttcatattgagtgctagtttctttgattgattttgcccataagcattagatatgtggtccatctgagtttaacacacgggcctattggatacacggataattgattccataaggacaactatagataatttatatatagtagttgatattccctaa

SEQ ID NO: 231060 - DNA, 320 bp, Glycine max
  unsure (1)..(320): unsure at all n locations
gctcgcgattggtccctttcttcccttcgcaacttgagttcactattgctaccccatagagctccgtgaaatttgttccggccatactcttccttgcgagccctcttggactctcgttcaagggctcttgcggtaattgcattctctttccgtaacccggcacactcctttcgaacgtgtgtagcagccaacttgaacttctccttggcgaagtttgcctttcctaactcgcttttgagagcttggacttcctcgtcctcttccggtgcttcaaaatactcttcgctgacgactnttaacttggcgagccaatctaaacc

SEQ ID NO: 231061 - DNA, 269 bp, Glycine max
agctactggcaatcgatcaccattaaggtgtaaacgattacacgcccgaaagatgtgacccctcatttggaatttcgaaaattaaaacgtagagaagctctggtaatcgactacatgtattgtgtgatcgattacgcaagtccaaaatgatgtaaaactgtgtaaacataagagtcaactcttgagaattgaaatcttaatgttgtaaacactggcaatcaacacctgattctggtaatcgataccagagagtaaagctctctggtaat

SEQ ID NO: 231062 - DNA, 332 bp, Glycine max
  unsure (1)..(332): unsure at all n locations
caccataaaaaggacttccaccaatgtgcaccaagcaaagacattaaccagaaaacgagagaattcttaaacagaaaaaatctcggaacaatccttctttaagaaacccttaacaacagccttgccctgcatctctcaatgttgcctaaagaatccctctggtcttaaaaacccatttacaaccaatgacctttaccctattatgcaactctacaaggatngaaacattcgtactctgcatggaaattcgctcatccttcatggcatcatacaactcatggcctgatcaaaagttcgggatcattctcagcatcaatattatagccaaattc

SEQ ID NO: 231063 - DNA, 64 bp, Glycine max
ctcgggaaaatgccaacccccccccaagttgtggctgctcaacctattcaagcccccggaggaa

SEQ ID NO: 231064 - DNA, 351 bp, Glycine max
  unsure (1)..(351): unsure at all n locations
agctanaggagagatcagagacaccttatngttgcaaagaaagacacagtctgttgaaatggatgatttgcttcacaaagcaatccaagtacagcatcaattataaaggaaaggagtggctaataggagttctaccaactttggttcttctagttggaaagacataagcaagaaagacggggctgctacttctagtatttccacacctaccccattaaaaactctttccaagtcccaataggaaccctctaaaaggagtacagatgcgaagtgttttacgtgccaaagcctaggacactatgcttatgactgctccaacaaaaggtccgtgctccttagagatggagaata

SEQ ID NO: 231065 - DNA, 437 bp, Glycine max
  unsure (1)..(437): unsure at all n locations
agcattgagacgaaatctttctctccatatacttngacccagggagagaatgtcaattcttaccctcggaagcttataagatgagatagaaaattttctatcttagaaaataaagagaaggaaaatttccaatcaaagatagggcgtagtttgtgagatatggaaaattttcaatctaaggatataagagaggaaaggaaattcccattcaaagagtgggagaaagcgaaaagaaaagaaagaaaattctcaacctaagagtgggagaaagtcaactgaaggaaagaaagctcctgatcaaggatcgaaagaaatcataataaatgtgctagaaaggtctttggaccggacaatatctgtcaatacagaattgtccttcaatgaactaaaaaaagggaaggaaacctcgaccttgaagtggtcttttcctttgatac

SEQ ID NO: 231066 - DNA, 368 bp, Glycine max
gagagaagttgaactttgacctgtgtctcacacgactcttagtcgatcaacgtacaacaagtggtacgcatgcttctatttacagactatggagctaccttcagaagctttctcgagaaaacttccttgagaagctcctttgagaacacttccttgagaagctacagctgaactacacacacaccctctatggctaagctcacctgcttgagaggctttctcgagacgatacatatagaagctagagcttagctacacccacccccttagtagctatgctcaccgccatgactaatacatgagagtctcattaaaaagccctgttccaagacatctcaaatgccctgaatacacggcttaacctatct

SEQ ID NO: 231067 - DNA, 221 bp, Glycine max
aaaaaataagacgcggacaccattaaatgggttttttttatatgatgtgttaaaaaccattaaagatcttgggaaaacaggggcgcgaaaaagacgaatcgcccatttatgactgcacagaaatcgccacggcagaggactaaccaatcagctttgtattgaaaagacttctggcttaagactatatataaaatggtgaccctcttaagagatcctccaaa

SEQ ID NO: 231068 - DNA, 450 bp, Glycine max
  unsure (1)..(450): unsure at all n locations
agctaggaggtctnttatgagatgctccctcattattgaactatcgttggttagctgccatctagatcttttcctctacacactgttaagtgctcaaaccttagaggcagagctctaataccaaactatagaagtaaataacacaagaaagggggaggggggttgaattatatttttagacaaaataaaaattttcttaagactgtaaaacacgtttatcatttgatgaatataaaagatcataagatgagaaaaacagttttctttaaacgatctaaaaataaattcaaagtcttttgtcagttaatcaagaaagcacactgtcataccctaattttgcccggggactaatcgttgttgatctttgctagtcgatntacgggagtgaacgctagttatagcgtgaacagatgaccattcaatgttttgatctagaatgcaaaagatacc

SEQ ID NO: 231069 - DNA, 217 bp, Glycine max
actccaaccttttgcaaaccccattgaggccatgctggcgcatgcacattgcatattctttaaactatgctgatagagatttctttgggcaacaatggataggatttatggcaatatatattgtgctctacactaattgtgacttttatgcaaaattacaagtgttactttaagaagtgaaaaataaacataatgatcatttgataaaaaaataatg

SEQ ID NO: 231070 - DNA, 476 bp, Glycine max
  unsure (1)..(476): unsure at all n locations
tctctctcccncnaacnatgagctttggtccattataccgttacttcagcgactgagcatgcacctgccctaataataaagaagaattactcttgcacaccctcccatcattcctctctctttgcaagtgccctcacaccttccaatacctatgcaccttcacctgcaaagggagatatataaagttggtctactggtgaaagaagaaattaatgggagagaattctcangttcgaatcctcttgctagcaaaaactaaaaatactaacacctaaaagttgccgatataaaaaaataaaaataaaaacttcacctgcacaagaaccacaaacacacaggaggtgcaaagggacaccatggagggaagccaccacttgtgacaaacacttaagtgggcttgttgttgggctttggccccacacgtgaaaaggacggttaggaagaacgcatggaagatgaataataatgatgagagt

SEQ ID NO: 231071 - DNA, 400 bp, Glycine max
  unsure (1)..(400): unsure at all n locations
cttacatcacctgcggcatgcaagctaagctgagtatacagagaacatataatgangactcattgcttggactattaatctgacttgggagcctatttggggaagaattgtcattaccaagtgccacaacactgtaaatttattctacccgtgcaatataaaataaatttattaattaatatgtttatacattaaccttcttattgcactactgtaaaagttgttatccacgacgtgcgttcaacaacggntaattcaaaaatgtcgttgctaaacgtgtaatggcattattgtaaatatgattatcattttaaagtcgtttttttaaaaccgctcttcaataatgtaaaacaaaagcggtttctacgaaaccgtctttggttgaggaaaaatatgaatt

SEQ ID NO: 231072 - DNA, 442 bp, Glycine max
  unsure (1)..(442): unsure at all n locations
agcccgnaggaggaaggaggacccattacatgtggcactaggcggcggccgggcgaaggcgcacaacaaggtttccacatgcacaatgcgcgcataaacccaccatgccctgttgcccacctccaactgagctcacgtactcccacgtagcccatatcctcgttattctcaacaccgggtccacatcaatcctctcaagctttcacaacatccaagcaaaacaacattcaaacagcacaagctatcacagccaagtaaaacagagcaaaggcagaacactttgctcaacacatcaaccaacatcacagctgttctcacttatagaccacagtaacaattccttcgatccaattcgttaaccgtgggatcgactccaaaactttactggaagtctatagcgcataagcctacattgtgaccgttgggagtcactagcaaacat

SEQ ID NO: 231073 - DNA, 334 bp, Glycine max
  unsure (1)..(334): unsure at all n locations
cgatcatcatgctntgataaatgctcaaaaaaagctagggccaatgaagagggtgagaatcatggagaagcccatgctgtgactgccattcctatgcagccaagttttccaccaacccaacaatgtcattacttagccaataacaaaccttctcttacccaccgcccagttatctcacaaggcaatccctaaatcaaccacaaagcctacctaccgcactttcaatgacaaacaccacctttagcataaaccacaacaccaaccaagaaatgaatntcgcagcgagaaagcctgtagaattcaccccaattccagtgtcctatgctgacttgct

SEQ ID NO: 231074 - DNA, 428 bp, Glycine max
  unsure (1)..(428): unsure at all n locations
agctnatnaatctataaaagcataaaccgtttacatattcacacaaaccatcatctattctgggcatgaacatgggaatacatgctaatgccaaaatgccattcacaataatggggaacagacattgctaaagtccgcatatttataaaagaaacaaaacaaatatgagtttttagaaaagaacaaaaaaacagcatttaatactaaagctttataccgatatgggctcaaaacggcatcaggtatctccacttaccgagtaagtggtctccaaggcctgttcatcaattcagntggctgaacaaaatcatcctctttttcatttccaaaaccaccttcctttgtccatatagcattgccatacacatacgttccctttgtttcaaagaccacctattagatcaaagctttaaattggctctcaccat

SEQ ID NO: 231075 - DNA, 399 bp, Glycine max
ccagctttctggctgtcttcgccaacataacgtagcacattacaagctttataatacttactagataaactggcctacacattgtctattctaattgaatctaaaatttgtgatggttctcattttggtcttaattaccaaaattaattcacatacttctacaacttaaggactcacatccattgcatacatttgtatgcaccttctaatgttctgagtgctgtgatacttaactatttccaaactctaagattcacgttctatggcatttgaaatcttaaaatatatataaattaattctctggccataagattgggccgaactgctctgtttactgcaatacattgatttgcccctgagcaatgagatagaatcgtagcctttcgctctgttaattt

SEQ ID NO: 231076 - DNA, 393 bp, Glycine max
  unsure (1)..(393): unsure at all n locations
agctnctaacagagaactgtgagatattatattcattctctacccttaaaatatttattcaatttacttattattctttttaaatatgtcattttatattttttcaactacttcaacaattaattttatcaaacacttatgatttaataaactaacttaaaagttttccaccactaatttttttttcaattaattttgtcgaacatatatagcctaaatagttttcaaaaaatttgtttattaaataatcaaacaaactttttagttaaaaaaaaagttaaaaactagttaaaatatcttaccaaacataattacaatgcattaaaaatcatagttgcttttatttatactaactcgacatgaaaattagattcctgaaaaaaatacgtatat

SEQ ID NO: 231077 - DNA, 230 bp, Glycine max
  unsure (1)..(230): unsure at all n locations
agcgagaagcgagaggagataattttancattagaaacccagcactcacgcaacaagacgatgaaatggacgtggccattgatagtgcggatgctggactcctgggacttgaagatatgtaccactatataaaatgttgaacaaaaacaaaaagaaggctgtacttgctcaagctacaacataacctctgcagcataatgccctcccgagataaagaacagaaagcttac

SEQ ID NO: 231078 - DNA, 310 bp, Glycine max
gcggatagcatcttcaagggtgagagaaagatcggccatggaacgatcaacaagaacaccaaagaagatagatgcacatggctaaactactagtttcgagcgtaccacctcccactagaatgctaatataagaagagaaaatagctatcttcattcctgataggcgctgctattacactatgatatttatactgaaattctcataacagaatttgtctcttctgtgattacagaatatcagcaaaatacgtagtcttgtctcctgattgctagcaccaaagcttggcagcgctaccgtatcatctccaca

SEQ ID NO: 231079 - DNA, 459 bp, Glycine max
  unsure (1)..(459): unsure at all n locations
agctntactcatgtacagtacaccaactgatatatttcaccggagttcattcaggaacccaaagaccaaccttcgaatgaagagttgctaagtcctgcacaaatacagataaacaaactagagtaagcatatgtttgatttgatggtagatcaagagaaaccaggaacaatcttcaaatggaactagatttactttgagtacagagataaataattcacaaatttgtttagtgataagcaatcatggtcttaataaatgtttcaaggccattgtgctttggttattatttgctttaattgaaaacataagtagggatactctggcttgtcggtttgcactttgtggtgaatatgttgctttatggtcaatgctatccgactatctcacaagtgcacattcccaaacaaaagggtgacatatgtaactaagtaccaatatttcattttcatcatatactt

SEQ ID NO: 231080 - DNA, 543 bp, Glycine max
  unsure (1)..(543): unsure at all n locations
tactttccttatctgtttttttttgtcttctccccccccccataggtatgatgcatcgtgcgggactcttaagtcacctgcagcatgcaacttacctgagcccagagattaaattnttttagaagcctcgggtagtaaaggctatttacagttatttgggatttttttaatatcttctgtatgtgctggagctgatctacattttttgtcgcaaaggagcaccaattattgaaggatcggaaaaaaaatgtgaggaagcgacccttacagggggggaattgtcttcctgctgcacctaccgcagtctcaaatcaaagtatagcatcaggaaatgatgcccgtgcagttaaactggtactttgtgacaatcaaaatattttaaaattgggaccttctaaaccatcaacgaagcgcactgtatacatgggtgttaaccatagtaacaccaagggagaattaaataccatgaaaccaacaaggcaacgaaagaaatctggtgaatcttttcaaattccttcaagatctcatttaccagttttctgc

SEQ ID NO: 231081 - DNA, 344 bp, Glycine max
  unsure (1)..(344): unsure at all n locations
tttgaagtgaaacttggttctacaccctatgactcatccattaagntaaagaaaaatttgaataaaggaattttcttctccgaaatattctcaaattattgattccttggtgcatgtgacaaaattctctacgccccacatcgcatattcaattgggtaaataggaaaggatactaataatcctgaccattgtcattggactgcattaaaaatggtttttagatactnaaaaggaatcattaattatgacatccattatacatggtttcttactgaagttatgtctgtactttagctacagcatcatgagaatcctgtgaacaactattatttcacattctacc

SEQ ID NO: 231082 - DNA, 332 bp, Glycine max
aactcttaaggctcatggtaattaaatagttggatctggtctagtggcagtaatgggcagttttcaaactgaacccctagatttaggcagatctatgctggcatgtagactaaggtgatacagactcttccaaaatcatatttgctatggttgcaggtggaacaactgcacaaacgttttcaagctctgtggtctcccacctgacgaatactggaaaaagtctaaactgccttatgcaactctatttaagccagagcaacccattgatagttgccttcgacagtcctttaaagatgtgcaacgactcagtgacaatttgtacaaactctctt

SEQ ID NO: 231083 - DNA, 473 bp, Glycine max
ttaagtcacctgcagctgcagcttgacatccttgcattataatcaatttgttaggaaacccctgatactgtcttcgattctcaaattgagcttgcagaaagtcttgtgtacaatgcagagctacagacaatagctgattttgatgatgtaaaccatcttttctgtttagatgtactgcaatgtatgaattgacgtattatatctacgattgaaagatagatagttaggcatagaattattcattttgtaatttgtacatagaattattcattttcattgacttaaattataaatttcaattgtatcgagaaaattttgatatgaataagagttaattcatggtatgtcagctttgaattagacatatccagttgatgctatgaatcagatataatttcatttataaggctgcaattgcaaacagaattatggtcacatcatcttattttgtactatcttagcaaaactttttg

SEQ ID NO: 231084 - DNA, 387 bp, Glycine max
  unsure (1)..(387): unsure at all n locations
ctgcagcangcaacgnngacncacaaaaaaaagaccagttgctttgcantattcacggacaaagnagagctccaactcaaatcccatattgagaaagcgaaaagctatcccataagtgtactctcctacccaagcgagaaagcgtcgggacattttgaaacatagtttctggtaaaacaaagcaataatataaatgagcacaataatcgcggtttagtgataacagctaatagacaaccaaccaatttatgcccacacaagcatgtgtgctacaatgcaacacgagaaaactcacttccacgtgagtgtaacattatttctcaaaggcatgtgacagctaacttcttgaagagcaccaaacaatggataaactaacaagaaacaaac

SEQ ID NO: 231085 - DNA, 403 bp, Glycine max
  unsure (1)..(403): unsure at all n locations
agctntctatattatacctaagtggcttcctgcctacaatcagagtgtgggtgtggatatataaaagaagaaagaaaggtattatttgagttagcaatggtgcgaagttgaaatctccagaatactatggtcaaacttgatgaaagtcaatgtctcttgactatatcaaatcaaacatcatattaagctcctagttatcttgatgttcttgcattttatacattcggaagcatttgattgacatggtttttccttcagttagtttgataccagaatcttaacatatatgcaacaacttgcgtttgttctttcccccataaatcgtaatcatatggataatggagatagggagtaaaaaagagaggtgcctactaaaagttattgtcagtcatatggaatatgg

SEQ ID NO: 231086 - DNA, 221 bp, Glycine max
cttttaaaaaaagtagcctggcactttgctgggcgttgattcactccacttacccaaccatcattttgctgtgtgcttttcctgcttttcaatggtgaaaccaaatcttgttgccgcccttgatgagaaaaagttcgacctaattttgatgcaactgatctcttggagaatacttcctcaaatttattaccccattacttttttgcacagttttcttgctc

SEQ ID NO: 231087 - DNA, 434 bp, Glycine max
ggacctctaagtcacctgcggcatgcaagcttcttatccaaggcaattctaggtggtttagctttttcttccttggcttattccctagtggatggagcctcccctctcctcttctcctttgccttccgctgcatctccatggtgtaaaatcaccattgaaggacctcattgaagctcaaagatccagccttcatagaagcgctacaagcaagctttcatcagttgaggcccctccgtaaccttcccttgaagaacttgtgaggcaaatgactatgcaaaacatgcagtttcaacaagagaccagagcctctattcagagcttaactaatcaaatgggacaattggctacacagttaaatcaacaacagtcccaaaattctgacatattaccttctcaatctgtgcagaatcctaaaaatgtgagtgccattaca

SEQ ID NO: 231088 - DNA, 409 bp, Glycine max
  unsure (1)..(409): unsure at all n locations
agaggcacctagagatatgtcgcgggggtcaggagaccttggggacgtcacgttgggtgctattgcccaaaaccaagcttgaccaatcccgacccaacccgagcatagtcggtcagtgagaacctgtgatgtacctaaacaggcgagctcctgacagtcaacagataaaaggaacaaagaccacaaagcaaggaggcttgtggtggctggccagctgtgaatcttgtgtgatatatgggttatggcctctggtaatcgattaccaagggtgggtaatcgattacaaggcttaaaaatgaagacaggaggctaagatggtctttggtaatcgattaccaacgaggtgtaatcgattaccangcttgataacgaggtcaggaagccatgaaggcttcntgtaatcgattac

SEQ ID NO: 231089 - DNA, 443 bp, Glycine max
  unsure (1)..(443): unsure at all n locations
agctagtatagatataggcgtcaatgtctatttaacagccaaancatgattgactacattactttgcactattttacattgaacttttctcttgaaataattttgtttttcagctaattataggtatgctcattttccccttcaaaggtaactccgtgtttaacttggttccttgactgtctcagtaggattccacatccctataagctgtaactattaaaggaaaagcttgatgctcaactgttagcaatatcttatgctttgcatgacttttggtaattacaccaaagagcagttgggtatgtgaaaaattgaaatctccatcatggggcatgggaatgataatcactggaaactggacagcacgacattctttttcggttttccgacctatatatgaaccctccggttctttctcaagtggtgttccaatcaaattcata

SEQ ID NO: 231090 - DNA, 320 bp, Glycine max
aatcaacacaagaataataatgaagtggaaaccatataattacaaagtataaggcataaccaacccaactcataaataagacataaccaaacccaaatccaaacagttcataaatcaaaaccacataatatcaaagcataaaagtctgaaatccatatactacaagataaataaagtactgaacataataatctaagtagtgtagccaaaatacacggtttataagagacatagaattagaaactaaattctaagaatgtggaggtggtggtggaagatcgaaactctgactaatgtaacacacatcctcttcaagttgt

SEQ ID NO: 231091 - DNA, 433 bp, Glycine max
  unsure (1)..(433): unsure at all n locations
agctngcatctataggagactanaatatagtcatngcttggcgggattctcccccaacatttatattacaggatctcattacgtacaaatatgagcttcctcagcataagttctcttacttttgtttccttgggctcggtttgagcctcccaagtgcttgtttatattttcttttatattgcaatgatatctgaggtgtgtgttttctaagtagatgttaatggggtgtcaacataattgggatgccatcttcatcttcctcttgcactcctcttcttttttattaaaaaaaaaaatcatcgtaaattcacaatcaacatcaagaacaaaccctcgtttaatcataaaaaaatgaaaacttttaaatctcacttatcaaacaatgaggacatgctctgatacaacttgttagaatcctaatctttaatcctta

SEQ ID NO: 231092 - DNA, 297 bp, Glycine max
  unsure (1)..(297): unsure at all n locations
actgggttgatctctctntactaaagggaatgctcgggtcctttatcagtgttcttctttatttgtggcttttctctttggaatattataatacagcgcatatataacatatagatcatcatcgtgggaagatacacaacatagacactaatttgtttaaataaacattaagagaatttatttgagtgtattcatgttaatagaagaaaaaaactcaatctttagggttcacatgttgctccaaccatatgcgatcaacatagacttaaatgagcacctcaatcgagtgtcattacc

SEQ ID NO: 231093 - DNA, 475 bp, Glycine max
  unsure (1)..(475): unsure at all n locations
gacctctaatcacctgcggcatgcaagctntaacctcagcatgtggagtctatcttatttggttgaaggagctacctttgcacttttcttataattatgagtgggaaaatggctttggctcacagttcatctacataagctgttactttcagggagcgccccctcctcgacatcttctctctctctctatggtttctcatctccctttccccttcttctcgctttatcccctcctcatgcctccccctctcctcccctcccctcatcacctcgcctgcccttcctcccccatccctgttcctcctctctccctcctcttttctcactctcctcttccgtctcctcacgtctcctctccaccttctcctctacttcttttatcctcctcctcaaccactctctcttttgtcgtcgccctcttcctcctattctttcctctcacctctccctctcctcccctctcctctcaaccctc

SEQ ID NO: 231094 - DNA, 445 bp, Glycine max
  unsure (1)..(445): unsure at all n locations
gaccttaagtcacctgcggctgcagctgctccccagatttgtatatttggtgtagaagngaagtgaaaaagggttcaaccccttaagcacttctctttctttcgaatntgcttggaaaaagttgttccgtgaagaaaatccaaaccgaggcgcttccggaaacgtttcgagaggaatctctcgaactatcgaccattcttcgacgttcttcattcgtccttcatcgctcttcgatcttcaacgggtaagtacctcgaaccaagcttttcgattcattctatgtacccgtggagagtcacattgtgtgtcctggatttttattctcgtgtcatttactatatataccccctttataccccgccttcaacgtgccattttatttaatcatttctcgcttaacctacaaataaaatatattctcaccgatcggtgtgattgngttatc

SEQ ID NO: 231095 - DNA, 328 bp, Glycine max
gaaaagggacgccccacattatcttcatgacacatatgcaaacatgatgatttggaaactttatgcaaaactggtcatgcatgcatctatgcggacactcaaatgtcaaatctttatggtcatgtgatgctagggctcacgattcatttcctctatttttaatcaacccaatgttgacaaaatatgctcttttatcaatctgtgcattcatccgagtccatatcaggcgtccgggaatatttacagcattcactcttcaggcgtagacacattttccaacaattggttatgatcaatgaaattgttcaaagataagttggaagtcatc

SEQ ID NO: 231096 - DNA, 441 bp, Glycine max
agcttgtctcagcgtctatgcgatacagaatccaacatgttagctatcatcgccaagtaccaagaagagttgggtctagccacggcccacgagcatagaatcgcggatgagtatgcccaagtatatgcggaaaaagaggctagaggaagggtgatcgactctttacaccaagaggcaaccatgtggatggatcggtttgctcttaccttgaacgggagtcaagaacttccccgattgttagccaaggccaaggcgatggcagacacctactccgcccccgaagagattcatgggcttctcggctattgtcagcatatgatagacttaatggcccacataattagaaatcgttaggaaacttgtatggtctctcagaccttgactagatatgaattctttcttttgaaatataatgagttggtcccatgtttctacttcaaa

SEQ ID NO: 231097 - DNA, 434 bp, Glycine max
  unsure (1)..(434): unsure at all n locations
ttaccttgaattaattcctttgattttctctttgagccttgtttccctttccttgttttgaagctcactacaagccttaaataaaaaaaccatgatatcaccatatccttaaggaattttggagctttggaattgttttgggaataagtgtgggggtttttgtttcattggataacatgttttgttggctatgcttcatgatgtattttgggccatacttgatgtacattgtatattggttaaatgttggaaatgctgaatgagatagttgttctcaaaggctacgtacgtaaaanaaaatcgataaagaaaaagaaaagcaataaagttgagtgaataagatcttaaatgacaaaagaatgatgagactcttggntctactctttatgtttaaaatttaatcttacttctttttattttcttattntttctta

SEQ ID NO: 231098 - DNA, 427 bp, Glycine max
  unsure (1)..(427): unsure at all n locations
agcttgcaatgcggtggtgcaatgaccaacgatgagcatgaatatgaagagaagggaagagcgtggtggtgtgaaaagcgtgagctgtgaagagaagtgactgagtgaggttttttagggttattctaaatgatgttgttttttagtgtttttttacgcaaaaaacccaatcagggtttcaaaaactatccaaatttgatcaaatcatcctaaaccaaatgtatggtcggtccaataaccaaatcagtatgttatatcactagatctcaattcgactgatccaacttgcggggttgaactgggtttttcaactacggtgtcaggtgaaaattaattgaaattataatacaaatgaccatttaataatttcattcaagataataaatgttagtataatttatgcaatcccnagaagaaaaaanaagag

SEQ ID NO: 231099 - DNA, 275 bp, Glycine max
  unsure (1)..(275): unsure at all n locations
gggaaagagaaaatgccaacacaattttatactggntcggccaacttccgtgcctacatccagtactcaagcaacccacttgagatttccactatctttgtaaaatcctttacgaagtctgaaccacacagggacaacccatcccttgtgttcagatgctntacaacaagagactcacagtctcttaaccaatctcattgaataagaagaatggaagaagaattctctcttcaagagaagaatattacaatgaagatcatcgtagaatccttata

SEQ ID NO: 231100 - DNA, 457 bp, Glycine max
  unsure (1)..(457): unsure at all n locations
agctttnctttctcaatcaagctgtctattgtctattaattctaattgcaagttcacattctaggtctttctttgtctaacatacaaatttgctcaaactcatgaaaggaaacatatactccatcacaatcatgcactcaattcaaaatgaaaacatacatccatttttcacaaaaagataaaagtgtttcactgccatgtcataaaaaataagtcaaactgttcaaaatgctttagaataagcataccaaccatttataaataaaactaacaaaaaggaattatcgtaataagactataattaaaataataataaactaaatggcacagaaatatcatcaggaatttaaaaatcctgttatctgtcttgagtatccgatgtctaaacatcctcctcatctgttaagcgaagcacaagggtagctggaggagaggtgttcggagacaggactggtgt

SEQ ID NO: 231101 - DNA, 265 bp, Glycine max
  unsure (1)..(265): unsure at all n locations
tatatatatatatatatatatatatatatatatatatattataaaatatataatgaaggcccggggagacaagtattcttaatctgttataaatctgctgcactaaagatacttggcctcttcatgagactaaccacgttccttttaataacttttaaatgaaagatatgggtgacgcaaactatttgataagaataaaaatattccataatggatcacaacgattgttatgctcacctcacaaagcatatatcaatanagtact

SEQ ID NO: 231102 - DNA, 454 bp, Glycine max
agcttcaatctacaagaggagcgaacaggttctttatatgttcaattcaacagtaattgaaccttttttacaattccaaacgtgttttaatttgcagggcaagaaaggggtctggatcaagttgcccatacaacattcaaatcttgttgatcctgcagtcaagggaaacatacattttattattatttatttgcctaatcctatctcttaattaagaagccattttgttacaaattttgtgctcctttttcaggctggatttaggtaccaccatgctgagccagattacttgatgcttgtacgttggattccagatactcctgatacccttcctgcaaatgcttcacatcgagtcggtgttggtgcttttgtcatcaacaacaacaaagaggtagtcttttctttatttctttctttcaattgaagtccaagctttgcagcctgcaaaatacaa

SEQ ID NO: 231103 - DNA, 447 bp, Glycine max
  unsure (1)..(447): unsure at all n locations
agctnngcctttagagaagtacgacatcactttcttttgaagctntaacctcatcatctctcatagnctgtagatttgggagccaatccaatccttgtgtccgaactctcagccacttatgatagccgccgatgatcccattactgcttcccctaagctctctgtcctttcttcacgctgcatcccatgccttgcgaactccttggagtaccctcgcgttgtggtcgctgaaaccccgtgcgatgaaaggcgtgatgctttcgcctgatggcactcctctcatgggacatccttcgcatgaagatagaatcctgattcttccttccttctagcgacggaaccaattaacagacgcccctccatgctagccaagagttggtcccaaatcgcctttcctttttcgacgcacgagcggtgaccttgtagcggatagacggacctaccttc

SEQ ID NO: 231104 - DNA, 346 bp, Glycine max
  unsure (1)..(346): unsure at all n locations
tatatatatgtatgttaagaaaaaagatccttggatatgcatgtatatagccaaaataccttaacaaacatatataagtatgtntaaggagcaagataccttggatatgcgtgtatatagccaaaatacctcacaaaaatatacacatgtttaggtagcaaaatacctcatgaaaanaaaaactaaaaaacacaccagaaaaagatatatactaatgataaaaaaggaagagaaaaataagttgtttagctgaaaaaccgatatgcttttgaaaagagatgacttccaactcttctttgaaaaaatcactgatcagtaactagttttaaaaatgtgtatacacttg

SEQ ID NO: 231105 - DNA, 461 bp, Glycine max
  unsure (1)..(461): unsure at all n locations
agctttgagactaanatgagagataaggatttgtttttagacttagatgaaatctaaaaataaaccaaaaatttatttaagtttctattagtttcagagactaaaatgataagaaatataaatttaggagttaaattagttatttattggacaagtaatattttgagcatgtttcataagtagtcactttggacttggatttctaaaatcactaaattccttgcttatgcattttcttctaatttttttaacctaaaaatgaaagtaatgaaaatcgaaaacctaaaaaacaaggacacactttttgttatcgattacaactaatttgaattgataaccaatcacatattaaataattntttattattttttgataattaatttgaaaaaaaaaatccttaaatgaataaaataaccgatagtatgcatatttatataatttagttcgtatttagtctaat

SEQ ID NO: 231106 - DNA, 443 bp, Glycine max
agcttgtaatgtagctagctatggtgtttaataaaggcacaaagctagttactaactgaaaagaactgcatgctctattaaagtgtgttcaaaaggctctattccactcttgtagaagcttagcttagttgctttcagctcttggtcttggggttgaaggagtactatatgacatcaaagtgtgtgaataaaatatctgaagaggtccaccactatcatgatcgtgacatagttccacaggtggggaacagtttgacataattgacattaaccaaacttctcatacatcatataagggaaaggataaccattgcctctataatcttatctatgatggccatgacaggttaactctgaattactctaagcactgtttctggcacgtgcacgaatatatacggtttaggcagtcaaagacatattttttataaatcaatataaga

SEQ ID NO: 231107 - DNA, 322 bp, Glycine max
atataagacggaaatataaatataaattaaggaaactcacccaatttgccagtcaaaataagatgagtgataaatcgctctttaaaacataaaaatatataaatttagtatctgaatgcaaggtcatcagatcattctatcagctatattcaaggattaatcaaatactaaatgacaaaacttaaaaattaatttgtcattaaattaattacagactacattgtacacattttactattcatgaactaaattaaaattcttatccgttaaagaccaatccacccggtggcgtacatatttattaacaagatatactgtttac

SEQ ID NO: 231108 - DNA, 456 bp, Glycine max
agcttggttgaaccccataacccaaggaatgtcaattttgatcgccaatacttcgacaacatttcatagagatgaaagactcgggaatacgtatgctatgcatggaaaatgtaattatgagattgagatgcccgaagaaacatcatttcctatttaaccatgcattaggtaccatgctcaatcattttgttttgttgttttttttttagaaatgggtttatgatcccaacatggttggctcatggtacctaacacatgcaactaagaatgcagtgtgaattttcacgcttcctttttttgttttttttttttttgtagaggaaaacgcaaggatcatgcatgggcaaacatgaaaacaaaaggtatgcggtttgtataacaaaaagtatgttgaacgcatatgcatgatgatgcaatgactcatgcaaaatataatgctggaatatgataatggac

SEQ ID NO: 231109 - DNA, 429 bp, Glycine max
  unsure (1)..(429): unsure at all n locations
ttttgggtatgagtagattaatcaaattaattaacttcacctcttttgaaattggtaagtgctcaccctgcgaaaattcagtccaatttactacacgaactgaaagaagtagctagaagctgcaaattaagcaacttaattgataaagaaaataatctttagcgaaatagtcttcttctctctttcacgtgaagtgagtgagttattatttattgtaaaaaatttctactccaatgttctataggtccattatctaatgtcaactaacattatttagatttagaccagtaaagatcactcttagaatgaatataagaagtctaatctctcctcatttatatnatctaattggatttaattttagacgatatgagacttagatatttctcaatataccctcgcatgccgaacacttcttggacttgatgc

SEQ ID NO: 231110 - DNA, 444 bp, Glycine max
  unsure (1)..(444): unsure at all n locations
agctntgcataatcgctgacacatgcttattttgactggngctagatttgattgatgattaatgcataaagtgtaaatcttttatatgatcatttaattatgctttagtatatcatcaaaagatctttatgtttttaatagctgtttacttaattattttttatattatgtcacgaataataaatgtatattacagtatttcttaaaaataatacttgttcagcatcagtctaatagaatgttgtcatgtgaaatttaacatatcttttgatctaagcaagagtataattattttaaaagatttcaatgtttaagtgcatgtgacaagaaatttcaatgagttttaagagtaagagagactatgattaatccataaagttataagttgagctgaaaaatcataaattaactcattcaagatttatacactagttgatttaattg

SEQ ID NO: 231111 - DNA, 417 bp, Glycine max
  unsure (1)..(417): unsure at all n locations
cacgggagcaattgattaccgattacaagctgaaaataaatggcttatttagtaccagttgaacaagggtgaaagaaatcaaatatacagtttatctggtacaacttcttcatcggtctcggggatgaatctgctgaaggacatagcactatatacatcagtatgcatactatggagcagagaggttatatactaatatcatattatggatctggattaagtgtagccaaatttgcatgcacacattcatatagtcactatatttgtataaaccattgaattaagattggagattggatcactcaaattttaaatgcatgctttaactctgatttaccgaaataaatcatgaatagtcgggnttcatatggtttcaaattattaaatgtgtgatgcatgagtccaatcagctcacta

SEQ ID NO: 231112 - DNA, 455 bp, Glycine max
  unsure (1)..(455): unsure at all n locations
agctntgagccaattcaaacgacaataaatttttactcggatgtctgatcgagttcaataatatatcgagacactcgaaattgaataccgaagctctgagcaaattcaaaagacaataactttttactcggatgtctgattgagtctcgtaatatatcgagacgctcgaaattgaataccgaagctctgagtaaattcaaaagacaataactttttactcggttgtctgattgagtctcgtaatatatcggaacgctcgaaattgaatatagaagctctgagcaaattcaaacgacaataacttttttttcggatgtctgagtgagtcccataatatatcggaacgctcgaaattgaatgttgaagctctgaggcaaatcaaacgacaataactttttactcgtatgtctgatcgagtcccgtcatatatcgagacgctctgaatcgaatacccg

SEQ ID NO: 231113 - DNA, 398 bp, Glycine max
agcttagccctagaggggatggaccttttttgttctggagaggatcaataacaatgcttataggttagacctcccagaagagtatggagtcagcaccacttttaacatttctgatttaattccttttgcaggtggagttgatattgaggaggaggaactaacgaatttgaggtcaaatcctcttcaaggggaaggggatgatgcaatcctccataggaagggaccagtcactaaagccatgagcaagaggctccaagaggattgggctagagctgttgaagaaggccctagggttatcatgaacctcagggtagatttctgatcccatgggccaaagttgggtccaattatctttgtacatattagactaggatgtcattatatttggtccttgtatt

SEQ ID NO: 231114 - DNA, 345 bp, Glycine max
  unsure (1)..(345): unsure at all n locations
cgtctatgcgagacggagaccacatgcttctatcatcgccaagtaccaagaagagttaggtctagccgcggcccacgagcatatgattgcggatgaatatgcctaagtatacgcggaaaaagaggctagaggaagggtgatcgactctttacaccaagaggcaaccatgtggatggatcnggttgctcttaccttgaacaggagtcaagaacttccccgattgttagccaaggccaaggcgatggcagacacctactccgcccccgaagagattcatgggcttctcggctattgtcagcatatgatagacttaatggcccacataattagaaatcgttatgaaac

SEQ ID NO: 231115 - DNA, 419 bp, Glycine max
aagcacctgcggctgcagctaaacattaatgttagcgtctcgttatttacgggactcaatcagacatccgagtaaaaagttattgtcgcttgaattggctcgtaggttcaacattcaatttcaagcgtctcgatatattaccggactcaatcagacatctgagtaaaaagttattatcgtttgaattggctcataggttcaacattcaacttcaaacgtctcgatatattacgggactcaatcagacatccgagtaaaaagttattgccgtttaaattggctcatagggtcaacattcaatttctagcgtctcgatatatttcgggactcaatcatacattcgagtaaaaagttattgtcgtttgaattggctctgagcttcaacatttaatttcgagcgtgtcgattattacgggact

SEQ ID NO: 231116 - DNA, 437 bp, Glycine max
  unsure (1)..(437): unsure at all n locations
tgagccaattctaacgataataactgtttactcggatgtttctttgagncccataatatatcgacacgctcgaaattgaatgttgaagctctgagccagagcaaacaacaataacacttttactcggatgattgattgagtcctgtaatataacgggacgctcgaaattgaatgttgaagctctgagccaattcaaacgacaataactttttactcggatgtccgattgagtctcgtaatatatcgacacgctcgaaattgaatgttgaagctctaagcctattcaaacaacaataacgttntactcggatgtccgattcagtgacgtaatatatcgggacgcttgaaattgaatgttgaacctctgagccaactcanacgacaataactttntactcggatgtctgattgagtcccgaaatatatcgagacgctcg

SEQ ID NO: 231117 - DNA, 471 bp, Glycine max
  unsure (1)..(471): unsure at all n locations
gcacctgaggcagcaagcntggtccaacgctctgtcaagctcttcataattataggtaaatctaggatctctatcagatactatgctagatggcacaccatgtaacctgacaacctcacttatatacaaggtggtcaacttttccaagagaaaatcttatattaatgggaatgaagtgagcagacttagtcaatctatcaacaataatccagatagaatctaaacctctaggggttctaggtagtcctaccacaaaatccatggaaatattgtcccacttccactggggtatctctaaaggttgtaacatccctgaaggtctctgatgttctatcttagccttttgacagactaggcatgcatacacaaactcactaacctctctcttcatgtagggccaccaaaacatcgtctttaaatcatgatacatcttggtagcaccagcatggatgctcaaattattcctatgtc

SEQ ID NO: 231118 - DNA, 381 bp, Glycine max
  unsure (1)..(381): unsure at all n locations
agctnaaacatncaacgaagagcaagacgatatattattagtctcacccacacatccgagcaaaaagttatcgcgtctgaacaggctcacaccttcaccatccaatttcgagcgtctcgaaatattacgggactcacacagacatcccgactaaaaagctgttgcccgttgaatgcactcagaggctcaacattcaatttccagcgtctcgatatatgacgggactcaatcagacatccgagtaaaaagctatcgccgtttagaattgctcagagcatcaacattgaattccgagcatcctgatacgtgacgggactgaatcacacatccgagtaaaaagttcttttctgtcgaattcgctcagagcatcaacattcaatc

SEQ ID NO: 231119 - DNA, 337 bp, Glycine max
agttttttatcccgcaaaaaacaacacgcccgaatgaatgtgaaaccctaacaaaatcaaccatataacttttacccggagctgatgagtcccttacatatcagaccccgatatgaatgctgagctctagcaaatcaacgaacatacatttactcgatgctgaataatccggacaatcgacacgccaaatgaagtgaactctacaatcaacacaaactttactcgagccgatgaacccgacaatcaacgccgaatgatgcgactcgacaaataacacaaacttactcgagctaagagccgaaaatcaacctcaatgagggacccgacaattaacaaa

SEQ ID NO: 231120 - DNA, 296 bp, Glycine max
  unsure (1)..(296): unsure at all n locations
cctcatcttcaatccaagacgaaagtgacaaacaggacttgaatgacatagaataagacgatgacttcgatgacgaccgacaaagaataagganatccctagcaaacacaggatatcaaagaagagcaaactcccaacaatagaaaagaggagaagattcatcttctcgtccaaagtgcaatgaatggaaccaacctgtacacacgagagccgatcgccctagtttcaagagaagaatggaaaaatccgacaccgcacacctcaatgataagaaagaaaagaaagcttacatcact

SEQ ID NO: 231121 - DNA, 70 bp, Glycine max
cccccctccccccccacccagaggatgatgtgcttgcctcaggaccctaagcaccgcagctgcagccgcg

SEQ ID NO: 231122 - DNA, 339 bp, Glycine max
  unsure (1)..(339): unsure at all n locations
tgacaangcttacaaagntgagctgcccggtgagtgtaatgttagttccaccttccatgtctctgatgtatctctttatgatgcaaatggagaatccgatttgaggacaaatcattttcaagagggagagaatgatgatgacatgagcaagagcaagggcaaggatccacttgaaggactcggaggacctaatacaagggctatagcaaggaaagccaatgaagctcttcacaaagtagttgccatactatctgaatactagcccaagtttaaatgagaaaagatcaatgttgtgagttgtatcatggcccacatggaggaagactaaatgacaccact

SEQ ID NO: 231123 - DNA, 434 bp, Glycine max
  unsure (1)..(434): unsure at all n locations
agcttctctgggcctctagtttctcttctcctttctcagnacctcctgttctggtgagtagtanccgacactgatatataatatctcagcacagtaattaatcttgtttattctggtgaatagccataattgcaaaaactaacagtttcttctttgtttgcttattggtttctgaaactacaacactcgctgagtttggcagtgattgaattcattcaattatgttgatttttttgtcttttagttttttggactaccctactttgttcttgtagaaaaatcagtggatggcagcacaaaaattgaagtgtaaaacaaattttggacttgctcataatattgtgcttctcttgtttcactctttgcaggatctctggtgggtttttcctaccgagagagaggagacacttcaacatctgctagaaccatatcat

SEQ ID NO: 231124 - DNA, 324 bp, Glycine max
  unsure (1)..(324): unsure at all n locations
tcttacaccccttaaccaaatagggttagggaaagaaagaattggacgataatggaaatggtcccatgtatgcttcatgagaaatgggtacctaaggaatattgtgtagaaactgcaaacactgtagtattcttgcttaatcgacttcccacccaaccaataaacgggaagactccttttgagacttggtatggctataaaccttccttgaaaangatttaagtatttggatgctcgtgttttacttatgtgccacacgttaagagagacaacttatacaaaatagctgaacctggtatctttgtgggatataattcagtatct

SEQ ID NO: 231125 - DNA, 261 bp, Glycine max
ataattaaagcttgccaatctcgatcacacttttagagtttaattcttatatattggtactaaaaaaaattacaccattaaacaataaataaattccaaaatatatgacattctatcggtattatactatcggtataaaggattcattgatttctataaaaattaatatttacaggagctactctaaacaatttgtaactaaggatatatatgaccggtaagttatttaatggaacaattgaccaatttattatatatgaa

SEQ ID NO: 231126 - DNA, 382 bp, Glycine max
agcttggggaagaaagaggagaccgcgagatatatttatagacgcgcgaaatcttctgacaccttatggaagagtatataagaataccgaatagagttcaagagcgtacagaatcctagaatgtgtggagcattctagagaattaatctccaccctagaatacaaagaatttccatcattcattgcggaggtggagtagttaaataagagtaggagtcttcattcctaaccatccaagacaagagtgaatccacttcttaaagtgagaaaactagaaagttagaaagcctctttgagagagaagataaatagcttgagaagtctctatccttaagcttgagtgagccatcatagaatgaatcaatgttggtaacacattctt

SEQ ID NO: 231127 - DNA, 428 bp, Glycine max
  unsure (1)..(428): unsure at all n locations
tctaagcaccgcagcatgcacttaccacctagaagcaggaaatatcttttgaatacacagangaatgaaggaagaaagaacaacatgaaattctgggctaaaagagctctgaatctgaatttaattttaaatgatcatgttggaaaaatgccacacatatcttctattataacctaagtgtcacacaaaatcggaggaaaatctgaatttctattcaaattccacttgaatctgaaattgaattcgtggagccaaaactccactaattatgattagtgaatntcagatatggttcagccgactaatccaagatcaagtccaagaatctccactaaatgtgtcatgaggcatgtcaagcatgaaagacatgcacaaagtgtgactatatgatgtggcaatagggggtagcaagcacatgctcacctccc

SEQ ID NO: 231128 - DNA, 432 bp, Glycine max
  unsure (1)..(432): unsure at all n locations
agctnnggtagagagatgaaattttttgtttaccctccctcaaaacggcgagaataatggtcatgaagttgttttacaacaaacattttcttcaatactttcttgtcttatattttgatatgaactcattgctcaacatgacatatgtcgtgtgaaattatatggagattatgagtatcactgcttgataaacgaatacctacgcaggcatctaatcaaggctccatctccgactcttcactcttataaaattgcctattactatcaccaccaatacaggtcactggggaaaggtacgatcgatggtcctttctctaatgcgttgaatattatgtaaggtgcaagttgccaaacaacctgcctccttatagggtctacctgaaagggattgccgaccacctttgccacgctaatcaatttttcctttgttaa

SEQ ID NO: 231129 - DNA, 371 bp, Glycine max
  unsure (1)..(371): unsure at all n locations
agcnngcctagaggagagggaagtttgttctatgtgaggaggncatatgccattctcgctttaagagtaatatcccacaaaaactaactttccaaatgtttgccttctcaggaatggcaccgaggaatctcgcctcaaataggttcagcatagacaaggcgggcgaaagaactacattcgccccggagtacaacagtcaccgctttaggagcgttgtacatcagcagcgcttcaaagccatcaagggatggttgtttctccgggagcgacgcgtccagctcagggacgactattatactgatttccaaaggaaataaggtgtccgggcggggcaccactggttactcccatggccaagttagaccacaaat

SEQ ID NO: 231130 - DNA, 441 bp, Glycine max
  unsure (1)..(441): unsure at all n locations
agcttctttgttagacctcgatcggtcatctttccattccgaggtcgaccgtcattnttttcgatccatttcggtgaataatatttttttgccgagatgggctaatgttttcctggccgaataaatgggaaaatgccagtttcggccgaaacgaaaagtcggttgagctcgcacaaaaaaacctagccgacctacattttaaatttttcatgcaaccccaaaacaagaaaacttcctgtgccgtaaaaaaaaaaaaaaaatattacatgacagcgagcgttttgaaaaacaaaattgcgcaacgtcggctgaaaaatatcagtcggggcttcttcacgaccgatgtcggctatggagttttcaattcaatccgagaacgaaanttgcatgatgtcggttaggaaatgttcgatcggcatcatcctgtgaagtttcttttta

SEQ ID NO: 231131 - DNA, 265 bp, Glycine max
  unsure (1)..(265): unsure at all n locations
cctcggtcggtcatgtttcctggccgatttccactgtcatttntntttatcaatatcggtgaataaatattttttttgccgagatgggctaatattttcctggccgaataaatgggaacatgccagtttcggcccaaacaaaaggtcgggtgacctcccacaatataacctagccgacctacatttaaaatcttttgtgcaacaccaaaacatgaaaacctcctctgccgtaaaaaaaacattatcggccagcgagcggttttaa

SEQ ID NO: 231132 - DNA, 452 bp, Glycine max
agctagttagtggagcgttcttggaggatttatctttgagcttcaatgatgtcctttaatggtgattttccaccatggagatgcagcggaagacaaaggagaagaggtgagaggaggtgtcatccactagggaataagccatggaagaaggagcttcaccgccaagatgagccttggataagaagcttggaaggatgcttcaatggaggaaaagaaagagggagaaaaagagagaggggggagcacgaaattgaaggaataaaagagggagagaagtggaactttgaagtatgtctcacaagactctcattcatcaaagttacaacaagtgttacacatgcttctatttatagacttggtagcttccttgagaagctttcttgagaaaacttccttgagaagcttctttgagaaaacttccttgagaagctagagcttagctgcacacaccc

SEQ ID NO: 231133 - DNA, 281 bp, Glycine max
  unsure (1)..(281): unsure at all n locations
caagctagaatcatntatcctatctctgacagccaatgggtgaagcccgtccaggtagtcccgaaaaagaccggcctcacagtaataaaaaacgagaaggaggagctaattcctactcgggtgcagaacagttggagagtctgcattgattataggaggctgaaccaggttaccaaaaaggaccatttttccctgccattcattgaccaaatgcttgaacgcctggcaagtaaatcccactactggttccttgatgggttttctaattatatgccaaatac

SEQ ID NO: 231134 - DNA, 408 bp, Glycine max
  unsure (1)..(408): unsure at all n locations
agctgatatatagaatgatatctatagagttctttntctacacacaaggaaaacttcattaatatacaaagtacaagaagtactctaacccaaatacaagacttttataaggatatccaagaaatatatagataaagacaaactactggatcaatattgtccatcttggccttaaatcatgttcatgacctaatctctattaagtctaaaacactaccataataatttaaaatagttaattaatttgatcgtacaagattaaacaataatataaaaaatatttatatactactactagatttttcttttaaagtactggtaataaatagattctaattaacatcttttattgtcgtggatatgattatacaataaccattaccctttatcaaattgacaaacacccat

SEQ ID NO: 231135 - DNA, 305 bp, Glycine max
aaaaaggcactcatgaaacatttaaaataatgtccagagagcgccctgttctttaagcttatccaagtaacacaaagtatattcataactagacacgaccatccttgccaatgcatgggaacaaaaataaatgttcttcaattcaacttgagaatgtttatggaatgttaatgggtgggaaatttgccaacagacacgaaatagaaagatgctcttgaacaggtttattagacccgtaaaataccttctatgcttactcttttggggagctataacaactctgaatcgacatcctaacaattctt

SEQ ID NO: 231136 - DNA, 468 bp, Glycine max
  unsure (1)..(468): unsure at all n locations
cctgcagcatgcaacttataaatcatatatggttagaatttgctttccgttattggaccttaagtttcatggacaatatcttcatttggttttgacgaaaaccccatggatcaatgcatataccacaaagtcagtgggagtaaaatatgtcggcttgttttatatgtatatgatattttacttgcagccaatgattgaagtttgctagatgaggtgaaacaatttctctctaagaattttgacatgaaggatatgggtgatgtatcttatgtcatcgacattaagattcatagagatagaccttgaggtattttaggtctatcacaagaaacctatattaacaaaatttcaaagagatttcagatgaaagattgttcaccaagtgttgctcccattgtanaaggtgataggtttaatttgaaccaatgcctaaagattgaacttgagagggaacaaatgaaaaacatt

SEQ ID NO: 231137 - DNA, 380 bp, Glycine max
  unsure (1)..(380): unsure at all n locations
tcatatctgantctaatgaagccatatctgatcaaaaactcatcaaaattcacggacctcattcgaggactttgcttcagtccataaaaatattttttcaagcagcacaccttgttctccccttcttaaaaccttcacgctgggtcatgtaaatgggttccttcagaattccatggagaaaaagctatttaacattcagctgttcaagttccaaatcatactgatttaccagaccacgtatgattctaattgagcaatgcttcacaactggtgaaataatctcattgttatcaataccttcaacctgtgtaaagccttntgctaccaatcttgccttgaactaggcctttctactcttggaatgccttctttcttcttga

SEQ ID NO: 231138 - DNA, 461 bp, Glycine max
  unsure (1)..(461): unsure at all n locations
agctttgtctttgntgttcacaatctagaagccatgtgtccaatggctctctgataattctttatggcatctgcggctgggccacatgagtgaaaaaggtttgcatattataaggtagcgaggttttcttggaaatcacaaggtggaagctctctcagtttgtgtggattgtgtctatgggaagtagcatcaaacgacgttcccaaaagttgtgcacacaacaaaagccatgttggattacgtccattctaactactgggggctttcaagagttccatcactaggaggagcaaggtatttcctttccatcatcgatgattactctaggatgaaatgagtattcatgatgaagcagatatttgaagttctcaaatttttctagcattggaagattcttatgtagagtcagacaggtaagacaataaagcatcttaggagtgacaatggctcggaattctatt

SEQ ID NO: 231139 - DNA, 355 bp, Glycine max
  unsure (1)..(355): unsure at all n locations
tttatggagatgtgtgtggtgtgtgtctctagcttaaccgactctattatgggtaggtgctatagtcttctttattaatgaaaactaaattattaataaagatattatagatcaatattaataatatgatgtgctgataacacacacacattactagtggtttagttttcattaaataaaaattataccaataaatgtaagacccggctactaacctttaaatnttcactagtaatgactaaattaaaaaaacaaacctttaacatttgcagtgaacttccgggtaaattccaaagatcacaagcacaataaaatgtatcttggttcctcttgaaacaaaaatctttatataaac

SEQ ID NO: 231140 - DNA, 462 bp, Glycine max
cctcagagtcacctgcggcatgcaagctttgacttgagtcatcaagagattataattatgtgaccatggcatgagtttcaacaatgaatcaagatcatcaaagaatcaataatcatcaatcatctttgaatcatctatctttcaatctttacaacatcatctctcaacatctttcaatcaatctttcaatatgtttctacaaaattttctgattcatttctcttcatctttctaaaagttttttatcaacactttctcttccaagaaaagttctttgttcaaaaacttgtgttattcatctttttcattctcttctccctttgccaaaagaacgaaggactaaccgcctgaattcttttgagtctctcttctcccttacaaaagattcaaaggactaaccgcctcagaattcctttgattcttcccttccccttaagcaaaagatttcaaaggactaacctc

SEQ ID NO: 231141 - DNA, 369 bp, Glycine max
  unsure (1)..(369): unsure at all n locations
ttgtgtgttcctgactggatggcatgaaatgaatcgcgaagattgagacttttggtagtgtggattggtgaataaacctaaacacttgtgcttgagggaaacaatgacttgtgaagattttgttaacgatccttccttgatatcttgcatgcttaaccagcttattcagctggcgttccttaataaatcatgttcacatctttgaaaagctgcatgtnctgtgagaatttgttgattgaagcatcgattgccattcatgtcatgtgattgaaattcttggaacacgccatcgttttggntaaccactgtgagtttgtcacttgaggacaagtgatctagtttttctttgcttgagaacaagcaaaacta

SEQ ID NO: 231142 - DNA, 442 bp, Glycine max
agcttaacttcccaaattcgagcgtctcgatatattatgggacccaatcggacaaccgagtcaaaacttattgtggtttgaatttgctcgaagcatctattttcaatttcgagcgtctcgatatattaccaaactcaattggacatccgagtcaaaggttattttcgtttgaatttgtcacaagctttccttttcaatctcaagggtctcgatatattacggtactcaatcggacatccgagtaaatagttattgtcgttttaatttgctcaaagcttctgtattcaattttgagcatctggatatattacgggactcaatcggatatccgagtaaaaattaattgtcattagaattcgctcacagattctattttcaatttcgagcatctcgatatattacgagactcaatcagacattctagttaaaaactattgtcata

SEQ ID NO: 231143 - DNA, 152 bp, Glycine max
ttggattgcaaacccatctctcttaagttagacctgacatccaacaacaatcaacgtaccgaccatttaatgtgttgaaacctaccccttcaggattcacattatgtctttttataaaactctgccttacacctaatccctgagtttagaat

SEQ ID NO: 231144 - DNA, 452 bp, Glycine max
agcttgaagagttccatgagtcaattctttgtttgcaaccatgtattttctatgtcacttttagctgcaacaagtactctctaggtcacttctggcactacccctaatctccccctaagattaagacccaagtatttttttttctcacgaagccacttatggctttcacaaataataaatgtttgatagaatatgaattctaatcactcaaagaatgtttacactataaagacccgccttgacgctacgatatcgctactctaaaacgcgtaaatttcaatttttaaataaaaacttcattaatttgattatgaaaacgagagtaaattttttgtgatattcattcatcaaacaacacacaaaaaaacttaaataagtacttatatataataatcatcatacatcatccacatgacagaaagtaatttaatctatacatatatttaagcatg

SEQ ID NO: 231145 - DNA, 353 bp, Glycine max
  unsure (1)..(353): unsure at all n locations
acccctctcataactaagctcacctccttgagaagcttccttaagaagattcctaaagaagattaagcttagctacacatacatctctaatagctaagctcacctccttgagatgagaagctagagctnagctacacaccccctataatagctaagctcacccccatgacaaaatacatgataatacaaaaaaaaagtccttactacaaagactactcaaaatgccttgaaatacaaggctaaaaccctatactactagaatggccaaatacaaggcccaaacgaagaagaaacctattctaatatttacaaagataagcgggctcatgcttagcccatgagctcaaaatcta

SEQ ID NO: 231146 - DNA, 439 bp, Glycine max
  unsure (1)..(439): unsure at all n locations
agcttactctgccatagaagaacataatcatttgtttatgtatctcaaccaagagtaattattttcaatcttcataagagttgtgctctttcaaactatactcttttaaagaatcataatctttcaaaattaagaatcatttctcttcatcaaaaagttatgttcttttatattatactctgttatattgaatcatagtcagtcaagacgtatcttttcataaagaattatagtggtttcataaaatttcattagaatcatttaatcacatgatccaaatagaaaatgaacttattttgttattaattcaagcatcattccttatatcattaggaaaaaatggtaagttatatcaaataaataatatatttaaaatttatcttacctattttttanaataaagcttacaccggtcgaaattcatttccttccctataaa

SEQ ID NO: 231147 - DNA, 231 bp, Glycine max
  unsure (1)..(231): unsure at all n locations
aagaaatttggaaacatttatgtgtgttgctgccttatattctatatcatcaatttgaaccctgatgacttgacttggtggacatatatggatattctgttttgaaccctgattgatctttagtntcagttgcaacatattaaattccttaagcagtaaattttgaatgttcaattcatgtgatggggggaagtcttatgtcgatctatttaactcatctttacaatgaat

SEQ ID NO: 231148 - DNA, 439 bp, Glycine max
  unsure (1)..(439): unsure at all n locations
agcttagaggagacattaattttcagtattttattaagtgaagagcaatgttaaagttaacttacacaggtattgcgttactggtttaaaaagatctttcattaaatattaaaataattccaacatttcaagaggcttgattctagattctataaacaagttgtcataacaatgttgcatgcatattttattttcaagaaaacagacagcagctgaatactcgagcatgatttgtttgtatctggagattacaatcaacattaacagaataccacctgagtttagactggctgaaagaactcctgatgctgctgaattagcaactgcatcatagtgggttgtatctcctcgtacctgttaacaagaatggacacagtaaagctcaaattaagtagacataaatacagatgatggggagtcatgaatcanaaaattttat

SEQ ID NO: 231149 - DNA, 281 bp, Glycine max
  unsure (1)..(281): unsure at all n locations
aagagtaaaccgaattttttnttgaaaaggtattaattattctcatccaataaggggaaaaaccttggaactcgttaaaaataaaatgaaaaagaatgaattacgaacgataaatattgtttgacacctttctaaaaagaaatacgtttttgtgaagagatatgaaaagaaaacaatataataattaatgtgcttaaaaaataaaatactctaaataaatatcacacataagaagtgtaaagaatttaaaataaattatgaaatataacttcttatgtgat

SEQ ID NO: 231150 - DNA, 448 bp, Glycine max
agctgtcaataattgtccttatactaaagataaggctacagttactacatcatcactttttttttttggaaggcagaaaatatatagtattagattaaacatatcagtactagaggtactggtgaaaaagataatacaagacacctatggtgccgccctccaaaatagaaaaaacccaacctaaccccaccatcgaaataaagaaaaacccaacccagcttaaccaaaggaatccaaaatattggtagaccagtgattaaaactattgttgaagtctttctctctagcttttaaccaagaccaagctagaaataaagcatcatccatcactttagatgagtcaaaaggtttgcccttgaaaatcagtaggttcctatgctgccatatagtgctagttagagcaatccaccatccacaccatctactatgatttcatggtcaaataaat

SEQ ID NO: 231151 - DNA, 314 bp, Glycine max
  unsure (1)..(314): unsure at all n locations
gcctcggtttcaatgcacacactttcaaacttggattctatgaattccactatcaaagattaatttcttaacactaaacatgagcaaaactctgatatttaaggacaagttcagcatcggttctcatgaaaaagattganattgatattgacgcgtgacagtcaacattgattctcataaattcgatattgacacatgacactcaacatcagttctacataaaactgatgttgagtacaatacttaattattggtctcttaaaccgatgttaccacctcttattattacaataatgcaccacgtatttgtaaca

SEQ ID NO: 231152 - DNA, 417 bp, Glycine max
  unsure (1)..(417): unsure at all n locations
agctttagtagcatgcaaaattgtggtttttttaaaggcngttcctctactctctcacattttctctgccattaaaagcataggactgagcaaaactttcattaacatgtactctctatacagcagcaccatgagagcatctttaacgcccgatttttgaagtcaagaatccttcttcatcatatctatctatcactatacatactctggagatgtccagcataaaggttgagtttttcatctaaaactttcaagaattacccccatataaaaaaagcatttttaatgtttctctcccttactaatcaataaaatatacttaagtgaaataaattgtaaaacctataaaagtggctcacaacttataaatatgatctatcagtatcagtagagtaaaacaagaaggttcttacatct

SEQ ID NO: 231153 - DNA, 311 bp, Glycine max
  unsure (1)..(311): unsure at all n locations
tatctatctaatgcatataatattttttgntatgagacagctnggttatcagacaatctacaatcatcattctgggttgcggaggggagcacgacaacatacaactcgatactcttggttgtgtacctgatcataaatatggtgtaatggatatgttaaaattaacaaccaatatatatcctgtcaattaactcgtaattgtgaaatgcaatatgtaatggatattaattttangctaagcccaaatgcataaaacaaaactctatcctgcagattccctttaatatcatttataaaattaccgggaccta

SEQ ID NO: 231154 - DNA, 468 bp, Glycine max
  unsure (1)..(468): unsure at all n locations
gcacctgagctgcaagctatatattttgagatgcttccgtttaagtccatctcacgaagaaaggagattagattgttactctcaaatgtgaaagaagatatttctaanaagtaactaatgaaattactcatgttaatgcttaaagttaaataatctaaatatattaatagggtaaatgaatttttataaaaatttttatacaaaagcttatttatttatcttgctatcctttatgacatgatatatgacgtgtgttacaattattttagattctcattgcatgatgagaaaataaaaaatgataattacaatattcatagtacaatcatatgcatgatacatgcatgtatacttatctttaattgaggaacatgtttattaatataagactgctttaaaggatctttgataaaacgtgtgaacatatgttaaggaaaaagtatttttttnaataaaatgcaacatgta

SEQ ID NO: 231155 - DNA, 460 bp, Glycine max
  unsure (1)..(460): unsure at all n locations
agctntgtagcagatgccactctactccatattctttaaagatatgttaacaaggaaagataagtatattcaccaggaaatcatcatagtggaaggaaattgcagtgcagtgattcaaaagatccttccacccaagcataaagatcctgggagtgtaactattccttgttcaattggagaagtcactgtgggaaaaacacttattgacctgngagccagcattaatctaatgccactctccatgagcagaagattgggagagttggagataatgcccactagaatgactttacaactagttgatcgctccattaccaggccatatgaagtaatagaagatgtgttggtaagagtgaaactatttatcttcccggcagattntatggtaatggatatctgcgaatatactgacattcctgtaatattgngaaggccattcatgttgactgcaagctgcata

SEQ ID NO: 231156 - DNA, 395 bp, Glycine max
ttcgacttatgaatagcttcaattagtttcttttgacatttgtgtgactcctatgtagtattaaacataacttaatattagtaaacaatttattaaatataagaatttcttaatcaaatttaaacataacttaagtaaatacctcatgtgaaacaaacttcgcaagatgtgttgaccatgaaatgaaggaactaaaggtctatcttactaactgaacctctgaagtgggaatatggacttcaacattggcatcttgaacttcttcaacactcatcttgatcaaatcattggataaacacacatggtgtacgaaggccgcctcaaatacctttccaaaggcactaggcaagtagaagaatgcttttcacaaggtacaacccacactgattcgagtc

SEQ ID NO: 231157 - DNA, 447 bp, Glycine max
  unsure (1)..(447): unsure at all n locations
agctncttcacatagaccgcctatgctagatcttctttatgcttaaaaacagaaacattaggcataggcaaaagatcaagaggagttagtgggttaaaaccattaacaacttcaaaaggagaacaattagtggtgctatgaacaactctattgtaagcaaattcaacatggggtaaacaagctccccaagtttttaagttcttcctcaaaactatcctaagcaaagttcccaaagtcctattaacaacttccgtttgcccatcggtttgtgggtgacaagtggttgaaaataaaaatttagtgcccaacttgctccacaaagtcctccaaaaatggcttaagaacttagagtccctatcactaacaatgctccttggcaaaccatggagtctcacaatctccttgaaaacatatcatccacatgggaagcatcattacattttacat

SEQ ID NO: 231158 - DNA, 459 bp, Glycine max
  unsure (1)..(459): unsure at all n locations
agcttgtccatgtcaagagccaacaccaggttgcatatgttnttacaaaagcacttccaagcccgatttttggtaaattcattgccaagttgggaatgattaacatctattcgtcaacttgaggggggtatcacaattaagcggttgaacttagttactaggagttattacaagttaggtgaatagttacttagttatgtcactacaagttattgaagttagttactacgagttactagaagttggttactcaatttggttattctctatattcgcataaataaaccacctttgtaatactttgattaatgaatttgaaaactatcattcacttctttcattcttgatagttttaacatattcttaactatgaataaaatatacaagatataattaaattaggttgtntcactccttggactagcatcaattttacataataacaatattagtcaataa

SEQ ID NO: 231159 - DNA, 197 bp, Glycine max
agaccgatccaacgagttgcagagacaaaaacaaaaccaccgaaggcgcttcctattgcattcgacttcggttctcactctctttttggatacttcaagggcaccacatggacctgagaagcttttgcagcacgctcttttttcacactcttgacatgtctacacacaatgaaccaacaatcataaatgcagcaaca

SEQ ID NO: 231160 - DNA, 419 bp, Glycine max
  unsure (1)..(419): unsure at all n locations
agcttcatctgatgtattattagtatttctttaattcgcttattaatcattatagaataaaatatggtatatgtttttgcgggacaattttagatttattatcttttttttctaagcagatgtgatcgactacactagacattagcattggtgacaaatatattgttcaaccttcgtaccatattattattattattattattattattattattattattattattattattattattattattactctctcttttcggtaatcttttctttctccaactttcatccatcttttgtttttgttattctgatattntaattttgtttttgtaaataaataatcacggttattgttcccaacaagtgtgttgcatctttggcggcacaataaaacaagagaatcacaatatcaaatgagt

SEQ ID NO: 231161 - DNA, 227 bp, Glycine max
tggacaacagtggttagcctctctaaatctccacctaagtaggggttgattctaatgccattcacagtccatgttcttctggtgggtgggtgctccatatcattggtcattgggcataacttttttgatgaagaaagggcaaaccacttgcactttagcttacttgtgaacaatgtttatttaaaaataataactctacttgttggcaaaccgaaaaattccttttg

SEQ ID NO: 231162 - DNA, 468 bp, Glycine max
cggaccttaagcacctgagcatgcaacttgagaagactagacgcttttctctatagccattcatggcaaggcctattataatggagttccaacatgataatcctcttgttgtgggtgatgcctcaaacacttcaatagcctttaaaatagctccacacttgcagtacatgtcaataattgctgtgagaacaatgacattcaactcaaaatgttgaagtgctcctaagtgagcacaagcacttaacagactcaccattgtaaattcactaggctgaaccctttctctctgcatcttgcggaaaagctccaatgctccatgagcctcttattcctaacatatccactaatcatagaattccaataactttagttcttgtaagcatgttatcaaataacctcctagatttatcaacctcctcacacttagcaagccccatgatcatagaattgcaagccaccacatcaagt

SEQ ID NO: 231163 - DNA, 414 bp, Glycine max
  unsure (1)..(414): unsure at all n locations
agaaatacccgatgccaagaaaaaaagaaaaaatataagtgaccacttacacagatggagtggtgtaactactaattaataaagaaactttttatcacttgtagtactcttattttattttatataagcaaaggttatttaaaaacagggtacaaaggatactctaactcatgtacaagagtcttataagaccaaatcagacggattagagacaaggtatacttgtataggattagttgttcaatcagaaaaaggagcgattgacactacttatttctcctttaaagcatgtctaggatctaaacttaatgaattctaatgtgctagtgaagttaataggaaaacccgaaacnaatattgttctcataatctagtagaccattcatagcgtccaaatagatatcaatggactca

SEQ ID NO: 231164 - DNA, 447 bp, Glycine max
  unsure (1)..(447): unsure at all n locations
agctngtcttatactcagctaccctagttatcttttattttttagaggtaataattacaccccaaaatggaattatataatggttttctacatagatttatcatgcccatatttggcatgctcttaatttgagagttttagaacttctagtgcttttaatatgatgaccaaggggtgttcaatctgaattcaattggattgaaatgtggccaattgaattcatcggtttgaattaaattattctttgaattgtactgaattgtttagaattattttaaaatatttagtctctttttttaagtgtcttttttcctctccttaaattntttaatattcgttatttcttatttctataaataattacataaatattatctatttctatttgtatattttctgtgtaaaaaatattcaagttaaagatttttctttgcatatgtaactata

SEQ ID NO: 231165 - DNA, 416 bp, Glycine max
  unsure (1)..(416): unsure at all n locations
atgagcctcaataaggaaaactaatcttaggcatctaaataaaggaattacctttatggatatctaatcagaatggttatctagtgcacctaattaaaataattatctttagagaacattanaaaaactatctatagtgagtctaattaaagtaattatctttagagatcatattatgcaattaattggtaactgaaagttcttaattaaaataggaatcaaggggaaaataatatatgtaaaatcgcaatccgagttatgtttattcatacatatctcttctttcaaactgctatatgtctttagtgttatttttaacacacacacacaaataatctccaactcaagataaatactcacaaagtttgggacatagattatctggaatcacaactagtctctacggtatgatatgc

SEQ ID NO: 231166 - DNA, 440 bp, Glycine max
agcttcttatccaaagctcatcttggtggtgaagctccttcttccatggcttattccctagtggatggcgcctcctctcacctcttctcctttgtcttccgctgcatctccatggtggaaaatcaccatttaagaacctcattgaagctcaaagatccagcctccatagaagccccataagcaagcttccatcaacatctcttctggatcagttcaagtggagggtacatccacttggttgttcaaagagaacaagggagggtacatctcttatgaatctttgcttgtaaaggtttttacaaggttgaaaagaaatctcaaggaccgcatgtcgcttggggactggatctaagcacgggttgttgccgaaccaatataaaactcttgtgttagcttcttcttccctacactctttaatttccgctgtgccacttaattat

SEQ ID NO: 231167 - DNA, 443 bp, Glycine max
agcttctatttttatttttcttttgtaaatgttcaggcctttaatgaaatctccacaaatcttttcgctttccaggtgaattgacgcttgtccataaattgaatttctgaattagacttcttatttaagtatttgtatcaaccatgtggctctcagtgttgggcaatttatttttcctagttctcttttgccctactttctctccacgtccttattctataatttgtaataatcattatcaatgcatattttcttcaaatcaataaccaaaaaaaatgtttaattccaaatcaatactgaagcaatgtttataaacatgccttaattttgaaatcaagaacacataattaagttaaaataccaatacaaagaatgaagtgtcattaccttatattgacagaatgagaataacatgtccatgcttagtttaggactgcttacat

SEQ ID NO: 231168 - DNA, 212 bp, Glycine max
acttttttttctctcgcccttacctaggactttttctaactctgtggtctattgaataccaaggctgttggggaactcggggtaaaccaagacctttgttgtttttgtgcaaggattggaaacttgtgtgactgaggacatttgtgtcgggcactgtgctcataggctatttgatgaagtaagtggctcactttgcagtcttgaaagcttat

SEQ ID NO: 231169 - DNA, 449 bp, Glycine max
  unsure (1)..(449): unsure at all n locations
agctaggagaggagaggtgtcatctgcatttttaatgagctnttcaaccatttgaacgcgaggaagaaggttaagaggaaggagttttcctttgaaaaagagttcatcagctgggtatcttgttctcaaggacactttcttggtttggaactcaaattccttgttctgtgatggggtgtcaatgtagtttttatccacatcaaccaaggaaaccttttttttggccatttcatgttgttgtggtgatctctccattagaatgcacaaaatggaaatatgtactttggaggtctcccaactaagaacaaaacatgcccaaaagttataatctcataactaactaacactgagcctcctttaccatttaaactatgtaggcatatagtacaatgggaatatgagggggataaatattggtcataaatcatatatcaatggtcaatagtgtt

SEQ ID NO: 231170 - DNA, 164 bp, Glycine max
ctcttagcgggcttagcatagggattgagcttcaacatcgcattgaggttcgtgagagggttcttcttgagaggtgctctcttaacatctttcttaatgggcctgaccacagactggacctcgtcggagttaatgatacgggccaagtcagagttgatcatctt

SEQ ID NO: 231171 - DNA, 449 bp, Glycine max
  unsure (1)..(449): unsure at all n locations
agctagatatcagaagatgttcttcctcttttattctcaggctntcttcatccaccagaacatggtccaaacaattcactcccaaagggtctccaaagaactgaaaagaaattaaaaagagtttagtgcaaggaatgagaaataatggcaagagaatgagaagaagagagagtgaggtatattggttgtacttcactttcacacccccaactttaattgaaaagaaggaaggaatatatggttccattaacggggttgaggttgggtcagaatggagaaaaaaggagtaagtctatgcaggaaaagtgagcaataaaagaggaatgtcaacaggagggggcagcagatacatgtatttatcaagaaagtagtacagcacaatgcatctaatgcaagaggagtaaatgcagtactctttcttggttctagaaatgggagtggaagaaaag

SEQ ID NO: 231172 - DNA, 417 bp, Glycine max
  unsure (1)..(417): unsure at all n locations
caccattatcaatttcagagagcacattttcaaacacaaagcaaaggcaatgctcaaatagggctaacctggggaggaagtcgcgagggaataggccacgaaaccaaatacggcttctttatcacgaggtatcgagaagatgaaacgacgatggcgtcgcagcagaacgtgggttaaggtggtgacgacgttgtagcagaatgcgggtgaggtggtgacaatatcgcagcagaacgtcgcgagttagagtcatgagggagaggaccatcgcgaggccaaagggtaagagtgaaagtagagttgaagcgccagaaacaaanaataataatttatataggataatacaacatcgattnttttcttccaaaattgatgtaatgtgaactttgtacatcgatttttggaaaaactgattta

SEQ ID NO: 231173 - DNA, 388 bp, Glycine max
agcttgttgagaccatgaatgggccttcctatttgggaccgagctttcctacttaagggtctctgctacctaggcctccaactcgccatatgaggtcatcacgttgaaaggctcctggttaaacctttgtattctatgttcatgctcctcagagtttggaagcctattccctgatcctggccatttcttacacttcatctatagtctcgagttctacccttatgttttcctcatttcgctgctattggaacaacaatatccttgttgatggtttcctgacttcaatgggaatcatggcgtctgtgttttatgtgagtcacttatgagtttcattgcctgatgtctgcggtgaacactggtacgcctatagaatggggagatctttttt

SEQ ID NO: 231174 - DNA, 184 bp, Glycine max
  unsure (1)..(184): unsure at all n locations
tgctctatgnncatctcccacatcaagttagccttcggatcattctttcctttaaaggaagaatgttgagtttaataccatcaattccgctttgtctaggaacaccatcatttcctctgcttctgctttcttcttcattatgaactctattctccatttgatccaacctctcatggagcgcatt

SEQ ID NO: 231175 - DNA, 364 bp, Glycine max
aagtgccttatgaatgctgccgtgcttatgctaccagtgcctggaaggcctctcattttgtacatgacaatcttggacgagtcaatggggtgtatgctggggcaacatgacgaatccgggaagaaatagcgcgtcgtttactacctaagtaagaagttcacgacctgtgagatgattactccttgctcgaaagaacgtgttgtgctttagtatgggcatcccatcgcctaaggcagtacatgctgagccatactacctggttgatatccaagatggaccccggtaagtacatctttgaaaagccagctctcactggacgaatcgcccggtggcaagtcctgctatccgagtttgatatattcta

SEQ ID NO: 231176 - DNA, 74 bp, Glycine max
ctgcctaattacatgtgttgttttatggtgagtgatgccatttgtttaagggtagcccttggaaaactatttca

SEQ ID NO: 231177 - DNA, 410 bp, Glycine max
  unsure (1)..(410): unsure at all n locations
tcaatggataatgttgctgcgacggtcacggaaccaacttcaatgtacgataccacttcaggaaacagacatgcagatgatgaaaaccttgttgctgttgcaggggacagtgaatcggatgctattgaaggagaatcagtcacactcacacatggtggagcggtttcaaagagtgcattgcgtgttttgagtgatctangaaacttgagagggaggcatagtgtaattgagattagagatgaagggtataattccattagaaggacgatttcaatggaccattcgtttcaatggggtagtggtttttcaattgctgatgttctacatgtgaatgaagagcatgaagggtgttctaatatggttagtccttcaaagaattcaagaggtgaaagtagcaagtctagctacat

SEQ ID NO: 231178 - DNA, 429 bp, Glycine max
  unsure (1)..(429): unsure at all n locations
ctaagctagccctaagggatgcctttcaggttggatggttcttaactttgcctataggtnggacctcccaaaagagtatggagttagcaccacttttaacatttctaatttaattccttttgtaggtggagctgatatcgaggaagaggaactaacatatttgaggtcaaatcctcttcaagaggaagaggatgatgaaatcctccttacgaagggaccagtcactagaaccatgagcaagacgctccaagaagattgggctagagctgctaaagaatgctctacggttctcatgaacctcaaggtacatctctgagcccatgggccaaggttgggtccaattatctttgtgcatattagactacgatgctattatatctggtccttgtatttatggctccatattgtangtagggtaccctataaata

SEQ ID NO: 231179 - DNA, 81 bp, Glycine max
cgagctcactgaacccaggatagtgttttggttttccaatcgggccgacaacccgttgaaaccccagattacgtaattttc

SEQ ID NO: 231180 - DNA, 380 bp, Glycine max
  unsure (1)..(380): unsure at all n locations
ttcgtcttacagaatgcaaaaagttgatgagagatgaaccactcgtttatnntccgcnccgncagccgtgacctcancaagtcaagttatgacaagatcctttcttgagcaccggacagaatgtacgtaaattcatccgtcgtgttnaaccggggcttagtctggccgcaacttgactgaatgggcgcacacagaacgaccgtctagtcttctagcgtgcctatccaggcntcttctgtctctacacgacacgcaaancagctttatacgcgcataaccactctgggtattttacgcctcggcagctctgactcataaagttatgtatgtacagatctcgtgagccgcggaacgatgactgtacatctccacngtgtcaa

SEQ ID NO: 231181 - DNA, 355 bp, Glycine max
ggtagaatggctagacatgatatatgtcagggctgggtttggttcaaggataaaagggatgccccacattatttccatgacacaaatgcaaacaatgatgatttggaaattttatgcaaaactggtcatgcatgcacctatgcagacgttcaagtgtcaaatttttatggtcatgtgatgctatggctcaagattcatttcctctattttaaatcaacccaatgtttccaaaatatgttcttttatcaatttgtgcattcctccaagtccatttcgagcgtgcggcgaaatgttcacagcattcacccttcaggtgtagacacgttttttcttcaaaaatcgattatgatcaatg

SEQ ID NO: 231182 - DNA, 239 bp, Glycine max
ctcagcggtgttgtcaattcaccgtatagatagtgactgtgttctctccgccactccaggaaacagacatggtcattagaatatcctagtggctgccctttgggactacgagcggcttgctatattacgagaaacaataccactcgcgagttgaaagtcattgtcgaaggaatctgctcagagcttgtgtgatctatgacaatcgacaaggattgttactggacttgatattacatacg

SEQ ID NO: 231183 - DNA, 383 bp, Glycine max
  unsure (1)..(383): unsure at all n locations
tgctatactntangcatggntagtactaataataatactgtttaattacaaaaactgccacgtgcgaacaatttgttattgctattgatgaatgacgaatctacaattgttgatttggtttctgtttgagcagattccgttctactgtttgcaaaaccgatggagcggcgcgtcgtttatggcgaatgcggccattaactctcacgcgcgggctctgtatgcgctggccgtgattcagttcaacggcagcggtggcacgaagagcgacaaggacctacgcgcccgcgtggcgctgtgcgccacagcggcgtttcttggccacgtcgatgcgatgcgcgaactcngtcactagctgcatgaccgttacagcgtgcggcagaaca

SEQ ID NO: 231184 - DNA, 440 bp, Glycine max
tattaggagcacatgcagcatgctatatatgacatatttttattgagaaaagaggaagacaatcgagataaaattaaaaagaaactgaacgcacccttttgatgttttatcatgggtccaccaatgtcctgtgttgaagactatgatattagcatcccaatacctggccgtagtacggtccatcaaatccaatcttaatgtctcaaacgaaccatttttgcccttgaaagttgactcttgaacaatgaatggtgaaacaacaaaattcaccgaacaattatagtcctaagaatacaacaaaatccaccgaacaattatagtcctaagaatactagtcagtaccatacccatgcaagattcacttttcacactacacatacacaaaccatatagaagtgattagataactcatcctaaatctaaaagcatagacacctttc

SEQ ID NO: 231185 - DNA, 442 bp, Glycine max
  unsure (1)..(442): unsure at all n locations
ctggatgattgactntccttntatggcgtcaacaagttgagtttgtcatcaaatcacattggcttcaatgtttcgttgtcaatcctcagattcctctccgttttctttctgaagaagatcatgaagctggcatagagagccctgtgtatgaagtatggcatcagcaggatcaagtgctgcttacttggctgcaatcgacgctttcaacgtcgatcgcatgtgctaggatgcgctcactcctatgaggtttgggagcacattcatgactatttccataaacaaacacgtgctacagcacgtcaactgcgaactcagttacaggctacaaatcttggtggaaaatcgatgcacgagttcttgtcgcacattaaagctcttttagatgctcttgcttccttccgaagtttgattatgctttaggaacatgttgactccattcttg

SEQ ID NO: 231186 - DNA, 53 bp, Glycine max
gaaacaaaactcaaaacaagcccacaaaggaaaagttaatttaaaaagaagac

SEQ ID NO: 231187 - DNA, 210 bp, Glycine max
catatgatatgctgacgactgcttgcacatggaaccatagatgagcttattggttcacctggacttagatgactcaccatttgctaccccctctgcatgagattcacgacctgataaccctgacaaggctaccgatccatgatgagattatgatatcaccaccagagactacctatatgattcatgcagtctacactatacctcttgtca

SEQ ID NO: 231188 - DNA, 85 bp, Glycine max
  unsure (1)..(85): unsure at all n locations
gctttantactaaggaagaggaatccatctggatgcanctctgtccatctcatccatctatacatttcaaccgtccctgtacata

SEQ ID NO: 231189 - DNA, 414 bp, Glycine max
  unsure (1)..(414): unsure at all n locations
ctcatgagtgacanaagaaaagtactatgtaacatactttctggtacttcaatgtcttgtcctcatgttagtggcatagcagcactgctcaagtctttccacaaagattggtcccctgcagccattaaatctgctctgatgactactgcttacacattgaacaacaaaggagctccaatttcagacatggcctcagataactcaccatttgctaccccctttgcatttggttcaggccatgttaaccctgtaaatgcttctgatccaggattagtctatgatatcagcaccaaagactacttaaattatttatgcagcataaactatacctcttctcagattgctttattatcaagaggtaaatttgtatgttctaaaaaaacacttcttcaagctggtaacttgaactaccct

SEQ ID NO: 231190 - DNA, 229 bp, Glycine max
gtcgacttaccaaaagacaatgggcttatgatcaagccacaactaagccgaattcagattgaattgaactcggcttagctcagccttgtccagcttagcggactcaatcaacctgagatgcaagggttgagcgctaagcgcggtagactcccggctaagcgcatgaccaaagatgcgcttaccgtaaggcttgcgcttatcgaaaggactgtttataaaacaccaaaat

SEQ ID NO: 231191 - DNA, 389 bp, Glycine max
cgccaaatacagcttgattgcggagaatcctggtggatctcgttttggaaatgcaagatgatacatgatttgagatgcaacaagatattcgcttcagacaatcaagattctaccaagccttgattcaagatttcttcaagatcaagccttgcctcaaaacgaaaggtttcaagtcattccacgcacatgtaatcgcttaccaatacatggtaatcgattaccaacgcacatgtaatcgattaccaatggtttgaaagtgtgtaatcgattacacatcatacgtcatcgatgaccacagactctaaatgttgggaatccacattctacatgaagagtcacaattgttcaagagaaataactgtgtcatccattacactaatgctgtaatc

SEQ ID NO: 231192 - DNA, 94 bp, Glycine max
  unsure (1)..(94): unsure at all n locations
agcttctcagatccgtcatggagagacttggcgactttcttattangcagtaccaatacaatacgaatatggcgccgatcggaactagcttcag

SEQ ID NO: 231193 - DNA, 417 bp, Glycine max
  unsure (1)..(417): unsure at all n locations
gttctagagaaagagaggtccaagttccatatagttctgagagatnttgtgtgtgaagattgcagagaagcgagttctaagcggaagccgttctgagagcttgagatgagtttgtgagtgattgtgagatcctagaggtgaaggagacatcctcaccacttgtgtttttgtagtctttcatcttgttcttctctttgttgtaaaggaggtttctggactatggaaagctaaatcctctgttggatcttccctgtaggtacctgatgtaaatgtatttctatctatgtaatgatgttttatgtgttctctgtttttcattccagtgtgcatttaccttgatcacgtagatgcatgctttgttggggtcattcaatagtgggaactggtctgattctaaagtccttgatagtatgggac

SEQ ID NO: 231194 - DNA, 95 bp, Glycine max
tcagctatctttccgcagtaggcggacttgcctttcttctttcttaatatatgaggagatttataatgtaatatttaacttatttgttgaagagt

SEQ ID NO: 231195 - DNA, 334 bp, Glycine max
  unsure (1)..(334): unsure at all n locations
gatggngcacaacaggagttccacatccacaatgcgcgcacaaatccaccatgaactgttgcccacctccaactgagctcacgtactggcacgtagcccatatcctggtttctctcagcaccgggatcccatcaatcgtcccaagcttccacaacatccaagcacaacaacatttatactgcacaagctatcacagccaggcaaaacagagcaaggcatatactctgctcaacacatcaaccaaaatcacagcttttctcacttaaagaccccagttacaattccttcgatccaattcgttaaccgagggatcgactccagaattatactggaa

SEQ ID NO: 231196 - DNA, 412 bp, Glycine max
  unsure (1)..(412): unsure at all n locations
cactactaaagtggtccttatgatcatcaatcatcaccccactgttgtgcacggtacttttatcattcagtgactttgtgtagaaggaataattgttgatgtcataacccttccaagtgaggacattaagattctgcccaacaactagcaatgataatgtcttagaagcattgtcggtagcaaatattgtatttctaaaccaattaatgaaactcctattgtgttcctgcaacaccctcatcatattcatgtttgggtgagaagctgtcacatattctttgtgagcatctatgtatggtataacatcagttgcgttgtttagtacatataaatgtgcttgtgatacttgctggcgatccatggntacaacagtgaatcctcgcgtgccgctaccttgctgcgtagcatcatg

SEQ ID NO: 231197 - DNA, 89 bp, Glycine max
  unsure (1)..(89): unsure at all n locations
agcttcaacctagaggagacgtgccattcctagtgntggagaagatcaacgacaatgcctacaagctacttgcctagtgagtataatgt

SEQ ID NO: 231198 - DNA, 432 bp, Glycine max
  unsure (1)..(432): unsure at all n locations
tccacgttcaatttcgagcgtctccatatgttactgtacttaatcagacatccgagananaagttagtatcgtttgagttggctcagagattcaacattcaatttcgagcgtctcgatatattacgggactcaatcagacatccgagtaaaaagttattgtcgtttgaattggctcagaggttcaacattcaatttcgagcgcctcgatatgttacgggactcaataagacatccgagtaaaaagttattgtcgtttgaattggctcagaggttcaacattcaatttcgagcgcctcgatatgttacgggactcaataagacatccgagtaaaaattttttgttgtttgaatttgctcagaggttcaagattcaatttcgagagtctcgatatgttacgggactcaatcagacatccgagtaaaaagttatt

SEQ ID NO: 231199 - DNA, 382 bp, Glycine max
  unsure (1)..(382): unsure at all n locations
nggatgatgttgcgcgtactgatgggtatcatgagatgtttgcggnggnntgacccatgngggcgctgaagtgatggcatgggtattaccttncttcctttttgccccaattgctccaattctcctagcattggtacatgtggaggagacgtaatcgaacttccctctcttcaaccctacttcgattctttccncggccaataccaagtccgcgaagctggaaggcatgtagcctaccaacttctcatagtaaaacactggcaaggtgtctaccatcatggtaatcatcctcctttcgaccatgggaggggccacttgtgctgccaggtctctccaccgatgagcgtactctttaaaggcnctactttccttcttaatcatg

SEQ ID NO: 231200 - DNA, 331 bp, Glycine max
  unsure (1)..(331): unsure at all n locations
ttcatcgtcgagagggagacagcccggattttcatctcgtgttcctaaatgaccgttcagcgatagaagaggcaggggtgcacatacaaccaacatgtttgactataatcagtcaccctagcaagagtgggtaataactcactgaacgagcgctcctgctccaaagatgaactgagctgatcgatctgtcgaagctgtgggatgtgaaataaaatccgtacgggaagcgaccgtcttagagggagtgacccacgcgaacattgctgtgcgatacggatgcgctactgtctgatggagatacgcangcgatgacgagaatgcaatgcctgga

SEQ ID NO: 231201 - DNA, 460 bp, Glycine max
  unsure (1)..(460): unsure at all n locations
tgtanaatggctaaacacgatacatgtcaggtgtttgnttgtgttcaagataaaagggatgccccacattatttccatgacacaaatgcaaaaatgatgatttggaaattttatgcaaaactggtcatgcatgcacctatgtggacgctcaagtgtcaaatttttatggtcatgtgatgctagggctcaggattcatttcctctattttaaatcaacccaatgtttccaaaatatgttcttttatcaatttgtgcattcattcgagtccattntgggcgtctgggaaaatcttcacagcattcacccttcaggtgtatacacattntttcaaaaactagttatgatcagctgaattttccaaagaaaagttggaagtcatctcttttcaaaagcatgttggtttttcagcttgacaacttatttntctttttctccttcttgtttnctttatcattatca

SEQ ID NO: 231202 - DNA, 481 bp, Glycine max
tgtgatggttaaatcaataaatgtagtagtgaacatataatcacaaaccttatgatagttgaccctttgacaaagggattgccgctcaagacatttatagaacatgttgaaaatatttgttattgatgatcattaagtgtaatttaccttatttattttactgacactcttagttcatttatgatatgtttctaattatttgttctctatgtttgcatgaatatttgtattagaataatgttagcaggttttgttttgaataaagacattatgttgtatcaattatgtactcctaactaatgatcatatttaggagaagactaatttgtaatacatggaaggaactatgtagattaagtgatgtacaaccgccacgacttgaattggtttctatttttaataatgaaattatgatgtatccaatgtatagaacaatttactcattttaatgtgcattatgttagtttaatctatttattta

SEQ ID NO: 231203 - DNA, 106 bp, Glycine max
  unsure (1)..(106): unsure at all n locations
caagctgggcncaagggttatgcgagacagagntataacattgttatccatcatcaacaaaatacgcaagaagaattaaatctcccacagcccacgagcacaaagt

SEQ ID NO: 231204 - DNA, 484 bp, Glycine max
  unsure (1)..(484): unsure at all n locations
tcaggctgctcaattgctccaggttgctgcatggaagggcttatgtctgtatggtggtcagcagaggagcacaaaccacaaacccttgcgacaggtacagatttctgattcaaggccagctgggttaccaagttgaccaacgcatccagtttgccttcaagcttcttagtttcagatgatgcagatgggtttgtagctacctcatgcactcctctaatgactatggcatcatttctggcgctaaactgctggaagttggaggccatcttttcaattaaatttctggcttcagcaggagtcatgtctccaagggctccaccactggcagcatctatcatacttctctccatattactgagtccttcataaaaatattggagaagaagctgttctganatctgatggtgagggcaactggcacatagtttcttaaatcgctcccagtactcatacaggctctcttcactgagctgtctaatacctg

SEQ ID NO: 231205 - DNA, 75 bp, Glycine max
gctgaatagctggctatgtatttgtccttacttctaaaggtatataacttatttcgatacaaattaaatatattt

SEQ ID NO: 231206 - DNA, 478 bp, Glycine max
  unsure (1)..(478): unsure at all n locations
tctangtaacccatgtctaggaataaaatgatattatntagccttatttatgcatcnttattcttaacgcaaactactgggtttacctcttaagagattatgagtgaaattatgtggtttaggctctttcacatgaggaatcatggttagagtagtttagttgacgaagataatagttggaatgactttaaatggtgaaaaatctttaacactgcatcaagagttagtttggtaggttaagcatccaacacatctacaaaatctgcaccaaacatcattttccacctccaagtgtttgttttgttgtctcttgcattntgctatgctttcttatcccttattatggttgaagtttatatttctgcactattactctaaaaaatatttagttttagtcattcattcatttaattcttggtatatacaaactntaagcacagtcaaaatctttgtggattcgacactcggtctcacaatt

SEQ ID NO: 231207 - DNA, 428 bp, Glycine max
  unsure (1)..(428): unsure at all n locations
gtgctactcaatgtgttgaacaacttttttgtacttatcttgattgagccttttcttgattcttgaatcttgatcttgattattcttgattcttgattcttgaaaactcgaaacttgaaacttgaaacttctcttgaatctttctcttgattcttgaattgttcttgactcaatcttgaaagcattctcatgggattcttgtcatcatctttgttatcataaaaaaaccttgaatcaatcttgattcatcatcatgaagcaatgaagcttgcttctacactacgcttctagaactttggatgctgctcaagcaaattacactaccacagagaaggagctattagcgatagttnttgctcttgagaaaatttgttcatatctacttggtactcgtgttattggttatactgaccatgcatctctgaagt

SEQ ID NO: 231208 - DNA, 348 bp, Glycine max
  unsure (1)..(348): unsure at all n locations
acgcgacacatacaatactcaggcttggacaccgngtagagtggagacgcgagcgcgggtctctgtacctctagatnggngacccatagcccaacggatctactccttctaacgatgtggaaaatctctctaaatatgctcctttgttggcagttgaaacaagttgcgtctttatcaacacaggctgaagagatgtgccctatcaagtgaggagcttacctcccccactggttgaagaccctttatacatatgtatgaggaaaatcatgtatatagaggacattaaacaataacatagggtattgaattaacatgtgcttaatgttcttctagtagtgaatactacat

SEQ ID NO: 231209 - DNA, 321 bp, Glycine max
  unsure (1)..(321): unsure at all n locations
gaagacaaactttaatgctcgctctttgttcgcatatgaaccagtatgatcctaaaacattggatctagcaaacgcttattggaccattgattgtgtgtatgtttacgtaatagagaataactttcccttaatgacgacctattgtctcatatgcttgcctgagctttcacgtgtatgtatttctacaagaatacttagcctgaatcagtgttattttttggcctgaatggaaacgacgactctcttacanacgacattatccacgtgagtgattctcatcattcaatggactatatactttatctgatgcttatacttac

SEQ ID NO: 231210 - DNA, 342 bp, Glycine max
  unsure (1)..(342): unsure at all n locations
tcatgatgatgaaccaagcaatttggatgatgccattagtttctttgatcgacncaagacttcaagatcaagcatcacgaatccaatccaagattcangagaagaaatcaagacttgaggttgtgctcattgctatgccggaaatgattcatgagaatggaagctgagaaagagatactcaaggttgtgcaaactaataggtgatcaaggtcgtactcgaatcacataaacattaaaaatgcagtatctatgaagtgatcctaggtcgtctcccaacgagcaatggtcaaccaacgttcataatagatagtgataaaacagtaacgaattgcgggggggggg

SEQ ID NO: 231211 - DNA, 435 bp, Glycine max
  unsure (1)..(435): unsure at all n locations
tacggacactatgaatactaagcttgatgtgagtctggcattatttgcggagagatgtttcttcttactctaancngcgtattatatcagacaggagaccgatttgctagcagctttataatcggaacgcatcgggtggaacggaccgaatgtttcgcctatgtattgcatttgccacattgcctcaaatttcaacaaacaatctagtaatggtgacttaaaaaaacaagtcatcaatattggcatgcttgttctttattcatgcatcatattattgctttattacatcttcactatatttattatttattgttttatcttttggcctaagatatgagatgacgaaaccatgattcgcggcacagttgctcgtaatacgagcgaacgtttcataagcaacagattagttggatcaaattcctaagagtatatgga

SEQ ID NO: 231212 - DNA, 88 bp, Glycine max
agcttccagtgatggagagctaaatcctctgttggatcttccttggacgtacttgatgtaaatatcctctatctatctaatgatgttt

SEQ ID NO: 231213 - DNA, 367 bp, Glycine max
cattacggacctataaaactaagctttatctagctagatctacaaagtggacaacagaacctaacggtttctaattatatgggccatcaaatctatcatgtgttgacagtaattgattaacccgtgaatttcctcgggggctgtacacacttcagcgatagcctttgctttggctagtagtcgcgggaggtcttgacttccattcaaggtcaaggcgaacctatccatccacatagtcgcttcttgatgcaatgcatcaatcaccctccctcttgcttccttttcggcgtacacttgtgcgaaatcctctactagcttttgttcatgggtcacagactggtttaactcttccttgtactgccctatg

SEQ ID NO: 231214 - DNA, 78 bp, Glycine max
agcttggatgagcaggttttttgttcatcaatctcatggcaacattaaacttggaaatgactaaaatgtataaattga

SEQ ID NO: 231215 - DNA, 435 bp, Glycine max
  unsure (1)..(435): unsure at all n locations
ngcatgacaagttaataattgcagaatgaatatttatgatatcaaattcatcctcatttcccagcatgatctgcataagcaaatatgacaaatatcatctgctcttttgcaatttgaatgagatcctgaaaaccactgtatttctaaaaggctgacggatatctaataggattgcacataataataacaaagaattccagtacatctaatatattgaagtttacaatggattagtagagggatcttgactacgtttgaccgaaagcaaagggacacaaaacacatttttccctttattatatgaattaataactatgacaatactaaaattggagaaacatgcaagttttcgcatccatgaatccatgcccatcatacattatcataggatacaaaaacctaccgaaagaaatatgcaccacaacgttttaacat

SEQ ID NO: 231216 - DNA, 79 bp, Glycine max
agctgagggttaaagtctcactatggtttgtgctcatgcaacaattgttagccggcgatacgagacatcttggcaaaca

SEQ ID NO: 231217 - DNA, 450 bp, Glycine max
  unsure (1)..(450): unsure at all n locations
attatgggcttcttgggattctttatcattagaagccaggatgaaagaacaggctcatctcanaggagtgtgggcacatatgatagttctggtttcaatgattggatatcagacatggaaattcaagaaattaaaagctttggtagcagatttacttggtgtaggccaaatggatctgtgaggagtaggctcgatagatgcttggtttcagaagagtggctacttaaatggcctgattcttcacaacaagtactacatagggattattctgatcactgtccaattattttgaaaacagatctggtggattgnggccctaagccatttanggtgatggactgttggcttaaaaataaagagtatcaaagactggttaatgaagtgtggtgtggtgaccaacaacttggatggggagtatcgtgcttaaaaacaaattgacgaacctaaaat

SEQ ID NO: 231218 - DNA, 95 bp, Glycine max
agcttagaaagttattctttgctagcaaagtcttgttttgaaataagattttcattggaaactcactctatgcggtagaatctctaattctattt

SEQ ID NO: 231219 - DNA, 448 bp, Glycine max
  unsure (1)..(448): unsure at all n locations
ctatgaaactcagcttacaatatgttntaaatccaggcccataagtaaattaaattcaaatctagataagataagataagatctagattaaataatatctagatgagaaattcaaatctagataaaataagataagatctagattaaataatatctagatgagaaattcaaatctagataagataagatctagattaaataatatctagatgagatcaaatctaaataatatctagatgagataaagataagataagatctaattctgtagaataaaatagtctaccctcttcaagtccaagctcaattctggattcaagcccaattctggattcaaacccaatgcttcattaattcctgaaattagattaaaaacatcaaattagctgaatgggcccaaataataaaactgcctaataaatgtgacaattaagactaatcagtattt

SEQ ID NO: 231220 - DNA, 482 bp, Glycine max
  unsure (1)..(482): unsure at all n locations
ntganagccgcatgaattaagcgataccccttgctgagggttaatttactgggcacaactctgcaactgatcttgggaaatgaacacttgtcctcctgagttcacggcctgcgaggccaacgcattcgacaaaaccgtcagagcatttcgacaacacaaggttgtcgggaacccatcgtcaccccacttgtctatctcctcattcacatcaccgcactcatcaaatggcacatattgggacgtattgaacttcagcacacatgtacctgcaccagtaaagttggtgcaaactgctcaaactctctggtataatgtattgtctaatctaattatgagtttttcttttttaatttgtgagaatcaaagacgagatntataactcaaatatcttactcaactaaatacgtatatatcacaacatctatatttgacgttaattagctcttgcgtgtatctctagatcatatatttatcaacatatt

SEQ ID NO: 231221 - DNA, 97 bp, Glycine max
  unsure (1)..(97): unsure at all n locations
agctnnggatttctctagtagggaatgtattctttctaagatggattcaaacccagtccncttcattaagaaccgctcatttcttcctctatttcct

SEQ ID NO: 231222 - DNA, 447 bp, Glycine max
  unsure (1)..(447): unsure at all n locations
tncatcaatattatacttagactatcctaagagaggatagcttgttcaattgtaaacccaagattgctaaccagacctttaagtcagatcccatcctttattgcttctattagagcatgcattctacctttgtagtggataaaaccacaatgggctaatgagtttccttcaaactatcaagagagttgccaatgatgaatgcgtaccttgtcatagttctccttgcatccaaatctacagcatagtcaaaatctaaataaccagcaagagcacaagacgtgtctccatggtagacaagtccaatatcagctgtacccattagtacccaaatatacatatcacaacttaccaattgtcgcaacctacccttcggcgggaaggcgacacggtgctcacgggtgtgtcatccaagaaacaaanatgcgcggagtcgccaccaacgtttat

SEQ ID NO: 231223 - DNA, 99 bp, Glycine max
  unsure (1)..(99): unsure at all n locations
agctntactatgcagagaatatccaaggaaaataccttcatctgacttaggcatcaaatttcctaagttatcttccgctattcaatacgaaacatttac

SEQ ID NO: 231224 - DNA, 420 bp, Glycine max
  unsure (1)..(420): unsure at all n locations
tatttgacttccctatgctgtctctacatacataaaacaaccccaccatcccaatgttgcaaaatcatattcatatatcattgnggcatttcaccgagcactnggtgggcgcaggtttggacacaaattgcaagagaatgggggcaatgtggcatgccccattgcttccgaatacaacataggcctaaggccttctcattcaaactctcaactccacaaaacaagcatggattcagatgcaaattgcttcacgaattttgcaaaaaactgagcaactaaagcacgaaaacacatcaatggagagccaaataaccaagggaaattgcacttacttgtggngagtgaattaaagcgtgaaaagggaagcagaaactcaacaatggaagcatnggggctgctgttcttgtagttcccgtgagc

SEQ ID NO: 231225 - DNA, 71 bp, Glycine max
  unsure (1)..(71): unsure at all n locations
ttcctaatttcctatctaaatagncttacatgaacaaaaaatgagtggctaagcctttatactaggggtcg

SEQ ID NO: 231226 - DNA, 468 bp, Glycine max
  unsure (1)..(468): unsure at all n locations
tctacttatgtggcanggcgggcttccttcactttcttgtctccaacgcgagctctgaccactgtcctttcttcccgcggtgcttcttttcatgtccgcctgagtgggcttatagcctaaaccatacttcccacgatttccttgggtttttatcaggctagttatgccgccattgtctttgcctaaacccatcccgggttcataaccgttccccaacataactcgggccatcattaccgccgcatcggacagacaaggttgcccaaagagggagtccacggaggaaatgctgaccacctcaaaagactggagagcggtttctaacgattcttctgcggcttccacataatgcatggaggatgggcagcttaccaagatatcttcctcgcctgatacgatgaccaagtgccccttcactacanatntcagcttttggtggagtgtagaatgcacaactcccactgagtg

SEQ ID NO: 231227 - DNA, 51 bp, Glycine max
gtctacaccgacgtagtttaggcactaaccggcttgtgttatattaacagt

SEQ ID NO: 231228 - DNA, 475 bp, Glycine max
tcgatataacctatctccaggagaatccggaactaactttttcttttctgaaaaccaaggcttccagagacaaattgttctagccaatttgtctcgaacatcattttgtttcagctagaaaataattcaaagatgtcaaggttgattcaagagaagaagctatgtgcacgacgtgttgtggcagtggcaattgaaaacaacaaaacaagccaatatgcagcgaaatgggcagttgacaatcttcttccaaaagaccaagctctcctattggtccatgtcaggcaaaaagcatcttccattcctacgccaagtaatcattaaatctctatctgcctataatatcttgattcaaatatggaaggccaattttgtaacctttatgtgcacatgagcattggtcgtttgatgttctaaggcctctttaatccaaataaatactttgcgacacacattagtgacttgaattgatgattat

SEQ ID NO: 231229 - DNA, 91 bp, Glycine max
agcttagagacataataagcggtatcacccctatgagaaccataaccacagagagagggatcagcaccttctctgattgcagtatccagca

SEQ ID NO: 231230 - DNA, 420 bp, Glycine max
  unsure (1)..(420): unsure at all n locations
tctaagttctaaaaaggctagaaggctaggccctatttgtatagtcggctagtctagctaaacctacttccaacccagccccattgttacatgcagataagggagacaaaacagacaattttcccatatacaattgcatcagaaacttgttatcagtctttacattaattcacataatgacagcaaaaagttactgacaccaagactcaaccttgtaaattaacatgatctcagagtgaagttcatgacatgagagagaaaagtcaaaaagatcatgcatatgtaaatgtatataattacattgatgaccacgtctaccgtggaccacctttataggtgatttacggtggcccactntttcaatcccttggattcatcttacgttcacgggaatatactacatcttacataccagatctc

SEQ ID NO: 231231 - DNA, 464 bp, Glycine max
  unsure (1)..(464): unsure at all n locations
ntagtcanacagaataatccaaaaatgtcagagaattgttttttgtttattcataacaagactttctatgattggtttaaagatacaatctttgcaaatgaaaatgattcagaaacattaagaaagctagcaaatgggcctaaaagaaatgttataacttgacaaggatacgacataaacaagtattcattttacacaaaagcacaagacgacaaaagtacaatgcagaacagcggggtcaccctaagggctgattctcaacacttcgcaagtgtgcatgacgctaatccttgtgtagcttccatcccttactttgggttcattgatgaaatttgggagtttaactatgtgaaatttactgtttgtgtnttcaaatgtaaatgggttgacaacaacaccggtgtgcgaaccaatgatagaggatttacgttggtagacctaaagaaacttggttaccacaatga

SEQ ID NO: 231232 - DNA, 68 bp, Glycine max
  unsure (1)..(68): unsure at all n locations
agctntagcttgagtcatagccgtaaccttgttcgctacaatggggtnggctgaaaatataaatctag

SEQ ID NO: 231233 - DNA, 422 bp, Glycine max
  unsure (1)..(422): unsure at all n locations
ttaagaaggacattgatttctatgtatttactgccttcatttcaatccagntaggatcataacattaacttctactggaatgagtttgtcttcaaacgcatgaaaaaagaattacactaattaaccaggtgctttcgacgatacaatatgtatatactttctaaagtaattagcaacagacataaaaaacaaagtttgtcttgggggagagagattttacatagctccaaaaaatttcagccccaagttacacttcatagaatgttaactaaacaattttattaaatgctaatgtataacggtcaaagccattgaggtagatgatgacacctcaaagcaggtgaaaacacaaaananaaatgtgtntgtgggctaagagtgcttatgccaatttagaagcatagagatacacacccttataa

SEQ ID NO: 231234 - DNA, 109 bp, Glycine max
cgacccggatccttgagtcacctgcagatgcagcttcacaaatcttgcaatttcacattcaacatcatgaactatcaaaaccaagctaactgggtagaggcagaaaact

SEQ ID NO: 231235 - DNA, 412 bp, Glycine max
  unsure (1)..(412): unsure at all n locations
tctggtgggacatcttgacttgctttccaatctgacatttttcacagattctgccttcttctattttcagattggggatgcctctaacagcacctttgtcaatgattttcttcatgcctcttaagtgcagatgtccaaatctttgatgccatattctgacttcatcttctttggaggatagacatgtggaggagtagctggtttcttggggtgtccataggtaacaattgtcctttgatctgctgcccttcattagaacttcactcttctcatttgtcaccaagcattctgactntgtgaagtttacattgaatccttcatcacacagctgactgatgctgatcaagtttgcagtcagtcccttcaccagcagtactttgttcagactanngaagtcatcatgaactagctt

SEQ ID NO: 231236 - DNA, 80 bp, Glycine max
  unsure (1)..(80): unsure at all n locations
agcttgaggggaatgcatggatgtgtgcaatattcatggcacacataatgtgcgaacattataccggangactcaaacat

SEQ ID NO: 231237 - DNA, 400 bp, Glycine max
  unsure (1)..(400): unsure at all n locations
atatcagctctctggtctgctactgttcatgtacaactngacactgtttgctgagaaccttctctctgacaaagaacaaatccagcttgatatgtttggtgcgagagtgtatgagagggttgagcaagggacacagtactcatattatcacagaaaataactggtggagcatgaggaactttgagttcagtcagcagggactgaatccaagttacttcagctgttgccaaggctaaactcctgtactctgcctcagtactggacctggccacaacagattgctttttggatcaccaagagacaagatttgggcctaagaacacaacagccccagaggtagagcttcgatcatcaaggtctgaagcccagtcagcatcgcacaaggcatgaacagagtagt

SEQ ID NO: 231238 - DNA, 471 bp, Glycine max
  unsure (1)..(471): unsure at all n locations
actaagcttctaagccctaatggatcgagaagtcattggcatgggtgtttctctcttgcggatactngncgnagtgcctctgatagcgaatcctattcctcagagaggttgagggcttcgcaccatattggtagaggaacctcccacctctacggagggtgcggcctttcgttgcttccctggtcagggagtctatctcgatcatggtgattctccctccttctactccaaagggagtaaggacaagcgatggggatgttagggcatctccccgcgtgcgacgtagccatagcattgggtcgccatcgtcccccctgtcgttgctggctatgagtgggtaagggacgatgttttgaagtataagtcctccctcacctctacagcaagtatcactgctctccaacactatgtgaagctggaagatcctgaggactcctacaagatagtcgtccaggcttgtgggagtgatga

SEQ ID NO: 231239 - DNA, 465 bp, Glycine max
  unsure (1)..(465): unsure at all n locations
ctggcttccacttcatcaataaatgtaaaagaagaatagagtttattatctctttagtnagaaattgattgcgcaatgaataaaatacggaaataatgaacaagctgttagtaaagattacacacagccttggaattcaatatcctaacacaaaaagccttggaatttaatatcctaacacaagaagccttggcattcaatatcctaacacaaaaaaatattttttttttcttggttacaaatatacatttcttaatttttaataaaaggctaggatttctaaagcatcataataatcccaactaggttagcaccaagaggatcaccaatcacctgtataagacgaggttccttactatagtgaatttacatgttgaaaaacattaaaataagacttcaactgccattggagaaattacaaaggaatgaataattccatatgttgcgtccaatgggacctttcat

SEQ ID NO: 231240 - DNA, 62 bp, Glycine max
gtaaaagtctcacgattgtcacgtgctcatgcaacaattgttagccgtggctatacgagaca

SEQ ID NO: 231241 - DNA, 451 bp, Glycine max
  unsure (1)..(451): unsure at all n locations
ttccaacatgtgaaaggtacttgacaagantnttcttgatctcacattgcttacaatcttaatatgattaaatttccaaatatttctttgcatgatgttctttgtgctctataagggtaaacaatattaattgtattttctatattgatatttgacagctcaatgaanagaagaaacagttgtcactcaaatctatggctgaagggaggcagcgattaaaacagaagcgccatgaagaggaattggaacgagagagaaaacaacagctagaggaggagaaacgcctgtatgtttgatgctttagtttctttatttatacattgtttgaggcttgcttatgtaagtaaaatagttttccctcatattaaactaagtaaagtgggagaaagcaagaaaaaagagcatgtattctatctanataggattaatattaatattaatattattatat

SEQ ID NO: 231242 - DNA, 429 bp, Glycine max
  unsure (1)..(429): unsure at all n locations
tgtagcanataagaagtatatngaaattaatcaggttatgttgttatattaannctataggctggatgcagnttcaaaaatttatgttcctatgttttcagatatgtntttccctctcattttttgaatatcaaaatttgatttcgatcttgtttaaatagtagtgttttgcaaaaagtctacaagaaagttttcaaagttcatacacatacacatactaatcaatcccctttttagtatgtttcttttatttcaaaagtatttccaataaattaaacaacattgtatttcaaaagttntaaagtataggatttgaaattcaaacatatgtgtgttggtgtggcaagtacctaattatggaatatgacaattgaggaaggccttatctagaacttgtggcccttgaaaaacccttgtactattatggat

SEQ ID NO: 231243 - DNA, 376 bp, Glycine max
  unsure (1)..(376): unsure at all n locations
ggggcttaagcaagtttaggtgctgacattataagcatatgtaatatttacggcaattagaaatttatcgtaaattgaaaaagtaaaatttagttttacttctaactgattttagtactgctactttcatttaaaattttgagaattttcttatcaagcaattcatcttcttttagcaaaattacttataaaaaataaatgtgatatcctacggataaaagattagaaaattactacgtaccctccttcaattacatcgccttttcttaagtgtgcaaattacaacaccttatacgagagaaccaagttgataataataaccacaacaaaaagtaagcatacgcanacataattaagaagatatcgtaacattgac

SEQ ID NO: 231244 - DNA, 89 bp, Glycine max
  unsure (1)..(89): unsure at all n locations
agcttgctacataaccaagcaattntctttttaatcatcaatcaggggacaatgtccgntagtagcccatactcgtaatcattttcaca

SEQ ID NO: 231245 - DNA, 474 bp, Glycine max
  unsure (1)..(474): unsure at all n locations
gacacataaaactcagctatgcagnttatttggattaaaacttaagcaattatttgatatttaaggggtgatattttcttggtggaaatatagctggaagatttggcctcacaatgtttatttaatgttttgtgaagttttttggccctaaaatgttttgacttaggaaagctagtcaagtaatatattcgagcaaagaaaggaaaaacacagagacaattgtgtttcgtattttagttagaacatgtgcttcttacaacattaagtggctgttatagcatgggcatttggctttttccttatagaatgtgtgaaagtctattcttctaattttagtatgtatgtagtatgactcatatagtatataaaactaaaagtttgagtggccatggcctccctcagctccttatcagattcgccactgtttagaatataatttanatatattgattgtcattcaattataaacaatta

SEQ ID NO: 231246 - DNA, 474 bp, Glycine max
  unsure (1)..(474): unsure at all n locations
actcagcttttatccaggcactctcttgggagcgaagctcttcttctatgcttattccctagnggatggcacctcctctcacctcttctcctttgtcttccactgcatctccatggtggaaaatcaccattgaaggacctcattgaagctcanagatccagcctccatagaagctccacaagcaagcttccatcaagtggtaatcagagcacaagagcttcaagtaggtgctccttaaacctccattaattttcagctttaccttctcctccatttttgattcttcatttttctccatgcatctcctcacatgtcttgtgctaaatgttgttaacatgattctttagaatttccaccgattaatcttgctatagaagctagatttgattttctatggttcaaatttcttgttcatacgaactttttaaaattactaagaattagtcactgcgaattttgagcttgaaattttac

SEQ ID NO: 231247 - DNA, 87 bp, Glycine max
  unsure (1)..(87): unsure at all n locations
agcttcgagagaagagatgcgtgatgattctttantcagaganattcgatttcaagattcaagattctggaattcaagattcaagag

SEQ ID NO: 231248 - DNA, 419 bp, Glycine max
  unsure (1)..(419): unsure at all n locations
gacctataaaactcagcttcttccaaacccaatgccaaaatgagtctgttaattttcgttcctcaccctcttccctaaccacnctataattcctcttcttcgctgcttcgtcatttcaggtactatttcattaaagttccgacttacttcttgaatttattatttcctttctctttttggtatgcttttttttttgtgttaaattttgaagtggacttcaagtgtttttttcttcgttagaatttaatttaaatgccctgccatctaatcatccaattgtagatttttatgaatggtaagattgttgagttttatagcaactactttaaaattcatatgtagagtgatttataattgattgatagtgtatattggttcaatataccgagaatggaaattgaactttttaatctatttat

SEQ ID NO: 231249 - DNA, 88 bp, Glycine max
  unsure (1)..(88): unsure at all n locations
agcttgtagaacaaaaggccatttatggtcttcaagtggattttcaaaaggcctatgactcaatcttgggcttttntggattatatgc

SEQ ID NO: 231250 - DNA, 438 bp, Glycine max
  unsure (1)..(438): unsure at all n locations
tggacaaacaaagtgatgcatctaggaaacacaaccactttattgttaaatatcggctttgtatgtgttgatttgtttaagtgttgacttaaatgaaaatgttgtgattgtttatatgttgttgtatatttcatttgtagggttgagggtgctcattggtcattaaagagactcctacaaaactctcctagtgacatatgcagtgtttgggaagcaatgaacaacatgatgacacttcaacacacccagattaaaacatcttttgagacaagcacacaggtggttgggcatgcgtttaaagttaccttgtacaataaaactacttggcatggtatctaggcacactntaaatgaaattgctgctgagtataagcgtgtaccttatgcaggcaaaaatccttcacgttgtgaatgtgtcatgaagagtacccatgatct

SEQ ID NO: 231251 - DNA, 375 bp, Glycine max
  unsure (1)..(375): unsure at all n locations
cggagaaagacccaggacaaagcggggagagtggattttgattgtcttcncgcagcggcngacaaagaacccctgtctacacggcagnatgctactctcaccacttaacatagaccctgatatgaactcgctataatatctcgctgctcgatgtacctggtgcaacctatatgccttgtacatagagaagctctattacgatggtcatatgaataatcaattcacaagcaatagtattaggatctcggaaactctaagctaataagacgatctgataagtatcatttgattaatagccagcgcaagagagaactactgttcttataatttaacatattcgaagaatgacacacttaaaatgtttaggtacaccaa

SEQ ID NO: 231252 - DNA, 85 bp, Glycine max
  unsure (1)..(85): unsure at all n locations
agaccggatacttaagtcacctgcagcatgcagcttgtgagactatatgnaagttttggttattttattatntaatacctaatca

SEQ ID NO: 231253 - DNA, 424 bp, Glycine max
  unsure (1)..(424): unsure at all n locations
tctaaactntgtacaagaatgaagctctgatactctttgttagacaagtggcctcagatatcttaagaaggggggggggttgaattaagatattcgaaactttttcccctaattaaaaatctatcttactttttaattaagttatgaattcccttaatgacaatcttcttaaatattaattcaaatgaagcaacttgaatatgaatataaagcaataataaataaaggagattaagggaagagaaaatgcaaactcagttttatactggttcggccacacccttgtgcctacgtccagtccccaagcaacccgcttgagagttccactaacttgtaaattccttttacaagttctaaacacacaaagacaacccttcctttgtgttagagattctttacacaagagactcacagctctttatcc

SEQ ID NO: 231254 - DNA, 437 bp, Glycine max
acggaccttaatatagcttgaaggagagagagaccgacagagcgcgacgatgttttttaagaagagccagccggttactcaaggtcctaaagaaacttgcctcagcgtttatgtgagacagagaccaacatgttagctatcatcaccaagtaccaacatgaactatgtctagccacgacacacggtcatagggtggcggacgagtttgcccaagagtacgcggataaggaggctataggaagggtgatcgactcgttacaccaagaggcaaccatatggatggaccgatttgctcttaccttgtatgggagtcaagaacttctccgattgctagccaaggccaaagcaatggtagatacctactccgtcccgaggagatccacggacttgtcgactattgtcagcatatgatagatataatggcccttattattaga

SEQ ID NO: 231255 - DNA, 444 bp, Glycine max
  unsure (1)..(444): unsure at all n locations
ctatttntagcctttattttcaagagtagtgtcgtctcttaatatatcgattcttcactcaagttcttcgtctgatgaattgtggtcattgggacatttaatgcttgcattaaaagcacatcccttcatcatgcaaagagtccatgctgataggtttgcgtgacaagcacttcagtagaaaagtcatctcttccattatagtgggtctactcaattgagcacaccttctgatgaagataagcactttcagaccttggacttcatttattcttctaggagaatgtttatgtaaaataaaatctcaaacccagagtattaaatgaatgtcctaaattcaaaacttaaatgctatgccagatcatgttcttgagagatatcatctaaaacatcacatgcaaaaatacaaatcatgatatgatagcacatcacacacccactttatca

SEQ ID NO: 231256 - DNA, 238 bp, Glycine max
tgtttgaaaacttttgacctatctgatgagccttcctgatctaaacttgacttgaaatgacctgtcctctgatctgatctgaaacttgaactgaactctctgaacttctctgatctgatgctcttgataatttgaactctatgggctttggacacttgtatctcaacactgaataacttgatatatctgaacagaactgtttccgatacaacttgtaaacatataacataccttccaa

SEQ ID NO: 231257 - DNA, 450 bp, Glycine max
atactaagcttcaacctctcacaaggacaagacggagtgtagattattattctccaaactctacgatgcgagtccaaatccctacatatgaatgagtcagcgtccacttccaattattttccaagaattctcgccttttcaaatcaactaaaaagaaatggcgcgaagctagaagatgtaagaattatggagaagatactatgctcattagatcccaaatttgagcacattgttctgacaatcgatgaaaccaaaagatttataaactattacgatcgaacaacttcaaggatcactggaggcttatgaggagaagcataaaaataagcgagagatcattgagcacctcttcaagatgcaactaaaggagaatgaacaagtcaacgaaatgaaagaagtcaatgacgccgatgtagaggtccaggtcattgcttaggacaggttggacgt

SEQ ID NO: 231258 - DNA, 89 bp, Glycine max
  unsure (1)..(89): unsure at all n locations
agcttgatgataatgcggtacccatcacattgtgtactagatggcggncgggctatggtgcataataatcgtgtatcaatcgtgtctaa

SEQ ID NO: 231259 - DNA, 465 bp, Glycine max
  unsure (1)..(465): unsure at all n locations
tagttcctaaattagcccataaggttttccagaagtggctaatgaacttagcatctctatctaacacaatggtcctaggcaaaccatggagtctcaacttccctgaaaaagagttttgagatgtgggaagcatcatccaccttgtggcatggtataaagtgttccatcttgctaaacctatccaccaccacaaagatagagtctacacctctttgggttctaggaagcccaaggacaaagtccatactaatgtctacccaaggtgcagataggatgggtaagggtgtgtatagcccatggggcatcaccctagacttggcttgtaaacaaaccacacacctagtgcaatgcttatggacatctttcttcttatggngccaataaaacttttctttaagtaagaaaagggtcttgtctatcccacagtggcccacgagcccaccctcatggctctctttcacaagt

SEQ ID NO: 231260 - DNA, 424 bp, Glycine max
  unsure (1)..(424): unsure at all n locations
aatgcccttnttgcagagcgagacagcctgnttatagggatgttacctctccatgagtccttggtatttttgttgctttggcaattttctcctcaatggaatctaaaatgcccgtttcatcctcagaagcactcataaaaacaccatagctgtaaaaagaaaaggtggatataagcttgcaatatataatgtacatctttggattttagtagaaggtcctcataaccataatcgccaattctcccatgagccagatcatttatcttagattgtatttgcaccataaaaaggtgcataaaatcttggcatattaccaaaagtctcagtaattgaaactcccacgaattacttgaggagaattttttttatggaatttaatttagaacataataaattataaaacctgtcattaagaaccacatgt

SEQ ID NO: 231261 - DNA, 91 bp, Glycine max
  unsure (1)..(91): unsure at all n locations
catgcaagctatatgccaggcccactaataaaaattagtattnatcaatttggataatttatgtttgagccggctcatctgacgcgttggg

SEQ ID NO: 231262 - DNA, 399 bp, Glycine max
  unsure (1)..(399): unsure at all n locations
acactgcaatgtcaaagctagataagtcttttgcagagatgaaaatagaaaatatcatcaaggtaagcttgtgtccaacacattagtggatgatcaacctgaagaagctagagaaccaactgaacatttgttgaggaaacatcatccagagtcccggatcattggtgatccaaaggacaaagtccaaactaggaactctctcaagcatacaacattactctcagggactgagccaaaacacatagatgatgctatgtctgatgaacacttggtcaaagcaatggaagaagagctagagcagtttcagaagaacgatgtttggaagctnttagaactccccaaaggaaatactaatgttggagcanagtgggtgttcataaacacgctagacgagacagg

SEQ ID NO: 231263 - DNA, 89 bp, Glycine max
agcttagctgcacacacggagtctcataacttatctcacttccttgagaagcttccttaagaagatccaacgaagctagagcttagcta

SEQ ID NO: 231264 - DNA, 433 bp, Glycine max
  unsure (1)..(433): unsure at all n locations
taattcttttaagccaaaccttggcagactgtgtaagagattcttttaacatataaaggtctattgtaaatcgtttctcttgacttcttgatcttgacttgaatcaatgttgaatagctttaatcttttggcatcatcaaaatcttaatacagcatatgcacttacaaattcaacacaaacttagaacataatgtgataattattatgactaanaatgactctaagacaacatgaatgaagtgatttacacttagatttttgtgttttcttttctaatctatattttgcaagaatattttgactganaacatgattcaagagtagatctatattattttgactgaatatttctatgttttctaatttaaaggtttagcacaagaatattntgattgaaaaatgatagaacctaaaatcaacataaaaacatga

SEQ ID NO: 231265 - DNA, 82 bp, Glycine max
agcgttgatactttcttatgaatttctttaaagctcgactcaatcccacaaaatgactcgaaggtgaggaattcaacactaa

SEQ ID NO: 231266 - DNA, 367 bp, Glycine max
  unsure (1)..(367): unsure at all n locations
ggaatcttanaaattatccttgggttcttttctttgttgtatacccactgcaggacaaatccaaagtttaattttcacaagtacatgattcgtgccctcgaagatgatttcaagcaagttgttggtataaggtaaatgcttttgtattattgcttctatgcatatcacacatatacataaatttaattgccaagaaaactttatcccatttgtgtcaattgtgtaaagttattgattctctgtaataacaattatattttgtggttgcagttggtatctttggctctatgtggctatcttcttgttgcttaacatcaatggtatgctacaagacaggaangttatggtttatgccatgcatcattta

SEQ ID NO: 231267 - DNA, 461 bp, Glycine max
  unsure (1)..(461): unsure at all n locations
tatatctggtcgagcgcaggtctgagcatacataatactcttaactactgatgcatacggaattgcttccatttgcttccgttccacatcatttttaggacatcgcgcgagactaaatttgtctcctgtctgaattggaacgggagatgctaagcacttttccatcctaaatctctctagtactttattgatatatgctctttgagacaagcctaacaatccttgtgatctatttcggaatatttctatccctatcacatagcttgcctcacccatatccttcatttcaaagttactagaaagaaacttcttagtctcatgaagaagaccaagatcattagttgcaagcatatatcatcaacatacaggactagaaacataaccttactcccactgaccttcagatatacacaccgatcaacagtgtcttccttanatccaaaggaaacaatggtatcatt

SEQ ID NO: 231268 - DNA, 475 bp, Glycine max
  unsure (1)..(475): unsure at all n locations
ctcagcttcttataagctgacaccatttatcaataaagacaagttgtgttttattcagaanattagagtttatctcttttatcttagtgagagtgattctcctaaattcttgagtgattcaagaacaccctggttgtatcaaaggactttcacaacctttgtgtgttgccctcgctggaaagagtgattcttttcttcctttcatcttcacccttgttctttcaaaccacaattccagaaaattcacctctgcccagaattatctcgtggccataactcccattttacgcactcaaattaagtgattcttgagcctaaattgaatttcaaaacgagacctttcacctcgctttggaatcacctcatttggagtcctgtagcttcagttattgccatttctatatttctgtccagccatcacttaacctacgttttaccatcccattcatccattntatgccaagaaccaccttat

SEQ ID NO: 231269 - DNA, 462 bp, Glycine max
  unsure (1)..(462): unsure at all n locations
tctaagagagaaanaggaagataatgatgagggagaagggttagtgtgtgtcttaattttcaggagggaaaatagagggctttagaaggctggtatatgaatgaacgagaatgaagcgaatggaatnttatgtttagtgttgaacttggaatcatcctcaaaatgaaactcgagagaaaattgaggatataatcttaaattattatcaattatatattgattacaaataatttggaatctgatccaaatgatactaagcttacatatgttaagtattattttagatctgagttttaatataaatgactagttaaatttttttataaagactaatcatcaacaaaattgatcaatatctcttatcaaagggtatcagaacataatttgaaatcaaatataatattgaatagtaatatattttgtgggggcacacttattttctatttaacacaatcaataaat

SEQ ID NO: 231270 - DNA, 410 bp, Glycine max
  unsure (1)..(410): unsure at all n locations
ctgatgatatggtcttaccgacaaaggatggtgtgggtttatttttaggcacatttagtcatcctgcttggacgaatgaaaaaactggggccaatgaagaaggcgaggatgaacgacaagcctgtgctgagactgacattccaatacagccaagtttcccaccaacacaacaatgtcattactcatgcaataacagaccttctccttacccaccgcccagttatccatgaaggccattcctaatatcaaccacaaagcctacctatcgnacttncaatgacgaacaccacctttagcgtaaaccaaaacagcaaccaagatatgaatattgcagcgagaaagcctgagaattcaccccaaatgcagtgttctatgctgacttgcttccatatctacttaataattcaatg

SEQ ID NO: 231271 - DNA, 373 bp, Glycine max
cgctgaccacagagcggtacctggagatatgtcgcggaggtcatgagacactgtggacgtcaagtggggagctattgcccaaaaccacacgtgaccaatcccgacccaacccgggcatagtctgtcagcgagaacctgtgatgtacctaaacaggcgagctcctgcgcagcaacagcataaaggaacaaagaccacatggcaaggaggctcgtggtggctggccagctgtgaatttcgcgcgatagatgagatgcgggctctcggaattgatcaccaagagagacgaatcgattaccacgcttaacaacgaacacaggaggctaagatggtctctggtaatctatcaccaatgggtggaatccattaccaagc

SEQ ID NO: 231272 - DNA, 385 bp, Glycine max
actaagcttaagctcaactgaatgattggttaggcagtactttactgattttcctaaagcgattacataaattatcaaagcaatctacaaagttgtactgattacctataaaatcatcacataatattgatactccatacaaatgaatcaagtgttgtgtattttggataaacaaaaagggttatgagccatctaaatccaacacatctcaacccatgccgtggtgaaaaataaaactaactaaacaaaaaatgctcctccggcattgagccatctaagttatcgactcagtgtgctctttgttagtacgggtgatgacggcttttcttgtgagttctttctgccttcatagtcaatgtgcttgacatccaagattgatttgatt

SEQ ID NO: 231273 - DNA, 81 bp, Glycine max
  unsure (1)..(81): unsure at all n locations
agcggcacttgatgatggaatgatattgttgctaatgaacaactntcttaaactattcctccacatcttactgattctttt

SEQ ID NO: 231274 - DNA, 331 bp, Glycine max
  unsure (1)..(331): unsure at all n locations
ggccccgnactctaacttgacgtggggacttattctctgtttcaaatagatctgnataaaactccttgaccagtgccacatcaatgcgaccatcatgctgcctggtcaaggctttatgccattggcgcttctcgagctctctgcggaactagtcatactctgtgatgtggaggtcaatattcctctcggggaggatgttccacgaatggacgttttgctcataacgctcccaagcgacctcngagacgaatctcatcgtgccatatggctcctgaggacgggaggcgggtgatttccttttcctataggccatctgcataaaaagaatcac

SEQ ID NO: 231275 - DNA, 92 bp, Glycine max
  unsure (1)..(92): unsure at all n locations
ccggaccttaatcacctgngctgcagcttgatatttgattgggtaacctatttaagaagggaaagaagaatagccgcaatgactggttgaca

SEQ ID NO: 231276 - DNA, 330 bp, Glycine max
  unsure (1)..(330): unsure at all n locations
tccatgatggncgcggatgagagcagagattgcatatcttgtacgcgcaganaacgatgcagcgtggatattacattagagggaaccaacatctggctnactacatgaaacatgctggatattgtgttgggagtgactccaactgatctgctcacgagagctacgttttgtatgcaaagacctgtgaatgtttgtatacattattttgatgatgtcaaagaagaatctaacaacgctgcttcaaatgataagcatttgcttcaagaataattcaagattgcttcaacaaacaaagccctagtttctagattcacttaagaccaagccttg

SEQ ID NO: 231277 - DNA, 371 bp, Glycine max
  unsure (1)..(371): unsure at all n locations
tgagctcattggtgcttccacatagagcccctcttaacttgttcctgctctattcttcctttcaggccctttttgtttcccgctctaatgcttcgaccctagtcatgttgacatctctcagctcgtcacactctttcctgaccctagtgactattgtctttatcttctccttgaccactctcattgttttgagctccactttcaaagcttgcacttcttcgctttcctcaaggactnttgcttctttcccacttaggccttttagcttcgggagccaagttatcccttgcgttctagacttcaaccacttgtgatagccgtcgatgatgccaatgctacttaccctaatctccgtaatttttcctttcact

SEQ ID NO: 231278 - DNA, 382 bp, Glycine max
cacgttctagatatttcatacctacacgttcaacttaccattatcatgcgccatgagtttctttacgtgacgtgcaatcaagtacattgcaaaagacatgagatcctttttcacgtgaactcagaggcaaaggcatgggattcacatctcactaatgacaaatgcatgacaccaaagcctacttcatgtgaatgagtcattactaatgctgtttctctcatgttggaacttctttcttcagcccctctattcattcttctttgtgtgccgcggagctcatttctctatctcacatcccaccttttccatccttcttgcaagcactttatctttttttttagtgataccatacaacatgcgcaacttggacctagtgatgtct

SEQ ID NO: 231279 - DNA, 96 bp, Glycine max
  unsure (1)..(96): unsure at all n locations
agctttgcggatttggtcttcggtggcgaaatgatcnaattgggtctaanaagaggcaaatctgatcatcatgcctataaatgcaaaaaaaataaa

SEQ ID NO: 231280 - DNA, 480 bp, Glycine max
  unsure (1)..(480): unsure at all n locations
tctatagaaggttcgntcctaatttctctacaattgcatcacctctcaatgagctagngaagaagaatgtggcatttactctgggtgaaaaacaagagcaagcctttgcttttctcaaagaaaagcttactaaggcacctattctagctcttcctgacttttctaaaacttttgagctagaatgtgatgcctctggagtgggagttggagttgtattgttacaaggtgggcaccttattgcttattttagtgaaaaacttcatagtgccacactcaactaccccacctatgataaagagctttatgccttaataagagccctccaaacttgggaacattaccttgtttccaaggaatttgtcattcatagtgatcatcaatcacttaagtacattagagggaaaagcaagttaaacaagaggcatgcaaaatgggtagagtacctagagcaatntccatatgttatcanataccaaaagg

SEQ ID NO: 231281 - DNA, 96 bp, Glycine max
ctgcagctggagaggtgctcaatgaggatattttgaggtttaaaagagagaggggggagcacgatattgaagctaaaacaggagagaagttgaact

SEQ ID NO: 231282 - DNA, 412 bp, Glycine max
  unsure (1)..(412): unsure at all n locations
tactaagcttaaaggcccaaaatcaacataaagttgtggaaggagaaattgtgaaaattgaagataaaagctaggaaaatcaagagcaagatatttttcaaggataaataagccaaanaataagataattaaatgaattaattagatattatttgtttgtaatttcttgtgattttctccttaattaaacctagctacaattctataaataggaggctagacattcattgtaagggtgtagaagtcccgaccagttcttagaattatattttagattttcacctactagatgcctccattgttccattagacattctaagtttcattgtattatttttatgggtgaaattccttccacctangagagcaaaggatgaatcttgtgttactttaattctatcaatggttgatc

SEQ ID NO: 231283 - DNA, 99 bp, Glycine max
  unsure (1)..(99): unsure at all n locations
ctgcaagcttcaatcaatttatgagcgaaaagttccttcggtcataaaactnngatcaaaacgattccaaatactagcaggttgcaatacttnccacca

SEQ ID NO: 231284 - DNA, 187 bp, Glycine max
tttgactagagtttcaagaggggataactttactgactaggtatcagatgtcaactctgagacatatgcttttggtgagatatatacatgctgccgaactgaatttatattaatttagttgaccataaggacttgaatctgcatgttttgttattattgagaatgttttattattcaagttcattac

SEQ ID NO: 231285 - DNA, 78 bp, Glycine max
  unsure (1)..(78): unsure at all n locations
gagctntgggtataattgttttcttatagggaaaattggggctttctaagatctactaagccattatcattaagaaat

SEQ ID NO: 231286 - DNA, 401 bp, Glycine max
  unsure (1)..(401): unsure at all n locations
ntggctctgaggacttgctccaatggctcatcatgtcttctattgaacctttcttcataggcttgaagagaacccatcaattggtctacggtcattgagtctaaatccttagactcttcaatagcacaaaccacataatcaaatttagcgattaaggagcgaaggatcttttctaccacacgaacatcttccatattttctccataacgcttcatttggttcacaatagccaacaccttgttgccaaaatctgagatagattcagattccttcatatgcaatgattcaaactctctacgtagaagttgtaggcgcaccttttttaccttatcaacaccttcaagggaggttttcaaaatcntccatgtttctttggatgtggttgcatttgacaccaactc

SEQ ID NO: 231287 - DNA, 465 bp, Glycine max
  unsure (1)..(465): unsure at all n locations
actaagcttgttgtacaatccctattgttccagatcatagtggctcttcttgtctgatatcactgcaagtttgagttccattgatccaccaacactgtctctcgggttatctttgtcatctagtcaaagacaaacatcatcaacacattctgctttacatgcactgccatgcttcaacaatcaagatagcatcataagtgttgcttaagaaagataacatatctctgtggcccattatctagagctacattggattcacagagatgtttatctcttatttcctttctcttttggtgggagaaggataaaagatgttaaaggaaaggacgatgaatcagagaaggcaagggaataagtcatgagaccaatttgatccttctgttccttgtacggacnctggaaaggtcctggcatggttttgtttattgtntaatggcccttcttttgtttgagttactataactg

SEQ ID NO: 231288 - DNA, 377 bp, Glycine max
  unsure (1)..(377): unsure at all n locations
aacatatccaattcactagtatcaatcacacaatattaacaatcaagagctcccagtgataaaatctcataaacaagacagatcanattgtgcattcgaacaaaagagaaagattcctcctttcataatagctgatatagaaaataaaatatgcaaatacctgcgctcaaattctcgaatttcaacaagctcactaccacaattatctgtccactgcactatccttctttcgggttgacctgcaggagtacaaatcccctgtccacctgatgcttcatgttcattagcagcctcaacaggaatgggtttactaattngcggcttctntatgctacttttaagtgcaacctctctgttatcactatcatcatctacat

SEQ ID NO: 231289 - DNA, 85 bp, Glycine max
agctgtgatatattcaagtgctcttaacactttggtgatgaattcttgtgttctattaggggctatatatggccaaaaggaaaca

SEQ ID NO: 231290 - DNA, 334 bp, Glycine max
tgtgaccagattgctagttagctactagaagtcaaaactccacttaatgtatccttggggccatgtgtatatttagaacttagaaggtacattgagtcacttttttgtagaaataaaagattattttgtaatagtcattagatcgtgctatgcgtatgaagtagtattggcatacattactatgtgagattgataatacatttgcatagattaagaaggctctgacaggttgatagtcagagactgttatagacaagacaatagatcgaggtaagaagtcaatcgtacgtgtttgttttcataattcattttctgtgaaaatttaatttggcta

SEQ ID NO: 231291 - DNA, 54 bp, Glycine max
gtatctctagaagaatagaattggctaattaacgaagtggagtggatcaaaatt

SEQ ID NO: 231292 - DNA, 370 bp, Glycine max
  unsure (1)..(370): unsure at all n locations
tgatcttncaccgccgccgccaccatcctcttagacttatattntaatattattaggactctgattntcagccttgtattttggctatattactatggtatttgaacaatatactatttccttatctgcatggtatgtttgaacaagtatgttattcgactatgtggatttcatagttaatctatttatgattgttgcttcatggctcttacttcatgatttgattgatggttcttcatgaatgatgtatgaatgtttagttatatttgcatacttaaattttgatacgcactttgactttttgttgaagccaaagggggagagaaatgggactaaatggattaaatcaagaactcacatgagtaattat

SEQ ID NO: 231293 - DNA, 84 bp, Glycine max
atgcagcttaatgatcgtctgtccgtctccttcttctcaatctgtgacctacagttggctggcatgtagcgtcttgcgatgccc

SEQ ID NO: 231294 - DNA, 348 bp, Glycine max
  unsure (1)..(348): unsure at all n locations
cctcttatactacacactacttaacaccactcaccactctcgagtaattngtccgnttccacattccgcaatgtcatgacccactctagagaaaagcacagcacaacactgtttctctcgcagcttcatcgctctgtttctcactcacttgtgactcatgagtcttctctcaaccctactatgcttttgcccttccatgtcttttttagggtttaacatgtttcctgtgattttaatttgaaaacctaatttgtgttctttntcgtgcctgtgtgcctgaatttgaatgtgagggatattcgttattggtgtcttttccttttttttttttattccgtacgattgata

SEQ ID NO: 231295 - DNA, 80 bp, Glycine max
accggatcttaaagcacctgcggctgcagcttgactatataaagacctcttatgtttctcttcctgtgcaatatagtcaa

SEQ ID NO: 231296 - DNA, 430 bp, Glycine max
  unsure (1)..(430): unsure at all n locations
tgatgtgagaaagtgtggaagagtcaatcttnctacttttgttngttgaccacagagtggtacctggagatatgtcgcggnggtcaggagaccttgnggacgtcaggtggggtgctattgcccaaaaccaagcttggctaatcccgacccaacccgggcatagtcagtcagtgagaacctgtgacgtacctaaacaggcgagctcctggcagtcaaccaataaaagaacaaagtccacgaagcaaggaggcttgtgtggcggctgaccagctatgtatcttgggtggtatctggaaattagcctctggtaatcgattaccattcgtgggtaatcgattacagggcttanaaatggagacaggatgttaagtagcttctggtaatcgaataccaattgtgtgtaatcgattacacagtatgatagggcact

SEQ ID NO: 231297 - DNA, 385 bp, Glycine max
tcatccacaggtccctcttgtaagactagacctatactaaatagcattattgtaacaacataattaaaaccaaaacttaatccgcagatccctcttgtaagactaagtttcgattctgcttcaatcaagttctaaggtaacaatacatttcccaatgctaaggtcacctaactatgcacacaaatggatgatcagaccaaaagcatacaaacattaagcattgaaggaagcattgaacataacaggctttaaataggctctgaattcacgatgttgcgcttggcgccagcctcgtgcttagcacgagtaagtgggtttgggcttagtgccagtcttgcactgagcctagctgaagacacctgttgtgcttagcgcactgatctca

SEQ ID NO: 231298 - DNA, 421 bp, Glycine max
  unsure (1)..(421): unsure at all n locations
tctagcacaatggacttaccttgaattaattcctgtgatatcccttttgagccttgtttccctttccttgttttgaagctcactacaagccttaagtgaaaaaccatgatattaccatatnccttaaggaatttggagctttggaattgatttgggaataagtgtgggggggtttttgtttcattggacaacttgttctgttggctatgcttcatgatgtatcttgngccatacttgatgtacattgtatattggttaaatgatgggcttaatccggattntggttgtggacttgaagagggcaaataaagcagcgcttagcttaattaatntctaattaggaaatttccaattttatttatgttgtcaattgttattcgtttgggccaagtattgtatagggcccatgactctagtgact

SEQ ID NO: 231299 - DNA, 381 bp, Glycine max
  unsure (1)..(381): unsure at all n locations
tttaccttacgaagaacttnccgatatagaatgtatatattctatacaaataattatatatttgactagggatcaatttactaaacgagcaagaattctatgttttctctatttcttatgaaatgcgaatcatgaatcgtgtgataatatcacggcgatcgagcatgtaacatcttagaaagtgaatacaagtaatcctatggtgaagatttacttatattttgaaaactgtattttacattaattcaagttgattgatgaaatattaaatattttttaaattatataaaattttgtatctctttgaactttttcgaaataacttaaatattgtttataatttgttttatatatcatccatgatgaatgaattatatatat

SEQ ID NO: 231300 - DNA, 267 bp, Glycine max
  unsure (1)..(267): unsure at all n locations
cattatctcagctataggcggagactcatttgatgtctgcggtggctttttgatatctggatatgtccatcccatcctgttgangactcttatctgggaagctattcaatattctgtaggccaagtacgaaataacatcattcaggatgctggtcgctttgtattatcagatgattatacaaattttgcagtaccatataactatatatatgcacaagatgtgccgaaaattttcattccaggatgaaaggatagaactgataggtt

SEQ ID NO: 231301 - DNA, 421 bp, Glycine max
  unsure (1)..(421): unsure at all n locations
agctntcataggtganatcaggtgcagccattttccttttattcctctcacgagggggaggttgtgtcatgttctcagaatgtgcaaaatcagaatgctcagaatcagaatgctcaaaattataatgctcaagatcaggatgttcaaaatcaccaataacagaatgcacagattcaccagttatggaatgctcagaatgatcaaaaggtataaaatgatgcctaactaatctatgaaatgtcctatctatctcaggatcaaagggttgtaagtcagatggattgcctctagtcatacactacattcagcatgcacacaactagttgccttgtcatgtaaataaaggtgtaggtttgaactacagctaccctcanatgatatccaaatgacttgaaattntgtgagcaaccttataaaatga

SEQ ID NO: 231302 - DNA, 421 bp, Glycine max
  unsure (1)..(421): unsure at all n locations
tcgattacacgcatactgtaattggtaccagaggtgtctttcatnaaacattctcaacagtcacatctttttgtgtggttcttgaatggctatcataggcctatatatatgtgacttgagacacgaatttgataagagttttgaagaaaaaaaagtcttatcctcttaaaaagcagaattgctctatcctcttacagattccttggccaaaactcttgtgattcaataaggaattatttgagtgctcaaattgttcaatctatctctttcaagagagatttcttcttttcttcttcttccttctgaaaagggattaagagaacgagggtctcttgttgtgaaagaattctaaacacaaaggaaggcgtgtccttgtgtgtctagaacttgtaaaggaattacaagatagtgaactctcagc

SEQ ID NO: 231303 - DNA, 394 bp, Glycine max
  unsure (1)..(394): unsure at all n locations
agcttgataacacgcagagactaacgtcgtcttctgtgtttcttgncaatcgtggccgacaaacccgttgacacgtggagatttacgtcatcttccgcgctcacaagatctatcatactgacttttgagtcacgctgacggtcggaaatacccgagtggttatccgtataaactttttgttgtctgttagacgaaaagcctgatagcacgctgagactaacgttgtcttctgcgaccttcgtcaatcgcggccgacaaacccgtttacaagcggagatttatgtcatcttccgcgctcacaagatctgtcatactgacttttgagtcacgctgacgggcggaaatacccgagtggtattcgtataactttttgcatctgtaagacgaaagcctg

SEQ ID NO: 231304 - DNA, 384 bp, Glycine max
  unsure (1)..(384): unsure at all n locations
tttcgtcttacagaatgcanaaagttgataaggataacctctcgtgtatttccgcccgtcagcgtgactcanaagtcagtatgacagatcttttgagcacggaagatgacgtaaatcaccgcgtgtaaacgggcttgttggccgcaattgacgaatggcgcagaagacgacgttagtctctacgtgctatcaggctcttcgtcttacagacagcaaaaagtttatacggataaccacttgggtattttcgcccgtcagcgtgactcaaaagttagtatgacagatcttgtgagcgcggaagatgacgtaaatctccacgtgtcaacgagcttgtcggccgcgattgacgaatggcgcataagacgacgttagtctctgcgtgct

SEQ ID NO: 231305 - DNA, 403 bp, Glycine max
  unsure (1)..(403): unsure at all n locations
agcttngtggccatgcaaacactaaggcttatggtttgtttcccccattcaaccaacccagtgtttccaaaaattgctcttttatcaagtcatgcacacatccgggtccatttaggcattcaggaaaaatctttcattgcattcaccctttaggcacacattctttttttttcaaaaacctttctgtgttatgatccgggaattatccaaagaaaactggcagtcattatcttcttcaaaagcgtgttggcttatttaagtttctttctcagatttgttcttcaattattttctttcagccaattttatgtagaaaggtctgaacatgggcaaaagtggtgtcgagattacatttatcgaatgaaaaaaccgttgaatgaaaaaataacaccaagaccacccc

SEQ ID NO: 231306 - DNA, 330 bp, Glycine max
gagccataagtggttgttactttatacttgtcactcgtgataatttagtgcttcttggtggtatgcctataattggacgtattctcattggtaaagataaaccaatataactccttgtgtctaatcttttattatctgttttaactaacctaggaattgaatttgattgtggtattgaaaatcttttattgttttataaaaagttgttttcatcgtctaaatgtgatttgtttaaagaacaattatatgtcttacaaagctctcttatatacaataactttgttttttacagaaagctttaatatttaaaaatcattatcaaccctcttt

SEQ ID NO: 231307 - DNA, 226 bp, Glycine max
  unsure (1)..(226): unsure at all n locations
ttctaatcgtcataacatatgaatcatggatatgatctangcattctttctttctttaactatcctaatgtatattattttaccatttgcaagccctttgagccaaacacttgatattntgttggaacactaacctangataaaagttcctaccttaccttangttangagagcaagggtgttntgatggngatntctatcatttgcgactaatgtatgtaatact

SEQ ID NO: 231308 - DNA, 325 bp, Glycine max
  unsure (1)..(325): unsure at all n locations
ctttgtgcaagaatcagtccgtccaatggaacgactactgttcttnggcgttcggaaggaccaactgatgcctcatgaatcctcctgtgcttgtgccacccatgcctggaagacccatcattctatacatgactgtgttggatgagtcaataagatgtttgctggggcagcatgatgagtctataaagagggagcacgacgtctattacttaagcaagatgttcacagcatgtgaaatgaactactctttgcttgaaagaacatgttgcgccttggtatgggcagcccatcgtctaaagcagtacatgctgagctacaccacttg

SEQ ID NO: 231309 - DNA, 414 bp, Glycine max
  unsure (1)..(414): unsure at all n locations
agcttctcaacggttgatcataatactgngctatggaggatatggcctctatggagacttctatcatggctaggtcctaaattttaccataagttntgcgaaaagcttgtcgctggagctgacccatcaactgccctaactccttaaggctggtgacatctaggcccttaatcttgacatgatagaatctttntccgatttgatttgtccccatcatttacctaaaaaggagtgaatcaaggctctgatatgaatgatgcaatgcacatgcatgatacgaaaagaaaaacaagtggtaatttacatatacgagaccgacaaagatccatcnttttaatactatgttctaggcattgcggcgccccaacgtatgcattataaagtgacgcattactctaaagagacacaatatca

SEQ ID NO: 231310 - DNA, 441 bp, Glycine max
  unsure (1)..(441): unsure at all n locations
ctgcacaataganaacactacaaaanagtaataattgcattatttttattcctcgtaagagtaacaacaatcatggcaattcaaagatatgaaatgttagattttcacacaatcattgtgcacaaaggcaatcaaacagttaacaaacacaaattcgtacatagttgaaccaaaatgtaaaccattatgcttctcttggagagagaatgagtgaggaagggtttatggagatggaatcactcgattatgccactttctacgaccacaactatgttggccacccttgcacacatggggacctccaacaataacgaatcgtgcaagaatggcctcattggtgttgtggactaatgtatggaagacaatagtgacgccaagtgaaactacaatggcctcaacaacaaactcggtggtggccatggtagactcttttacatgtat

SEQ ID NO: 231311 - DNA, 450 bp, Glycine max
  unsure (1)..(450): unsure at all n locations
atccttaagtcacctgcngcatgcaagcttctaaactttgtacaagaatgaatctctgataccacttgttagacaagtggcctcagatatcttaagaaggtggggttgaattaagatattgatgcaagctccatgggagcttgtaggcctaggatcttcttcatcaatggattcctttgcttcttggaagataaatggcaacggaatggcgaaggaagagagagaggagacgccacttcaaggagaagatgagtctagaagaagctcaccaccataggaggccatggataagagcttggaggaagaaggagaagaatgaaggaagagggagagaagagcacgaaattttgtgctctanatgagctttgaaatctgaagnttaatattcaaatgttcaaagttgataaaaatgcacacacatgacctctatttatagcctatgtgtcacac

SEQ ID NO: 231312 - DNA, 348 bp, Glycine max
  unsure (1)..(348): unsure at all n locations
nttactgatatgacaaggagggtcctgccttgcttgctgtttatttgcaggctcgtgcccctgttcctcctatctacgatgcttcttctcacatcagtccgcgtgggcttatagcctagcttaaactctccgcagttttccttgatgtccactaagctggccatgtcgtcattattctctcccaagcccattccgggctcatagttgtgccctaacatcacacgggccaccatcattggcgcacccgacatgcggggccgcatcgggagggattctacngaaagattgcttaccacctcaaaggattggaaagccgtttccaaggagtcttctgcgactttcacatat

SEQ ID NO: 231313 - DNA, 357 bp, Glycine max
aagagtttgacttttacatgcctaactccttattgagtggcatttgaatgggttgttgctttcttgtcttagtttatttgtgtttacatcatgcatcatcgtatagaagtaggaagatggtttttgagataagaaacgtcttcagtgttgtttttctcattgctttaacttattaccactcatgtgtaatcgattatatacgtcttggagaagcttgcaaagagttcatagctcttggttaatcgattatcatatatttgtaatcgattacacacgtgtttttgagaccatgcttgtattctcgggtttctagttttatcgattacaaggacgtagtaatcaattacattattcttg

SEQ ID NO: 231314 - DNA, 392 bp, Glycine max
agcttttcctcttatttgctctgatagggttttcaagcgttagagagaagaagaagagattaaagccttcactttgtactatcttcgtgcgattcacttttctctctccatgaatattaaacttgaaatgcaaaccaggtgtctacatttcacgacaatccaatggttaacaagtctgggattgtagttttactagacaggttttgagtctctataggaaaagagaaagctacggtgcgaaagacatttctcttagtccgtcaattttttcacaatttcaacggtgagaatgctcataaatgagttttgaaccgggtgctgaattatcacaacaatccaactgttaacgagtccaaaatcatcattttactaagacagttttgagtgtatgt

SEQ ID NO: 231315 - DNA, 292 bp, Glycine max
gcttctacatcattctcgcatttcttgttgtcggctcatcttcttcgattcatcgtggcgctgtgggagatgaggaagcccaaaagcccaccatcttcttcaagcaactctaccacacccggcactgctgggagccatactcgattcgggttcagactcgcgatcggggtcgacggtgagaatctcccaaagacattgcatagaatgatcttaatctgcgaccacgtgttcattgacatccaggctctgatttgcaggttcgacaacatcaacggtcgcctgagccacgtgt

SEQ ID NO: 231316 - DNA, 439 bp, Glycine max
taagcaccgcggctgcagctttagtacataggaaaagtgaacctttgtatgcactcctgttcatctcatccatctatacatttcaacggtgtccctgtacatattgttcctcgaataactcctaatgatagcattccacataaacacgtcagggtaacaaaattcatcaaacagcttgcgagcataacaaatttgtccaagatttgaacctcccattaaccagttggtcatgagaaacccattatgttgcagcccggagataactaaccggttatgtatttgatcaaggtgtctcttgtgggtagaattatcaataagagatgcatagaatgagtctgaattgaagcaatggtcatggttaacaaagtgttcagggtgaagagctgatgaaaaacaaagatatttgacaaacttgaggacaaagcatctgggtatttga

SEQ ID NO: 231317 - DNA, 479 bp, Glycine max
  unsure (1)..(479): unsure at all n locations
ctcatgagtgacacaagaaaagtactatgtaacatactttctgtgtacttcaatgtcttgtcctcatgttagtggcatagcagcactgctcaagtctttccacaaagattggtcccctgcagccattaaatctgctctgatgactactgcttacacattgaacaacaaaggagctccaatttcaaacatggcctcagataactcaccatttgctaccccctntgcatttggttcangccatgttaaccctgtaaatgcttctgatccangattagtctatgatatcagcaccaaagactacttaaattatntatgcagcataaactatacctcttctcagattgctttattatcaagaggtaaatttgtatgttctaataacacacttcttcaagctgtaacttgaactacccttcattatctgtctatttggagaagtgcctcaatgctttgtgaatacaggagggtgcacaatgttg

SEQ ID NO: 231318 - DNA, 426 bp, Glycine max
  unsure (1)..(426): unsure at all n locations
agcttgttcgcacatcgntcgcgtgataatatataattattatttaaanctattccataaataaattaaattacatgcaaaaacaaattttaaaaaaataacataatatatatttacgaccaaaaatttatataatatatatataaaattaatacaaggaattatataactaacctagcatagcaaatttaaatatttgtaactagaactaaacctaacatacaaaactaatatcatttaaaactataactaatattatttataactataagtaaaactaatatcttttaaaactaaaactaaaactacactaaataatttaaattatcaaactaaacctaatttaccatttaaaattaaaactaattaaacacaagattttataaataacataatttatcatntttaactacaactaagtaaaca

SEQ ID NO: 231319 - DNA, 477 bp, Glycine max
  unsure (1)..(477): unsure at all n locations
tttacacataccaccttgacactgttgctcagaagacatgtaatatcnttgcgctaatagagaatgtagttggatgaanaaagatatcaaagtacaccacatctgtagaaattatcctatatgatgagttgaataatataaaattataaataaaaaaatttcaaatttggctttgcatacttatttcagttgagaaaaaaaaaaaaagattatacacagtataaaattttgtacacattcatctgatccctatgataaatttattaacttttaaaataattatctaatcaatttacaatggcataacaatgtanaattacaccgcaagttcatttcgattactttaaaaattagcaatgttntaatgaaccaacaacattatccaatgttagattagttcaaattttgctcccttgaattcttctctcggtcgacagctatcagtgcattaaattgactattgataaacatcggatc

SEQ ID NO: 231320 - DNA, 399 bp, Glycine max
  unsure (1)..(399): unsure at all n locations
agcttgtcaaattctgtgtgaaacaacactntcttcattttgttatttccttattgctttctacttttagttccacaatcagtatcatcattgtcaggttttcccatattcaccttcaaattggtgtttgtcaacctcaatcacttgactatggaacaagcaccattgaaaggccaccacttatatattaattgtattcttggttccacatgtaccaccactttctcgcttcttcttatctgatagtaaaacgggaagttttctgtcttgatcatgctttccattatgctataataatcatcacatgtagatattaatgtaaggctttcttctccttcccaataaagaaaggaaacacatacacattcaactcatatttagtcaattaaggtcctttat

SEQ ID NO: 231321 - DNA, 365 bp, Glycine max
  unsure (1)..(365): unsure at all n locations
atagaagcattgaacacataatatcattcttcaatagatagtaataatatttacatccgcactcagcggaatttcccaacaaaggattctagccctccattagaagggagtacctntcacaaataagagaaggggttcagagaaaataccagattacatagcagtggggatgtctcctccacctctatgaacctaagaatcactcctaaacctaaaatctacctaacagttagggcctttgtcttccttgctcagcttttcctctgttattcattcagcactaggctcatgcagtctattcagacctctctctctttttctatgcaattcatgcttacaaagggagttttttttccatgaaggca

SEQ ID NO: 231322 - DNA, 416 bp, Glycine max
  unsure (1)..(416): unsure at all n locations
agcttctcagatccggtcatggaaagactnggcgactttcttcattaggcagnaccaatacaatacgaatatggctcccgatcggaactagcttcagagtatgaccaagagagaacatgagtccattaaagaatttgcccaaaggtggagagatctcgcagcccaagtcatcccgcccatgacggagagggagatgatcacaattatggtagatacgttgcctacgttctactatgaaaagctgataggatacatgccagctaagtttgcggatctcgtctttgtcggagaaagaattgagtccggactgagaaaaggcaagtttgaatatgcctccaacgtggcccccaacaacaacagaagagccccagtgatgggcgcgaggaaaaaggaaggagatacccacgcagtcacca

SEQ ID NO: 231323 - DNA, 379 bp, Glycine max
gttctagagaaagaaaggtccatgttcttatagttctgagagattatgttgtgtgaagatttgcagagaagcgagttcgaagcggaagccgttctgagagcttgagatgagtttgtgagtgattgtgagatcctagaggtgaaggagacatcctcaccacttgtgtttttgtagtctttcatcttgttcttctctttgttgtaaaggaggtttctggactatggaaagctaaatcctctgttggatcttccctgtaggtacctgatgtaaatgtatttctatctatgtaatgatgttttatgtgttctctgtttttcattccagtgtgcatttaccttgatcacgtagatgcatgctctgttggggtcattcaatagtg

SEQ ID NO: 231324 - DNA, 350 bp, Glycine max
  unsure (1)..(350): unsure at all n locations
aagtcacctgcggcatgcaagcttatccttatggcctgccttcggacttctttctctgtgccccctggaagagttaagccaagcccctacttttgagaggcaactcccaccttatgaagactatcccgggcacgatgatggggaaggagatacccatcttggccccctgctccacctcanagatccatccccgcatgaaccaccccagccgaacatagtccgccatatcccggcctcacccacacccgtagaagaatctgttcccttcgcggaagataagggaaagattgaagcgctcgaagagaggttaacagcagtctaaggcctcggcaattacccattctcgcatt

SEQ ID NO: 231325 - DNA, 335 bp, Glycine max
gttcctgaaataggggcacttatcttacacgctacgtgttgttttccttgatattgccatgcatatctttgcaatgtcatgtgcatctctgtcgtgttattatttgatggtgttaccatgcttgcttgtctagaatatttgtattttgtgcgatcaaccgcgttgatgcaattctactcccgaagggcattggatagaagactccaagaagattgggccagagatgcaagagaaggccctagggttctcatgagccttagggtagatttcgggcccatgggctaagtatgagcccacttatctttgtacatattagattaagggttcattatttt

SEQ ID NO: 231326 - DNA, 363 bp, Glycine max
  unsure (1)..(363): unsure at all n locations
atcaccaaaattatcaaactcgcatggttctagcacttttggatcaatgcttcctgcacgtaaatgtgtcattaattcttttaaagggtaaacgtgttgttattatatgtatacgaattggataaacaatcatatttttaaatgacatattgtcgcatttgtttgcgtattgaatcgattgacatatatggatgacaataaaagctaacaatgattgcatgtttattatgtcggccgaaaacgaaatgtttatagcttggattaactatggaattaaatagcatgtaaagttggataatcatcaaagtgttcaaacctgaagcacacattttctttttcatcaaatntgcatcttttaacact

SEQ ID NO: 231327 - DNA, 319 bp, Glycine max
tactttttatggtgtgtacatttgatgatcattacaaactttattcattacaatttcagtgcttcagcaactaagatgccaccagccaattcaaatgccattattggaaaaggaggaagaaagagagcatgaaactcaggatcccaaacagggcaatattctttcatttctcaagagagcttgagaactacacaaagacatgcaaagttcaaaagggatgatccttttccaggatcattcatcaatgctagtcccttcatgaatgaggatattgcattatgcagctctgttagttgaggggttcactgtaatctggatg

SEQ ID NO: 231328 - DNA, 410 bp, Glycine max
agcttcttatccaagactcatcttggtgggatattccttcttccatggcttattccttagtggatggctcctcctctcacctattctcctttgtcttccgctgcatctccaaggtggaaaatcaccattgaaggacctcattgaagctccaagatccagcctccatagaagccccacaagcaagcttccatcatgtaatcgattaccagtgaagaatttcagaaaaagctttttgaaaagacacatcacttcaaaccattttgaaaaggcacgaagggcctatatatatgagtgtctgacttcaaaaagcaagagagagatattctaagagaacttaattgtcaaatgctctctcaacaactcttggagaaacacttgcaaatctattgagaattcatccacgaacttca

SEQ ID NO: 231329 - DNA, 381 bp, Glycine max
tgcatttggacatgcgaaagcgccactccatcattatgattattacctgccatctcaaacaaacaaatcatacgtaacaagacaattatagttggtgtttgaatacctcacccactcaagtgtatcacacaattatggcttttctctaatgaaaacactcttgccttttaccactctaaatccctttgagttcttatgcaattcaagaaattttggccacaacaaaaaacaattcaccaatatgtgtaaggtaaggctagagagacaaggaaaaggttaaccaagacaaaggctaacaatgtttttaggcacaattgaaggaaataaaattcagaatttatgaattcaagttacaatccttcatactaccaatatattacc

SEQ ID NO: 231330 - DNA, 401 bp, Glycine max
  unsure (1)..(401): unsure at all n locations
gagcatgcagctgccaaactaagtccgttaggtttatatgatgcattcgatgatgaacctatgatntcatcaattcctgaacctgctgatacttcatataacatggtcagagacagacaaagaaggcagattaaagctcctgtaagattgggttatgctgatctcatagcttatgctttgagtatatgaaaagatgatcaaggctcagaaccaattttttacaaagatgtaatttccagaaccgacagtgatcagtaatgcaagatgagtttgactctttaatgaagaatgatacttggaaactttgtgaaaagccagcatagcagatagttgtagggtgtaaatggatcttcataaggacaccagaagagataggaatggatatctcagatacaaagcaa

SEQ ID NO: 231331 - DNA, 393 bp, Glycine max
  unsure (1)..(393): unsure at all n locations
gcatacggacctttaaactcagctacccaaagtaccatagctctggtagaatgtgtgttttattcancaccaagatactgagccaaccctatgtctgatattctgacattaaagtcctcatccatccgaatatcgctcgactaaatatctcgatcacaacttttggtacaattgcctcatgcaagtaagccattctacacgatacaataatcagagatcaaaacagaattcatccccttaaaatatgaaagtcaagacaaatagaacactttttttttccggaacaaatgaacatacgctttagcgtgtccaaagagaagttatatccgtgcactccaagtaagaaagccatgttggcgcatggctacctgaagccactggtccaaattgcca

SEQ ID NO: 231332 - DNA, 350 bp, Glycine max
agcttcaaattgaccactacgggtgtttcttctcgtactacggccagagatatcacgggcacctgcgttatatggggttcaccaacatattgatgatgatgatgatgacgaagaagaagtacaagacatgagggtgtgagtgaagtgtggaggctataaaagtggggaaggaggaccagaccagaccagaccggatagggaacaaggacaaaaaggttggagataaggacacatagtgagggacccaaaaggaggaggtgtctgggaattcttccctatactatcatactatgtctatgtcttgtgtatctctaaatctctacacctacctacaactttaaaaccaaacc

SEQ ID NO: 231333 - DNA, 354 bp, Glycine max
  unsure (1)..(354): unsure at all n locations
tattaattntataaggaatattntatatatgtttggaatatcagtaaaaattatattatttgaataattaattatatgtacagttaattatttgtataattgatcataatcatgatcaatttttatttgagtaagtttgttgaaaagccatttaaaagtaattaatttttttgaatgcaacaaaaaatcagctcttatatagtaaaatagtataaaatatagtcgaaagaaaaaaataagctgtaaaaacatcttatctttttaataattttttcttcttctaaatctaagctaggatcccagacaacaatcttattttataaaccaaattattttctaaaaaaaacggaattt

SEQ ID NO: 231334 - DNA, 408 bp, Glycine max
agcttaggtatgaagtaaccagttcgcctgttctagcaagttacttcagaaggaaggaagcaactcgcccaggcgagctgctatgcagcctccaccccttatttcttataagtacacatgaggagggctgaaggaagggtccaacatctgaaatcaacaagatttgagagaaattagtgagaagaaggagaaagaagaagacaaatcaaggtcaaggtgcttccgtaatgtttccgtgatcgattctgtgatcgttctttgtctgttcttcatcattcttcgaccgggtagtttctattttttgaagttgtgaattcattctatgcacccttagggggccatccttggctttcatgtcttcattttcattcatctaccatcggtgatctttttctctggtttaagcga

SEQ ID NO: 231335 - DNA, 259 bp, Glycine max
aactacttctcattgacttgatggggcctatgcatgttgaaagcctcggaggaaagaggtatgcctatgtcatccacaacagagtcacacttataagagggactcccaccactctgtatgaaatctggaaagggaggaagccaactgtcaagcacttccacaattttggaagtccatgttacattttggccgatagagagcacaggagaaagatggatcccaagagtgatgcacgaatattcctgtgatactctacaaa

SEQ ID NO: 231336 - DNA, 374 bp, Glycine max
  unsure (1)..(374): unsure at all n locations
agctggaaggcgtgcactccaccatcttttcatatgagaatactggtaatgtgtctactatcattgttatcattcttttctctgtcattgaggcgccacttgagctgccagctctctccacctttgggcatattctttgaaagatccgagcccctctttgcacatggtctgtagttgcattctattcggaaccatatcaaaaattggactgatattgcctaatgaatgcaaccattatgtccttccaagaatggactcgtgacaggtcctagttatcgtaccaagtaacagctaccccagtaagactntcttggaagaaacgtatcaacagttcttcatcttttgcgtatgcgcccatctttcgaccacacgtc

SEQ ID NO: 231337 - DNA, 476 bp, Glycine max
gacctataaaactaagcttaatggctatgcctcatgttgcttcctctatctgtaactatagcctcaaccatcaacaacaacataattccatcaccatttgtcatcacgattcatatgatcatacctcacataagccatagctgatgtcaactatcatggattctcatcatacataattataacaagagacacacattgacaaccaactaaaccagttatcactactacatacaccaatagccaactaggccaccccaaactcacatgtcaacactaactctactccatggagtttcaacacaatatgagtggctacttatgatccctaatagataaccttctgtgatattttggttgaagttttatgccatattacatgcattttcttggcgcaacccaccgattggagacataatttgtgttgccataagcccaacactcaatagattgaagagttgaaaatggccatttattaa

SEQ ID NO: 231338 - DNA, 347 bp, Glycine max
atccgcagaagaacatataccgcccactcctgctgcaagaggagatgcatacttataatacgtggcaagtgttgctactaggatgactgcaacatcaaggtcttcctcctgcttagtattttatgaagatgatgatgaagtcgcggccacctgctggactcctatacgacaatagcatcattgcttgcactgagttattgggaggaggcacccatcttattgatcaaactgctatcctcaggaggagtgatatcaccgacggctccaccagtggcagcaatcataatactcctgatcatgctgctaactccctcataataatagagaagagacgctcataaatctgg

SEQ ID NO: 231339 - DNA, 231 bp, Glycine max
atgacatacatgtctagtgatacatagagtctacgagagtggattatcgtatactacatttatacatgggtgatgtagtgttaggctaccacaactatataggtgatgcacaggcctcattgagccgactccctatagacattgattgcatatggctatgcataaggtcctttagtgtgcatgaatgtatgtacttactcattgatatgaggtttcgtgtagatctagaca

SEQ ID NO: 231340 - DNA, 408 bp, Glycine max
  unsure (1)..(408): unsure at all n locations
agcttgtctcaatggntatgcgagacagagacttctttttatccatcatcaacaaataccaagaagaattatatctagccacagcccacgagcacaaagtggtggacgagtatgcccgagtgtacgcggaaaaggaggctagaggaagggtaattgactcgttacatcaagaggcaacaatgtggatggaccgatttgctcttactttgaacgggagtcaagaacttccccgattgttagccaaggccaaagcaatggcggacacctactccgccctcgaggagatccacgtacttctcagctattgccagcatatgatagacttaatggcccatatgaattaggaaccgctaggaagttgtattgtcactcagaatcttgactagtataactttctgaataagatga

SEQ ID NO: 231341 - DNA, 450 bp, Glycine max
  unsure (1)..(450): unsure at all n locations
caattgctccaggttgctgcatggaagggtcaatgtctgtatggnggtcagcagaggagcacaaaccacagacccttgcgacaggttcagatttctgattcaaggccagctgggttaccaagttgaccaacgcatccagtttgccttcaagcttcttagtttcagatgatgcacatgggtttgtagctacctcatgcactcctctaatgactatggcatcatttctggcgctaaactgctggaagttggaggccatcttttcaattaaatttctggcttcagcaggagtcatgtctccaagggctccaccactggcagcatctatcatacttgtctccatattactgagtccttcataaaaatataggagaagaagctgttctgaaatctgatggggagggcaactggcacatagtttcttaaatcgctcccagtactcatacaggctct

SEQ ID NO: 231342 - DNA, 347 bp, Glycine max
atatgggctatgtgggagtacgtgagctcagatggaggtgggcaacaggggatggtgggtttatgcgcgcattgtggatgtggaaaaatttgttgtgcaccatcgcccgaccgccacctagtaccacatgtgatgggtaccccataatcctacaagctggagatgaggaagtgttgaagggtgaaacttcctgcttttattgttgaccacagagtggtacctggagatatgtcgcggtggtcatgagaccttggggacgtcaggtggggtgctattgtcccaaaccaagcttgaccaatcccgacccaacccgggcatagtcggtcagtgagaacctgtatgtacct

SEQ ID NO: 231343 - DNA, 341 bp, Glycine max
gtgcggaagagtcagtcttgctactcttatttgtcgaccacagagtggtacctggagatatgtcgcggtggtcaagagaccttgcggacgttaggtggagtgctattgcctaaaaccatgcttgaccgatcccgacccaacccgggcatagtcagtcagtgagaacctgtgatgtacctaaacaggcgagctcctggtagtctaccatataaagaactatgaccacacagtaacgaggcttgcgtggtggctggccagctatggatcttgagtgatacttgcaatatggcttctggtaattgattaccaagggtgtgagatcgattacaaggcttaaaaat

SEQ ID NO: 231344 - DNA, 415 bp, Glycine max
  unsure (1)..(415): unsure at all n locations
tcaagcttgaagaatatggggtacccatcacatgtgtgattttgtggcggncgggcgatggtgcacaacaagttttccacatccacaaatcgcgcataaacccaccatcccctattgcccacctccaactgagctcacgtactcccacgtaacccatatactgctttctctcaacaccgggtccccatcaatcctctcaagcttccccaacattcaggtaattcaacatccaaatcatcacaaactaacaaaccaagcataacagggcaaaggcagaaaactttgcccaaaactcaaaccaaaatcacagcgttttctcacttaaagagcctagtaacatttccttctttctaatttcgtaaccggtggatcgactcgaaaaattactggaagtctcttaaacataagtctacat

SEQ ID NO: 231345 - DNA, 369 bp, Glycine max
  unsure (1)..(369): unsure at all n locations
tanacanattctaagcacgttatacgagagcgacaagatctatccttcactcgncgaacctgagggattttatgaaatatatcggtatgaaaggcttcttcaagattcgggttcaagcataatcaatgttctgactcatcattgatataatctgcgccaggcatgatggtcactgacataattctttctactatataagctttgcgaccaaacatttgatgatcgaaaatatctagacaatccttaccttgttcctattctcatttgctgtgagtagtggtacactggcatgaaagccagttgatgcaatacgtcaagcataaatgagaagtatatggctctctttcattaacacgacgatgatgcgta

SEQ ID NO: 231346 - DNA, 372 bp, Glycine max
acctgaggcccgcagcttactcccacgtagcgaatatatggcagtctccatactccgcgttaattctatgcaatatgatgtctatacccagacggaggtcagtaatggcaaaccatcgaggcggttccggcaattttgcagaagaccgcgaaagagcatcacaagcaggtaaaaaaggtggacagcacagcgggggtaatttcaagaatgacccgcagcgcgcatctgaagcaggtaaaaaaggtggtaagagcagtcacggcaaaagcgacaactagccgggctaatcaatgacgaatgcatctttgtctgtagctcgtcaaaaagccatcaccgccggctacccggtgggtgatactgatgacaaatgta

SEQ ID NO: 231347 - DNA, 270 bp, Glycine max
ggtaaccggcggtgatggtcttttgacgagctacagacaaaaatgcattcgtcattgattagcccggctagttgtcgcttttgccgtgactgctcttaccaccttttttacctgcttcagatgcgcgctgcgggtcatacttgagatgacccccgctgcgctggccaccttatttacctgcttctgatgctctttcacggtcttctgcaaaaatgccggaaccgcctcgatggtttgccattactgacgtacgtctgggtatagacatcc

SEQ ID NO: 231348 - DNA, 401 bp, Glycine max
  unsure (1)..(401): unsure at all n locations
atataaactcaagcttaaactccaaagagcatcctagctagagtgcctgtataagattgatcataacggtgctcttcacagacacctcttggtgtcaacaccttgtgctactctgagtgaataatagccacggtggtagccatatatcaacacatgttaccctttgngatgcctatatacctctcttccttcaagcacaatatcttcaagatcaagggagtattcaccgactatttccccggaaatcctcctgtggtgtattacttcacagggacacaaccatcacatttgaagaccatgaaaggcacaatggtctatagacttgcttaaattccacagatcaatggtcgcgcaagactctgcaatgaaatcacctgagaaccattctattcttctacatg

SEQ ID NO: 231349 - DNA, 365 bp, Glycine max
aaaagagaaagagaaataaaaaagtgagagagaaagagacaaatcttgtgagagggaagggtgcacacaacaacacagtctatatctattggtcatctcattaaaaaaaaaaataataacccacttaaaaagacgggaagagacaacgtggcagacacgtgaggtgcatgtgcgttcaatcagggacgtgcatgtgttgtgttacttaaaaacacttcaaggttcaaggaaacgtacacaagagttgtaatatattcatattattaatatattggtacattaattgatattgctaatttattggcttgatttattggcttgattctctggactggtttgattcatctcatcaatcttcttattct

SEQ ID NO: 231350 - DNA, 335 bp, Glycine max
  unsure (1)..(335): unsure at all n locations
cgacatagaccagttggcatattctcanatcatcagagcttatccatcgtgagcagaaactaaataatgcttaaccactcaagacagaagcagtcatggcttaactatccatgacaaaagctaaaacagtacttaaccactatgtacagatgcagacaaatgaacattgcttaaccaccacacatgacagaagctaaaatcatcaaaaacaagcctacaaggatgaaaacaacaaaacatgccaaatattatgaaacattaagctatatagtagaaaactaaatctatctgtaaagagaattttgcataaacaggttgtatgcaagaatacctta

SEQ ID NO: 231351 - DNA, 413 bp, Glycine max
  unsure (1)..(413): unsure at all n locations
agcttgngcatccaataccatgagtatgatgttccatatgnccntaaaactggactaatccatttgcttccaaagtttcatggccttgcaagtgaagacccacacaaacatctgaaagaatttcatattgtctgctccaccatgaaacccccagatgtctangaggatcacatatttctgaatgcctttactcattctttggagggagtggcaaaggattggctttattaccttgctccacggtccatcacgagttgggatgacctcaagagagtattcttagaaaaaantttccctgcttccaggaccacgaccatcagaaaggatatttcacgcattagacaactcagtggagagagcctatatgaatactgcgagagatttataaaattatgtgccaattgccctcacca

SEQ ID NO: 231352 - DNA, 358 bp, Glycine max
  unsure (1)..(358): unsure at all n locations
taggctaaattagtctacacttttgtgagctatttttttcttgtnctacccaataagagggatctaaggatgaagcttactctatgttactctcaacctagaaaggctgtctaaattgatcctactgcaacaagatggatctgaggacaaagctcggattgattaagtctaactagggatcgaggtttagtaatctaagctacatcatagaaccataaagcatgattgattagagaaacatctttttatgcatcatctggtctgctagagaaaacttaacacttctacctactgctggcaatantactcacttgcgttatttctggtcttagcctagacttaatataatcctggttta

SEQ ID NO: 231353 - DNA, 394 bp, Glycine max
  unsure (1)..(394): unsure at all n locations
gctcttatccaaaactcatcttggtggtgattctccttcttccatggctnattccttagtggatggctcctcctctcacctattctcctttgtcttccgctgcatctccaaggtggaaaatcaccattgaaggacctcattgaagctccaagatccagcctccatagaagccccacaagcaagcttccatcatgtaatcgattaccagtgaagaatttcagaaaaagctttatgaaaagacacatcacttcaaaccattttgaaaaggcacgaagggcctatatatatgagtgtctgacttcaaaaagcaagagagagatattctaagagaacttaattgtcaaatgctctctcaacaactcttggagaaacacttgcaaatctattgagaatt

SEQ ID NO: 231354 - DNA, 378 bp, Glycine max
  unsure (1)..(378): unsure at all n locations
tgcatntggacatgcganagccgcactccatcattatgtattttacctgccatctcaaacaaacaaatcatacgtaacaagacaattatagttggtgttggaatacctcacccactcaagtgtatcacacaattatggcttttctctagtgaanacactcttgccttttaccactctaaatccctttgagttcttatgcaattcaagaaattatggccacaacatataacaattcaccaatatgtgtaaggtaaggctagacagacaaggaaaaggttaaccaagaaaaaggctaacaatgttttaggcacaattgaaggacatataattcagaatttatgaaattacgttaccaatcttcatacaacccaatattta

SEQ ID NO: 231355 - DNA, 209 bp, Glycine max
atccatcaggttggttcatgtaaagcctcttcttctagagcaccattcaagaacgccgtattcacatgcatttgatgcagctcaagatcaaaatgagctactcatgccaacattactcaaagagagtctgtcttagatgcaggagaaaaggactctctgtcatcgattccttctatctgagtgaatactttagcaacaagtctagcgtt

SEQ ID NO: 231356 - DNA, 331 bp, Glycine max
  unsure (1)..(331): unsure at all n locations
ntcanataaacgaagtgtctccaaagatgtgaatacaagttattagagccttcttttatgaaattacacgacacaagaaatacctccattattatgaattaatggtacaagagagtcttcaagtcaagtgcacatgcagtgcatatgatacagggaagaagataacagaggcaggtagtaacacaggacaacacatagcagaggcaggcaagcaatgaacatgatgaggtgcaacaagcaaagcagtccaacaaagagcaaaagcccaaaaggagagtagcaaagccagcataccttatagattatatctgagggggtgggataggcacta

SEQ ID NO: 231357 - DNA, 401 bp, Glycine max
  unsure (1)..(401): unsure at all n locations
caagctttaaacttgtcaagaatgaactctgatccactngttagacaagtggcctcagatatcttaagaagggggggttgaattaagatattgatgcaagctccatgggagcttgtaggcctaggatcttcttcatcaatggattcctttgcttcttggaagataaatggcagcggaatggggaaggaagagagagaggagacgccacttcaaggagaagatgagtctagaagaagctcaccaccataggaggccatggataagagcttggaggaagaaggagaagaatgaaggaagagggagagaagagcacganattttgtgctctaaatgagctttgaaatctgaagtttaatattcaaatgttcaaagttgaaaaaaatgcacacacatgacctcta

SEQ ID NO: 231358 - DNA, 354 bp, Glycine max
  unsure (1)..(354): unsure at all n locations
ttttctgatatgacaaggaaggtcctnccttgctngctgtttatttgcangctcgtgcccctgttcctcctatctacgatgcttcttctcacatcagtccgcgtgggcttatagcctaacttaaactttccgcagttttccttgatgtccactaagctggccatgtcgtcattattctctcccaagcccattccgggctcatagttgtgccctaacatcacacgggccaccatcattggcgcacccgacatgcggggccgcatcgggagggattctacggaagtattgcttaccacctcanaggattggaaagccgtttccaaagagtcttctgcgactttcacatatggcata

SEQ ID NO: 231359 - DNA, 409 bp, Glycine max
agcttaggttaaattattctaaacttacgatgtatcgaggtttagtattttaggctacaacatagaacacaaaagcatgattgattagagaaatattttcatatgcatcagcttgtttgttagaaagacccaacgctttttacctattgctgtcaacttttacttacttgcatttactgtttttaccatagaagtagtttatttctgttttaaaccatagtttatcaatgttgttccaacaaagccttacttctgaataaaactctgtttaataagtaagttcccagagttcgatactcggatcactctattttgtttttaaatacttgacgacccggtgaagtgccatcattttcttctatttcttaaactctttttgcaccattttaattactgattagtcttaatt

SEQ ID NO: 231360 - DNA, 231 bp, Glycine max
  unsure (1)..(231): unsure at all n locations
cattctcttctcccttggccaaaaagaattcaacaaagactaatcgcctgaaattcttttgtggcctctcttctcccttttccaaaagaacgaaggactaaccgcctgaattcttttgtgtctccccttctctctntccaagagaaattcaaggactaacccgctgagaattctttgtcttaacacattggagggtacatcctttgtggtacaagtagagggtacatctac

SEQ ID NO: 231361 - DNA, 413 bp, Glycine max
  unsure (1)..(413): unsure at all n locations
agcttgtcaagcccncgagtctagacaagtgttttttgtgattcttctgtcaagttgtctgggtgaacatgcttttgattttgcaggtgaggtctgagttgtaaggtgagggaaatttctatttttgacaactctacccttttttgattgttggagagtgcattgaagacagacattacatttcgttcgttggtgcaggcgtgtacggtaggcgcgtagtactattgcgtatgtgtcactcatggagtgagcatgtactgggacgtgatgcatggctaagtggggctatgtcgtgttgcgaaaaattagggcactactttagctcttgctagttatcgaagagttcatctcctcagtaaatggcggttatgtcttctttctcctgaatatcattagctttgcgcttacttctt

SEQ ID NO: 231362 - DNA, 425 bp, Glycine max
  unsure (1)..(425): unsure at all n locations
tgaaggcatactggatgcattggttaactaggtaacccttctggccttgaatcaganatttgtacctgttgcaatggtttgtggtttgtgctcctctgctgaccaccatacagacctttgcccttccatgcagcaacctggagcaattgagcagcctaaagcttatgctgcaaacatttacaatagacctcctcaacctcagcagcaaaatcaaccacagcagaacaattatgacctctccagcaacagatacaaccctggatggaggaatcaccctaaccttagatggtccagccctcagcaacaacaacaacagcctgctccttacttcaaaatgttgctggccaagcagaccatacattcctcaccaatccaacacagcaacaacccagaaacagccaacagtgaggccctcccaaccttcc

SEQ ID NO: 231363 - DNA, 410 bp, Glycine max
  unsure (1)..(410): unsure at all n locations
gcttctcaggaggtgagcttagttatgagatgtgtgtgtgtanataagttctagcttctcaaggaagttttctcaaagaagcttctcaaggaagttttctcaagaaagcttctcaaggaagctacctagtctataaatagaagcatgtgtaacacttgttgtaactttcatgaatgagagtcttgtgagacatacttcaaagttcgacttctctccctcttttattctttcaatttcatgctcccccctctctctttctctccctctntcttttcctccattgaagcatccttccaagcttcttatccaaggctcatcttggtggtgaagctccttcttccatggcttatttcctagtggatggcacctcctctcnacctcttctctttgtcttccgctgcatctccatg

SEQ ID NO: 231364 - DNA, 464 bp, Glycine max
  unsure (1)..(464): unsure at all n locations
gagtacagggaaagaatcaagatattatgtgcctgttgtgttcaccaccagatntcagagtaacttcttctccaatatttttatgaaggactcagcaacatggagagaagtatgatagatgcttccagtggtggagcccttggagacatgacccctgctgaagctagaaatttaattgagaagatggctccaaactcccaacaatttagtgccagaagtgatgctattgtcattagaggagtgcatgaagtagccacgaattcatcatgtgagactaagaagctcgaaggtaaactagatgccttgggtaacctggtaacccaactgaccatgaatcnaaaatctgcacctgccgccagactctgtggtttatgctcctctgccgaccaccacacagacctttacccttctgtgcaacaatcttgagcaattgaacacctgaagcttatgctgaaacatttaca

SEQ ID NO: 231365 - DNA, 408 bp, Glycine max
agctttgagccaaaatcctgactcaccatattatcttgacccaggtgagaatgccaatccttaccctcggaagcaaaaaaagaatagaggggaaatttccaatcaaagaaaaagagaaggaaaatttccaatgaaagcaaaaaagaaatgaaggaaaattccccaatcaaagagtgggagaaagcaaataaaagggaaaagaaggaaaattccccaatcaaagagtgggagaaagcaaaaagaaaagaaaggaaaattcccaatcaaagaatgggagaaagtaaaaaaggaagaaaaagaaggaaagatagctcctgatcaaggatcaaaagataccataagaaatgtgcagagagggtcttggaccagacaatatctgtacagtacagaattgttactcaatgaaca

SEQ ID NO: 231366 - DNA, 443 bp, Glycine max
  unsure (1)..(443): unsure at all n locations
acatcgatgtttgtatttatgggaggattgttgtatgccattttgttntaagagtagtgtcccactggtaaaactaactntccaaatctttgccttcgcaggaaatggccccgaggaagcttgcctcacagaggtccaggaaggacaaggcagccgaatgaactagttccgctccggagtatgacagtcaccgctttatgagcgctgtacaccagcagcgcttcgaggccatcaagggatggtcgtttctccgggagcgacgcgtccagctcaaggacgacgagtatactgatttccaggaggaaatagggcgccggcggtgggcatcactggctactcccatggccaagtttgatccataaataatccttgagtttatgccatggctggccacatangtggcgtgcgtacatgagacctggtaagggtcatggacccgttga

SEQ ID NO: 231367 - DNA, 401 bp, Glycine max
  unsure (1)..(401): unsure at all n locations
agcttatccttatggcctgcctccggacttcatcctctgtgccaccccggaagattaaagccaagcccctactttcgaggggcaactcccaccttatgaagactatcctgngcaagatgatggggaaggagatacccatcttggccccctgctccacctcaaagatccgtccccacatgaactaccccaaccgaacatagtccgccatatcccggcctcacccacaccagtaaaagaatctgttccctttgcggaagataaaggaaagattaaggcgcttgaagagaggttaagagcagtcgagggccttggcaattacccattctcggatttggcggatttatgtcttgtgcccaacatcgtcatccctcccagttcaaagtaccagactttgataagta

SEQ ID NO: 231368 - DNA, 366 bp, Glycine max
  unsure (1)..(366): unsure at all n locations
ctcagcttcccattaatgtaccagacgaccgcgggtccagccaatctatcttgganaaagtgcatcaacaacttttcttccctagaatgcgcccccatcttgcgacaatacattntgagatggttcttaggacaagtcgtccctttgtacctgtcgaaatcaggtaccttgaattttggggggatgacgatgtccggtactaagcaaagatctgccatgtccgcgaacgaatagtcgccaaagccttcaatagctctcaatctctcttcgatgagatcgagtttccttttttcttttgctgcagggggtggtccttcggcgaanaagaatattggctgtgctgggaggtttcgaggttctctcgtg

SEQ ID NO: 231369 - DNA, 424 bp, Glycine max
agcttcaaaccacagcaacacaaaatctaagtgtccaaaacccctcaatttaatggattttctatgcttcagaagtcaaattgagaatgggacaatttgaagcatactctcacatcacacaagtctataacatcaatttaaacttgtttaaactggatttacgcttaaaatctcaccgaatcaaaatttgactcttcaacacccaaatttaccctataaatggctctttgctcactttggtcatttgtttttttctttagcacagcctaacctttctcataagtcctaaatggcatttcaagctaagattaactcactctaacctctaaatactaccaattccagatttggccttccagccctaaaaaataactctttttcactcctacaccacattctctcttttatccctagagtagttcta

SEQ ID NO: 231370 - DNA, 392 bp, Glycine max
  unsure (1)..(392): unsure at all n locations
atgaagagtcagtagatgactatttctttcactcctctaaatgtaaagattcaagatttaataagaaaaacatggagaaaatcaatgaaatcatctactttgtgtgtatgaagctcggaaacatgaaggttgaatgtcctcagttgaaaaagcgaagatcatctatgaacaagaaaaagaagagtttgatggtcacctaggatgacttagacaatgaaaaaagtagcagttcatacaatgaacaagccaacatctatctcatggcagatacaaacgataaagttgaggtaaaaactttctctaaatctaatacttgtgctttatcagatgatgaanaggatatgccttatgatgttctttttcataactatcatatgatttcccttcagtgc

SEQ ID NO: 231371 - DNA, 426 bp, Glycine max
  unsure (1)..(426): unsure at all n locations
ggatccttaagtcacctgaggctgcagctttcagatgtacctgagtatttatcttataaatgaaagccgaacaaatcaccatcaacaatataatagaattacctttctaaattctaaggtacttttgctaaagttgtccctttatcaaggacacaataattttgacacatagtgtttattaacacgttcaggtcatcaacaacattaactatgttagaaacacatgaccattaggaaaatggaacaaattaactgtattttaggctaaaattcaacttttatgtaaaaaaggtaagaaacaccaaactcaaactataagccacacattgttacacgtatgtacgactactaaaagagatatctacgttgctggntcaacgacggttctagtaacagaatctgctgaacttcttgtgattcttcaat

SEQ ID NO: 231372 - DNA, 431 bp, Glycine max
actaagctttcagacagattatggaaagtgctaatttatattattatatcaaactataagtggctcctaataatcaagaagcagaagcttatttaagctatgactacttaaccttaaaaagaaacatctcaacaaaagttgtgtatatcagcctgttgattgagccctgtgctaattgttgtaaacttctttgacttaattaattcatcgatcttttaatgaaaacaggacattccttgaattatgggtgtgagtcgtggctatgacaaagccaatgatgctattaccttaggccccctctaagctcttagagtctatatagatccctctcaatctattagttcataatatttgagaattttaaagaagataattaaagacatatttattatcttgaagagttaataatataatttgataccgcaatataa

SEQ ID NO: 231373 - DNA, 433 bp, Glycine max
  unsure (1)..(433): unsure at all n locations
tgaacccaagcacgcagcatgcagctatgctgggattatggatttttatttggcatttgtgngcgagacctttctcgtatatatgccacaattggttcaaaaccatcaaatttgaagaagtcactcattctatcatcatcaaatggcgtgacactaaaattgaccttactaacaacattactttaaaatataacggaaggactattctgcaatacttatgtaaaagatagggactaatatgcaacaagggtacaaagtcagggactaaattgcctatttactcgttntgttatcatcaaatgacgtggcatcagacatgtccacgtgtcatgccacgtcatcctttagtgccacgatagtccacgtggcacgaaaattgacctcattaacggcgttactttacaatttaacggaatgactagtttacaacacc

SEQ ID NO: 231374 - DNA, 325 bp, Glycine max
cacttcataccggctcagtttcctattatctgttctcaggctgatcaccatggcgagaccctcgatagatgcgatcaccatgtggcgccctgtggatacataaccactgatctttgtctccctccatcttcgagtatgcgtcccatctatatggccactagagatcactctgctgatatgtgacctcataagtagctggaagtggctgccctttcttgataggcgacgtcaacgctgagggagcgcctctgatccgtgattgagctgtgtccacatttgccaccctttaacagactcagcctgatgcctgactctgcggggtatg

SEQ ID NO: 231375 - DNA, 382 bp, Glycine max
agctcgtgagtgcgggcttgagacttgtattagcagtcattgtgatatacgatgaggtccctcaagaacgttcagactgggtgcgaccatgccttgctgattttcaattgggaaactggcaggtcgtggaataacccgaagtttccatggcaggcataatgtaatgctttagttttaatcctacagttgggcctaggctttagggttctctccttgttaaggcgttatgtcttttgaagaatataatataaagatctttccttcatctatttttgcgccttcattcatctgcatgtttattttgttgcatttaaacgatacatatccgatgacaagtcctgtgaaggtactaataccgatgaccctaccatcaattttgaac

SEQ ID NO: 231376 - DNA, 449 bp, Glycine max
  unsure (1)..(449): unsure at all n locations
ggagaggctgcttcaatggaggagaagacagattgagttatagagagaggggggagcacgaaattgaaggaagataaagggagagaagttgaactttgagttgtgtctcacaagactctcattcatcaaagttacaacaagtgttacacatacttctatttatagactaggtagcttccttgagaagctntcttgagaaaacttccttgataaaattctttgagataacttccttgagaagctagagcttagctacacacacccctctcataactaagctcacctccttgagaagcttccttaagaagattcctaaataagctagagcttagctacacatacctctctaatagctaagttcaccttcttgagatgagaagctagagcttagctacacacccctattatagcttaactcacccctatgaccaaatacatgaaaccaccaa

SEQ ID NO: 231377 - DNA, 348 bp, Glycine max
  unsure (1)..(348): unsure at all n locations
agcttgtncatacatatatagccactagtggttggtacaatataaaactaacttcctaatagaaagcctaatctactggattattcttctntattccttctagaatatatgagcgccttcctacgcacgttcatgccttcatggtctgtttattacgtagtctttcagatgcatgggcgtgctactgtgccttttgggccttgctgcttgcacccctactctactattcatatcattaccgcttgcttcgaataacaccttgtcctcaaggtgatgtagtgcttggagggtcgtccactcttcctacgatgtttcgtcagggtgtacgcctctccattgaaatagcac

SEQ ID NO: 231378 - DNA, 472 bp, Glycine max
  unsure (1)..(472): unsure at all n locations
ctgtagaatcttacaagagagtagtggagtaatttanctattaatgttccaataaatgaagcgggagttatgtctttacatatccttgctcacaaatttaagtacaaaatagtgtattttaataaatacaagtttaaataaaaaataaataaacaattcaataatgtagaatagaaaggatgatgtatctacaaatatgttagcattatatttaaggtttatttatgtgttacatgagtgggaatgatctatttattaaaaaaaaagttagacttagacttcttaaaatgtctcttttgattaaaaaggccaagttatacgctaataaaaaccttattaagcctggaagattacattgttatataatattttatatatattacatagtacattaatataacacatatgtaatatgtatatttaattatagatattcatattaataattatgtttataatacgaataatggat

SEQ ID NO: 231379 - DNA, 380 bp, Glycine max
agcttcgggattgggatgacaagtcgaagggttcccaccctgccacatcagtaggagctttataagtgtgggtctaggacacgaaggccaagtggtcacgatatgcgaggatgactctccgagtaggtcggattaggtacgaccattccctcctggtttctgactaggaaattggtgagtggaggagcgcctggacatttacgcgacaagcataatgtaaccctttgtggcttttaaactctacgattgggcctaggctttagagtttccttttgttaaggcattatctcttttgttcccaaatttataatataaaaatcttgcttcatctgttcctgcgcctctacccattctcattcacttgcatgtttatttcttta

SEQ ID NO: 231380 - DNA, 337 bp, Glycine max
  unsure (1)..(337): unsure at all n locations
cgcctaattaactngaaattgagagagaatgattattaattacacaaaatggaagtactaagtatttattacctatacttaacaaaaaatacttacaacactacaaaataaccataaactggggaagtttgatacaatttacacaggttntatacatacaagttagtcgtattcatcgactaacaatcgctcagtggcaagttntgctatatgagtttgacatcgtctatgtcacccaaaaggtgataaagggaagtgactaggcagactatttcgctcagcagcctctcaatgattactagcccatgcatctagagtttttggatgaagacattat

SEQ ID NO: 231381 - DNA, 402 bp, Glycine max
  unsure (1)..(402): unsure at all n locations
agcttgaagaanaaatggttaaaagccaaactttattgcttttagtttcctatttcctttctaaattgttgttgaaccaaccccccaaggagaaataggtgcaagggaagagtaatagaccagaccaacccacaaaaatgaaatggtccctccgcaacaagtcatccataatatcaaataaatcattttcatcattggtaaatttaccaagagctatagtcatagtgattcttctattcaactacttcaaccatttcccaacacctcaacattttcatagttgctcaggtttctcatagatagcttctatactttaatgcttgtataggaaagtaagatattgaagtttttgggctttatgtggaatcctctgtcatgggttatggaagctgctgctatcat

SEQ ID NO: 231382 - DNA, 190 bp, Glycine max
tctagccatatggacttaccttgaattaattcctttgatattctctatgagcctatgttccactttctttgttttgaagctcattacaagccttaagtgaaaaaccatgatatcaccttacccttaaagaattttggagctttggactttgtttgggaataagtgtgtgtgtgtgggggggtggataata

SEQ ID NO: 231383 - DNA, 381 bp, Glycine max
  unsure (1)..(381): unsure at all n locations
agcttgccttctctagcatctttntgggtttcttcacattttcttagtaccaagttgcccatctggaagtttctttgattgacctggttgctgtatcttttcttagctctcctttggtacaaattgactctcatgtggacttctttgatggtctttttggctaagtcgagtgcttcactaagcatcttgntatttggctaagtcgagtgcttcattaagcatcttgttattttcttaaaatgggctttacattcctcattccactttgttccctcctacttctttagtagtttgaaggaaggtttggccatataacacctattcacatgtaccaacatgaccatcgntcgaagattaatacttctcatcagaaaggattag

SEQ ID NO: 231384 - DNA, 267 bp, Glycine max
  unsure (1)..(267): unsure at all n locations
ccattcatttgtctagatggntgttntttaaagggttattatgggggacaactactagctgctgttggacaagatgcaaataaccataactactgtattgcttatgcaattgtggatgctgagaataaagacaactggagatggtttctcacactactgangaaagatttgggagattgtatgcagcatgggtgggaatttatgagtgacatgcagaaggtaccgtgtttagtttattggactaataatgaatttttatatgttctt

SEQ ID NO: 231385 - DNA, 436 bp, Glycine max
  unsure (1)..(436): unsure at all n locations
agtcacctgcggcatgcaagcttcaaaccanagcaactcagaatctagcttctattacccctcaatttagnggattttcaaggtttgagaagttaagatgagaatggggtaaatttagagtaaactctcacctcacacaagtctatgacatcgatctaaacttgctcaaactgatttttatgcctcaaattccaccgaatcaaaatatgactcctcaacacccaattttttttttaccctaggaatggctcttgccttcacttcggtcatttgtttttctctcttgcacagtccaagcattctcataagtcctaaatgacatttcaaactaggatttactcactttaacctccatttaccactgaatcccgntttagccttccaactctcaaagcctcactctttttctactcataacactacattctcactttct

SEQ ID NO: 231386 - DNA, 499 bp, Glycine max
  unsure (1)..(499): unsure at all n locations
cttgagaaaacttccttgagaagcttctttgagaattcttccttgagaagctagagcttagctacaacacccctctcataactaagctcacctccttgagaagcttccttaagaagattcctaaagaagttagagcttagttacacatacctctctaatagctaagctcacctccttgagatgagaagctagagcttagctacacaccccttataatagctaagctcacccccatgacaaaaaacatgaaaatacaaaaaaaaaagtctttactacaaagactactcaaaatgccccgaaatacaaggctaaaaccctatactactagaatgggccaaatacaaggcccagaggaaggaagaacctattctaatatttacaaagataagcgggctcatacttagcccatgggctcgaaatctaccctaaggctcatgagaaccctanggccntcattnggatctctagcccaatctacttggagtcttctacccaatgc

SEQ ID NO: 231387 - DNA, 370 bp, Glycine max
  unsure (1)..(370): unsure at all n locations
gtttgatattttacnaattcacatgcgatatattatatctgaataagactaccttatcaagctagagaatatcccagatgttgaatatttgagaaatacacttaagaaataagacctcctctctttctgtatgttgggtcctaaatataaaagtacaatcatgtataactcgataatttaataaatatgaattgtggaatgcaggtgtcattggttgacttatccggaagactcagcagctattggcatcaaagaacataatgtttatcttttcggcaccttcttcaagtaacgccaaccatcattcattgaatagtttattactcatttcaccaaatattttgactcggccagcacttagttattggat

SEQ ID NO: 231388 - DNA, 377 bp, Glycine max
  unsure (1)..(377): unsure at all n locations
cctatattgaacatgtcttatgtttattgataancacgtatatcataaggaatattaattattagtcaatgatatggatattacttacatcatccacaactgtagtatagctatgttgaaatacttctcacctgatatcatttcatgtacatcagaatatgttagtaaggatgcatctacatttggaatcacaaatttagtctcatcccactcaatacactcttgtaaatatcatacaggctcttaacgaagccacacaacggatcatgtgcagcaacattattcatactttgaataggtccaaccagtatctttggactaacttgtgactgatatatgattaatgaatatacgaattaatggtaacctatgcacaa

SEQ ID NO: 231389 - DNA, 418 bp, Glycine max
  unsure (1)..(418): unsure at all n locations
agcttcttctttaaggtcatagagactccaaatctcattatagntattaattcttcctcttcttcacgagctggtcaagagggaaggagacatcatttccactcttccaagattttccaagtggtcttgaaccctctcttcatcaagcttagataaatgacctccattttcaactctaagcttgattttcactttacttatcttgttttattctcacttgtaggttcaaatcttatatttgtactcttgaaggttggaaactagaatctaaactccctcattcttccttctaaatttcgcggagactacaagaggtaagaggggtctctcttactcttagaccctaattgtgttgttaaacattcttgaacatgttggtttgaaattttcgtgctcgctacactgttctggatctttg

SEQ ID NO: 231390 - DNA, 385 bp, Glycine max
  unsure (1)..(385): unsure at all n locations
ctaagcttaccattgtttacattgctcataaaggagatttcttttctttaaatttactaatgagacattaacctatgaaatgaaaagaacttaaatggctgagtgtaattgaaattgtggcaaccaaaagtcaccccaaggctgatgcctaagctgccaattgggtccttattacaacttgaactaaaccaaactaaagcccttttagttgagtaactcacttttttttattgacaaattttaagagtaaataggcattttggttcctgacttttaaccccttttgtaaattagtccctatctgtttaaaatgtaaaaaatagtccttatttttgcataagttttgcaaaatagtccttgcccgtaaatttaanagtatacaccg

SEQ ID NO: 231391 - DNA, 281 bp, Glycine max
tactatcattgttattatttgtttcttcgtcattggagggaacacttgggctgacagataccttcacctttgggcgtattctttggaagatccatgcctcccttctggtcatggactatgaaatgcgtcctatccgagaccattatactggttctgcctaacgaaagcaaccattatgtgcttctcagaatggacttgagaaggctctgagttagtgtaccacgtaacagctaccccaataagactttcttggaaggatgaattacaaatcctcatctttt

SEQ ID NO: 231392 - DNA, 309 bp, Glycine max
cacgcacacacttctgcctatactatcactcatattaattctccccctttgtctttgaagttatgcttgtctctaaactatatcgactactcatgtgagttcttgacttatccccatttctcttcccctttggcactaaccataaggccaagtgcgtatcaaacttacatgatacagatatagcttatacattcatataacatgcatgaacaaatctcaaccaatccttgaggcaggattcatgacctctcaatcgtatgtagattcactttcaaatccatatcgtccaataccatacttaatgtatgt

SEQ ID NO: 231393 - DNA, 370 bp, Glycine max
tccatcagctgcatgggataataaccctatcgtggaaccactgaccatatcggatcttaagtgggacaatagcatgccgcctcaactatcaggcttagatcaatggtctggcctgcaacttgaggattcaacttacgagagttggtctgaactccaagctagctaccaccttgaggaaaaggtgtttcttactggagtacggaatgatagcaccacaaggccaagaagaatcacgaagaggccctcacgatgggaggggttcatccactgagttccttcagcaattattctgtctgtcaacaaaggggtagtataagaattatatagaagtgcttgcctcctcaactctagctagtgcttgtcccctcta

SEQ ID NO: 231394 - DNA, 402 bp, Glycine max
  unsure (1)..(402): unsure at all n locations
agcttggaagcataatcgaattacttgactttttcacacaacacaaagaatagtttgcactataatcagaaggtacggtcaaaagagtattctttatgaatcttttnttatgagtcattgaactatagagtatcaccatcgctaagaacaagaatctcaaacaaccatactctttatgcaattaaggtaaaacaccatactacaagtatacatagaattataatgttcttataataagtatacaacttacatataagaagtaagaattaaatagttaataaggttgtattaaggaatcataaacttcaactactacattcacgactacgcacaanatanaggggagtaagtagtcatgcgtttacacatcaagaaagacacactcatccaagaaatatatat

SEQ ID NO: 231395 - DNA, 361 bp, Glycine max
  unsure (1)..(361): unsure at all n locations
tagtaaagctaagcactaacatacctcatcatattcaatttcttgtcnttgactatagcctttagccaccaatcttgctttgtatctctcctcatctcctttaacattcttctttgccttgtacacccatcttactccgattgctttgtgtccttgtggaagtgtagtaagttcccacgtatcattcttcgtgattgacttgatttcttcgtccatggcgtctttccactntatgttttccgccgcttcttgatagcttacaggctcacaatcaccaaaaagacaaaagagggtaatgtcgtttaagtttttggttacctcataaatctcttcaatgctccttaagtgtggtgtcctctca

SEQ ID NO: 231396 - DNA, 413 bp, Glycine max
  unsure (1)..(413): unsure at all n locations
agctttgctaccccaggatccattaggaatttacttgtgaaagagagccataagggtgggctcatgggccactttgggatagacaagacccttgtcttactcaaagaaaagttttattggccccatatgaagaaagatgtccataaacattgcactaggtgtgtggcttgtttacaagccaagtctagggtgatgcctcatgggctatacacacccttacccatcctctctgcaccttgngtagacattagtatggactatgtccttgggcttcctacaatccatagaggtgtgtactctatctttgtggtggtggataggcttagcaagatgacacactctataccatgccacaaggtggatgatgcttccacatctcaaactcttttcagggaagtgtgagactccatggt

SEQ ID NO: 231397 - DNA, 393 bp, Glycine max
  unsure (1)..(393): unsure at all n locations
ctatgatactaagcttcgaagaagtgatgaggacaagccctnatgtctagtttgttagagcccgagtagtcgaagagaatttcaagtccatagccatcaaagtctgtaaagagtatgatgaactaagggatgtcaatatggccaccgctgatgccttggaacgagaaaccaagaaggcccaaaaggaagaacacgtgccagcaaagttttgaggggctttatagggcagcaatagtaagctcaagctccgataaggtgataggaatcatcacgggtcaaaggcatgatcttgaaggacgagctataggcttaccttangtcgaaaagaaatctgtcccaacagttaagcgagactgaaaggaacatgttggccgtcatcgatgagtgcaaaga

SEQ ID NO: 231398 - DNA, 408 bp, Glycine max
  unsure (1)..(408): unsure at all n locations
gatccttagagtcacctgcggcagcaagctaatgcttttctgagtgtatgngcttttgtttaaggattaaggatgtttgtttcattctttttttgctctttcctctatgcttcccttatacacgagttcactctaggatgatgagtaaaaacaatatgaatcctatcaaggatcatatcagcaaataaattattctttaataactatattttacattcatgtattgcacaagtttgttaaattataaatttgttatatttttattttattttttaacatatatgtacataaataaaattattaattaataaaatatttaataataaattaaatatattaattattgagaaacatgattaattaaatctttaattgaacatatgtcgtcttcaagaatattttcatatg

SEQ ID NO: 231399 - DNA, 238 bp, Glycine max
actcactttaactttccagatgcagcttgatccaccttttacatcttccactcagctatgaaggggggggttaattaaatttccaactgttccctatcaaaaactatcactttactcagtataattcctaatgacaacttcttaataataatccaaatgaaacactttccactctgaatatacagcaatcattaacaaacgagattaagggaatagaacatgctaactcatctttata

SEQ ID NO: 231400 - DNA, 376 bp, Glycine max
  unsure (1)..(376): unsure at all n locations
agctattggtcaatctgaggagtggngtctttatgctgcaaattgatggtttctgggtggaaaatcctaatttggttaagcctgaaattctgcagcatttgcaaagcagattcaaattaattgaagttatgtacaagcactgcagcttatttaaggcagaaattctacagcatctgcagtctgtgggtggaaaaagggtgggagtggaaatttaaatggagaagacacttgtttgacagagaccttgagatggcagattgtttccgcaatgatgttgctggcaactgtatttagattcacaaaaaggatgagtggatctggaaaataaaccctactggacaatattctgtgattaaaggagagactacaaacaaac

SEQ ID NO: 231401 - DNA, 419 bp, Glycine max
  unsure (1)..(419): unsure at all n locations
agcttcanaccanagcaactcagaatctaggcttctataacccctcaatttaagggatcttcaaggtttgagaagttaagatgagaatggggtaaatctagagtaaactctcacctcacacaagtctatgacatcgatctaaacttgctcaaactgatttttatgcctcaaattccaccgaatcaaaatttgactcctcaacacccaattttttttttaccctaggaatggctcttgccttcacttcggtcatttgtttttctctcttgcacagtccaagcattctcataagtcctaaatgacatttcaaactaggatttactcactttaacctccatttaccactgaatcccgttttagccttccaactctcaaagcctcactctttttctactcataacactacattctcactttct

SEQ ID NO: 231402 - DNA, 455 bp, Glycine max
  unsure (1)..(455): unsure at all n locations
acttccttgagaagcttctgtgaganaacttccttgagaagctagagcttagctacaacacccctctcataactaagctcaccttcttgagaagcttccttatgaagaatcctaaagaagttagagcttagttacacatacctctctaatagctaagctcacctccttgagatgagaagctagagcttagctacacaccccttataatagctaagctcacccccatgacaganaacatgagaatacaaaaaagaaagtctttactacaaagactactcanaatgccccgaaatacaaggctaaaaccctatactactagaatggccaaaatacaaggcccagagggaggaaaacctattctaattgtacaaagatagcgggctatactagccatgggctcgaatctacctaggctatgagaccctagggcttattggatctctacccaactactg

SEQ ID NO: 231403 - DNA, 413 bp, Glycine max
  unsure (1)..(413): unsure at all n locations
agcttgcatganntacatctccctctttctcatgcaaattcttcttgatatcatcaaaatcttcatgatttacacatggtagggcattgagaagtaatgtgtcctcttccaagacatttaaagcactttatagagctagtcttctcttgcatactagccttaggggcttgattctctattgtcttccccttatcatctttaggcttagaaggtgtcaaccctaagatgccttgaccttggtctttctttggataagagtgagagccatatgattttgaagtagacttctttttaagttgttgctctacccttatttcccaatctaaggtagcctctacattgtctttcccatggaagtatgggagggtaacattaacctcttgaggctttctttccttttctctcctatggga

SEQ ID NO: 231404 - DNA, 419 bp, Glycine max
tcgaagggaagagagagaccgatcacgagcacatagcatggttttattagaagagttagccgtttactcaaggtcctaaagaaacttgtctcagcgtttatgtgagacagagaccaacatgttagctatcatcaccaagtaccaagatgaactaagtctagccacgacacacgggcatagggtggcggacgagtttgcccaagtgtacgcggaaaaggaggctagaggaagggtgatcgactcgttacaccaagaggcaaccatatggatggaccgatttgctcttaccttgaatgggagtcaagaacttccccgattgctagccaaggccaaagcaatggcagacacctactccgcccccgaggagatccacggacttctcgactattgtcagcatatgatagatttaatggcccata

SEQ ID NO: 231405 - DNA, 336 bp, Glycine max
agcttgtggaggagtttgagagatgcattcttatttacttcgcatttcattggacccatggtgatgttttgataagtcaagtatctagacatgtcaaaatctcttatactagaaaacattgtgtcttgtctctcaatattttgcctagtccctatactttaaaaatggcgactatgatcttcacatttctgaaaaattgtggacctagtctctcagtctaactttgttaaccttgtttcctaatgtggctaacgactaacacatagtatcgacatggtacatggcagacacattgcatcagagagtaacttcactggattcaaaaagatgatgacc

SEQ ID NO: 231406 - DNA, 454 bp, Glycine max
  unsure (1)..(454): unsure at all n locations
tgaagacatgcatcaccatctcaccctattgtgtctggcttcatctgatatatgaattaatatctaagaaggagagtacatgtgtgtttacagctattggacggagagatatctatagagcttgccagggcaaattaagctgctactaatacctggattaatttatcagtgaaacataattngtgcatggctgcatggatcctgaccaaaataatcatgtgactggataaagctataatagtcatttttattagtgtctttctccaatgcctacgcatttcacgggcatggattccctcccatatacatatatttaatttaatttaatggcattcttattaatggtttggttcaatttaaagtctttacaaatctgtttacttagttttttattaaataataccgtaaatgattactattatatagtgaagtacattcatcacttgtacatggt

SEQ ID NO: 231407 - DNA, 383 bp, Glycine max
  unsure (1)..(383): unsure at all n locations
agctttcataagtganatcaggtgcagccatctccctattagtcctctcacgaggtggaggtagagccatgttctcagtatgaaaattagtagtcgaatgctcaaaatcagaatattcagaatcactcgcaacagaatactcaaaatgctcaaaatgcacagaatgaccaggatgcacactatgcctaactaatctatgaaaggttctatctatttcaggatcaaagggttgtaaatcacccggattacccctagtcatgcattatatgcagcaaataatgtgttctcaacaagcacctaacaaggggggtaaactacagctatactcaaacaatattaaaatgagctataatttgtgaggaacacccttaaatcatgaaaag

SEQ ID NO: 231408 - DNA, 391 bp, Glycine max
  unsure (1)..(391): unsure at all n locations
tgaagaggatgctntaatggaggagaagaaagagagaagtggggatcacgaaattgaaggaataaaagagggaaagaagtagaactttgaagtgtatctcataagactttcattcatcaaagttaccacaagtgttacacatgcttctatttatagactaggtagcttccttgagaagatctcttgagaaaacttccttgagaagcttctttgagaaaacttccttgagaagctagagcttagctacacacacccctctcataactaagctcacctccttgagaagcttccttaagaagaatcctaaagaagctagagcttagctacacatacctctctaatagctaagctcaccttcttgagaagagaagctaagacttatctacacacc

SEQ ID NO: 231409 - DNA, 426 bp, Glycine max
  unsure (1)..(426): unsure at all n locations
tatcaaccctacccatcttgcanaaaccattgatcacagtgtttatggtgatcacatcagcctgacattggctctcaagcataaacactagcacattcaaaagctcagtgggattgttcacgaaacaaagagctctcaagtaaatgtggtaaatcctagtctggtccacaccttccttccttagcatgagtttcaaaacttccctcgccttgtccacatccatcacatggcagagagcttccactagtaccttataagtatgctcagataacatgaacccaaattcagctccttcctctaacaactgataagccctcatacaatcaccatccctgctaagcccatgaatgacatgattatacgacacatcgctcggaacaaaccctcttttcctcaccagaataacaatcctagctgcnccatata

SEQ ID NO: 231410 - DNA, 347 bp, Glycine max
acaatctcattttcttgtattcatcaataatattcattgtataaaagtgatattaaataacgtctgacaataacatagatattagcagatatataataacaaacatattaaacacaaaaacatgtccaacaaatcgctgcacatcttttttatatattgattttcatatatatgagttaactttctgctagcttaactatatatatatatatatatatatatatatataaagctccaggatatggttgaacgatactaaaaattatgaatgcttaacaaagatcacgggattttataagacatacaacaaacatgtctattgagaggaaagaaagaattatgaagtc

SEQ ID NO: 231411 - DNA, 399 bp, Glycine max
cggacttcctgcgttaagagaaccatcactacctcttgtgtacccaaacccaatcacctgcttcaagcacgactttctttctgctttgtcggcttgccttgcatagctcgcatttttcttttcaatgtgaaccttcacttgctcatgcaacttcttcacatactcagctctaacctgagcatccttaagcttaaacatatcaactgtatgcatatgcaacgaatcacgatgagtcaaaggattaaattcatacactatctctaatggtgaacaactattcgagctatggacagcccgattagtagcgaactctacatgatgcgaacaggcttctcaagagtcaagactattctctaaacagtcctaagcagtgtgcctaaagacctattgactacctca

SEQ ID NO: 231412 - DNA, 401 bp, Glycine max
  unsure (1)..(401): unsure at all n locations
cccttgatctctnagtcacctgaggcatcaagctcatgaaccttccttgatacctgtcttgcttgctagcttatttcatttgtgctacttaatgaacatgttcatatcttataaatactacatatctttgtgaaaggttgttggttgaagcattgctagttatctatgttcatgtgattgaatcatttgaaacaaacacaattttggctaaccactatgatttgtgacacttacttgcgcttagcgagccgtgctcgctaagcgagccatcaaaagattaaaggtccaagagcctttaatacactaagtttggtggaaagaaagagagagtttacacttaaggaagaagaagagacactaggagagcagcatagagagcttatgccagaatagagagaaat

SEQ ID NO: 231413 - DNA, 365 bp, Glycine max
gaagcacaactaaattccactccctcaattttgaattccggacaaatgaagggatgatatctccaataaattcttctttttcgcaaagaccaataaattatggtgtatgcttaaatcgacaagatcatgtgagacctgaatgatcttgattgccaatttaaacatgtcaatctatatcacaaatgtttaatttgtggtaagctggattcttaaatatttaatttgaattcctgaaaaaattaatacattaacatttgtcactccaaacaaaatattgaagtttaaatttcgttgttagcttttcaggtgctatcgtgtaataaagtatttctagtgtcttttctacatgacatttaatatgtttt

SEQ ID NO: 231414 - DNA, 305 bp, Glycine max
agctttgatcttattataaaatgagatgttctggactcattacgctatctaaaaaacttggggaggatccaagtgttccgatcatccatttgcatactcatgttctggtggcatactcaccgttgtttatttctttatgaatttcatcataactaaaataacaccaaggcacccctataacactcgatccaaaaaaatggataatgaagagggcgtgcaggaacagatgaaggccgatctatcggtcttataagatcaaatggcttccatctcggatgtcatgttataactccagaaaaccatag

SEQ ID NO: 231415 - DNA, 293 bp, Glycine max
tagagaggaagcatcaatggaggaagaacatatgatagatataggggaatgggaattgaaggagaatagggagagaagttgaactttgaagtgtgtctcacaagtttctcattcatcaaagttatgacaagtgttacacatgtttctatttatagtctagcacatgggaagcttccttgagaagcaaggtgatgctttcttccctataatgagatcactcaccatactctaggcattatcatccgccagtattcgctttagtgatcctaaggttcatgtttttacgacttctc

SEQ ID NO: 231416 - DNA, 392 bp, Glycine max
  unsure (1)..(392): unsure at all n locations
agcttgccctagtttatttaaatataaanatctaacctaagnngactttatataaactaagtcataagcttctgtcgcacaacatgccctaataagaacccattattcctccaacatcaagcaaattaataaaagttgcggtaagcctttccttgtttattctattagtcacatatacttaaataaggtccatttttatttatcagcagcatatatttaaagtaaaactgtacattgaccaataaatgaaaaaggattcagtatactcagatgtctatctttcaacattttgttcattaaaaaaaaatcattcaacattctgtagggcaaagaacttaaaacaatttcgtaagaatactcttttcattaattcttttttataagattcaaat

SEQ ID NO: 231417 - DNA, 370 bp, Glycine max
  unsure (1)..(370): unsure at all n locations
tttttttttatagaaaaactttcaatataaaagaggggttaangaaaattntcacggcggagtgctgntaatcttagttacacagaactccaattcattattaaataagatatcaaattcgagtattgtgaactaataatatatgattgtaagaaaatgtttctataaaaataatcaatcaaatttttaagagaaattttttactgacaaagtacgtagatattttgcatcaatattcttttattatcaacaaaggttagtttgtaattttataaaaaagtagttggtttccttattcttctcctttacctacttcaccaactgactaacctatattgctttttgaccaaattatgtggcccaaaatgga

SEQ ID NO: 231418 - DNA, 355 bp, Glycine max
  unsure (1)..(355): unsure at all n locations
agcttctctcanatttactgactgttgttgccaaacatctcaactagattaatatatttataacaaaacaggcggattagaaaacatgcaaaaacatttttactttttcaaagaaacttggttccaccttccgaaccaaaccattttatcatgcaatattagtacccgtggaccattttagtaaacacggcatttcacattgccgtttaaatggcaaggcttccattttccttcttcgtaaaaaattcttgggtttgcctctagattcctattccatcaaaataaacatttggaccgatattctgcaaatgatcaagctggtgtgataatctatccgcatctaatcaagaattct

SEQ ID NO: 231419 - DNA, 452 bp, Glycine max
  unsure (1)..(452): unsure at all n locations
tcaccctgatcctcctcaagctttactcttggagacccctctggtgaacttgagttgcccaatgaatgttgcacttcctctgacacattacaattttcgtgctcatttgatgcaaggctcactccctcatgggtctctggaactctatgctcagcctgattatcacgtttccttgcttcagcatctttcgcgccataagcaacatttttatctaggttagcataaaaatcaagcanaaagtccttcttcttgtaacctatgcaaatattaaatacaaaatatgtcaataatntacaatagagggataggaattacaccataaacatgcaggtcaggttaattaataaattttacaatatacactaaaatgaagaagaaagggaaactcttaaaatccattactaatctacgtcgacaccanaagagaatgaaacatgataaaataataagaa

SEQ ID NO: 231420 - DNA, 402 bp, Glycine max
  unsure (1)..(402): unsure at all n locations
agctcgagactcaggatctttagcaaccaatctatacatctctttccattcaagaaacaagtttttatgcttcacagtagtcttntttgacctcaacttatcctcggtcaagtatagcttcacataagggtcacatgcaccaagacgatctttcttctttaacttcatcgcctttaaaatcgttgcatttaaaatcccaaccggcctcttcaaggctctaacatgacaaaggtctgtattaacaaaaaacattattaataattacaaagtagttgaacaaataattacaaactcataatgaataatttggagcatactttgttgggctatacctcgaacttcaatgttttcgccataaatacatattgaacttgacttaataactctgaaatacaccttaag

SEQ ID NO: 231421 - DNA, 432 bp, Glycine max
  unsure (1)..(432): unsure at all n locations
caagtaactcacagctcaacataatacactggttatatcaggatgcganaatgatacagatcatatctaaagcaactgccataacaataatctatattgaccctaaaaatcaccctccgaacaataaatatgcaacaaaacataatttaaccatcagatctccctgaaaaccttctcagcagcggctatcgtcttttctatgtcatcagaagtatgtgccaagctggtgaagccagcctcaaactgggaaggtgccaaatagacaccttccgccagcattcctcaaaagaacctagcaaacttggccgtatcactctctntggcatctgcaaaattatacactggtccttctgtgaagaanaacccaaacataccccttatatgcccaccaatattgcatggtctgcccgctttccagcttcgatgatgccc

SEQ ID NO: 231422 - DNA, 365 bp, Glycine max
  unsure (1)..(365): unsure at all n locations
acccaccatcactttgtacatgcaaaagctatctttgtgatgagaatcctaaaactacctaaatataaggatctatgaccaggagtatgaccaaacagaccatggatatcctccaagaaatggtagcagacgcacttaacaaggcccaagtggagaagaatgaaggcctaaaggtaaaggcactactaagaatattaattgttgttgaaggtccaaattgttttaaaggcctgtgtctatttctatcttttcatttagatattctatatgtatggatntcattttcaatagaggactttttggcatttgatataatttggtgagagcgtttctctacgctccttgttgaaccaatctcagactta

SEQ ID NO: 231423 - DNA, 438 bp, Glycine max
  unsure (1)..(438): unsure at all n locations
tgtttacctcatgtngagttntcatacaatagagtgtttcatagctctactaatggttctcgttgtgaagttgtttatggttttaacccactaactcctcttgatcttttggctatgcccaatatttctgtttttaagcataaagaaggtcaagcaaaggcggactatgtgaagaagcttcatgagagagtcaaagatcaaattgagaggaaaaataaaagctatgctaaacaagccaacaaagggagaaagaaggttgtctttgaacccgaagattgggtttgggtgcacatgataaaagaaagatttccagaacaaaggaaatcaaagcttcaaccaaggggagatgaatcatttcaagtgcttgaaagaatcaatgacaatgcctacacagttgagctacccggtgagtataatggtaagtccaccttcaatgat

SEQ ID NO: 231424 - DNA, 368 bp, Glycine max
taagactacatgtgtacattaattattgtgtgcaaactacatgcgtttattaattactgacagtgcaatagtttgttgctgctcattgaattataacatcactgctgtatgactaattaaaatcaactaatgttttgatgcatcaagatcattcaaccacgagatttcagctgtacactaaatgcatgtatactgtatgcaatgtttatacttagaatcttaagcacgtgtggtcgaagtcaaagctagcgtgactttgattaaatcattttcatggttaatggtatggcctgaatggtcatcttttatttgagcatgatatcacttctgagcttttctgcaagatcatcatttgcatcatgatttta

SEQ ID NO: 231425 - DNA, 391 bp, Glycine max
  unsure (1)..(391): unsure at all n locations
agcttattgtcgcaacctacccttcggcgggagggcgatgctagactcgcgggatgcgtgttccacgaaaggaatacgcgcggagtcgccaccaacgtttatttgaggaaaacgtcggaaaaaccggaaaagacgcgatctacgaactttttagtgaaaggttcgggagttgtatttacgcacggggaaggtattagcaccccacacgcccgtcccaagggacggcagcctttaatcgaatgtgcaaacatgactttgatccttaaagtcccttntatgttcttatatcccttataccctttntacactttttcttttttgtgggcgacaagggtggttccctttgctcctacgtattcctcaatttgggatgagaaaatcaaacctacgt

SEQ ID NO: 231426 - DNA, 395 bp, Glycine max
  unsure (1)..(395): unsure at all n locations
gcttcttgggttggctggctattatagaatattcattgatggattttctatattggcatttcccctaactaagttgactcgtaagaacgagaagtttgtctggaatgagaagtgtgatcaaagtttccaagagttgaagaggcggttgatgacagcaccagtgttaattntacccgaccctaagagaccatttgaagtgtattgcgatgcaagcgggcaaggtctggcgtgtgtgctgatgcaagggggaagagtattggcttatgcttcacgtcaattacgtccgcatgaagtaaactatctgacccatgacttggaactagcagcggtggtctttgctttanagatttgaggcattatttgtacggtactcgttttgaaagtcncagtgatca

SEQ ID NO: 231427 - DNA, 406 bp, Glycine max
  unsure (1)..(406): unsure at all n locations
agcttgaaacttgaaaacaatattttgngtttgtgtggatagcttcatatactactggggttttcaaattgattgcaattaccattgaactgaccaataggatatacaaattgatatatggtccaaagctttaaattttattattatttaaatgcacatcagacttatttatggcaaatctttaatcctaaagctgttgaggtttatacccatacacagtgtaacatgttcatgtttgaaacaatgaggatctgccttctatgtaatcttaagaatgttttgattgatctttagaaatgtcatctattgtagattgtagatgctgccttttcttttttctttttctttttttttcgtggtttgacttccactgcctttgacccttgctacttatatcaatgggttt

SEQ ID NO: 231428 - DNA, 410 bp, Glycine max
  unsure (1)..(410): unsure at all n locations
tgaagaggaagctattctgagagcttgagatgagtttgttattggtcgtgagatcctanaggagaaggagacatccgcaccacttgtatcttcgcaatctttcatcttgttcttctctttgttgtaaaggaggcttcctagttatggaaagctaacactctctattggatcttccctgtaggtacttaatgtaaatatcttctatctatttaatgaagttttgtgagtactctgcgctatcagcttttctttctagtatgcctttaccttgatcacgtagatgcattctttgttagagcattcaacagtggatacctgtttgactctgatgaccttgataggacaggactaagttattgactatcacgggaatctgtgtgcataatgtagctgaatatgtacgcttaatg

SEQ ID NO: 231429 - DNA, 412 bp, Glycine max
gcatgcaagcttgaggttgtgaaaagaatatatttcatctatcccaacctctccttgtaggaaaattttattggtctcctgagatttcacaagagacaaatgagggtgaaactcaaagaaaacagagttgtctttaacatattgactcgcacttaacaaattcttcgaaattgaaggaacatgtaacaacttatgaagcttagaggttatggcagtatcattaggagaaacaaaaactgaggaaccagtgttggagatacttaaaccttcaccattgcctatgaaaatctgctcatgtacatcaaaatgagtaaattggtcaatattttgagaatcaccagtaacatgaaaactggctccataatctggtatccaagtggagccagatgctccattaccatgagaggaggag

SEQ ID NO: 231430 - DNA, 415 bp, Glycine max
  unsure (1)..(415): unsure at all n locations
atgatatattgngaatttgtttgtggtacacatgataatcggatttttatattgaaatgattttaatgctacctagtttccaggaacaacttagtctacctcttggctcttgacatttccagtaattgagctggaatatgagcccattcatgttatgatgagagagactttcatttaaaacagacaaggcattatgctgttatgataaactgaaagttcttatatgtattgtctcaatttgtgtaagatttatttggagggccttacaaattatggttagtgattatgctatgaagtgggagtacaaagcatccttaacaaggctcaaattacttagacatcctctgtattacataattttccatcactttccccctacatccaactggcagatcactggtcttggatttatatg

SEQ ID NO: 231431 - DNA, 324 bp, Glycine max
agagtggtacctgtagatatgtctcggtggtcaagagaccttggggacgtcaggtggggtgctattgcccaaaaccaagcttgaccaatcccgacccaacccgggcatagtcggtcagtgagaacctgtgatgtacctatgcaggcgagctcctgtcagtcaacagataaaaggaacaaagaccacaaagcaaggaggcttgtggtggctggccagctgtgaatcttgtgtgatatatgggttatggcctctggcaatcgattaccaagggtgggtaatcgactacattgcttaaaaatgaagacagatgctaagatggtctct

SEQ ID NO: 231432 - DNA, 348 bp, Glycine max
cttgaaagagctagggcgcaccttctctttaattcaatctgcgggcttagcgagcgttcgctaagcgcaacactcatggactaagcgcgaggaagactctggaagaagatgagctatacaggctcgataagcatatcgcttcatctcactaagcgcaccacttcagttcatccgctaagcgagaaaggcgtgctaagccaaaaatcactaatgtgcgctaagcgggccataagtgcgctaagcgcacgagcacgaacatggccacctatttaagcatgaaatcagattctagagggagagtctggactatgattcagagcttcgcatgtctaagaattctaaagagag

SEQ ID NO: 231433 - DNA, 357 bp, Glycine max
  unsure (1)..(357): unsure at all n locations
tctagactctacacatagatgaagctgaacttttatcaataatgatgcttcgataccacttgttagacatgnggcctcagatatcttaagaaggcgggttgaattaagatatttacaaactattttcccaattaaaattctactgtgattttaatgcaagttcaaagttcccttagagattaatttctaaatgatgattctaaatcaccaaactgaattgctaaagtgaagccacaataaataatgaattttaagggaagagagagtgcaaactcagtttatactggttcgtcacacccttgtgactacgttcagtccccaagcagccacttgagagttccactacttgcaaaagcc

SEQ ID NO: 231434 - DNA, 379 bp, Glycine max
  unsure (1)..(379): unsure at all n locations
gaaataagtactagctcaaatggtttatagtttctataattttgaanagtataatgtacattaacattagtgacaaaatagtaaatggagtagttatacccgatccaagaaatatttagcaacattgggaagattatgtaattccttttttgtcttgtatggttcttgaacagcangatctttccagatttcatctaccataggagcatactcacgcgttgcagcagggaagaaagcctccaaatctccgatggccataatatccagtaatcagtcagaaaagtgcttgaatctttgagtatagagtaaacactcaccttgttttcgtcagctgctgtctcttgctaaattattatacaattagattcattcacataac

SEQ ID NO: 231435 - DNA, 402 bp, Glycine max
agcttggttcaaccccataacccatggaatgtgtattttgatcgccaatacttcaacaacatttcatagggatgaaagactcgggaatacgcaagctatgcatggaaaatgtaattatgagattgagatgcccgaagagacatcctttcttatttagccacgcattaggtaccatgctcaatcattctgttatgttgtttgtgtttttttttttattttagaaatgggtttatgatcccaacatggttggctcatggtacctaacacatgcaactaagaatgcattatgaattttcaagcttccctttcttttttgttcttgttttgcagagaacaacacaaggatcatgtttgagcaaacatgtagaacataaagtatgttgaacgcatatgcctgatgat

SEQ ID NO: 231436 - DNA, 398 bp, Glycine max
agcttcaagatgagctgtcattcttgcagtctataattcgtactcctcaccatcaaaaattggtggtgaacctgctgtgtatgatgtttctccctccattgtgattcctctcaactcacagatcccttaatgataagagctctagatacctatttgttgttttttttaataacagcacgcagaaatattaaagaatgaaagggagcataaagtaagaaattgagactgcaaaagcttgttttattctgatatgaagcaacgtatttaaaatcatggaaaagatagtaactgctaacaaaaagattacaccactaacaaatcatgactagagaataggatcaaaactgcctattctatcagccacatgactttattttccttaaaaataccaaagaatt

SEQ ID NO: 231437 - DNA, 414 bp, Glycine max
  unsure (1)..(414): unsure at all n locations
actcagctatcttattatctatctacagatgtcttgcaagattattagatataaacatgaagttctaactcaagatgttttctttggtgcatgggcataatgcaatcactctatgtctagcaatgattttattaagatgtccctacctttgagctctactaaaaattatcctctctcgagcgactaatccctaaaactgatgcatataaaaccttcaatgtatttctactaaggattaccctctttcaagcgccaaacccctaaagatgatgcacggatgaaacatataataccattcgtggcattttacgcctgcctagccctaactataggggtttagcctttcattgtcatgagagacttctacactttanggagttgatatggatggaagaagatggatggatagaggaa

SEQ ID NO: 231438 - DNA, 419 bp, Glycine max
  unsure (1)..(419): unsure at all n locations
agcttgtaaatggaaacagtataataaatctataatgttaagagataaaatgtagatagacaaaattttgagtaaaatagacctccctctcattcaattaacattaatattagccgaatcatttcattcgactaacattgtagataatcgtattgaccttgtctatgatttgttaaccttttgtttgactaacattgataagccatcaattccatatccaatcataccagcctttacctcattcaactgacataaaagttagtcaaattccaccttagccggcaaccattctactaaatcctcaacagctgaattttgcagcaaaattttggatgttataacattatgatttgctaatctaataaaattattgttaataatattatgtaatagtntacaaaatgagagtttaatacttt

SEQ ID NO: 231439 - DNA, 88 bp, Glycine max
  unsure (1)..(88): unsure at all n locations
gctgcggactctagacatcatgcatttcatatttttcttttctcanacatacgaattgtacgcattcatggtagcagacacgcactag

SEQ ID NO: 231440 - DNA, 392 bp, Glycine max
  unsure (1)..(392): unsure at all n locations
agcttttggcanaaccaaaactgttaattcataaagcatttaccctcactatagtctcaactcttaattcccctatgttctcactcattttaaaacccagtaaattaaacaacatattgtcaccaaatccaccccccccccctatccatatcaggttagaatagaaatgcacaacagtctcaaaagtagatgactcacaggtttgattgtatcaagtaagtactttgatgacttctcagaaacactaatttgatacttggatgaaacaaanatcanaccaaacctcagcatctgtgagctacttgttcatcattcatgcaactttcatgttattcacatggtttgaaagatgagtaacttacgatatatcatcaggtttgctatttagacag

SEQ ID NO: 231441 - DNA, 433 bp, Glycine max
  unsure (1)..(433): unsure at all n locations
tactaagcttggcattagangttatctgtccaatcaatctacaacaagaggtgtatggagaaagacaccacaagaagcatggagtggaagaaaagcctgtatctctcacttgagggtctttgggagtatagcttatgttcatgtcccagacgagagaagagaaatacttgatgacaagagtgagagattcatcttcatcggttatgattcaatttcaaaagggtacaagttgtacaacccaaacaacaagaagatggtaattagtcgagatgttgtgtttgacgaagaagaacaatgggactttgagactcatgaaaaggaatactacttctttcctccacttgaggaagagaagacaccttaacatgttcaataagagctcaccccatcaacatcaaccactcatgaagacacttttgtcatctctgagagt

SEQ ID NO: 231442 - DNA, 404 bp, Glycine max
  unsure (1)..(404): unsure at all n locations
ttgctttaagncccactcgttagttccttggtgtgtttctagttanattgtccaattgtcataatctgggctaacagcttgagtagtgcactaaatgtctaagcagtaaaaactcgaaagtctgagtgtcaaatttcacaagaactatgttctgttcatgcatcgtataaattttaatttataagaaaagatattaagagagataaatgatacatcacacgaataagaactaatcacagattattgtagaaaaagaatataatatgaagcacaataatcagtagagaattcactgggatcagaatgttatgacctagcatgtctcgtctgcctaaatatatggctcttagattcttctctatcaaccaaagtaaattatcctatccacatctattagaatactt

SEQ ID NO: 231443 - DNA, 368 bp, Glycine max
  unsure (1)..(368): unsure at all n locations
ctgcgaaggcaaacattaggaatgttagttttaccaagaaatgctactcttaaaacataaatggcatacaacctcctccaataaacacaaacatcaatgtaaatttagagcagactcatgcacatacttccttatgaacattcactcgcacaagatattcttctacccataaaaatgcacccatgcgcaatcaaggaaccttcgttacctagattatttatatgtacttccaaggtgtatttgctacctacatcacatgcatttccttggctaaatttacatacatgcatactcaaagcatcttggctaccataaattgcacacgtgcacattctagtatntctaatacctatgcatatacaaacttt

SEQ ID NO: 231444 - DNA, 393 bp, Glycine max
  unsure (1)..(393): unsure at all n locations
agcttataagaaccaaaattccttaatcatgtccaaatatgcatgtgaattaggacgcatcaacaagaatcaagccaaggctattgtgcaagcaatcaatggggcaaaacacaccaaatgattataatgatggatggctcanattctcacaaaggtaaaatcatcactttcaaattgagctttcaaaactatcatgacatgtagagaagaatcaaggatttcaagtcacaaaatgtcaagaacttttattttcaaaacaattacccatttcttgaacatatcctataattcaaagaaaaacatgcaaagtcgtacgtgcacatgannatgacccacactattatactgaaaatccgacgaaactaacaacatttacaaattaacacaactaac

SEQ ID NO: 231445 - DNA, 356 bp, Glycine max
  unsure (1)..(356): unsure at all n locations
tatactnggccttatataactgtcnttgggcttggctgccacgctcaacanagtactttcgacacctactatacgttgatttcaccaatgctgttatgggaatgttgtgacaatcctttaaaaccttattgatacattctgagaggttcgttgtcatgtggccatatcgacgtccttctctatcgtaagccatcgtccatttttcctttgagatgcgatcaatccatgttgctatagctggactcagttcacaaaatttttctaaattttgataaataatgtgcttgcatggagtgtatgctgcataaaattagttatgaataacaattctaagtattaattgaaagtaaataaac

SEQ ID NO: 231446 - DNA, 348 bp, Glycine max
  unsure (1)..(348): unsure at all n locations
gatcctctcagtcacctgccgcatgcaagcttgtccttngattcagttaatagcaacgcatagctcacattatttgcttcaactcctaaacaatccaaaagttatggcttgtggttttatgtcacaacatacaaatcttatgctttacttgagacatcatgtaatgctatctctactattgatctcatagaacagaaaaaaaaacactaaaaaatgaaacctactatcatcaacaacataaaccaaaatttttggctgctggttttgtgcccattccccacatttgatcttctatgatccnatctacaaatctcgcccccgccccncatatatatgatttaaagaaag

SEQ ID NO: 231447 - DNA, 258 bp, Glycine max
atgacatataaggtagaagacctaagttctgaaaggcttgaatgcaatcaaaggtttcagcacaaaagaattcatatcaataaacttatggtcgataatggaacgagatgagaaaagattggagtacccgttctgctgttcatcggaagaaaacacttgggaagaggacaatgatggtggaattggtgctgtggatgcgctagtggcttcggaacgatgagctctttgaagccgagcagaggcggaagaaccctttcg

SEQ ID NO: 231448 - DNA, 401 bp, Glycine max
  unsure (1)..(401): unsure at all n locations
agcttctatagaaggatcattcctattgtctctacaattgcatcacctctcaatgagctggtgaagaagaatgtggcatttacctggggtgaaaaacaagagcaagcctctgctttgctcaaagaaaagcttactaaggcacctattctagctcttcctgactnttctaaaacttatgagctagaatgtgatgcctctggagtgggagttggagctgtattgttacaaggtggacaccctattgcttattttagtgaaaaactttatagagccaccctcaactaccccacctatgataaagagctctatgccttaataagagctctccaaacttgggaacattaccttgtttccaaggaattttgtcatcatagtgatcatcaatcacttaatacattaga

SEQ ID NO: 231449 - DNA, 386 bp, Glycine max
tccttcagttaaccacttaatccaaccctaatttaatttactaagcgaaaatcaatctaggtttgtcaatatgtgattaagcaacacatacaccaattaaccccttgttcattaagcccaaacgtaatttaagcacagaggcaattaatcgaacacgaagcgtgcacagattaacagaacgcatgtgggttaattggtgaagggaaaaccgataggagagcaacaattaaaacagaacctcaaagagagttatgcttcttcctcagagggaaacaacactagaaatttagccttccataagttcaacagaagcagataacataaatgaaactaaaggcagaaagcgtaaatgagctaaatgagaaaacgaaattaaattatggcag

SEQ ID NO: 231450 - DNA, 387 bp, Glycine max
  unsure (1)..(387): unsure at all n locations
agcttattagctaggctcatgcaacatagactttgnttttttaccaagtaacgcaatattagtctatcgagtnttatgaatgcccaatcctcctctagactttggttgggtaatagtttcccaattaacccaatgagagtatgtgtttctccatacaaaccttctaaccacattatcaatatcctcacaattaaactctctctcgatctggaatccacatattctgcatggtgtaaataggaatagcattcaaaattgatttagccaatgtaacacatcctgaccctgttcaataatttagccttccatcccactagctagcttgttactcatgcgaactgcaatagaggaacaatcagaattcttgaccctcccagtgagaatagg

SEQ ID NO: 231451 - DNA, 331 bp, Glycine max
  unsure (1)..(331): unsure at all n locations
tgatatacacaantaagaacatgtaagcagagaaatcttatttatatagtttcattgaaaagaacatgtggtgttctttagtccaatgggtgtatttctggcaacatagggacactgatgagtcatcagagccaccagataacatgatgcaattggcctcttctatattctgcgacagcaagtggtgtgggtagctgttcgacacctggacctgatcaaatgcaatgttgttgaatagtcacacgtttgagccatctatagtatgggtcacaactcctacgctaggttcccaaattggaacgcatagataggcatggcaacggtgcggttc

SEQ ID NO: 231452 - DNA, 410 bp, Glycine max
  unsure (1)..(410): unsure at all n locations
agcttcttatacaaggctcatcttgttggttaagnctcttctttcatggcgtattccctagtggatggcgccgcctcttacctcttctactttgtcttccgctgcatctccatggtggaaaatcaccattaaaggacctcattgaagctcagagatccagcctccatagaagctccacaagccagtttccatcattagagatatctaattggtcatgtgatcagttttccataatgaacttatgagttatgctttacccagctcatggcaattggcgttttcactccctgttttctcaatatatccctaactttgccaacattctttcgcctgccagccaaagcatatatgttagaaagcaacatgtaattgccgatatatgaggttaaccttgacagtttactgcacaa

SEQ ID NO: 231453 - DNA, 470 bp, Glycine max
  unsure (1)..(470): unsure at all n locations
cttagactattaccaagtattggagtcactgcattcagtattggagtgctctatatgattgttttttctctttttatatgaaatggctcgcattagattctcacaccattntgcctgttctgtctgacaagccactttggtttcttaacgtttcttcaggacaataccattntaattgctggagccactggctttctcaccaaaagtatgcactctatgtccctttctccttcaacgggcacttttattgctatattggagatctctttggtttatgtatcatagtctttggcttatttttcgctttcacaccatcgatccagaagcatgaatatagaaattaatactagtaatttaacatactatttattatcagcttgttattacaaataaatacatgttttgtacatgtccatttaaaatgtgtgatagttagacataaaaaataaccaagtgcttacaaatattta

SEQ ID NO: 231454 - DNA, 409 bp, Glycine max
  unsure (1)..(409): unsure at all n locations
agcttcaacatcagaccactgtcagtgtgcttttactacttcacatggacttgatggggcctatgcaagttgaaagccttggaggacagaggcatgcctatgtggatgtggatgatttctccagatttacctgtgtcaactttatcagagagaaatcacacaccnttgaagtatttaaggagttgagtctaagacttcaaagagaaaaagactgtgtcatctagagaatcacgagtgaccatggcagagagtttgaaaacagcagggttactgaattctgcacatctgaaggcatcactcatgatgtctctgcagccattacaccacaacacaatggcatatttgacaggaaacacaggactntgtaagaagctgctatggtcatgcttcatgccaaagaactacccta

SEQ ID NO: 231455 - DNA, 359 bp, Glycine max
  unsure (1)..(359): unsure at all n locations
cgatgaaagcgctaactttgttgaagctntatgctactattctaagatgggtccagagtctacaaagtactcaatagtaagacacttctacaaatttaaaactagaattaggaaagcacttattttttaaattttcaaaacaagttaaaatgatcttgtaattcaattaaaaaccatttccatccatttgtatgcaaacaagaattattttcaaatttaagtttaaaaacaaataaggtagaaacttacatctaccatacacgagatctaaaaactacaaaacttattttgattntaaaaaagagagttaatacttatatattgaacgtaaataatcttatattgtatcacaatgatca

SEQ ID NO: 231456 - DNA, 258 bp, Glycine max
gaagtgtataccctatacggaggccagcaataggacacacatcgggcggttccggcaattgtgcagagaacccggggagatcttcatacgcaggtggggaaagtggacagcgcagcgaaggatatttcccttactgatcgcgggagctcgtctgacgcatgtaataaaggtgttgataacagataccgctaaagcgacaactaggccggataggtcttgcgacctgacatttgtgtgtcactcataatatgtgccccc

SEQ ID NO: 231457 - DNA, 310 bp, Glycine max
tgtatgattatggtgtacccatcacatgtggtactaggtgtcggtcgggcgatggtgcacaacatggtttccacattcacaatgcgcgcctaaacccaccattccctattgtccaccttcaactgagctcacgtacttccacgtagcccatatcctctgttctctcaacaccgggtccccatcaatcctcccaaactttcacaacatccaagcaaaacaacattcaaaccgcgcaagctatcatatccaagccaaacaaaagcaaagcagaaaactctggttaacacatcaacaaaaatcataacttttt

SEQ ID NO: 231458 - DNA, 403 bp, Glycine max
agcttaggttcaacatgtgaaattgttcaatatagctatatatatagataaaactaagaaacattatcacaccaggcacaccctctgttgaaaattggttttcttgctctaaaagaggaacagtgtatgaataaataaattccatgcaaagatgatgaaataaagaactataacaatcaaaattacctaaactccgtttgatgattccttctgaagaagatccctcttcagttcctcaatgctatcaaatttacgtcttttaattctgcttacattcataaattataatatataacacagtgaaatttgaccaaaaacaagaagtaatataacacactcatagcattatctctcataatagaatgacaactgctacaatatatgcaccacaagcatgaaccct

SEQ ID NO: 231459 - DNA, 240 bp, Glycine max
  unsure (1)..(240): unsure at all n locations
actatcattgttatcatttttttcttcgtcattgaggtgccacttgagctgccagatctcttcacctttgggtgtattctttgaaagaaccgtgcccctctttgcacatgttctatagttgcatcctatccgacaccatatcaaaattgtactgatactggctaacanaggcaaccattatgtccttccaagaatggactcgggaatgttcattgtagcgtactaagtaacagctacccc

SEQ ID NO: 231460 - DNA, 253 bp, Glycine max
  unsure (1)..(253): unsure at all n locations
agcttgatgagtgagttgattttatccntagttttaccacgcgcattagccgcttcactcgaggaaactgccaagaaaacactctccgcttgattgttttgaatatattattcaaagatatgttgattattctattatattgtgtgtccgagatcctgagtatcttattagggattcgttcaaacgcggtcaccacgaggatgatgagcataatataacctcaccggtgattaaactgcattaccacacaccg

SEQ ID NO: 231461 - DNA, 244 bp, Glycine max
gccaaaaagaacttactacacccacgttaaccattctcggaggggcactcacaaactcaaaaagaggggccgggtgacagaacgagtaacgcagagggtggagacaccagacaagaggaaggacgttcgcacttcagcggagaaaaaaagacgaatcggcagagaggacacagagaggagcaagcacaagccccagctggaaccccatcaactataacaacacacgctttcacggaaccacaaa

SEQ ID NO: 231462 - DNA, 322 bp, Glycine max
aaataaaggtagcctaaccctagcaaaggtaaacaacctccatttctccaaaaaaacaactcaaacccaacgtgtgcttggcaaccgagaaaccctggggcattccattgaaactgaaaaacctgaagcataggtgcaaaactaattgatgtgggctggctgaaaattgaagagaatcccttgttgaatcctaacactgacaagcgacaccacacatggggcaaatttgaaggctgattttaagtgtctctaatgacacatcatgatttccaaatttatgccattattgtaaaccaccagttccaatgctaaaatgaaagaa

SEQ ID NO: 231463 - DNA, 114 bp, Glycine max
aagccttcccaacattcaagtatttaacaatcaaacagcacaaaccatcgagccaagaaaacagggctaagcagaaactctgccaaaacaccaaccagaataacagctttctca

SEQ ID NO: 231464 - DNA, 167 bp, Glycine max
gcatgaacaaacccccaccgaaaaaaaaaaacacaacaccaaacggacgaaaaacgcggaagaccctgcaaaaagaagacgaccaaggcaaaaagaacaaaaccggagacccgacgaacaacctacaacacaccaagaaaccaggacggaaaaaaaaaaaccaacca

SEQ ID NO: 231465 - DNA, 216 bp, Glycine max
  unsure (1)..(216): unsure at all n locations
aagctcgagcctatctacacaccccccgatanagcgaagctcccccctgacagaaacaagaacgacaaaagagaatccttactacgaagactactacaaaggccccgcaaacaaggctaaaccctatctacaagaaggcacaaacaagcccacgagaaaaaccaagcaagataacaagaaaacgggccagctcaccatgggcccaaaacacaccaa

SEQ ID NO: 231466 - DNA, 290 bp, Glycine max
ccccatagccactaaagaagggcaccccacacaggaagataaaaagcctagcccatttacaagggccgggaccacagatggagagggtccatatctgtcacattaacaggaactttgttagcgcgaggtggatgcataaagatcaagttgctgtgccagatgaagaaacccatcaggaccatccaaactgggtacatccatgctccccgggctttgaattgaagaattggcacatcatggagcgacccaagatttctgtgcaaatccaatgtaatccagcagtacgaacc

SEQ ID NO: 231467 - DNA, 406 bp, Glycine max
accaaaatctcagcttatcttaattaatatgctctaggtgtaggctcattattgttaacggtattattttcaataatgtggttaatatttttttcttattatattgcgcgggtgttggtggagaaaatgaagtttaatataatattgttgttgaactaaagatgctttggtcggcattgttggagctctatgagagtgttgttggaagtcagaacacatcggcaacgatttacacacctaagcaagggatgatagtgaaacaagaaaaaatattgtgtggagggtgtatcgtaataatgtgaagactagattaatctcactgctattggcctttaaacaataaagaagggggaggtcgtttctttaaaaataaatattaaaactaacactctattccaagcaaaag

SEQ ID NO: 231468 - DNA, 386 bp, Glycine max
agctgcatttattgctgaacaaatctttattcttgcatgtattagagggggttgcactcctatgatcagattgtattgatttttcatttctcaagctcaagggagtttttaactattagatgctataagattttttattgatgtgcaatatcgattgtattcttaagaaatgcagatggaaatttgtttagcatgtagtttacgactgacataattatgtctcccatgtgttactttacttcatataactgttatggggaaaactctgctgcttgtttgacatcaatataattattaatattgttgctttactgaggatggaaatgtgaatttcagaatcacataaaatttattacccgtcagaagcgtgctgacgcaaagaaagc

SEQ ID NO: 231469 - DNA, 466 bp, Glycine max
  unsure (1)..(466): unsure at all n locations
gctgccgctgagttgcccattaactgccctaactcttttatactggtgatccctaggctcttgaccttgacttgatagaacctctttttaagtgaaggtgtttgacttgatcccatgttttactaaagtgaaacaaaattggtgcgaatcaaaactccgacatctatcatgggtggaatggatgaatgcacgaagaatgcatatgatacagatgcaatttatgaacacgggagcccgggaaattgtctccttcttagatacaacgtcttgnggtagcaaagtgcccgatgtatgtatttaagaaggcgacacggaccctccgttggcttgccaaagagaggggatcaagacagaacccgtgcgtgatgcatatgcgaaaggcgcaacacgggaatgtacatagtatgacaatattcacaaaatataaaagggtacatgacacttatgcatggcagtgtgaaaaatg

SEQ ID NO: 231470 - DNA, 414 bp, Glycine max
  unsure (1)..(414): unsure at all n locations
accttaatcacctgagctgcagctgnctggcagatgctggaccctttttttatgancnngtgtgcattcaaggaccctatgatgctaaacattaataaacatggaaatttacgggaacccggcttatatataataatctatcgacatctttattaatttgttcgcaccctaagctctgcgaaataactttatatgagtcagcctcctgcgaatataatgtcgggagatatctagtagcggactcttacgtgtcggaatgagaacactctactttggtagccttgttgaaaaagtgtggttttccctgtgtgcaggccatgttatgagtatcaaagaagggaagggactcaagttctgcctcaacgcatacaaaaaacatgcgtataaaaagtaattggaaatcgcaccactaaa

SEQ ID NO: 231471 - DNA, 334 bp, Glycine max
caaacataacatgggtagattcttcaatcttcaatgaaaccttattggaaactatatatgtcctgctcgtagatgagtatcctaataatagaagtccatctgcttttacaataaacttgccaagtgattctgtatcgttgtttaacacaacgcacttataaccatagaccttgagatgtgatatatttgacttgctaacattgtacatcttataaggtgtcaatttctaagatgatcttataatcactctattgagaacaaagcaagttgtacttaccgcatccactcgaaaatatttctgcagatggttttcatttaacagacgccatgctaa

SEQ ID NO: 231472 - DNA, 392 bp, Glycine max
  unsure (1)..(392): unsure at all n locations
agcttatgagcttcttatactcctctgcagttttggcctgnncttcaacccaactttgtcacaacaaggttccctcccattttataccaaaagggaaaaatgctacaaagccaagttattatgaataatgaataacccccctaacacttaggcttcaaattgagatttagaaatagagaaagagacacacaaggagagaaaaacggagtttaagggagcaaagaggaatgaatatgcacagaagttaggatagagcaccaccaccaacttattggtatggaatggtccaagtgtgggtcatgtaagtgaaaatataatgaggtgttgaggctactaatattgttgaagttgacattgaaggaaatgccattagaggttaagacttaagatga

SEQ ID NO: 231473 - DNA, 480 bp, Glycine max
  unsure (1)..(480): unsure at all n locations
tgcttctaggtagtaataattttatggaactgtacaacctttattttgtggcttatcagnttggcctaactcaataccttcttatggcctttttgaccatgaccccacctacttcttgtccttcattgttttccaatgaggtaaagaacatcattgaactaacctaatcgatgcttaacctatttaaattccatttgtttttgcttgaccccaagaaaacaactagttttctcaactggtggcctgctgtgaaagacacccttttttttcaaaaggttttcctttntaccttttgcaagccaatgatcattttcaaccagatcccattgctcaaactccaagacaacccaagtcttctcctcatccggtttcttttttggctaagaagaagaagagctccccagctagaatcaccattaatccttcactaactccacanacaggtattattttcactactacaaaaatgatattctatga

SEQ ID NO: 231474 - DNA, 344 bp, Glycine max
ccaagacaaatcaataacgcgagaaatatgcacccatataccatcaagggcacttccttttctacatcattttcaccaactgccaaagcgtatttgatacttacatcacacacaatttcctggctaaatacacatacattcatactctaaacattttggggtaccaaaaattgcacatgtgcacatcttggtatacataaggtgctacatttcatgctcttttcaagtttttgctacctaaagccgcattgcaaattcaagtataattttctttgctgactaaaactgtattcaaattaaaaggtattcatttttttgggaatgtatcttctttacataacaat

SEQ ID NO: 231475 - DNA, 368 bp, Glycine max
  unsure (1)..(368): unsure at all n locations
agctttacacataccgtgcgcttctttatattaacaagntataaaatgttagatattgtgagttaataagaaagatgattcaaatccagcacatgaaaacaaccttcttggaagcaggcaataatttgttttatatatgtttaacacaaaatgggtaggtatcctcttataaaaaactggaaagcatcttatcttatgcatacaaaatgtttaattatatattatagagtcaaagaaatcatatgaataagaatacacgataaggtggaaaagtaaagttatgtaaattgctaacaaaatttccaatccgtgtaaaagaaattaaaaccttcatatgaataataatatacggtgaggtgggaaaagta

SEQ ID NO: 231476 - DNA, 467 bp, Glycine max
  unsure (1)..(467): unsure at all n locations
aactaagctgctgccccttcacaggatgccaaccttattatgtcaatatgtagataaagcccaatattaatttaagaattgcaccaacagtaccacaggtactgtgtctgaacacattntaagaaacatgctaatgaatttaattggttcaaggcggtcaattagcacggtgaagttctaactttattttcaatgcatatttatgggatccaaccgagaatgtccatttcaattgtgtgtacaagaagcgtgagtgaatgtaaacctcctaatatccgtctttcattcctacggataaaaaaaataaatccaagaaagtttgaaaaacatatttattctttaaactntntatgtgccttcattgactatgtttttatatgtatcggcagcaaaatatatttttcaaaaagtcattgatgaacaacttgaggaataagcattttacaagcagttcaaagtacaaacca

SEQ ID NO: 231477 - DNA, 394 bp, Glycine max
gcttcacaaaggggccagatccagtaggcctgtctggatctttaaagtgaggatcgcaaagcttcacaaagcaacacatgttgtcttggctgaaagtccttcttgagcagcttttcatcatgatactttttgaccttttctttatacaactttgaagattcataagttgttaatctcatctcttccaaatccaaaagctggagcctcctttgttctctaaatacgacttcatcaaagttcaaaaacttcaaggcctaatatactttatattccatctcaactggtaagtgacaagacttgccatacaccatctgaaatggagataagcctatcggagtcttgaatgttgttctgtatgcccataaagcatcatctaatttgatagaccagtctt

SEQ ID NO: 231478 - DNA, 433 bp, Glycine max
cctagagcttagctacacacacccatctagaaactaagctcaccttcttgagaagcttccttgagaagctagagcttaactacacacacccatctactcaaaatgcatgaaaatacaaaaaagtcccttgaaatacaaaaaagtccctactacaaagactactcaaaatgccttgaaatacaaggctaaaaccctatactactagaatggtcaaaatacaaggcccaaaagaaggaaaaacctattctaatatttacaaagaagagtggatccaaccttgacccatgggctcaaaaatctaccctaaggttcatgagaaccctagggccttctttagtagctctagcccaagcctcttggagtcttctaaccaatacccttggggggtaggaatgcatcacgatcattgtgcagagcacaatactaacaagag

SEQ ID NO: 231479 - DNA, 396 bp, Glycine max
cacgcatgcacagctctccaaagggggctgtggcataccatttattcttgaaccattatcgatgagtaccttagcgacgacatggtccatgcatctgacagacacatgtagagctttgttgtgccctttcccctcaactggaatctcctcctccgcaaatgcgacgtagttattggtagctatgtgattaacaatgccttcaaagccttcgactgaaatgtcgtgtgctacatgggcttcgttgaggacctttactaatagtgcacgatgaggctcggagctcatgaacagttcgagcaaggagatccttgcaggagttttattcaattgctcaaccactttaaactcactttgttggatgagacgaaggaactcatgagcctcctccaaggtcac

SEQ ID NO: 231480 - DNA, 426 bp, Glycine max
  unsure (1)..(426): unsure at all n locations
ctagggcaaaattgggtgttgaagagtcaaattttgattcggtgagattttaagtgtaaattcagtttgaacaagtctaaatagatgttatgaactggtgtgaggtgagagtttgcttccaatttacctcattctaaatttcacttttcaaacctagaaaacccactgaatggaggggtgttggacacctagatcctgtgttgctgtgctttaaagcttgactttgtgttacacatgattgatacatgatttgggacttgtangaattgatttgggcaagattggatgagggaaagtgtgatnttcgaaatctgcacttatgcagaattttgctgtcaaaatacgtgcagcaggattatggcttgtgcacaaaaatgcttgtgtgtggttggctgtgggaagagtagcacagaacgagttctggat

SEQ ID NO: 231481 - DNA, 391 bp, Glycine max
  unsure (1)..(391): unsure at all n locations
agctagctagctngatactgtagcacgtgtgtattttatgactatgcagcatgcatgtgcccttttaactttgccttcctcctgtctgcagggtccccaaaacattaaccatgtccatatggatatggtcctcttgttgtaatttctatagcgaggcatccactaatgtgttttcttatgccataaatattaaaaaagttgttgagaagtactgtagtagtgaataataattcaacgtaattggtctttattctctcattgcattgtcaaatgtcgtggacttttaaccaacaaaaatataactaaacaattcaacgttttgaaaactggaaaatgctattggagaaaataatgttaaaccgattatgtggctacgctaaacgcttccacc

SEQ ID NO: 231482 - DNA, 474 bp, Glycine max
  unsure (1)..(474): unsure at all n locations
tctatacnngttcctttttattccgagtgtgtaagagtgtggcttataaatcaggaaggaaggttgggtaaagaagggagagagaaagcacgcacctacagtatcaaacattgaagaagaaactgtccacgttggcaaaatcgtcggctataattggcacacgtttcgtcacaaaataagatcacattttaatagtgagtaactgacggtgttcctatcattaccttttcttttcttttttagttaaaaattctggtaaaacggttcacacgctgacaagctaacactgtttccccttacggcactcaaccacagtgtaagaataatttcgaggcttaaccaattatactgttagttnnttttttattttaattatttatattctttaacatttcattatttatctaagagtctctctattttttatttgtcaatcttaataaataaattacaggtactcacgtctctattata

SEQ ID NO: 231483 - DNA, 349 bp, Glycine max
  unsure (1)..(349): unsure at all n locations
ggagtagntcaggctcacgtaaccacaagctgcgataatatgtgaacatggatagtgaagcgcaaaataccttccgcattaacaataatgaccattcaagttaactgtccacttttgccgccacgttgcgtaatatgattgaaggtctcctctacttcaaaccttgtggagtggatgtcatacacacgaacgatgtgcgaacaagcttgttcttgattttttctaagttctttaacaagctctgaacaatatacttgcccttcatttaactggctttgggcttggcggccacgctcaacaaagtatttttgaaacctactgtacgttgatttgaccaacgctgttatgg

SEQ ID NO: 231484 - DNA, 469 bp, Glycine max
  unsure (1)..(469): unsure at all n locations
attatntactctattnatnatcngtggaggagtggatataatggaactctatnncatttcctatcaaatgaataaatcaagtatatatatatatatatttcaaagtattattttattacaactattttttctttatctatttaattataaaaaccttagcatcctctaaaactttatttatgtatttattgttactaaaaaatctctttaatttatttaaaaaaatggaatgttacaagaagcaaggtagtcacactcaagatttactcagacttggaaaggggaaacagattcgtaaacagaatatatcaactagaatttgctcaggcttgtgaacctgatgctggtatcggatcaaacgagagctctgattatcgatatgttgggaaaaactctcaaagacacctctatcataataagagagagaataaattatagaatangacctaactatgacaacattgataca

SEQ ID NO: 231485 - DNA, 413 bp, Glycine max
  unsure (1)..(413): unsure at all n locations
gggatccttaagcacctgcggcatcaagctnttataagctatgtctaggttgtatttaggtcataagctatagcctctttcttttagacctttgttatatatatatatatatatatatatatatatcgcttttggagaagggggcacggtttatgggctttccttcaaaatcggtgcactaattatgaagcgtgtctctagagtgtccttctcaatacttattaattgattcatatgaagaattccgaccacaaataggattgagaaaggggaccctcttttccttgtctctttattctttgggttgagacactatcagcaatgttgaagcaggccatccggaatagagtaccaaagatttcacatctctcctttttttttcagttgatagcattatcttctagagacgcaaa

SEQ ID NO: 231486 - DNA, 418 bp, Glycine max
agaggcaaatttagtcatcctgcttggacaaatgagaaaactgggacaaatgaagaggatgaggatgaagtaaaagcccatgctgtgactgccattcctatatggccaagtttcccaccaacccaacaatgtcattactcagtcagttacaacccatctccttacccaccacacagttatccacaaaggccatccctaaatcacaccacaaaacccacctactacacgaccaatgctgaaacaccacttttagcatgaaccgaagcaccaaccaagaaatgaattttgcagcgagaaagcctgtagaattcaccccaattccggtgtcctatgctgacttgctcccatatctacttgataattcaatggtagccataaccccaaccaaggttcatcaacctccatttctccgagaata

SEQ ID NO: 231487 - DNA, 386 bp, Glycine max
agcttggggacagtaaaatcagacgtcacgcttatatatgagctactcttgtttgttacaataaactagaaaaaatatactccatgtgtatgggtgatctttgtactaaccaatatttatgaacaacgatagacgttaacttctaagggtcacatgttaaaaaaaaaaaatcaagggtcattacctaaatatttcgccttaagataggtttatatatacaaagaaaatgaatgtgcgcagaaacatccttcatttccatcatgtatacaatgatatctcctatatttcactcaaattacacaaaaactcttttgatttgcttaaaaccatttttgtgacacccacacccatatcgatatcatatttagttttgaaaattgaaaccg

SEQ ID NO: 231488 - DNA, 202 bp, Glycine max
ccaaatatagctggaaaagtataacctggaaaccttttggtaccaaggttacacatcatggcaggggtcaaaatgttatgttctagggactagtttgggaaccaactaatcgtaaaaaatattatgatttatttacaaaacgggcttttttaaaaaaatgattacctactactattgtacttttcactgatacaaatacttt

SEQ ID NO: 231489 - DNA, 417 bp, Glycine max
aattaaggaggtgcatttgaagtcgatctgtaaattaatagtgagaaatatattttaacggtaagtaacaaatatggatctgattcttacacctgcaactatcaatgattatctgtacagaaataaatatattgtatgaataaaatatagagcacttggcaagctatgcatttcagcttaattataaatgagttaccgaccatcctcttgagatacacagtactaactaactccatccggcgcatgcatcatcaatctcaacatacaaggctaagcagctgatggattcaaagaagtgtaacaagatcagagaagttgttatgcttcaacaaatcctcaagaaatggaagaatgttgcaactgcttccaacaacaacaacaacagctccagcagtaaaggcatcaagttattgaagc

SEQ ID NO: 231490 - DNA, 387 bp, Glycine max
  unsure (1)..(387): unsure at all n locations
agcttggntggtattcatgcaagctataaattttgttttacaaatgcttgggttagagaggagatcatctatatcatcatggtcttggtagagaacgctatgttggcctggaagatggaactgtagcctctctacaaaaagttttctaccatgtattggaaaaccaaagatcctccaagcagattcacatggagaaatgtatttttaataaaaaatatttaaaatacaatcataagatgatttacatattaaacttggttcatacctgcgatccagatattccttgatttcatcatttggagtgtttgcatgcgaaactgtttcattgtcatcatgtaccatcacagccgaaactctatcatatcctttattgatgtacttgaataa

SEQ ID NO: 231491 - DNA, 441 bp, Glycine max
  unsure (1)..(441): unsure at all n locations
ccatagatatcatctgctcggggcttcaaggaagaagagacggggaagttttgtgatanaccaccataagaacatatgggatgttctaataacggtattggatacacaggctttaataagtgaaaacacgtgccaccctttccattacagtcctctcaccgggtggacggtgagccatgatcttagactgctcaaaatcagaatgttcataactgtgatgctcaaaatcaccaataacataatgctctggatgactcaaaggtactaaatgatgtataactaatctatgaaatggcatatctatcataggatcaaacggttgtatgtaagatggaatgcctctagtcatacactatagtacacatgcacaactagtagcactcttatgcaagtaacaatgtgtgattgaactacaaccaccattaaacgatattcaaatga

SEQ ID NO: 231492 - DNA, 384 bp, Glycine max
agcttgaggaatctcaggagaactatttttatcctctatcgctgtcaaaatacacacatgagtctgcttataggtaaggtgatgtgccatcattatcttctattttctaaaccctttttgcaccattttaattactgattggccttaattgccaattaatcacgcagttttattatttgggctcatttagctaatttgatgtttttaatctaatttcaggaattaatgaaacatttggcttaatccggattttggttatggacttgaaaaaggcaaataaaacagcgcttaccttagttaatttttaattaggaaattttgcaattttattttatgttagtcaatgtttatttcgttttgggccacagtattgtaatagggccc

SEQ ID NO: 231493 - DNA, 461 bp, Glycine max
  unsure (1)..(461): unsure at all n locations
tatgcgcatatttccttacaaacgtgtgtgttgcacatgtatttctattaaccgcaaaaaatgcacccatatacaatcaaggcagcttcgttacctagattatttacacgtacttccaaggtgtatttgttacttacatcacacacctccttggctaaattcacatacatgcatactcaaagcattttggggtaccaaaaattgcacatgtgcacatcttggtatttctaacacctatacatacacaaacttcatgatgaatcttgactatctacacaataaggtgctacatttcatgctcttttcaagattttgctacctaaagccgcatgcaaattcaagtattatttcctttgctgactacaaatgtattcaaattaagaggtatacattttttggtaatgtatcttctttacataacatgcaacataattatgntatattttgtgagacatttgact

SEQ ID NO: 231494 - DNA, 349 bp, Glycine max
acccaactagccttgaatcagaaatttgtacttgtcgcaagagtctggggtttatgctcctctgccgaccaccacacaaacctttgcccttccatgcagcaacctggagcaattgagcagcctggagcttatgttgcaaacctttacaatagacctcctcaacctcagcaacaaaatcaaccacagcagaacaattatgacctctctagcaacagatacaatcctagatggaggaatcaccctaatctcagatggtctagccctcaacaacaacaacagcagcctgcttcttccttccaaaatgttgttggcccaagcagactatacattcctccaccaatccaacaac

SEQ ID NO: 231495 - DNA, 362 bp, Glycine max
ccctcggaagctaataaaagagaaggagaattttcaatcaaaggaaaaaggagaaggaaaatttctcatcaaagaggaagcaaaacaaggagagaaggaaaatttccaatccaagagaaagctataagaatagaatgaaaaattcccaatcaaagaatgagagaatgaaaaaaagagaagtaaagaagaagaaagctcctggtcaaagaaaccagaataaatgtgccgagaggtccttggaccatacgatatctgaacaatacagaattgtcaccaaatgaacaaaagatagaaatggaaaccatgacctaaaagcggtcttctccctttgattaccaaccaaaatcctgtgcgctagcgac

SEQ ID NO: 231496 - DNA, 383 bp, Glycine max
agcttatctttatcgtagatatttcaatattttaattccaaagaaatcattagggggaggttacatctttcgcatattctctctatagaactaaacttccctagagcaagtaacgtatagaaatcaccactcaataatatatggtcccttcatataattgatttaacttttttgccaactgccacacaccaaccatattcacaacaacaactaagcttgtctcaccaggtgtactcagctacatggatcaattgacatcattggtcttcaccaataatcaaattttcagcaataccattaagcagtaataacaccattattattattattattaaaggtatcttggatttttctccctccattttaaatggattttatatttg

SEQ ID NO: 231497 - DNA, 449 bp, Glycine max
  unsure (1)..(449): unsure at all n locations
acctctgtgggcgcttaatttctagttctctcgnaacaaactttcataactcaaaagaacctttgcactcttttgttctctaacacattaatgacactttttaggccttgtatacttatcagctaacaatatgcaaaaaaaaaaaaattagttttcgcccaagcaaaattagtttctgcatggacaaaacgagtttttgcacgaataaaaaaactagtattatttttcaactagtcgtccaaaataagttggtgtgccacttgtactcaataattttcaagaccagagttttctagtttccatcaaacttggtccttcgtcaacaccactgactttacatttagtacacactagtcgtaagatttcggtgtttcttgtacaaatatttgaaaacagtaaactgagatgactcttgtaattatatggacggaanatgatatcangtacta

SEQ ID NO: 231498 - DNA, 394 bp, Glycine max
agctttaaactatttcaggaaggagaatttatatcttcccttcaagatctttctacaaatcattcattctatttactaaatacaaaagaattaaatgcattttatatttccaaaacattcactattttacttaatacttagtactttataaagtattaagattagtaagataaagaagaaaatagtattacttttccaagaattgtaaactttccagtaagttttttaaagaccagtcaaacaaatcttaacgaaggaaaattcctagaggatagtattcacagcgaattattccagggaatgttatccataacccttaaacgttgaagcagacacccatatgaaataaagggtgaatgcgctacaatatcatcacaactcacaagtcatttat

SEQ ID NO: 231499 - DNA, 487 bp, Glycine max
  unsure (1)..(487): unsure at all n locations
ctaagcttggtcattagtcttaagacttatgagatgggtgcgaacattctatttctttaatcccataacagcttataaaaaataaataacaataaaaatgtcagaacgaagctgaattctaaaaaaacaataaatatttaccgtaacagtttcaacagaataatagccacgatcaacataatctcccataaacaagtaatttgtatctggacactaccaacaaaaatggtaacaagaatcagtatttaacaaagaggttccatatttcaactaaaagcaaaaaaaaatatatttaaatatgcaagggtgagatgctaaaaagtaatggttcaaccgagaataaaataagcacatagcacatttgttctcaaatttgaaataagacaatgagagactgagtatgtaactgaatggcaataaacactgcagcttgtttctcaattaanaattagactttctgctatgaaataagaaataggccaaacct

SEQ ID NO: 231500 - DNA, 390 bp, Glycine max
  unsure (1)..(390): unsure at all n locations
agctntgatttcctttgtccggaaacctttctttctcatgtgcacccaaacccaatctccgggttcgaagacaaccttctttctccctttngtggcttgtttagcataacttttatttttcctctcaatttgatctttgactctctcatgaagcttcttcacatagtccgcctttgcttgaccttctttatgcttaaaaacagaaacattaggcataggcaaaagatcaagaggagttagtggattaaaaccataaacaacttctaaaggagaacaattagtggtgctatgaacagctctattgtaagcaaattcaacatggggtaaacaagcttcccaagttttaagttcttcctcaaaactgtcctaagcatagttcccaaagtccta

SEQ ID NO: 231501 - DNA, 469 bp, Glycine max
  unsure (1)..(469): unsure at all n locations
ntgagccanaatcctgactcaccatataccttgacccaggtgttattgtaatccttaccctcggaagcaaaaaaagaatagaggggaaatttccaatcaaagaagaagagaaggaaaatttccaatgaaagcaaaaaaagaaaagaaggaaaattccccaatcaaagagtgggagaaagcaaaaaaagaaaagaaggaaaattccccaatcaaagagtgggagaaagcaaaaagaaaagaaaggaaaattcccaatcaaagaatgagagaaagtaaaaaaggaagaagaagaaggaaagaaagctcctgatcaaggatcgaaggaaaaacagaagaaatgtgcagagaggtctttggaccggacaatatatgaacaatacagaattgcaccaaatgaacaaaaaagaatgaaaggaaaccacgacctaaaatggtcttctncctttgattaccaaaccaaatcccgtgc

SEQ ID NO: 231502 - DNA, 363 bp, Glycine max
tctataaaggatattgacatcacctccacaaaattaaatagtgtaggcataaccttacatggagaccatatatgagcttgctaagataccaaacataaataaggcgccaaatcatatttagcaccactgaataatatccattctctgctctttctctaatctttaattaacttcggatgggaaacaatcaaacctttattaccttaaataggaaacaatggcctaaccagaatttctattacctccaaaaccaaactctagaaatccagtttcgttcaaatgactgacatcaccccacacttttaagggccatttgtcctcaccgcacaagtgaaaaacactaacacatgtattgagtacctt

SEQ ID NO: 231503 - DNA, 444 bp, Glycine max
tactaagcttgaggagttgatgagctaggccatacaaacgccggagcagctctcttttttttcacgattgttaggattcgattactctatccaatatcaaacaagaaatatgaatgtggttgcagacgcgttgccacggcgtgtggagttgcccaatgcttcatgtttcatcctctcaatgacacattttgtgtttgtggaagatctctataaggagttgcaatcgcataaagacttcatcactctgagggagaagatccatgcgaacctataagatacccggatcacgtgtaacaaccaatatcttttgcataagggcgaatctggtaccttcagacacaccatcataaggctctgttacataatttatcaactcaacacgggtatagggtttcaaaaacctgatcaaagcggaaacttacatgcaacatagtatgacattac

SEQ ID NO: 231504 - DNA, 346 bp, Glycine max
aaaagataaaaatatgtcctaaggaatagtatatttaactatgtaataagcaacaagaggaatgaaaaattaccttaatctaatttctcttctcttgtccatggaggccatggccctcaaaaccagtttctaagttgcaaacttgtatcatttggagctcacattatctttgtcatgccaaactccactaaaccttcaggatcttccgataagctgcatgatgccttcattcgtctcacaaattagcaactatccctgtgagagtctatgaaattcatgacccacaaaattgatgagctctttcatcgtgtttcccctttgatgaccacttcaccaccaattcctt

SEQ ID NO: 231505 - DNA, 478 bp, Glycine max
  unsure (1)..(478): unsure at all n locations
actaagcttctcagggaagtttctcaagaaagcttgttgggaagctacctattctataaatagaagcatgtgtaacacttgttgtaactttgatgaatgagagtcttgtgagacatacttcaaagcttcacttctctacctcttttattccttcaatttcgtgctcccccctctctctatatctccctctttcttttcctccattgaagcatccttccaagcttcttatccaaggctcatcttggtggtgaagctccttcttccatggcttattccctagtggatggcgcctcctctccgctcttctcctttgtcttccgctgcatctccatggtggaaaactaccattatagaacctcattgaagctcaaagatccagcctccatagaagcctcacaagcaagctttcatcacaggtttccatgtcgtgtgattccccgagatgaaacanacattcatcactttcgccttcgccacg

SEQ ID NO: 231506 - DNA, 324 bp, Glycine max
  unsure (1)..(324): unsure at all n locations
ccgaaccatcaaaccaatggaatgtatgcggntacaggttcttacggaggacaatccccaggcgctattgctgaaggtcgaatgctgcacgaacagagattatccacctgcaccggaccattatatcaagctggccactgggaacgcaccctgccctaatggtgccactatggctgggaaccaccaaagacccgccccggaaaagatctaccccaaccgcgtcgcgcacatcctgaatgaagagaccactcgcaagtacttgcaacctgtgaaaagataaatgacattgtggccacgccgggatccaacatggcccctaaagcc

SEQ ID NO: 231507 - DNA, 414 bp, Glycine max
  unsure (1)..(414): unsure at all n locations
ttcatactaagcttaagctgacgttctacagctgggaagtcgaggctttaattactcactggntctgtacatccctatctgcatccatctgttgaaaattattgaagcataatcttttttcaaacctgtcccttaatatttatgagtgagagaagatcaatcaatattttaatattttgcattatctaatgacgggtaattcagtctaatgaacttgttttgcttataattgacgctatctaatgacattcttatttcttgtgcaataaccttaaagtgtggatgacgaatgcgaagtcaattcttgatgatcgaagaaaatctgctatatttgtataatgcattatgggtgatgtgcgttctttctatgttaccttgagatgtgaaacacaacttcttatggatgtcttcttt

SEQ ID NO: 231508 - DNA, 402 bp, Glycine max
  unsure (1)..(402): unsure at all n locations
gtcacctgangcatgcaagcttgtngcccagctcagagagcgatctttctctgccaagcgagctcagctcgcccaggcgagctcaactcgcccaggcgagccacgttgcttcctccaaaaacatcagccttttggaggaatgtttnggaaggcccaagtgggcctgtttgctatttacacccccctttttactaaatgcacacccctttccattttttttgtaattctttttccgtaacnntacaaaactttacgaatttcgtaacgatacttattttttctttcgcaaggttacgaacccatacgaatacgtattactcttttttacttccaagaagtaccgaaacttacggattgtgcaaaaacatctctttttgacttccgccacattacggaatttca

SEQ ID NO: 231509 - DNA, 412 bp, Glycine max
  unsure (1)..(412): unsure at all n locations
cgctggaaacctacctaaagcgaaatggccttagtagcttgatatcacagcagcaaacaaattcagcttcaaatgtgcaagcacagacaaccaatgatagtgagggaaaacacactgaggattgtggaaccgctttggttattcatgagagggaaagcagtcctgaagagaacagtgggcaagacagagagcaaaacaattcactctcatgaaatcttgccagttatattataatttttttgtcctttgttttaactcaaaaatcattttacaagaatccttgcataaattataaaattataggacgttcattngtatgactatattatattttctcgatattgctcgctgtgacttatggatgcgaaatttccccccaaaactcaataacctatatacgccaaagcgtgtg

SEQ ID NO: 231510 - DNA, 402 bp, Glycine max
  unsure (1)..(402): unsure at all n locations
gaccttaagtcacctgaggcatcaagcttgncatgagagggatgtggggtctaatttcctaaagggcgggagtattgcaacatcctggaaatttctacccggagttacggaaacgatgtattttgaatgattatatttatatataaggattgctccgtgtatatgtatagatatgttcttggtagaaataggaataatgggggcaagatatgcgggttggactaattaagggagagaaatccataactgggaggttatgggttaattcctaattaattagttaaaaatcatcgttttgcgcgcgacttaaaatttaacgaaaccaacctctgaaccaccgttcggggttttattctgagccgtttgatataatatattgcttgcttttgaaaactggccccg

SEQ ID NO: 231511 - DNA, 395 bp, Glycine max
tcatctcccacagcaagccggcctccggatcattctttccttataatggaggaacggagagcttaataccatcaattcggttttgtctaagaacaccatcgttagctcttctcgtcctttcttgttcattatgatctatattgtccatttgattcaacctctcatggagcgcatcatctcgttgattcattaacctctccaaatgttgcatcaaagctcgcatttggaattgcgaacgccccactccatcattaggagtagtacctgacatctcagacaatctaatcagacgtcccaagacaattatagttgctgattgaatacctcacccactcaagtgcatcacacaattatggcttttctcttatgaaacactcttgcgctttaccactcta

SEQ ID NO: 231512 - DNA, 334 bp, Glycine max
acacgaaagtcactgcaattgaggaggcccactacttttgcaacatgagagtagatgaactcattggttcccttcaaacctttgagctaggactctcggataggactgaaaagaagagcaagagcctggcgttcgtgtccaatgatgaaggagaagaacatgagtatgacttggatactgatgaaggtctgactaacgcagatgtgctccttggaaaacagtccaacaaagtgctgaacagaatggacaggaggcagaaaccacatgtccggaacatccctttcgacatcaggaaaggtagtgaataccagaagaagtcagatgaaaagcccag

SEQ ID NO: 231513 - DNA, 393 bp, Glycine max
ctcacattcttgttctttctttgactaacatacacgctagctcaaacttatgaaaagaaacatagtcttcatcataaccatgcattcaatcaaaaagtagtctataacacccatttcacaaaaagataaacgtatgtcactgcataatcatcatgatcaagtaaaactgttctgtatgcttcaaaacatgcatactaactattcacaaaaagtataagtatataattataaacagaaaccaaaattactaaaaacaatgtactgaaactaatatagttataatcattatccaataagcaaaatcatcaggaatttaaaattcctgagacagatcctgggtgtcctttgatgttcgattattttgttatggtattttatccgggttttaatttc

SEQ ID NO: 231514 - DNA, 409 bp, Glycine max
  unsure (1)..(409): unsure at all n locations
atcctaagagtccacccgaggcatgcaagctggcctcaaagaggaggaagaaagacaatgttgttctaangaactacttccgccccggagtacgacaggtaccgctttaggagcgttgttcaccaccagcgtttctaagccatcaagggatggtcgcttctccgatagcgacgcgtccagcttagggaggacgagtatactgatttccaagaggaaatatggcgccggcggggggcaccactggttactcccatggccaagtttgatccataaatagtccttgagttttacgccaatgcttggccaacagaggaaggcgtgcgtgacatgaaatcttgggttaagggtcaaaggatcccgttctatgccgacgctattagccagcttctgggatattcgatggtattgg

SEQ ID NO: 231515 - DNA, 119 bp, Glycine max
gtatcgtaattcattacacactctgtctgaagcatgcatattatgtatcgcacgcgttaactgatgacagttgccggatcctggtatcaataggggactaccatacactgatgatatga

SEQ ID NO: 231516 - DNA, 370 bp, Glycine max
  unsure (1)..(370): unsure at all n locations
agcttgctctaaatttacattgaggtttgtatttattggagggggttgtatgccatttttgntttaagggtagcatttcttggtaaaaactaactttccaaatgtttgccttcacgggaatggccccgaagaagcttgcctcaaaaaggtccaggaaagacaaggcggccgaaggaactagttccgctccggagtacgacagtcaccgctttaggagtgctgtacaccagcagcgcttcaaggccatcaagggatggtcgtttttccgggagcgacgcgttcagctcaaggacgatgaacatactgatttcaagaggaaatagggcgccggcggtggacattactggttactcccaaggccaagtttgat

SEQ ID NO: 231517 - DNA, 415 bp, Glycine max
  unsure (1)..(415): unsure at all n locations
ctcaaccttataggcgacacactgtgtgctgtaaggattaattatatgctagtttaaggtactttggccttttttctatggtggagagaattggtgttgctgcaaataagttattattgcctctttcgaccaagatccatccagtgtttcatgcctcacaactcaaaccttgccatggaaatcacactcaacattatgttcccttaccattcacttttaatgaacaactaccaatcattcagccacgagctatcctgcaagatcgtgttattctcaagggacaaaaacaggttcaacagttattaattcaatgggaaggtcttgatgagtctcangaaacatgggaagataaagacgtgtttgaaagtgcatatccatcattcaaccttgaggataagaatgtttttaaaggggg

SEQ ID NO: 231518 - DNA, 353 bp, Glycine max
  unsure (1)..(353): unsure at all n locations
accaaaaaccatgagtttttccattagaaaaggctttccataggagttccacaaaccagatgaagaatatgaaccatgatatggagtcctgtggtatgatgaggaaagcattcaaaaggggttatccattaattttaagggctttaccaatcctccattcctttaaatctggacacaaaaacctgtataagatgaggtgggaatagaagaaatggatagttagatagtaaaagagatcagtcacctctcttaatccctttcaacattgaaaaaccctcattcctctctatcttattttccccttcaattgctcttgtgcttngaatccctccttctcactagttgataatggg

SEQ ID NO: 231519 - DNA, 314 bp, Glycine max
  unsure (1)..(314): unsure at all n locations
cttaccgagcaagatgatccgtaagacacttgcggatcaacttgatccgcgattgccatatggatcaactagatccgtaacaaacatgcggatcatctatgtcaactacggatcaagtatatcttctgcggatcaaaaaaacctacgcgcggatcaaaatgaatgagctgggtgcacataaatattattaaaaatacatgagggtatgtttggctattcatgtaccgtgttgggtgcacctaacagcacccaaatgctntttatttattaagtccttcatttgaaattaagaaaatattaaacaacactaatta

SEQ ID NO: 231520 - DNA, 140 bp, Glycine max
cacacctcccggagttcaaaacccatcagagactggctcatatctcaatccgccctgacgagcgcaacttcgcatggctaactaactaatggattgcgggcttgaccctggacggctcgcttattgctccttcaccatgg

SEQ ID NO: 231521 - DNA, 342 bp, Glycine max
caacgtgcctactatcattgttatcatcttcctcttcatcattgggggcactacttgagcaccccgatccctgcatctttgggcgttttaaataaaaagattcatgtctccttgttgcacatgctttttagcattggtttttccggccctacattcgattcatcttgttcccctctcctggacgataccatgcggacttaaagcaatgggctctttaagcttctactaatactcttccccgcttttaacccccttcacaaatctataactcacaatcccctctttcttatttcccctctaagtgttcctccgctttaaatccctccttctaccaaatgaaca

SEQ ID NO: 231522 - DNA, 210 bp, Glycine max
agagagtcaagatccattgagaggaagaatgaagtctatgctatacaagccaacaaagggagaaagaaggtcgtctttcaaccccgagattgggttagggtgcccatgagaaacaaaacggttcccgaacaaacgaaaatcacagcttctaccaatgggagaaggaccattctaagtgcttgtaagaatcactgacactgcttaacaact

SEQ ID NO: 231523 - DNA, 382 bp, Glycine max
gaagagaggttcatagtagcttgggagacaggttctcagagacagggctcaagagaaggaaggtcagatttgttgctttggagggtattcttaccttcgcagaaagtgaaagagcttccagtgttcgaccgcaacaacatggaatatagcttttacaacaacagcggacagaagaagagcatgagacataactccaacaacgtaaatgagaaggcgatagagcttcatgaaaaggtgcgagagaggcaatgagagggcacaagaatgaaaagggaaaactcgtcccctttaaagacagtttttgaaaactgatgttgaactatttctttcaacatcatttcttgaagaaactgatgtcgtaatgcattttcaaaaacgattt

SEQ ID NO: 231524 - DNA, 395 bp, Glycine max
cgtctcaaaacaaactaggatttcaacaattccgcaatataggaataacctaggtcgactcaaagacacaatccaattaagttctaacttcaatttacttataaatcaaagcaagggatttcatctaacatgttgcagacaattaaaaattgaaaagcataatcataaaagttaacatgtttataaagccgatttaaggagcatctatctaattcaccaaatccaagaaattctaaatatcacagttttcttgaaatgatgaccctattatgaagctttagtcaatctaattagaggtaatataatcaaaataattgttggacaagttgcctccgaatattaagaaaaggggtgagtaattttaacggtcttgctaataaaaattatcttctaat

SEQ ID NO: 231525 - DNA, 391 bp, Glycine max
agctagaggttcaaattgttggaacacagagctttcactcttatcaagaaaaggatgtataatctataaccaaagactcaaaaaaagggggccattccgaaacatctcctgtggttcttcaagaaggtgagaaatcacaagattccagtgcaaatgagtctcatttggctgctgaacctgatccttctcagctcaattctggaatcaatcagagaccaaaaagggtcactaaacctcctgaaagatatggttttgaagacatggctgcctatgcattacatgcagctgaagaaatagattcaaatgaaccagccacttaccaagaagttatcaatcatcctgaagctgaaaataggttttagctatgaaagaggaaatggaatctttgtat

SEQ ID NO: 231526 - DNA, 367 bp, Glycine max
  unsure (1)..(367): unsure at all n locations
ctaagcttaactacaggtnggctntaagagatgtgtgctagcaattgagttggctacgatgtgagacatgtgaggaggcagcattagcacttttccgagcatcgcttgttgatgttctcacatatattaattcatattacaagcttatcaaactgatccattgaatttgtaaaatacaccctccaattntcatcattaacgatgatttgacttgcttggttggaggaaccacttgcttgagcatgttttgcacaaaactgaacttggcactctaatgctnggacactgtcttgcagaactccatttgagatgtgtttcaggctattcttgcatgacttcatttctacaaaacaacaaacttacatac

SEQ ID NO: 231527 - DNA, 345 bp, Glycine max
gcactaagaatcgaatacaggatcgtatcactacccaaaccgaatgcataaaggcccttctctaaaaggagtctgaaatgtgaatcgtaaacgtggaaaatgactaccactgggacgtaatcgaccaccagcgaaaaaactctagaagttaacttggaaaagccaggaccatacaaaacataatcgtgtaatcaagaaccaacaagctgtaatcgattacccccgagagaatctctgacaaaaattccgaaaaaccacatccctatcaaaacttttgaaaagccaccacggggctataaatatgtgacacggttatgaaaacccttacaaatttccggtggaacc

SEQ ID NO: 231528 - DNA, 277 bp, Glycine max
ggtacctggagatatgtcgcggtggtcaagataccttggggacgccaggtggggtgctattgaccaaaaccaatcttggtcaatcccgacccaacccgggcatagtctgtcagtgagaacctgtgatgtacctatacaggcgagcctctgggagtctacagagtaaaggaactaagaccacgaagcaaggaggcttgtggtggctggccagctgtgaattttgtgtgacatgtggtttgtggcctctggtaatcgattaccaagggtgggtaatcga

SEQ ID NO: 231529 - DNA, 401 bp, Glycine max
gcagcatcaagcttgacaaccggcttgtgaagaaatatatttattaataataactattatctataccatttttatgacattatgaatgacttcatgaattgagataaagtgcttaaagaattcacttgcatgtgaaaaattttcaaaaagaaaaagactcatgttaaaaggataatgcaaccagattaatactttcaaagaaaaaaatgttttgtatagacatttttcacacaatttaaatatttttatttgactatattagtataaatcatctctaatccatgtattttttaatattatactctctttttcattttcctatgatatactttgtgtttaaataacttgaattcaatatgactttgtatatcaattatttttgaatttgtatattacttata

SEQ ID NO: 231530 - DNA, 155 bp, Glycine max
  unsure (1)..(155): unsure at all n locations
gagtcttcttaccttcaaaagagcttcatcttcctattgtaatanaagcatcaatcctcccttcactggaggaactataagaactcttagatgactgactatctacctctcattctctaacacaaacatggaccttttgtaagacattgggatgc

SEQ ID NO: 231531 - DNA, 391 bp, Glycine max
agctttaagctgacattgtgactggtactttttatagatatcaggctgtttctgaagagcatccatccctactactcctccttgcatatcctccttgaaatcaaaggatgccaaatcacaaggggaaccaaacatcaaatggaagttgttgttgttgtgattggcctcaaagggtggtgcattcaaagctttgaaccggccaaattgaccttcctcccttgcaaacatgtgatgattgttgttggacatgttggcttcttcaaagaagtttccttccatactgattccttgactgcgaaagaagatgtcatgttgctgctgaatgcctggctgaggaaggtttggattttctgcagatacatggttactggaacttaaaattttgttgctt

SEQ ID NO: 231532 - DNA, 385 bp, Glycine max
  unsure (1)..(385): unsure at all n locations
aatctaaagtattaaatgtactcaacacgagataatattaatactgctcaaaagcagggaaataaaaatcctgtcagtgatcctagtcctgtggtgatggtgggttctgatccatggccttctcgttcatgtccagtgcaagagtgtctgctagagatgcctgatgagtacccttcgcggtcactagatcattctaaaaataaatggctcacgtggagtgggagtggcttaagaagagtcatcactccggtctggctgaggttcctgcgctgtggaagcctcacccctatccaaaggagaaggcaggactctnggccaggcaacctgttgcaaaaacatcgtcatgctcataaccgatcgctgttggaccacatactgcaagctc

SEQ ID NO: 231533 - DNA, 411 bp, Glycine max
ttaagtcacctgcgccatcgcaagcttgccaaacctctttgctttcgcatgtgagttcgagatggccatcgccacgaagagttgctgaggagtttttgttgttatcatcaatggaaacattggtggaccagacatggttcatggctccatcgaggactacgaggttgccgtcatttgcgattgtgatggctcctacggagccgttgatgggtttgtcgcggtttgccacccatataacttctgatccgggaatgttgtcgtaccaaattccgacgtagcgggaagaggagttgtcgaagctgaagaaacccatcgcgaagttgagctcttctgagaccaaagtttcatgctctttgtccctgatcgtgacaccctgcgtgatcctgatctttgaactagctgctaaagaaa

SEQ ID NO: 231534 - DNA, 406 bp, Glycine max
  unsure (1)..(406): unsure at all n locations
agctattgaacagctcatatgtcataacaaatattaacaaactctaagacagcagtccaccaaatttgtgaacaaaatgcctgtttactacacgtggacaccttcttgtggatggttacgagctaaaaaaaataagatataattgctctttangcatagggaaggaaaaaaagttggagataaaatgtatttaataattcacgcaataaactatactatatgatgattgcgttacatgacatgacaacgtctctaggatatcaagcacgaaaactntatcaacctatcataatctctagtagaattgagagatcggagttgggtttgattctataagcatacatactttaacattgctcccacaccattcaaatttaagagttttttatataaaatcttcacattt

SEQ ID NO: 231535 - DNA, 403 bp, Glycine max
atccttatagtcacctgcagcatgaagcttctacaaaattgtatgcggtggttcttctttagtaattctgacttacagaagcctcctatccctcttccattcccacatagagcaattccaaacaaaaagatggaagaagtggaaaaggagatcttggagaccttcaaaaaagttgaggtgaacatacctctgctagatgccatcaagcagattccaagatatgccaagtttctaaaggacctgttcacccacaaaaggaagctcaaaggcaatgaatggattatcatgggcagaaatgtgtcagcattgataggtaaatctgttcctcacattcctgaaaaatgtaaggacccaggtactttctgtataccttgcattattgggaacaataaatttgagaatg

SEQ ID NO: 231536 - DNA, 469 bp, Glycine max
  unsure (1)..(469): unsure at all n locations
ctcagcttctaaagccaacttatagagaagtcaggattccacctgtctcaccaactntgtcatggtcaaaaaggctaacgattaatgatgaatgtgcaccaactacaccgattngaatagggcgtgtcccaatgatgcataccctttgcccagcatcgacaagctagtcgatggagcgtctgggttccaagtactaagctttctagacgcctactccatatacaatcagatccgaatgcacgctctagatgaggagaacacgacattcatcatngaagatgccaacttttgctatagggtcatgccctttggccattaaaatgcaggcgctacataccaaagatcgatgaaccagattctcaaacaatagattggacaaaatgtcaaggtctacatcgacgacatggtcattcaaatccanagcatagcccaacacgtggcatacctataagaggtatntattgaaatc

SEQ ID NO: 231537 - DNA, 389 bp, Glycine max
  unsure (1)..(389): unsure at all n locations
agctngtatagntccccaaggtatggtcattttatagttaaattggtaaataaatcttgttttatggttaacgttgtctctagaacatttccattgaatttaatgatgaaatctatgcattttcaggtgaaaaagaggctaagttttgaattgcaaaatgtagcagttgggctaagctcagcagctgggctaaacgcatatccaccgctaagcgcagcttcagcgcgcttagcacaaaggagaatctggcagagcattatcatcaaagttgtgcgctaagcgcgagatcagtgtgctaagcgcagaaggtgccttcagctaggctaagctcgagactggcgctaagcccaatttcacttactcacgctaagcatgagtttggcgctaac

SEQ ID NO: 231538 - DNA, 327 bp, Glycine max
ctaattagtcatgctttcctcaattagtcttctttccttaattagacatgttttcctcaattagattgttttccttaattagctctggtctccttaattaactcatattcctaggctttattttactcactaagtatcataatttatcactgttaatattctctgcacaaaaacttaaatgatgttaatataacaattatttgctaaaaaaaggaaaaattatgagagaagaattacaaattcctatataatttaaccccaaaatatactcattattagcatttatcaatgtttgacatccaatgcatgatgtaacacccacacttg

SEQ ID NO: 231539 - DNA, 335 bp, Glycine max
  unsure (1)..(335): unsure at all n locations
attaagggggtatgtgtttattatgtatagttaanaaaaaatanttattaaagtataaaataatnataaagtgggagagtttgatacaatttatacaagttttatacacaaaagttagtcgtattcaccgactaactcttatcggggatggaggtgctaagcgccatcactggtctgtgtttaaatcattggaagtgcacttatcacatgtaggggctctaagcctggatcattttttgtaagtggaaaccttgttgtacgctaagcctaaatttgtaggctaaatgcattttgcagaccaatcagagcttctgaacttattttaagctaacatt

SEQ ID NO: 231540 - DNA, 439 bp, Glycine max
  unsure (1)..(439): unsure at all n locations
tcatgtcttcatggttcctctatgtgctcacttctctctttatcatgtttctgatcccattgtgatttcttcttatgaaaactagtttctatagtgtatttttcacgaatttgatgttttttagttaagagacaaacaaaaataaacatatggcttgattcatcaatctataaatgagtaatgttctttactcaaatacatgtattacagagcattttcacaaaaattaaaatgccaactagagtaattcaatacatgtattttttggttgttaaagtgtttttgtcctacacccctgtggctatccttgcctctatcatcctatctagtcttccaggattaattgagctaagtgaggctcactatatatggaagggtgacaaattgngcttcgatgcttggattggtggttatcttgggtaatggttgcaacaatacg

SEQ ID NO: 231541 - DNA, 390 bp, Glycine max
  unsure (1)..(390): unsure at all n locations
gcaagctngctctaaatttacattgatgttngtatttatgggaggaggttgtatgtcatttttgttttaagagtagtgtcccacttgtaaaactaactttccaaatgtttgccttcgcaggaaatggccctgaggaagcttgcctcaaagaggtccaggaaggacaaggcagccgaaggaactagttccgctccggagtatgatagtcaccgctttaggagtgctgtacaccagcagcgcttcgaggccatcaagggatggtcgtttctccgggagcgacgcgtccagctcagggacgacgagtatactgatttccaggaggaaataggacgccggcggtgggcatcactggtcactcccatggccaagtttgatccagaagtagtcctt

SEQ ID NO: 231542 - DNA, 417 bp, Glycine max
  unsure (1)..(417): unsure at all n locations
gagggtgagccacgttcttagtatgaaaattaatagttgaatgctcaaaatcaaaatattcagaatcactagcaacaaaatactcaaaatgctcaaaatgatcaggatgcacactatacctaactaatctatgaaaggttctatctatttcaggatcaaagggttgtaaatcacctggattacccctagtcatgcactatatgcagcaaataatgtgttctcaaacaagcaccaggggagggttaaaactacaactgtagtcaaatgatatccaaatgagcttaaattntgtgagcaacaccctataatcatgaaaagatagcacaaaaaaatttaaacaaaaattcaaagtctaactatgaaaactacttaagcanagtttagaanaatatgacaataatacttttgaaaataaaa

SEQ ID NO: 231543 - DNA, 342 bp, Glycine max
cgcagaaatttttgtttccagaaaatatggctcattgggtatatcaaattatgattgtttatgtagcttataatttttaatggacattaaaatcttgtttccttttttgcacttaattgaaatggagttgttcctgttcttgtggagaaagtttggcaatttttatagttagcattctagtttatatcaaggaacttgaaactctatctaattaactttcctctataaataacctatttatctttccagtttgctttccatgttacactaagatttataagcttataaaaatgtcacaccctatttcatatttaataagctctaaccttccttttttaatca

SEQ ID NO: 231544 - DNA, 321 bp, Glycine max
tatgcccccaaaggagaccattgcacaaaactctctgttcaaaactgttattaaaataatacatgaacacccatgccaacagcaataaaaaaaatcatgttaaagtagggcacttgttaatattaaatagtacaagatacttgaataaaacattcactcattgcatgcttataaacaggattaggctataaatgcctggcatcgttccacaaaaccttagtatctgaaccaacatgatcacaaactggtccctggcctttgcatcagtgagccagtgtcgaagattttcttgttagagatacccacaccaaagagcatctc

SEQ ID NO: 231545 - DNA, 247 bp, Glycine max
ctaacggcatccgtaaagtattgggaacatcgcatacattgtctattcaacttcgaatatacggtctataaacatcaataaagtatgcgtggaatgctaaaattgattaattcacgctcatatatacgactaatcacatcagtaatagtattgggtacaacctatactatgttcattcagaacccataataccgattatcaccacttataaagtattgcctataattctctagcttatttaatttcc

SEQ ID NO: 231546 - DNA, 227 bp, Glycine max
cacaccaacacaaaaaaaacacaaacaccccagcctgtctcatacaccaaaaaaacccggagaaaacagaagggagaggatttaccaccacccccgaaaaaacgacagcccgacaaagaaaagagcagacacaaacacagaaagggacagcacacaacacaaagggaggaagcaaagaacaaaactccggaaaagaagcaaaaaaccgacccacaacaaaagaacac

SEQ ID NO: 231547 - DNA, 298 bp, Glycine max
cataaagggggggggggtttttattggccacccctacgcacgggctctacttgaatagctggaaaattgttccgagaaaaaattctgacgagactctccgaactgttaccgaacgtacattgaggaattttgcctaagtatcaccgcccttcaacattttgatagatatacaccttaacgggtaatacctccaccaaacttctgatctttctatcacccgtggcggcctcattggccatgtgtatttaatacacgttcatatacttttatacccccctgtgcgtgctctaaccactta

SEQ ID NO: 231548 - DNA, 402 bp, Glycine max
gaccttaaacgacgcagcatgcagctctaaacaagagcaggctattttattttcaagctaaaggttaaagaacttacgaaatgttcgcttattatccgttatcatttttttgttaccttgcattcattgataattttaaaaacgccaccttgtttttcatttaatttcgtatcttcaacattttgcgaaggaaatcatgaaaacaagggaatgaaaattttaccatttgctttacaaatttttgaaaccattaaacgaaacaacaagggtggtattttttcgtaattgttaataaaaatacaagtgatgattagacatcaacccaatattgaggactaaagctttggcaaagacagaaggccctgaacatatgaacttataaaatatgttcatgcaatttca

SEQ ID NO: 231549 - DNA, 325 bp, Glycine max
ccacaatataaaatggaattcctgatgccacctacacgtgaagtatgaaatgaaggccctgaatgcatattatataggaaaaaaaactaatatttgtctctcaatatgaaatatgctgacattcttgaaagaagaaaatataaaattcactttcttaaagtgtaaaaagtgcaacaaaaaatgattcgacgttaacttttgtctgtcatcgttaataaaatcgcttacgtggcacggatggacaaatttattactgaaacgattgccaatgtggaatgccagcataaagctaatattatcataatattatttctttgacattttg

SEQ ID NO: 231550 - DNA, 350 bp, Glycine max
agttacccccccgcatctcgacaaggggggggggtaatatttttccccccacaaaatatgcacatgagtaatttcaatagagcaatagaacctatttctgtaaagagatatacaaccaggccgtctcataaccttcctgccccgccaaatttactcaggtgctttaccaccaaggaatcatgtaaaaaagggaggaactttattacctaagaaactggatggcacccatcaatcaggtagtttattctacatgccattgaactggcaaaaactgataaagtcctacattaaaaaaactttatttcatggggaaaattagtcaagagtttctttcatacctaaaatcccat

SEQ ID NO: 231551 - DNA, 311 bp, Glycine max
agcagcagcaagaaagagagggggattaatttgcaaacacaaaaacgcgcaagcctcaacccacaaaataccctggatccaaaaatggaaaataaaacaaaccacaggcgacacgctgggacggatgacccaaaccaaaagaaatatttttactacaagacaaaacggaacagcagctatagcgctagaaacccaagggacaccataatagaaggtccataaacccaatgcctcttattatcgcactactacgagaaggcactagccgaaggcgcgggggaaattcagggatacggaacaaaaccccccca

SEQ ID NO: 231552 - DNA, 336 bp, Glycine max
acacccctttgagactaagctcatctccttgtgatgattactaaagaagctagaggtgagctacacacacctttctaatagctaagctcaccttcttaagaagagaagctagagcttagctccacaccccctataataagtgagctcacccccatgacaaaatacatgatagaacaaaaaaagtccctactacaaggactactcaaaatgcctcgaaatacaagcctaaaaccctattctactagaatgggcaaaaaacaaggccccatatgaaggaaaaaccttttctaatttttactaagaaaagtggggccatactttacccatgggcttgaa

SEQ ID NO: 231553 - DNA, 397 bp, Glycine max
  unsure (1)..(397): unsure at all n locations
tgcaagctntagccaaacagaagaagcgagagagttattaattgggcgttgaaaaagcataacaaaactttctgtgattggtttaaagatacaatttttgcaaatgagaatgcttcagaaacattaagaaaactagcagatgggcctaaaagaaatgttataacctgtcaaggatacgacataaacaggtattcattttacacaaaagcacgagatgacaaaagtacaatgcagaacagcggggtaaccttaagggctgaacctcaacactttgcaagtgtcaatgacgccaatccctgtgtagcttccatcccttactttgggttcattgattaaattttggagcttatttttgtgaaatttacaatatgtgttttcaaatgtaaatgggttgaca

SEQ ID NO: 231554 - DNA, 412 bp, Glycine max
agtttcaacttgaagattacgaatagtgtctccgatggtaagacctggcaatttggatgcagagaagttacttgtgtcattgatcagaacgtgtgcaagtgagattataaagaggggagagttgcttgcatgaagagaacgtggcatgttcgtggctacggatgtgattgtgttgttgcttacatgtcattcaactctcacactattctccacctacacactactactattcaccttttgtacgttctcaccgttttgttttttaaataaatttctaaattttcttctttcctctaaatttagtgatcctgtgatcatatttatgaaaattactctattaaacaatataaaattcactaatgatttctatatcaagatattatatatctaacagtattacgattagatataa

SEQ ID NO: 231555 - DNA, 470 bp, Glycine max
  unsure (1)..(470): unsure at all n locations
taaatactaacttcacatcagaccacttcaggtgctggagcgactgcacatgtgtttcatggngcctatgcacgatgaaagccttggaggaaagaggtatgcctatgttgttgtggatgattacttcacatttacctgggtcaactttattcagagagaaatcagaaacctttgagtattcaaagaggtgagtctaagacttcaaagagaagaagactgtgtcatcaagagaatcaagagtgaccatggcagagaatttgaaaacagcaggttcactgaattctgcacatctgaaggcatcactcatgagttctctgcagccattacaccacaacagaatgggatagttgagaggaaaaacaggacttngccagaggctgctatggtcatgcttcatgccacagaactttcctataatctctgggctgagaccatgaacacaacatgctacatccacaacagagtcacac

SEQ ID NO: 231556 - DNA, 325 bp, Glycine max
  unsure (1)..(325): unsure at all n locations
ttttacatgacanaagaacgcataaacgtttaatgaatgaacaaataacaagcactatcattgatcacggttcactatctacagccattgactcttgaatatcagaggtgaaaatacaaaacatacacatgaagactcttaaaaccaccattacaccactgccacttatcacttgccatatacagaatgaactgagaaaagagcatgctgactacatgtaccaaatcactcgtttcattacatacccccaataaaaaagcgacatgtgagtgaagaaaataccaactttgagagagtgttattctttataccacgtttcactttc

SEQ ID NO: 231557 - DNA, 364 bp, Glycine max
atgctaatagcagaagtgaagaattttttttaagcacaaatgaaatactaagttttatacctatcttaacataaaatactcataacattacaaaataaccataaattgtgagaggttactacaatatatacaagctttatacacaaaagttagtcgctttcaccgactaacatgtaatcgataacacaattacttgtaatcgattactagagtttctaaatgtttttattttcaaatttaaacatgaagagtcacatctatagatgtgtaatcgattacaccttgatggtaatcgattaccagtgactgatttcgaaaaataaattaccaaaagtcacaattcttaaagtgactatgttctgaa

SEQ ID NO: 231558 - DNA, 397 bp, Glycine max
gctttcaccaagctaaggttggggatcatgcaccaagaagcatgcttttcatcattaaagggggtagctatgcatggattaatctctcctcctccagaggtagaagtgtcttctctttctgcttgagagagaatcgaacttccaacttactatttatggtccagtcggatgttattgccaaagacctctagcatcatcttcaaataattccctgtcctattgtacagatcgattcatttttagcagtgagggaagacaaacatcgccatttaatagctttcctattaggcaatgttagagaattatgctctggattctcttactaataggatccagcgtctgaatatgctgcgtttccctatcaagatagaattctatctaatggacttcctgatgt

SEQ ID NO: 231559 - DNA, 351 bp, Glycine max
cgattgagtcatttaataattcttgacgctagaaattgaatacagaagctctcaccaaatttaaatgacaataactttttactcagaagtctgattgtgtcccgtaatatatctagatgctcaaaattgaaaacagaagctctgagcaaaattcaacgacaatagcttttgactcggatatccgattgagtcatttaataattcgagacgctcaaaattgaatacagaagctctaagcaaattcaaatgacaataactcttgactcgaatgtccgattgagtcattttataatttgagacgctcaaaattgaatgcaggagctctcaccaaatttaaatgacaataacttt

SEQ ID NO: 231560 - DNA, 482 bp, Glycine max
  unsure (1)..(482): unsure at all n locations
tcagaccaaagcaactcanaatctaagtatctaaaacccctcaatttatgtggatttcaaggttcgagaagtgaaaatgagaatggnggtaaattggagcaaactctcacctcacacaagtctataaccttaatctaaacttgctcaaactggttttacgcctaaaattccaccaaatcaaaatttgactcctcaacacccaaattttaccctagaaatggctcttgccttcactttggtcttttgtttttctcctttgcacatcccaagctttcccacagtcctaaatgacatttcaaactaggattaactcactttaacctccaatttctactgaatccagatttagcctttcaaaccctcaaagcatcacacttttccactcataacactacattctcactttctaaccctaagttaactatacccttcatccctagcagttttccatcagcaatttcagcacataaacatcacaagca

SEQ ID NO: 231561 - DNA, 390 bp, Glycine max
  unsure (1)..(390): unsure at all n locations
agctncatgaaaatgctgagtctgctgtatatattgcttcctgaacaaaacaggttgccaaagagtcaatatgaggctaacaagattttatgtccagtgggaatggagtaccagaaaatccatgcatgtccaaatgatttcattttgtatagaaatgagtttgcacagatgtgcaattgccctacatgtggtgtatcatgctacaagcccaacactaacaacttgattgatgatatttcccctaataacactcatctaccaaaggtttgttggtatcttccaataataccaaggtttaagcacctgtttgctaatggagatgatgcataaaacttgacgaggcattcatgcagtatgaaaagtgatggattgctctgacatctggctgat

SEQ ID NO: 231562 - DNA, 339 bp, Glycine max
tacagcgatggcttccaatgtttatggaaaattgcgtgcgcattcctagtttgccattggaactgtgtaatgaagtgcttcttaagagggtgggggagaagctaagaaaatttcggaaagtggactgtcttacgtcaattcattcacgtgggttgctcgtgagagtttgcattgaaattaatctagagagaaagctactactgccatcaataaacgttagaggaatgaaacttcatatggaattatacgaaggattacacctggtgtgcttctcttggtgacgcgggatacttggctctttcggtcaaagctcttattgccaaggagaatatgtatcaa

SEQ ID NO: 231563 - DNA, 379 bp, Glycine max
  unsure (1)..(379): unsure at all n locations
caagctgatggagagagcgagaagagtctttttttactttngnnngctgaccatagagaggtacctggagatatgtctcgggggttaggagaccttatggacgtcaggtggggtgctattgcccaaaaccaagcttggctaatcttgacccatacccgggcatagtcaatcagggagaacctgtgacgtacctaaacaggcgagctcctggcagtcaaccattataaaaacaaagaccactaatcaaggaggtttgtgtggcggttggccagctatgaatcttgagtggtatctggaaattggcctctggcaatcgattaccaagggtgtgtaatcgattaccgggcttaaaaatggagaaaggaagttaagattggct

SEQ ID NO: 231564 - DNA, 465 bp, Glycine max
  unsure (1)..(465): unsure at all n locations
actaagcttcacgcatcataancgatatgtggtagcgggctttatttagcaacaaacngcttagttaccctgttgtcctcagatttccccttgccagagagtatttcacacatgctccctaaccagcatattcagttagagcagatgtcgtacaaaacacaggaataacgttgcttccttacattaaaagaactactgttatggccgaaatccctaatctgcaatttcctagaattcgagagcttggactntctcgaagcaagatagagaagatgagttttattcattttgccccctttcattacatagtaattgcttcatatagtattcttgtgaattgatactaacaaaattgttaaattctgatgctacggcctaacagaaaaaatagcttttanagattcaagaagattccatcctaacagaattgcanagctcgtgggtaattccctaatgtgccactct

SEQ ID NO: 231565 - DNA, 387 bp, Glycine max
gcaagcttgattgccacatgtgagagcggattttatacttgttaaacatggagttaacagtatattacagtttattcatcaattctatttcaacgctacagcgagttagtttgtgatatttaaacctttcttaattaattcctgttacaataataacaaccataatatcatttctacacttaaattcgtccttctatcccttgtccgtattatttttgagagagaaaaaaaatcaaacgaatctcactttcctcctctttttttcttaccaagaaaacataggcgcacatatggaaaaatgaattgtagataaccataaccttcaggctataatttctgcagtatattttagcatgcaaataatttaattttattatgtaataaatt

SEQ ID NO: 231566 - DNA, 374 bp, Glycine max
  unsure (1)..(374): unsure at all n locations
tgctaaaaaataaaatgtgtgggananatttattctttaatgtaaaattgatccaaataaaactgcaacttgtatgtggcgtaatatatatttatgtaatcataaaagtgataaaaccttattccatgtccaggtccgcaagtaatatctgtggctcttacgttttgggacccgcttattattgaaatacaatcatcaccttccataaaaaaaattgcaaaatattaaaacgtttgactaaatccaaattttcatgttgcatatacatatatacagatatatatattttattntaattttttcattttgtggtccttacctgtcccaatgtcactgttacttatgacaataatttgtgtgtctgcgacatgaat

SEQ ID NO: 231567 - DNA, 413 bp, Glycine max
ggatccttaagtcacctgcggcatgcagcttgaggaaactagatgcgttggttattctgttcacccacctggccatgaatcaaaaatctgcacctgtcaccagactctgcggtttatgctcctctgccgaccaccacacatacctttgtccttttgtgcaacaatctgaagcaattgaacagcctgaagcttatgctgcaaacatctacaacagacctcctcaacctcagcagcaaaatcagccacaacagaataattatgacctctccagcaataggtacaatcctgggtggaggaatcatcccaaccttagatggtcgaatccttcacaacagcagcagcaacaataacaaccttattttcaaaatgttgttggcccaagcagacattacgttcctccactaatccagcaa

SEQ ID NO: 231568 - DNA, 297 bp, Glycine max
tgaatatcatggtctcttttgctcaaggggcttttctacctgaagtctagaacattggattatgagggtttttcttccttaatggctaatcacattgggcattattaattagaaagagcatctatgcctaaatataatattcaagggcattagtcttaattatttatttggataaacataattgataatttattaagatagaaaggagaggtacgaatgtgagagaataagaaactaattgttaaaaataaaagggaaataaaatataatggaaacttccattgaaacagcccattt

SEQ ID NO: 231569 - DNA, 390 bp, Glycine max
agcttggaacatacaatctgaatgttatgttctcttaaggacttaatcaaaatatctgctggctgatcattataaccaatgaactcagtgacaatctccttggacagaagcttctttcgaatgaaatgacaatcaatctctatgtgcttaatcctttcatgaaaaactggatttgaggcaatatgaaaagcaacctgattatcacaatacaacttcattggtagctcttcacaaaacctcaattcctgcagaaactgtttaatccacatgagctcacaagtaaccatagccatagatcgatattcagcttctgcattggatcgagcgataactggctgttttttgctttttcaagaaaaaaaatttccttcaatgaagacacaatagcct

SEQ ID NO: 231570 - DNA, 457 bp, Glycine max
  unsure (1)..(457): unsure at all n locations
actcagcttcaaagatcatccnctngacaacattattggtgatatcttatattgggtaacaactagacattntcttaaagacttatgcaataatatgacttttgtgtctatgattgaacctaaaaatttaaatgaagccataatagattatcattggatagttgctatgcaagaagaactaaattagtttgagagaaacaatgtgtgggaactagtagagaaacctaaaaactaccccatcatatgaacaaaatgggtatttaggaataagttacactactagaaaatacactttcaacatcggttatttagaacattctacatcggttctaaaaccgatgttgaaagtgacgatgttgaatgtatgaatgttaacatcggtcttggaaaaccgatgtttacatacatatgacaacattaattcttcaaatacccgatggttaacacaatgaacaac

SEQ ID NO: 231571 - DNA, 382 bp, Glycine max
agcctaatgttatagaaagaaaaacattgctactataatgctaaccgagcgtatcataaattaatataagcttgcattttaaattataattatttctctccaatcactattgatcatgagaaattcttatttcacacaaataaatttataccgaaaacatttgtcagcataatatttgtatattgcatatttatttcttcttaagcaaggatattgtttcctcatttcacaaaattcagtttttggtaatctcttttaattcggatactttattttcaagttggcctaatttaagaaaaagagataagatctcaacttaatgggattcttgttcccattcttctctgtatttatcattttgtttttgcttaatatttaacac

SEQ ID NO: 231572 - DNA, 334 bp, Glycine max
tttataggatgttttactaatacacttacaccttgagactgtgatacacaaatgaactatttctcccaccacattgaaaattttaaatttgtaatcaaaatttaatttcccgccagactaaaatataaaagttaaaaactggcgatttaatttttttaaaaacacacaaggaaaccataaataaaaatctgcaaatcaatattggtaattgaaactgagacccacctattgtatgaaccaaatctaaaatattttgcttatagtaagctatgccaattgatattgatttaaacatcaatcccatcattcatacaatgaggatgaggacaaccaa

SEQ ID NO: 231573 - DNA, 169 bp, Glycine max
atacaagagaaggttaagaacacacactttcctctttcttcagatatatacacagctgtcatatcttgttctaatgaagccatatctgatcaagcactcatcaaatttcaggtaccacattcgaggacttttgcttagtccatacaaagtttttttcagcaagcacacc

SEQ ID NO: 231574 - DNA, 392 bp, Glycine max
  unsure (1)..(392): unsure at all n locations
agctntctcccaagncctaaatgacagtacaagctattattaactcactttaacctccatttaccacaaaattcagacttaaccttccaaccctcaaagcctcactctttttccactcataacatcacattcttactttctaaccctaggttaactctacccttcacctctaacagttttccataagaaatttcagcatataaacatcacaaacatcatcacaaaaaccctaaaacagaatgggtatgtctaactcatccaagcatggcaatttcaacaagctttcaacaagagtcttcacaaataaccatcatgaagcagaaaactaacaaaactacccatcatatctcccaaaaccccatacccacgaaaatcaaaggagaaaaaaattc

SEQ ID NO: 231575 - DNA, 436 bp, Glycine max
  unsure (1)..(436): unsure at all n locations
ttagactggtgattcctaggctcttgaccttgacttgatagaacctctttataagcgaaggcgtttgacttgatcccatgttttactaaagtgaaacaaaatcggtgcaaatcaaaactccgacatctatcatgggtggaatggatgaatgcatgaaaaaatgcatatgatacaaatgcaatttatgaatacgggagtctgggaaattgtctccttcttagatacaacgtcttggggtagcacaatgcgcgacatatgtatttaagaaggtgacacggaccctccgttggtttgccaaagagaggggatcaagacagaacacgtgcatgatgcatatgcgaaaggcacaacatgtggatgtacatagtacaacaatattcacaaacaaatataagcanaagggtacatgacacttatgcatggcaatgtgacatat

SEQ ID NO: 231576 - DNA, 356 bp, Glycine max
cagcagctaagataacaagagagcaggcgatatcttacccaaccccgaaaaaaacgccaccaaatacaaaccgattacctacgctaacaatactcgaacaacatctaataatacatcccaccacacactcgccccaaagtgagaggtcaatgaacaccaacactgagactgtctcgaactggacccacgaccaccgccactaaatcttatttccataatactcgggaaatccaaacggcttcccacgtccgtgttagcatgaatgaaagaaacttgacccataaaaggactgtgaggtacccaacactcgccaatcccgcttcctcaagagtgagcatccaccgaccctgaaaaaa

SEQ ID NO: 231577 - DNA, 422 bp, Glycine max
acatcaaaaggaagaatttagagagaaaaattaacaatttctacataatttaatcccaaaatttacctattaattgcagttatcactaaccaaactttgtgtatgtgtaaattgaagatcttagtcaaacttaaatcacttttatgtgacttaaataaaaaggatataacaaaatacgcctcttgctagatgtggaaagcaagttttcttatatgccataaatttatttgctcgtctgactcatctaacccattgtgttaggccaaattgaccatttgcctaatattatataattatttgacaaggaaattaaataaaatagtaataattcatcaaataggtggtatgattcttggagggaactattgttaactatatcacttttgttattcacactatccatatatgtcgttttttatgta

SEQ ID NO: 231578 - DNA, 349 bp, Glycine max
caagctgagctgaaagaactttaatgtggcatactctactagcacgtttctctttaaaaattttagtcccaaatgtgtgattaggattgaacccatgtaggattgaaggagttaatgcaaatttgtttcctttcaataaatttgaggttgaatttagggtgagaatgacgacccttaaaaacattgtttacttgatgagatgcagcatttttgatcttcaaaagccacaaaaagagcttgatggaaaaacctgtgcagctgttgggcacagtaatctcatggctctctatgataccatgttcagccaggttggcacaaaactaagttgcttatttattatcatctcaac

SEQ ID NO: 231579 - DNA, 426 bp, Glycine max
gagctactatcacaacgaattacagtagcctggtcttgcattttacacaattttcccaacacccttctcaaccatatggcttgacaagcacatgatgctgcacctataaactctgcctctgtaattgatagactcacaattggttgtatttttgatgaccaccaaacatcagctgaacacaataagaaaacataacccgaagtactttttctgtcatccaaatcccctgcataatcgctgtcagtgtaagcaagaaactctttgtttcctccctttgtgtagaaaattccaaactcagttgttccctttaaatatctcagcacccttttggctgctagtaaatgcagctcagtaggattctccatgtacctgctaattaagttcaccacaaacatcatatcgggtcgagtagatgttagatacata

SEQ ID NO: 231580 - DNA, 331 bp, Glycine max
tccccgtctaagacactgacattaacttatcttctcctttttggacaaagtatggcacgctggtggcaagtaaattttcatcccatcaaaccttggatgcaactgtgatcgtatgcccatatcaactaaaatcttaacgggtattcaagccatccttcgacttgccttgaaagttaaggagccgtccaattacactgtcacaaacatttttcttcacatgcataacatcaatacaatgtttaacgtcaagatcagaccagtacggaagatcaaagaaaatggaccttttcttcatatgcaactcttacttttatccttcttttgggacttt

SEQ ID NO: 231581 - DNA, 423 bp, Glycine max
agtagaaacatgggaccaactcattgtagttaattattagtcgtatctagtcaaggtctgagagaccatacaagtttcctagcgatttctaattatgtgggtcattaagtctatcatatgctgaaaatagccgagaagcccatgaatttcttcgggggcggagtaagtgtccgccatcgccttggccttggctaacaatcggggaagttcttgactctcgttcaaggtaagagcaaaccgatccatccacatggttgcctcttggtgtaaagaatcgatcacccttcctctagcctttttctccgcgtatacttgggcatactcgtccgcgaccctatgctccggggcccgggctaaacctaactcttcttggtacttggcgatgatagctagcatggtggtctccgtctcgcataaacgctg

SEQ ID NO: 231582 - DNA, 379 bp, Glycine max
  unsure (1)..(379): unsure at all n locations
agctttangaggaggagcgcaggcgctgcattttctttgnccctgaagtctctaccatcaacaccgaccacatcaatgttgtcaaatagatgcccacgtcaacggaatttttaattgctactggattttcttaacttttcctgtcgttattggattttccaaaagtgagcctttctcccagaagtaaatctaaatcattcattcttggtcaacgggaattacactcattattgccttgtccaggctttggtccacgattgtttcctgaataattattctatattgacatttcttctttgtactggcgactttccatagtaagtcgactctctcattattttctcttacaatgggtcgaagctcaaacttggtgaaggcc

SEQ ID NO: 231583 - DNA, 419 bp, Glycine max
  unsure (1)..(419): unsure at all n locations
tataacactagcttcttaaggaagcttccatcaaggaagcttctcaagaaagctacctatgctattaatagaagcatgtgtaacacttgtgataactttgataaatgagagtcttctgagacacacttcanagttcaacttctctccctatctttccttcattctcacgccactctctctctttctctctctctctctctctctctcattctcttccttcattgaagcttcctctctaagctntgtattcaagacactctcttggtggtgaagcttcttcttccatgacttattccctagtggacgacgcctcctttcacatgttctcctttatcttccgctgcaactccatggctaaaaataaccattgaaggacctctatagaagcttctcgagcaagcttccatcaagtggtatca

SEQ ID NO: 231584 - DNA, 411 bp, Glycine max
  unsure (1)..(411): unsure at all n locations
atctctaagtcacctgcggcatgcaagcttgtaggccaaggatcttcttcatcaatttagtcctctgcttcttgaagatcaatggtagcggaatggagaaggaggaaaggtgattggagatgccacttcagggacatctaacttggtcactgcaccccccatgtacatacacaacacacatcatcacaatgacatcatcaacatcaacatcatctcatttcaatattgatgtaatcctaccctcaagggaattggatagaagactctaagaagattgagccacagatgcaggagaaagccctttgattctcataagccttagggtagattntgggcccatgggctaagtatgagcccacttatctttgtacatattagattacggtttcattatttttgggccatgtattt

SEQ ID NO: 231585 - DNA, 412 bp, Glycine max
  unsure (1)..(412): unsure at all n locations
ttaaataagaatttaaatagcacaatacaaacatgaaaaaatattatactagaaaatacgataataaaagtaaataacataacataaatgaattaatcaaagcaattaatcatataatcttcatttaaataatagttggtattgaggagatgattaaattatatatttttatatttatagttggtatttgcttaaagattgcacattaataaatttaattntcaaatatttggtaacacaattgttagtgcttagctctacggagttttaaaagattggctaagattttgttaaaacataagcacttaaacaatgaaggaaagctggagttgctgcacatgatgtctcaacgtatgtcaaggaataagatcgggctgcacaatgcacaaagcaagaaaaaatgactaatgaa

SEQ ID NO: 231586 - DNA, 398 bp, Glycine max
  unsure (1)..(398): unsure at all n locations
gcatgcaagcttncaaaaccttgtagcatataatttgtttttgataaacaaatacataaggctgaatgtctcattcaagcattgaaaatgaatatagatattatgggcctgtttgattttcttctcaattttacttataaaaactgatttttaaaacaatttcacagtactcaacaatctatttctcatccaatatgtaataagtttcgaaagttgtttccaaaaccagtgttttaaaaaccaaaaacagatggaagttgttttcttatcctcttctattttcttgaaatgctcaggggaaaacgtttagaaaacaaaaatgtgttcaaggaaggacaaaaactttcaaatgtgcttaggagacaaaaacaaattttataaaacacaaaactgttttt

SEQ ID NO: 231587 - DNA, 405 bp, Glycine max
  unsure (1)..(405): unsure at all n locations
acattgtctctttcttgggacaatcgtctaaaaggaaatcatcatttgatacttagtcgtgaccatgactaaaggaatttcacaccaacaatcatacagatgcaattgtcactaattaaaaataacaaatggagtcacattattgtttcgtgtaatatatgacaacttaaatgcaattatgtgaatgtattttgtgtatcttcaagatagatttcatggcttgcaattgcaacaattagcatcttggaataacaatgtaacaatcttgtcaaaaggatcactntacaatttaaatagcaaaatactatgtgaatacacaaaatatttctactacatctaaaacctaatgttggatatcgttaatcccttgttatcttgtgaatggaactgacgcattcaatataa

SEQ ID NO: 231588 - DNA, 384 bp, Glycine max
agctggggagaaccgacgaaggattaatccttttgatcatagaaacgatcttcagtaaaattttaaattcgaggcttatgaataacatgattgaaaagacagactacactaaaagtgataagtcaaatttttcaacaaaaattaattatcaataaaattaatagatactctatattaatgatattaaaaaaactaaataaaaacataaaggctaattgttttatcattgacctaaccctcatcatgagagcctttaaataaaagattaaatatttaaaatttaaaaatatcaacatacaaatatttttttacaaaaaaaaaacggaactccaattgtctcattgcatagaaccatacttaggaacaaaaattattctgggcaat

SEQ ID NO: 231589 - DNA, 396 bp, Glycine max
aaagctgagcttgcctttataggaactagctgagctgagccgagccttacatatgccgagtcaaagacccttgtcaagctgctcggctcatatccacccctaactgcatgctagtacgtatacttgcatttgcatgtgtgcatgattgcatgaagagagtcagcatgtgtttccatataaactgattactggtgatttcaaagaactctagaagcgaatatgattttgtgcttgttacaacaatatatagacatcttgggctttaatatgtaaggattatgtcaggctattctatgatttttaataagaacttgatgaatttacagcttagtacttgaaattataaattagaaagggatacattataacgcatcttactctaagagaagcatatct

SEQ ID NO: 231590 - DNA, 402 bp, Glycine max
  unsure (1)..(402): unsure at all n locations
ctgcagcatgcaagcttgagaaaaatntaagaaagaaaggactatctcatatggttacaacctcctataatcctgaaaagtataatgtacattaacattagtgacaaaatagtaaatggagtagttatacccgatccaagaaatatttatcaacattgggaagattatgtaattccttttttgtcttgtatgtttcttgaacagcaggatctttccagatttcatctaccataggagcatactcacgcgttgcagcagggaagaaggcctccaaatctccgatggccataatatccagtaatcagtcaaaaaagcgcttgaatctttgattatagaagaaacactcaccttgttttcgtcagctgctgtctctgctaaatttattatacaattagattcatt

SEQ ID NO: 231591 - DNA, 399 bp, Glycine max
  unsure (1)..(399): unsure at all n locations
ctaagctgtacaagttntctagttntctaaaccttgaaaagaaaaaagtgttgtattcatctnttacattcccttctccctttgccacaaagaattcgtcaaggactaactgcctgaattctttctgtgtctctcttctcccttttccaaaagaatgaaggactacccacctgaattcttttgtgtctcccttctcccttgtcaaagaattcaaaacgacacagtctgagaattcttttaattcttccctttcccataaacaaaagatttcaaaggactaaccgcctgagaattcttttgtttcccccttcacaaagtttcaaaggactaaccacctgagaactctgtcttaacacattggagggtacatccttttgggtacaagtagaggttacatct

SEQ ID NO: 231592 - DNA, 391 bp, Glycine max
agcctaatcacacacccctacagacgcgctgttaatgtgctcaaaaccattatccaaactcaccccacgactctccggctcttctatccctttaatctcagactcatcaacccccagcttatccccaacaacagcaaccccagaccccaacacattaaccttgacgctatcaacaacaacatttacaccaccaccatcgaccttttcaacatcaacaccctcactcttctcatccaccacagaatccgaattgtcggtcccaccgtcgttaactttctcctccacctccttctctttcgcctcttcctcattcaattcaacagcagcagcctcaaaccctttatcaataccactcagatcgactccattcttcacggctacaacaccactc

SEQ ID NO: 231593 - DNA, 340 bp, Glycine max
  unsure (1)..(340): unsure at all n locations
tatggttcatttgactcgcgagtngaacaagtgtggttcgttttctgactactttnttaaaacatgatttactatttatggcttaaatcttttatttaattaacattatatgatgtatgtttacgattatataagtgtttgaattattatgacatgtgtttaatatgtattgacctctttcttaatattcgaatatttataatttcttgatttaaaaaactggagatattgattttctatgctctatctaacgatcgaattaataatgcaaagttctctttcaatacggttaactcatacattattattatgtcgatgacgactgtacaccttacatgga

SEQ ID NO: 231594 - DNA, 321 bp, Glycine max
ttgcgtttacagcttgagtattgcactaaatgtctaactagtaaaaactccaaagcctgagtgtcaaatttcacaagaactttgttgtgttaatgtatcgcataatacttaatctactagaaaagaaataacgatagataaatgataaataacaagaattagaattactaacctatcattggacaaaaagaaaataatatgaagcaaaatattcagcctagaattcaatgtgatcaaaatgttaggacctatcatgtcttgtttgcctaagatatatggtctttacattcttctttatcactccaggaaatttatcctatc

SEQ ID NO: 231595 - DNA, 468 bp, Glycine max
tcctcggggccattatctgcgaacgcaaacatgtaggaaagttatgtttactataaaatgctactcttaaaacaaaaatggcatacaacctcctccaataaacacaaacatcaatgttaatttagagcaaactcatgcacatacttccttatgaacattcactcgcacaagatattcttctacccaaaaaaatgcacccatgcgcaatcaaggaacgcttgttacctagattatttatatgtacttacaaggtgtatttgctacctacatcacatgcatttccttggctaaatttacatacatgcatactcaaagcatcttggctaccaaaaattgcacacgtgcacattctagtatttctaatacctatgcatatacaaactgtgtgatgaatcttggctatctacacaataaggtgctacatttcatgctatattcaagtgttatggctacctataagcctcatgc

SEQ ID NO: 231596 - DNA, 390 bp, Glycine max
  unsure (1)..(390): unsure at all n locations
agcttgaaggtgnngagctcaccatcttttcatattataatactggtaatgcgtctactatcattgtcatcacttttttttccgtcattgaggtgccacttgagctgccaggtctctccatgtttgggcgtatttttttgaaagattcgtgccctctttttgcacatgttctgtagttgcatcctattcgaagccattatatctacactgcctaacgaaggcaaccattaggtccttccaagagtggactcaagaaggttccaggttggtgtaccaggtaacagctaccccagtaagattttcttggaaggaatgtatcagcaattcctcatcttctgcgtatgcccccatcttccgataatacatctttaaatggttcttggggcaagt

SEQ ID NO: 231597 - DNA, 450 bp, Glycine max
  unsure (1)..(450): unsure at all n locations
tctcacgattgtcacgtgctcatgcaacaattgttagccgtggctatacgagacatctngccaaacaaagtcaggttagccataactcgcctgtgctttttcttccatggtatatgtagcaaagtcattgatgctgtcaagtttgatgaactggaaaatgaggccgcaattatactatgccagttggagatgtattttccccctgctttctttgacatcatgattcacttgattgtgcatctggtcaaagaaatcaaatgttgtggtcctgtttatctatggtggatgcacctggttgaacgatacatgaagatactaaaagggtatacaaagaatctatatcgtccagaagcatctatttgtgagaggtacattgcagaaaaaccattgaattttgtttataatacattgagaatgcttaacctgttggcctttctgagtctcggcatg

SEQ ID NO: 231598 - DNA, 383 bp, Glycine max
tgcaagcccgaagaagagagtatatgagtgttctttcttggggttaacaatatctctaagggctactgtgtctacaacttgcaagctaagaaactcgtcatcagtcgagatgttgaagttgatgagtacgcttcttggaattgggatgaagaaaaagtggagaaaaacgttcttatacccgctcaactacctcaagaagaagctgaggaagaaaaccctggtgaaccacacaacaaaaagatcaagatctatcatcaccagagtctactccaagacgagtaagatctttggtgaacatatatgaaacttggaacttggccatacttgaacctggaagctttgaagaagcgtctaacaagaaatttgggtcaaggcaatggaag

SEQ ID NO: 231599 - DNA, 413 bp, Glycine max
tcctcattaggaccttaaaactcagctgctacaactggaagggggttagagttatctgtttcatctcaaaatggagcctatctactatagtcttatccgacaaggtaatttcaagagcctataacacgacttacctcaaattctattacagttaaaccttgtagtggtgatgtactattttttctacgagattttttggtaaataggtcttaacgaggcacacccaacatttacattgaataaagtactatttttatgatttttattagctttatagatctgagtagaccaattggtttctctgactaaacacttaattctatgtatagataagaccgaataaatatttgacttactaaaggactgacacccacagtcagccaaagatagatcgcaaataacttaactatttg

SEQ ID NO: 231600 - DNA, 391 bp, Glycine max
  unsure (1)..(391): unsure at all n locations
agctncatgatgaatcgacaatgattcatatgtgtttngatgacaacaaaagatgatgaacaaaaagctcaagtgaattaaacaacatctcaagagaatcatgatcaagatcaagattcaagaatcaagaattcaagactcatgaagaaagcccacaaacaagtatcaagattcaagattcaagatctcaagaatcaaagatcaagattcatgaatcaagaatcaagactcaagatctctagaatcaagatcaagattcaagactcacgattcgagaatgaagaaaaaactcaatcaaaataagttttaaaaagttttttcaaaactttgaatagcacatgagtttttgacaaaatttttaccaaagagtttttactctctggtaatcgat

SEQ ID NO: 231601 - DNA, 475 bp, Glycine max
  unsure (1)..(475): unsure at all n locations
gctttggtctctacagatcttcacacagcagaagtactcaaatctctctggaacttggacctttctctctctagataccctagacatgcatagatttgaatcctagtccatactccccttctaaactttgatttcaggcttaaataagtggccttgttcgtgctcgtgcgcttagcgcacttatggaccgcttagcgcacattattgaatttcggcttagcgcgtgcctttctcgcatagcggatgaactgaagcggtgcacttagtgagatgaagtggtgcgcttagtgaacctgtacaaatcatctttttccagagtcttcctcgcacttaacccatgagtgttgtgcttagcggacgcttgctaagccagtagattggcttatcaagaaggtgaaaaacatcactnttcaaagctcgcctaattaacctganattgagagaaaatgattattaaacacacataatcgaatta

SEQ ID NO: 231602 - DNA, 384 bp, Glycine max
  unsure (1)..(384): unsure at all n locations
agcttcaagctntagtcttcatgggtcttcccctatctataacatttctttcttgttgaaggatcttttggacactggaggagttcttgtttttccacatctttctaatatttcttgtgatcaaacttaattcgtcatcttcttcattagagtcatcatcaatgaattcttcttctgaagcattattcacgacaaaggctttggacaatgactctttggacacaaagttgtgttttggtctttcaatcataaggattagcgatttacctttcttttttccttcatcttgagcaagctctttctcatggactttaaggattttgatgatctcttcaagagtcattgaatcaagattcttaatggatcttaatgctgtaacttgca

SEQ ID NO: 231603 - DNA, 443 bp, Glycine max
gacttgagacatcaagagattatggatatgtgaccatggcttgaatttcattaaaaaagaaaataacaatctatctttcaatcttctctcaacatcattcaatatctttcaactctttctatagaattttctgatccatttctcttcatctttctaaaagtctttgttcaacactttcttttccaagaaaatttctttgctcaaaaacttgtgctattcatatttttcattctcttctccctttgccaaaagaacagaaggactaaccgcctgaattcatttgtgtctctcttctcccatacaaaagattcaaaggactaaccacctgagaattcttttgattcttcccttccccttaagcaaaagacttcaaaggactaaccgcctgatatatcttttgtttccccttacataaagattcaaaggactaaccgcctgagaat

SEQ ID NO: 231604 - DNA, 345 bp, Glycine max
actgagagttacggagttcggaagttagttttagcttatgaataattggaatggagaaacctgtattatgcaggagaaaacctatattattgatttttcaggaacgagtttcaacacattccagctgatcacatgctttcaaagagttgtttggcattaattaacagaaaagtaaagtaaaagccatattacaagtatagttgcaatacattattaccttaccagcatgctttttgaactcagccatatcagcgaagtatcccctagtcatttcatctgcactgcacaaaccctatcattacaaaaccccccaaaaaaccacaccaacggaaaaatgaacttaca

SEQ ID NO: 231605 - DNA, 455 bp, Glycine max
  unsure (1)..(455): unsure at all n locations
ggaggatggggctcatttcaggcctaactatgtttatgtgtttgggtgtgctagctgcacccagcattattgctggtgcactcaacacttaaggaaaaaaagactaaaatatcctctatttgtaagacttttaagttgatccgtaaaagacttacagatcaacttgatccgtaagccttttacggatcaactngatccatagaagccttacggattaacttgatccgtaagccttttacggatcaagttgatccgtatgcacttaatatcaatatacgaatcaatntgatccgtagaagctctacgaatcaacttgatccgtangttttttacggatcaacttgatccgtatacgcttaatatcaacatactgatcaacttgatccgtacgaattacggatcaccctttcgcacacccatcacaaatgcgaagaaagcgcagatacagttttaca

SEQ ID NO: 231606 - DNA, 413 bp, Glycine max
  unsure (1)..(413): unsure at all n locations
gatcttaagtcacctgcggcatgcaagctngnttaccccatgtagaagttgcttacattagagctatccatagcactactaatcgctctccttttgaagtagtttattgttttaacccactaactccttttgatcttttgcctatgcctaatgtttatgtttttaggcatacagaaggtcaagcaaaggcggactatgtgaagaagtttcatgagagagtcaaagatcaaattgagaggaaaaataaaagctatgcttaacaagccaacaaagggagaaagaaggttgtcttctaacccggagattgggtttgggtgcacatgaaaaaagaaaggtttccggaacaaaggaaatcatagcttcaaccaaggggaaatggaccatttcaagtgcttgaaagaatcaatgacaat

SEQ ID NO: 231607 - DNA, 351 bp, Glycine max
  unsure (1)..(351): unsure at all n locations
gcaaaaaactctccacattcacaaatgacgcataaacccaccatccccagttgcccaccttcaactgagctcacgtactcccatgtagcccttatcctcattcctctcaacaccgggtacccatctatctctccaagctttcgcaacatccaagccatacagcatccaaccattatgaaccatcaaaaccaagataacagcgcaaaggaagaaaactctgtccaataaacacaaaccaataccgcaacttttcttactcaaataccccagtaacattctcttcgttccaatntgttaaccgctggatcgactcgaaaattttactggacgtccctagtacataaatctaca

SEQ ID NO: 231608 - DNA, 389 bp, Glycine max
  unsure (1)..(389): unsure at all n locations
agctnctccctcttttgcctataaatatggggaggagggaagaacaaaaatgttcaaccctcctggtatctgagagtccctattagagagaaaaattgtttccgtgaagaaaatccaagccgaggcgcttccgtaacgcgtccgagacgtttccgtgggtgatttcgcgaagattttccattgttcttcgtcgttcttcgttcgttctttgtcgttcttcggtcttcaacaggtaagttcccgaaatcgaacatttcaattcattctatgtacccttagtggtccccacttgtttcacgtgcgtttattttcatttcatttactttccgcacccccttttgatgtgttttagtcatttatttaagtcattttctcgcctaatcaaaaaa

SEQ ID NO: 231609 - DNA, 284 bp, Glycine max
ttgcccttctataggatcttttcaggtggttttgcattaaatattatttaaccccaataccttttattactttacaataaatgttatgcactaaaaagaataatgcatgatctctcttattaggattagattagaagactagtaccattaattatgcgggaaagtattaagtgaaaaagaagcttgagtccaataatctaaggagttgtggtaaaaaaacaaatgtaacaatttatgctctactatatacaactttttaaggctgattagtaaagagctatttt

SEQ ID NO: 231610 - DNA, 382 bp, Glycine max
agcttaaacatagggtgggtttgataactaatcaatatcaaccatcgatgacacattgcccaaactgtgcatattcatgctgtccagcaagtgatgaagacaaacaaaaattcctttactttttctgatttatgacttcatccttgattttttttttctttttgatatctgaaattcctatactttttgtcatttccttgctaaaacacaattaaccttatttcattacatacctacctcccaaataatacagcacatttccaatgacacttcttcacaatcaaagttcaagaagaatacaaatttgatccagttgtaaactatcctaaaagaattccatgtttcaagctctatcttgtttttccaatttagattagtcctt

SEQ ID NO: 231611 - DNA, 324 bp, Glycine max
  unsure (1)..(324): unsure at all n locations
ggctatgtttatggcctagccaaacttagttagaacttagaagggtaacttgcccatataatataaaaaatctctcgcatatgtggtttgggcaaaagtgcaaaatttcaaacctggccctagataaaatacttaatgaaaacttcataataagtataaacctgttcttttccagtccaattatgaagccagcttcagctagggctgccaagaggcttcctgtcccagcatcttttccagtcacggcatactcacttacaanagcctgtaaagtgtccacaaaatagattccatacaaatggatatgccaataacttataaaac

SEQ ID NO: 231612 - DNA, 389 bp, Glycine max
  unsure (1)..(389): unsure at all n locations
agcttncaagagaggcgagcggagcatcttttacacagcacaagctatcacagccaagcgcaacagagtcaatgctgaaaactctgcccaaacacctaccacaaatcacagctctttccactcaaagaccccataacaattccttcgatccaattcgtaaacccgtggatcgactccaaaattttactggaagtctatatggcataagcctacattttgaccgttgggatctactagcaaacatccagaactcattcttcattactgtttccacaaccagcaaatacatggatatttctgcacttgtgcagaattttgctgcacaattttacagcaaaatcgtgacaaagagcatatttcgaaaaccacacttcccctcattcaatttt

SEQ ID NO: 231613 - DNA, 304 bp, Glycine max
ctaccccgtgaagaacgaagaacggatgaagaatggtgaagaacggacaaaaaccttcacggatttgcttacggaaacatctcggaagcgttacggaagcacctcggcttggatattcttcacggaaacaatttttttcacccaaaacagctaacatacatagccagggggctcagggatccttataacagccaccttcagcctatttataggaaaaagggggaggaggttgccgcccagctcgcccaggcgaccttcgctcgcccaggcgagctgggcggcaacctcctcacccattatacta

SEQ ID NO: 231614 - DNA, 356 bp, Glycine max
gtctgtatacctgattttgacgatgtccacgaagaatctaacaaggcctgcttccaatgataagcattcgcttcaagaataattcaagattgcttcaacaaacaaagccttgtttcaagattcactaaagaccaagccttgccttaaaacaatgtgctttcagacatgctaggctctggtaatcgattaccaggaagtgttatcgattaccagaagacagggttgagaaatacctgttgaagaaaggttttgaatttgaattttcaacatataatcgattaccatatgtctgtaatcgattaccacccacgacactgtggaaattcaaattcataagtcataacccttccaattat

SEQ ID NO: 231615 - DNA, 307 bp, Glycine max
aagaggcaccgcctcctgatgacacgagaaatacttgacattaccgaaaaaaaatgttatcgcgaagaaaatccaagccgaggcgcttccgcaacgtttccgtgggtgatcttccgaagatgatcaaccgtacctccacgttcttccgtcgatcttcatcgctcttcggtctccaaccggtaagctcctgaaatcgaactttccaattcattctatgaacccttagtggccctcatttgtttcacgcgctcttattatcatttcattaactctccgtacctcctgttgacgcgctttaggcaatttt

SEQ ID NO: 231616 - DNA, 330 bp, Glycine max
aagtgtgcctggttgctatttacaccccctatttactatatgccgttcccttgctattttattgaattcttttacggaacgtgcgaaactttcgaatttcgaacgatcttactttctttcgcgagttacatgctgacgatctgtgatattctttttaacttgcaagaattacggagactcctgattggcataaccctctttcgatttcgcccatacggatttactatcacgcagcctgctcttttattctgaacgttggactcatattgccgtatcagtatatcccgacaatagggtgacgatgaatgggttaactttatccttttattt

SEQ ID NO: 231617 - DNA, 375 bp, Glycine max
aacttcttatccaaggctcatgatggaggcgaatctctcttcttccatggcttactccctaaaggatggcgcctcctctcacctattatcctttgtcttccgctgcacttccaaggtggaaaatcaccattaaacgacctcattgaagcttaaagaatcaacctccatataacccccacaagcaagctttcatcaagtggtaatcacagcacaagagcttcaagtaggtgctccttaaacctccattaattttccgctttaccttctattccatcgttgcttcttcatttctttctccatgtctctccttacatgtcttgtgataaatgtctttaacatgattctttacaatttccaccgatacaacttgctata

SEQ ID NO: 231618 - DNA, 287 bp, Glycine max
  unsure (1)..(287): unsure at all n locations
tatgtgctcttctctctgcgaggcaaatttaagggcaagtctttatcctaagcaaatcaccttatccacgcaactatcttgtctccttgaaaccacccgatggaaccttcaccgagcggatattcactggtgcggtcggggacaaacctatctaccttattttttttatgtaccatggnttatgcttgatcttgtaagttcatcatgattgcatccttatgactttgaaccgcattgcatgtctatgcttctttgaaaccaatagaacaactctgaaacgtttcttt

SEQ ID NO: 231619 - DNA, 393 bp, Glycine max
  unsure (1)..(393): unsure at all n locations
agcttgtgccacctacatagcatagggttttcatggttgatcaacctacgctgncaactnnatttcagcccctaatttacattaccaaagttttttctattttgtacggggtgaccaaaaaaatctcattctataaataacaagatttaattggacctttcaaatataatggagtcaacctctccttaataataaaatgaaagttctcgtaccaatttagaaagacgcattaacctggagagacacccttaatataccataaaggtaataatatttctttttttttttttcaagaaagatgattgggcatatgactatcatactccatcacaatttattgtgtttatagggaagattatagtgaaaatgcattcttcatgccaaaaccgtcaa

SEQ ID NO: 231620 - DNA, 473 bp, Glycine max
ctcagctaatattgtaggcttcttccttgttcaactcgtcaaaatgtgccctcttacgaacaaagaggatatgcttatatgcataagtgtccctcacctgagaagtgcttcacaggcaaatgctcttccagtcattggagtcaatcttgtagaaagcataatactcctcctttgtgatctcctaaagctctgtcatccaaaaggccttatccttctttttgtagttgtgaaaacaaagtcctctaaaggtttccccctcacgaaggatttttcctttcacagcaaactaatgttcaatttacgaatggtaaccggcagatctgaatgaatttccttaccttaagtcttcctatattgttgtcactaactaactctaaaactaatattctaattatccttaattaactcccccttcctacggtcctaatggtacccttctaaaattggacttttctgatctataggttattcct

SEQ ID NO: 231621 - DNA, 385 bp, Glycine max
agcttgagatgaggaagtgctgaagggcgaatcttcctgcttttattgttgaccacagagtggcacctggagatatgtctcgggggccacgagaccttggggacttcaggtggggtgctattgcccacaaccaagcttgaccaatcccgacccaaccagggcatattcggtcagtgagaacctgcgatgtacctaagcacgcgagctcctggcaatctacatataaaatgaaaacaataccactaagctaggaggcttgtggtggctggccagctgtgaatattgagtaatatgtggattgtggcctctggtaatcgattacctaaggtgagtaatcgattacaaggctttaaattgatgacaggaggctaaaatggcttctggt

SEQ ID NO: 231622 - DNA, 466 bp, Glycine max
ctatatacactcaagcttctctcacaattgtctataaatagggggagaagtgaagtatataagggttcattcccttaagcacttctctctctttcgaatatgcttagaagaattgcttccgtgaagaatatccaagccgaggcgcttacgtaacgatttcgtgagggatatcgtgaaggttttcgaccgatcttcgatgttcttcattcggtcttcatcgttcttcagtcttcaacgggtaagtacctcaaaccaagcttttcaattcattctatgtacccgtgcgggtccacaattggtttcacgtatttttattctcatttcattcacttcttataccccctgttgacgggcttaagccatattatttaagacattgatcgcttaacctacaaataaaataaatatccaccggtcgtgttgattctattaaccgtgaactttggtggaatgaatcccacccatc

SEQ ID NO: 231623 - DNA, 415 bp, Glycine max
  unsure (1)..(415): unsure at all n locations
tcacctatagatgagaagttattttaccaangcaaatgttcacccttgtaaactttacttcaggatgttcattcttcgacgtgaaggggtgagttggcgatcccacatcaattaatgatctacccaaaatagcgtataaaagtaggggtagtcctcaccacatcaacaaatgatatggtctgaataatgtatataagtggagggtaattctcatttcacgaacacgcctttgagattgagtcaagctgaaattgctattttagatgttgtctaagcctatcttagtggttgttgtcaaatgacaagcttatcggaccattgcagatattcagtgttgtaaacttcagtccgggatgtccattcttcaacataaggaagtgagttggtgatcccacatcaattactgacatggcca

SEQ ID NO: 231624 - DNA, 423 bp, Glycine max
  unsure (1)..(423): unsure at all n locations
agctntctccactaagatgcctgatgcttgaaatgtcttttctgatggcagcggtcctagatgcagggaagaatttctccaagaacaccctcttaaggtcatcccagctgaaaatggacctgggagcaaggtagtatagccaatcttttgccactccctccagagaatgaggaaaagcctttaaaaagatatgatcttcttggacataagggggcttcatggtggaacaaacaatatggaactccttaagatgcttatgaggatcttcacctacaagaccatgaaacttgggcagcaaatgtattagtccagtcttgagtacatatggaacaccctcatcaggatattgaatgtacaagctttcataagagaaatcaagtgcatccatctccctaagagtcctctcacgaggtggaggttgag

SEQ ID NO: 231625 - DNA, 411 bp, Glycine max
  unsure (1)..(411): unsure at all n locations
agctnttgnttttgtaaaaggtcgatttacattgtattaaagcatatataatacttttaggctatttaaaagtttattaaatgtttttttattgatttaatcattaaatcgcaaatatatgttatcttgattacttgcattagattttgtaacagatatggttaataatgatataatataattaataatattatatatatatatatatatatatatatatataatatgtattatacattaatttcgatatataatatatattatcaattggtttaaaaattataaatcttactcatatgataaaagctatttatctttnttgttttcactaataatactccaccatatagttgaaagaatattttttctgaacataaaaatattaaaataagtcttgtttttctcaacaat

SEQ ID NO: 231626 - DNA, 278 bp, Glycine max
gatattagatagaacattaatactttagaaggcactatgctgtccggaaatattaggggtttttttataccactaattttttataggtgacaataattaaaaagactctatgggttaactccataaagtatctcgtattatattcttttatttaacaaagatggaattttaaattttacaagaatattaatcaaggatcaatttaaaaaaaattatgaacagatgacctgcaatacgattgagtaaataatttacttatatcaaaacttcctatttag

SEQ ID NO: 231627 - DNA, 413 bp, Glycine max
agcttagtagccaactcctgaggatcaggccttttgagtgcaaacctggaatgagtacataagttctccccctcctccaaaattattggggtcttcagaaatgtgttaagagtatcctcatcaaacttctctaagtgacctctcacctacttaggtgatttatcctcggggtcatagaggttggcgttaaactccttcataatagcgatgtctatgctactgtcagaaaaatcagtcagtttcacatcccaatggcgtctctcgggttcctccttgaactcatcaaactttgtataatagactaccacattcctctctagtattagcttgtgaggcaccacaatgtctgtatatctctcccaagcctcttgggatgtgaaccaggatctatcaaatttggcttgtgtaggtgt

SEQ ID NO: 231628 - DNA, 390 bp, Glycine max
  unsure (1)..(390): unsure at all n locations
aatctaatagagactgtngaagcattaatttgtagattgtcacacagagattaggctcaagtttctctcattggaatgcttcaacttgtctttaagatgctcttccaacgtgtcttaaagctccaaagaataccgctgaagtgagctccactcaactaacagacttttggagtaagtagacaaactngacagctgccatgaaacgacagctngcagaaccattctaaggtagacattctgaggaacctttatgatgagcatcttgaagcattatcagaatagttatttctgaagctcacatgatatgcctttatgaagtaacacaacttcatcaatcttaaaacatcttcatagcataaatcattttgaagaagattgcttcatagatac

SEQ ID NO: 231629 - DNA, 429 bp, Glycine max
  unsure (1)..(429): unsure at all n locations
agctngngcaaatcaagtcactcccgttattttatctctagcatgcattggatgttggtctcgtcctttgtcacgggaagccggaaggtccatatcaccttcttaattgtacacatggggcactgcgcccccaaatgcgcaagtaagaagagataattttccaggctctcgtgtccgtaaaatgcattcatatcatgcatcgcataagcatctcttcataacatcataatggacatatcctgcatttgtccgctatcatattccggcctcacattntgcatgagtcatggcatcatcatgcatatgcgttcaacaaactttttgatctgcaaaattgcataccatttgttttcatgtttgctcatccttgtgttttcctctacaaaacaaaaacaaaaaagggggaagcgtgaaacttcacactacatt

SEQ ID NO: 231630 - DNA, 384 bp, Glycine max
catcacacagcagattcctagcaagactacccatcatatctccccaaaccccatacccacgataatcaaaggagaaagaagtccacccaaacctgaaatatcgaagtcccactcgtagccacgcacttcacgaccctgaaaatgctctcctttcacgattgggggcagaaatgagcaccaaaggttgaagctttgttggggtttcaatggagaatggaggagaacgaaaagcaacgtgaggaagagggagagagagagctgttctgaataaacaaaagtgtgggggctgagtgaagagagagaaaagcttttggtcttaaataaaagaggtatctctttttctatattttattcaactctgcccatgccctattgagtggacag

SEQ ID NO: 231631 - DNA, 404 bp, Glycine max
  unsure (1)..(404): unsure at all n locations
agcttagcaaatggacctgtgtgttgccncatttcatcatatcttctgcaatactcatcacctctatcatatctaacacatcccacattgatgtctcattaccataatactccagtgtagtaaatttctaaggcatccattgcctacgaaatctcgggcagtaagtagacataaccataacgtgaaatcatcatcaataatagggataaagtatcattcctttccaaaagagctaacatttaaaggcccacagatgatcattatgcacaattacaagaaactgagggcttcaagagactcacttctttgtatgattcgatcggtaccctttatacaacccacacagatctttacatccgtaaaatataaaaaaggaagaatctcctttattatatcaatccttc

SEQ ID NO: 231632 - DNA, 410 bp, Glycine max
agcttccatcaaagaggcactaagcaaattggtatccttggagcggaggtttccaaatggagggctactgctcgcacgatttggagagtggagtgccctaaggtagctagtgccaccgtcacttttgttgaagctgtgaagtcaaaccaccaactgtcttccaaggttggcagtattctacccaagttgttgcacaccaggttggacggtgatgaactctttgagcgctacaaggatttgtagagagagaaaaaggacttggctagcaaggtgtagggtgttgcttccaacctttctaaactctaaagaaaaaggaatgcaagaaagtataggagacacaagtactacttctagcctttctaaactttaaagaaatatgctttgtaggcccgtaccgtcctgggtttcat

SEQ ID NO: 231633 - DNA, 333 bp, Glycine max
gcaaaaaaagagagataggaaattttccatcctatggaaaaagagaggtaagggaatttcccatctaagagtgggagaaagccaaaagaaaagaaaggaaattcccaatcaaagaatgggagaatggaaaaagagaaggagaagatcgatagaaagctcctgatcaaggatcgaaagagaacagaagaaatgtgcagagaggtctcttgaccagacaatatctgaacaaatacggaattgtcaccaaatgaacaaaagatagaaaagggaaccataacctaagagtggtctttctcctttgattaccaaccaaaatacctgtgcgtcagtgac

SEQ ID NO: 231634 - DNA, 429 bp, Glycine max
agcttcattctacacctgaaaaagaggatgagctagctacacaaaagagaaagcttcctgatcatgagggagctaacaaaaattttcatgcaggtggaccttcttctagtagttctgacttgcagcagcctcctatccatcttccattttcacctagagcaattccaaacaaaaaaatggaagaagtggaaaaggagatcctggagactttcaggaaagtagagatgaacatacctctgcttgatgccatcaagcagattccaagatatgccaagtttctaaaggagttgtgcacccacaaaaggaagctcaaaggcaatgaaaggattagcatgggcagaaatgtgtcagcattgataggtaaatctgttcctcacattcctgagaaatgtaaggacctaagtactttctgtataccttgcattattg

SEQ ID NO: 231635 - DNA, 389 bp, Glycine max
  unsure (1)..(389): unsure at all n locations
ataactagctgctttcctgaatcatgagtatgtagatgttggaaaagaaacaccattatgttggttactggttctactcttttttttttgtgtgattgcttcctctccctttctattagaaatagctggttctagctgctattgatgtcatatattggatggggactaacatgctngatattgtgattcttgtaggcaacatcaatttgttattgaaaaagttaattaccaatcaaacatagtatttgcctatctcttttttggcaaacataggctttgttgccacttaaaacaaatcaacaccgtattcatgcagtgcctaattaatggaaattcacttctcatactcctgttatactactacataaaatcaaacgatgtttatcaac

SEQ ID NO: 231636 - DNA, 337 bp, Glycine max
  unsure (1)..(337): unsure at all n locations
agcagcaactcaacatcactggagcgagggatatattatatgacncaatcagacacccgagaaaaaagttattgtcgttggaatctgctcacagctcaacattcaaanccgagcgnctccatatattacaggactcaatcaaacatcccagtaaaacgctattgctgatggaatttgctcaaagcttcaaaattcactttcaagcgccccgacatactacgggactcaaatacacatccgagtaaaaagttatatgccgtggaataggctcacaactacaatattcaattaccagatgcttgatataatacgggactcaatcccacgtccgagtaaa

SEQ ID NO: 231637 - DNA, 335 bp, Glycine max
  unsure (1)..(335): unsure at all n locations
aaaatgaatgttgaagctctgagccaattcaaacgacaataaacgtttactcggatgaatgagagagtcccgtaatattacgagacgctcgaaattgaatgttgaagctctgagccaattcaaacgacaataacttnttactcggatgtctgattgagtctccgcatatatcgagacgctcgaaattgaatgttgaacctctgagccaattcaaacaacaataactttttactcggatgtctgagtgagtcccataatatatcgagacgctcggaattgaatgttgaaccttgacccaatcaaaccacaataccttttactcggatgtctattca

SEQ ID NO: 231638 - DNA, 414 bp, Glycine max
agcatgcaagcttaacatgagtacggaggcggaagactactttaatatctataaaaagggagtcacgccaaggagaaattgaccaccgagtctcataccactctaatatacacctgaagcctgagatctctcccttagggaatactttcctctctcccattatagactattcccttattaaataccctttcctacaatcaatatctatacccctttacaggtataaggccccttatggatatgagagactaaacctttacttaaggtctgacaggactaaaaagcataaagaagtcttttatgcttcatatctatacgagcaaacaagtgtttgcatttctagtatcctatcttaaaatagaatcacgtatcattcatcctctgaacatctttaaggataaggcgctcgacaga

SEQ ID NO: 231639 - DNA, 409 bp, Glycine max
gaaaacatagggataagagaagaaaaatataaaagataataaccacattttttaagttatatgtcagtagggggaacatagggataagaaggaaatatagaacagaaccaaagagaaagtaacaatgtaccggataacaaaaaaattgaatagaaaatgaacaggaaaacaataggcgaaggttgagtatatgagtatatatgtgtagaggcgagttccttgaacatggattttaagcttaacagcaagattataaaatttgattgattatacaattgattaagttatagatttaaaagttaacatagttaaattcgcggcaaacaatattaatatataataatatcataactttataatatgaaaaactcatatatatatatacacaatatatcagtgattatttaac

SEQ ID NO: 231640 - DNA, 391 bp, Glycine max
  unsure (1)..(391): unsure at all n locations
agctcatgcgcanatttccttacaacgttctttgtaaaaacattctattaaccgaaaacaaaataatatgcgcccatgtacaaacaaggcagcttcaatacctatattatctacacgtactctctacgggtatttgttacattacacacatctctttggctaaaatcacatacttgcatactcaatacattttgggggaccaaaaattgcacatgcgcacctcttggtatttctaatacctatacctacacaaacttcatgatgaaacttgactttctacacaataaggtgctacattccatgctctcttcaagatgttgctacctaaagcgcgatgccaaatcaaatatattatcttttgctgataaaattgttttcaaataaaaggtta

SEQ ID NO: 231641 - DNA, 394 bp, Glycine max
  unsure (1)..(394): unsure at all n locations
aatagtttaagagagaagtagattacacttggttttcactggntcattcaagcaaagctacgcccagttctcctctacataatttgaaagggtttcactaatcaaaatattgattacaaataagtattttatcctgcccctcctcactatacaagtattctctaagccactcttagcacacccttggactcccccagaatttaaaaattcccaagtattgtttaacactaagtcacacttggattttagaaacaaaaggttgaataaatacaatgattcaataatactctaagagtggataatctgttaagcccaaatataaatagctttgtttaacaaaggatgacaagattaagcgtaagatgagtgtccactaatttagcggaagtttgct

SEQ ID NO: 231642 - DNA, 414 bp, Glycine max
  unsure (1)..(414): unsure at all n locations
agctttcttttaagttgttgctccactcttatataaanctggactagctcatctaggtccctatatggaaggagttcaaccttttccctcacttccatattaagcccactaaggaacctagctatgcttgttctttcctcctccctaactccagctcttaaaaggagtagttccatttgttgtctattttcttcaacactcatactcccttgtctaagcctttggagcttgtccataagctccctttcatagtaggagggaatgtgcctcttcctaagggcaatcttaagatcattccaatactctactggaggatccccatgaatccttcgttccctaacaagggaagtccaccaatagagggcatacccttgaaagctaagggtagccaatggaactttctctcttcctaat

SEQ ID NO: 231643 - DNA, 419 bp, Glycine max
agctttgatggttttgagaagaaatcacatgtttgtcatcatcaaaaagggggagaatgtgaatgtatgtatacatgattttgatgatgtcaaaagaagaatcaaacaaggctcattttgcttcaagattaatacaagattgtttcaacaaacaaagccttgattcaagatttcttcaagatcaagccttgcttcacaatgaaaggtttcaagtcattcaaggcacatgtaatcgattaccaatacatgtaatcgattaccaatggtttgaaagtgtgtaatcgattacacatcatatgtaatcgattaccagagactctgaacgttgagaattcaaattttaaatgaagggtcacaactgttcaagcaaaataattgtgtaatcgattacactaattttgtaatcgattaccagagcg

SEQ ID NO: 231644 - DNA, 392 bp, Glycine max
  unsure (1)..(392): unsure at all n locations
cttatacaagaatgaagctctgataccacttgttggacaagtggcctcaggtatcttaagaagggggggggggttgaattaagatattacaacttatttccccagttaaaaattctatttcactgtctatccaaagtataaattcccttaataatgaatttcttaaatattgattcaaatagaacaatttgaatatgaatataatacaataataaataaaggagtttaagggaagagaaaatgcaaactcaaatttatactgggtcggccacacccttgtgcctacgtccagtccccaagcaacccgcttgagagttccactatcctggaaattccttttacaagttctaaacacacatggacaacncttcctttgtgttagaattctttac

SEQ ID NO: 231645 - DNA, 385 bp, Glycine max
  unsure (1)..(385): unsure at all n locations
agctngcttgnggggcttctatggaggctggatctttnancttcaaagaggccctttaatggtgaattttaccatggagatgccgcgggagaaaaaggacaactagtgagaggaggcgccattcactatggaataaaccatggaagaaggaacttcactaccaagatgagccttggataagaaacctggaaaggatgcttcaatgaaggaaaagaaagggggagagaaagagagagtggggagcctgaaattgaaggaagaaaaagggagagaaattaaactttgagttggtctcaaagactcttattcataaagttacacaagtgttcacacgcttctattatagactggtagcttcttgaaagctttttaagaaacttcttga

SEQ ID NO: 231646 - DNA, 318 bp, Glycine max
gaaacattctttgtcatgtttttgtctgataagcttattacatgttgatgattataacacatatatatgtatatgaatcttaaaataaattaggaagctatatttcaaaaaataaaaataaattgaaggaaattattatattaagaatcaatgataaatacttttaatgtatcttttagtttaattatctattaactctgtttaattaacaataatataagttcgatcaatatatacatgtggtgtgccatgtaaatattaatactatgtcatgtgtatataattcatgagatgtgataacatgttgctttgggatta

SEQ ID NO: 231647 - DNA, 427 bp, Glycine max
agctggggcattaaatatcctgatgagggtgtttcatatggtctcaagactggactaatacatttgctgcccaagtttcatggtcttgcaggtgaagatcctcataagcatcttaaggagttccatattttttgttccaccatgaagccccctgatgtccaagaagatcatatctttctaaaggcttttcctcattatctggagggagtggcaaaatattgactctactaccttgctcccaagtccattttcagctgggatgaccttaggagggtgttcttggagaaatttttccctgcatctaggaccactaccatcagaaaagacattttatgcatcatgcaactgagtggagagagcttgtatgagtattgggaaagattcaagaaatcgtgtgcacgcttccctcaccactagatttctgagc

SEQ ID NO: 231648 - DNA, 424 bp, Glycine max
  unsure (1)..(424): unsure at all n locations
ggagatgagattngttgaacacaaatggatcatggccggtgagccaccaccagtcgcaaacatggaccagatggaagatgatgctcaacaagagtttgcgtactaatggagtccttttgagtctcttatgattcagatgatggataccatgcttcacctacattaagagcacttagtcgatgttcacggcaccttataaaacatcaccactaggctatagaacatacaaactaggctaacccttaataaccttcttaacccagataaggatgaagcatagttatgttgtgcttgggtctactgtctgctgatttggtttgttatggcttggatttttagctctgtcttataatgatagttaagtggtttatgccctatgattaatgaattgtaatggttttctatctatgaaatgcttttattt

SEQ ID NO: 231649 - DNA, 227 bp, Glycine max
  unsure (1)..(227): unsure at all n locations
acctntgagcgaatgcagataactttaactttttactcggatggcttattgagtcccgcaatatatcgagacgctcgaaattgaatgttgaacctctgagctaatctcaacgacaataactcttttacttcgcatgtctgatagagcccacgtatatatgcaaaccctccaaacttgaatgttgaacctcttagccaattcgaaccaccataactttatactctgat

SEQ ID NO: 231650 - DNA, 400 bp, Glycine max
agcttcgtgtaatcgattacacgatatttggtttttattaccacggctcgtttctgaaatatctaaagatgtaactcttcaacaaggttttgactctttcaaatgggttttaagcttttctaaaagatataactcttctgaatggctttcttaaccagacatgaagagtctataaaagcaaggctctcttttgtattttaaattaaaataaattccaagtctttctaacaatctcttcgaactatttcttcttctttgtaccacaagttttctgaagttatctggttttctaaaccttgaaaactcgtgctattcatccttgtcattctcttctccctctgccaaaaagaattcaccatggactaaacgcctaaatcctttttgtgtctctcttctcctt

SEQ ID NO: 231651 - DNA, 353 bp, Glycine max
ttatgcttaaccaggcataaaaaacttaatggtgatgttctgaatttgtggcaccaaaagtcaccctcaacatccaacaagatagtcaccatttggtctcccaaaggctgatgcctagggtgcaattgagcccttattacacttgactaacctactaaggcctttagtgattacccgaacatattttggtcaccactttacaggattggccattatttatacaactaacactctaaattgagacaagtggtgtcatttagtcctcctccatttggggcatgatacaactcacaacctggacctttctcttgaacttggcgtgaattaatagaaggacgcactgttgagaactc

SEQ ID NO: 231652 - DNA, 362 bp, Glycine max
agcttctggatattatttataagtcaggaattatctgcaaatgctatatcagcccctataaacaaggacccgtaactacgctccactcctataaatatcaagttccatcgaaccctctacacatccttcacacacttcagcacacaagcaacaagtttgtgcctctctctttctctctcactcactcaagccttatttaagcatatacttgctttttatctcctaactcatattcttacttgagcatcggagtttttttttgcaggtcccccgtcctgttctctctacaaaggtcatcctcaaagccgacgtataaagtcatggagcccactttgaccacgtccaccctgacgtgccctaac

SEQ ID NO: 231653 - DNA, 320 bp, Glycine max
  unsure (1)..(320): unsure at all n locations
tatcatcatcatcatnttttcgtcattgaggtgccacttgagctgccaggttctccacctttgggcgtattctttgaaagattcgtgcccccttttttgcacatattttgtagttgcatcctatccgaagccattataccgacactgcctaatgaaggcaaccattatgtcctcccaagaatggactcgggaaggttccaagttagtgtatcatgtaacaactaccccagtaagactttcttggaaggaatgtatcaacaatttctcatctcttgcgatgcccccatcttccgacaatacatctttatatggttcttggg

SEQ ID NO: 231654 - DNA, 425 bp, Glycine max
  unsure (1)..(425): unsure at all n locations
agcttgtcaagccccctagctaggacagagttgtcctatctactttctgttaagttgtccagggaggacactacttttgttttgcaggaaaagtcaaacatgtcaagcaagggaagtccttgtgattgacaattctatcttttttttaccattggagaacgcattgaagacaagcattccatttgtcttttactacgggcaagtgcagtgcacgcatgttactctagcatatgtgtcacttgaggagtggacacgtattggagatgtggtgcatgggatagtagggctacctcgtggtgcgaactttcattgcatcatttcagctaccgctaattactgaagagtcatgccttcacttaaatgaagtatccattcgattntttattaccaccactttgaatttatgctctttctcctgaaaattc

SEQ ID NO: 231655 - DNA, 442 bp, Glycine max
  unsure (1)..(442): unsure at all n locations
tctatttatagacctccaatctttaatggagagggttaccactactggaaaacccgaatgcaatattttatagaggcaatagacctaaatatttgggaagccatagaaatatggccttatatacccaccacagtagaaagagttacaatagatggtagttcatcaagntaaagcattacaatagaaaaacctacagatagatggtctgaagaggatagaaaacgagtactatacaatttaagagccaaaaacataataacatctgccctaggaatggatgaatatttcaaggtttcaaatcgtaagagtgctaatgaaatgtgggacactcttcgattaacacatgaaggaactacanatgttaanagatctatgatatatgcactaattcatgagtatgaaactattagaattgaatgcaatgaaaatattcaaagcatgc

SEQ ID NO: 231656 - DNA, 414 bp, Glycine max
agcttctaagcataataagagtaaagtgctactatactaatcatcattaatcgaagaaagtttctatatcaaattaaatattaccaaatttcattaaatgttgacccgaaggtagacttctctcattgtttttaattctataaatgctaattgctgtacaaaaagtggatttcttgaatatcatgtatgtgattagcatttattaatcaaagaaatccattttaatttctttacagcaatcaaagaaacctattaatgcaaacttgtttgttcggtaatatatattatataagccggaatttttaaaaaggtacatacattaaatctttgttatttatgtatgattatctgcttagaattatctctctcatttttatataaaagatattctctcactacgatatgtcctattta

SEQ ID NO: 231657 - DNA, 439 bp, Glycine max
tcagctgagacctgaggagacggaccattccaagtgttggagaagatcaacgacaatgctctacacgattgacttgcctagtgagtataatgttagtgccactttcaatgtgtctgatctatctctttttgatgcagatggaggagccttggatttgatgacaaatccttttcaagaaggacggagtgatgaggacataaccaagggcgcggaccatgaagcacttgaatgtcccatgaccataggcatacttaaacaatgccaacacgtcatagagacaaggctggtcatttgtatagctgccattgatgatgattgaaggcccaagtggataaagatgaaggcccagatgcagaggcactaccaagactactaattgttgttgaaggcacaaactaacttgtaggctccagtaacacacagttttaagcataattta

SEQ ID NO: 231658 - DNA, 424 bp, Glycine max
gcatgcaagcttagcaagacgacaacattcatccaacacacaatctatagattccaccgaggccaaatgccaaaatctgaaccaaggggaaatttgctattgatgttacatgtacttgtgtgttatcaaatgagtcattctaagtatatgctttatacaaaaaatgaaatattagcttactatatttgtgtgaagctttgaaggacattcattaggtgttgtatcattgatgcaaatagagtatttgaatgttggacaagatacccgagtctcaacaacatatacatccctgggaattcctttctaagagccaaaatctatggattgaagagcctatgaaaaacacaaacaaggtttaagtaaacaaattatccattgaaaaaagaagaaggaaatagaagaaacactttatagacagtgaact

SEQ ID NO: 231659 - DNA, 427 bp, Glycine max
  unsure (1)..(427): unsure at all n locations
tgtgccggcgagaagaagacttctgcgacggagaccactatagaacaccaacgaggaatgagcgcggaagaagactctggaccaagaagaagaagtcgaagaaggggagaaggttgttgctgggtgcacggacgatgtatgagcgcggaagaagaaaggttnttnttttaaaaaatttattaagttttgatttttaaatgaagggcattttcgtaacttcaatgaattgctgggtgcaccagcaattttgctgggtgcacctagcaacagccggcccccaaagagaaaaagatcccaaattttattttagtactaatatacctcaaaaaanaaattattgtagaattatattttgaaaataatttaaataaaacaattataattgtaataaattattttatgaataaataaaaagtctcattcttaa

SEQ ID NO: 231660 - DNA, 395 bp, Glycine max
  unsure (1)..(395): unsure at all n locations
agcttgaaagacctacaactcgcgtacctatttatgttatcaccatcaacatcagacaacacttgtccatgcttggggctcaacaaactgacaaccctcttacttgtcaaggctactatgctcgacacgaaanttctccttcgacactagacaacctttttcgctcgtaagctgactaaaagcttagggggcttatgtactgtctaaggtccacaaaataaacgtggaaaactacgtggcactccaatacacatgccaaccctccatttcagccctaacacaggagcatggacgtctcgccctcaacagctgggctcccaaattgacagggtatctttaaccacttcattatttgaaaatgttggaactccttatctatggcacgtttatattat

SEQ ID NO: 231661 - DNA, 349 bp, Glycine max
  unsure (1)..(349): unsure at all n locations
gataaatcccatagagaaaacgtccgattgatgttccgctttattttacctaatagatgtgtttgtgattagtatattattcttgacctcttttttgaattccaacgtggttgcggcacgaccgaacggtcggaatntattttaaccgaagttaacggataatacaattcaaacgttcggtggaaatttattttatttttaagataagcgataaatgacttaagtaaaatggcttaagcacgtctacacggggtttaaaaagtgaatgaaacgagaatacattatcacataacacaatgtggaccaccatgggtacatagaatgaatctgataagctttgttcgaggta

SEQ ID NO: 231662 - DNA, 418 bp, Glycine max
gagcttctggatattagatataggtcaggaggtatctgctaatgctatatcagcccctataaacaaggacccgtaactacgctccactcctataaatatcaagttccatcgaaccctgtacacatccttcacacacttcagcacacaagcaacaagcttgtgcctctctctttctctctcactcactcaagccttatttaagcatatacttgctttttatctcctaactcatattcttacttgagcatcggagtttttttttgcaggtcccccgtcgtgttctctctacaaaggtcatcctcaaagccgacgtataaagtcatggagcccactttgaccacgtccaccctgacgtgccctaacttgagagtttggtaagaatagtccttgagtaattaaaatatttattactttttta

SEQ ID NO: 231663 - DNA, 260 bp, Glycine max
cactaacctggctaatcgcgagtaacactgttgccccttttcatgatttgttgcctctcattatacctatttcttacttgaacgctgatttcgatggcttggtggagattgattaactgcatgaatttcatacaggatactttcaaaatttgtgtaaaaccccatacctacctttggttccattttaaccatgcattgtctactatataagccaataagcttctcttcatgcttcaaggaaaaagttgtctcaatgaggc

SEQ ID NO: 231664 - DNA, 410 bp, Glycine max
agcttaagccccatcatggcccccttgttacatttcaatcctttccaccatcttcatgggacaacaatcctgtgatagagccgcttgccatcttggatcacaaatgggatgatcaggacccctcggtactgtcagtcctagttcaatgggttggtttgcagcccgaggatgcaacttgggagaattgggccgatctccaaggaatctaccaccttgtggacaaggtgcttccggaaggagtaggagatagagtatcagctacaagacccaagcggaccattaagagaccactgagttaggaagaatacatccactaatcactcagcaacataaacagaaggacaatttatgaaactcacctttaagtagtggtggcctttctcattgagcgtatctacatcgggggcatg

SEQ ID NO: 231665 - DNA, 413 bp, Glycine max
  unsure (1)..(413): unsure at all n locations
agctgcagctnttatnttagtagatgaagatgaattcttggcccctcatggactcctctaaaaacaatagcatcattttttgcactgaattgttgggagttggaacccatcttctcaatcaaattcctagccttagcaggggtcatatcaccaagagatccaccactggcagcatcaatcatactcctctctatgttgctaagtccgtcatagaaatattgaagaagaagttgctcagaaatctagtggtgagggcagcttgcacacaatttcttgaatctttcctagtactcatacaaggtttcttcactaagtatcctgatgcctgagatgtcttttctgatggcagtggtcctagatgtacggaagaatttctccaagaacactcttttaatgtcatcccagctgaaaat

SEQ ID NO: 231666 - DNA, 423 bp, Glycine max
  unsure (1)..(423): unsure at all n locations
agctngnctatctgcacatgtgtccctggaacatgaacaaagcggatacctaggtgattaaggaaagctatatcctgcagtcctcagaattagaaaacaagttataatgcatagtactgcataaccatagctaagtaatgtactatcaaagataataatcggaagcaatcatgcaaattgtgaagttaaaatatgaaagacgtgcgtgccttgagaatgggatccaagaaaggaccagaaacaatttcaccggaaataatgataacaaaggtgctaccacgataggcccacaagtaaggccaggcctcgcgaaacgaacgcacgaattgcttatcctccatcgtcccgtggtagctctctccatcttggctcaacgcattaagcttctttcggtaacccaaatgggccgccacgggccgagct

SEQ ID NO: 231667 - DNA, 380 bp, Glycine max
  unsure (1)..(380): unsure at all n locations
ntatgcaagtaataacaaaagtccctgcagaacgaaaacttatttgctgaggaatttaacctcgacattatatgagccacgtgactntgtccaatatttacctattgaattatgaataaaaaattgtgatgcacagggtttgtttctttgttttaataagattatggtgtcaattatgattgattatcttttattcgtacataataatggcccatcaatgggccatgtaagtgtggtccatgtacgtgcctatacttgagaacattgtttctactctcttattgtatcttgtatcttttcatagtccatcttgaaatgtaaatttttattctgaaatagacctcttaacatatattgaaagatgcanaatacaataatag

SEQ ID NO: 231668 - DNA, 413 bp, Glycine max
agcttagagtaaatgacttcttctcgtaaccattaccgctagacttaggatgatgatcgcggtgatcagaatcgcttttggggcttttctcaacgagcttccagctgagcttgatgccttggaaaagatccacgacctcttgtgttccatccactgccaccgcaatgttcttgtgctttgggagctctccaactttgagggacttgtaagagtgggatatttgagcagggagatactcttgggcggcttggaagagctggttgatttggccatcccaaatctcgttgatctggagtgagacctgtttaatattttggcgatctgagaacaaagcctttatctttgtgactatgaaggtgcgaacttggtggggtatgagatctgtgatcgcggttctcagaagcatcatgaat

SEQ ID NO: 231669 - DNA, 336 bp, Glycine max
tctgacaactaccattgtctatgttggatgggtcaagaacctcgagcattgtcttgatgatcagtgccttgcgaagcacggcaaccatgtctgactccatcctgtcccttaagccgcggagaactttggcaccgggggtgcactttgtctcttcattcagttgctgaagatcaaataagagattggtgatctcttccatttcaaacttgattgcttcaacttcttggaagaactgatagaggcttgcggcttccgtggggttgagtttccctgcttcaatgtcaagatcgtcgtcttcaaggtccttccgagcctggttcttcagttccacataac

SEQ ID NO: 231670 - DNA, 416 bp, Glycine max
agcttccttgagatgcttcctttggaagattcttatagaagctggagcttagctacacacccctctaatagctaaggtcacctctttgagataaaaagctatagtttaactacacacaccccctataatagctaagctcacccccatgtcaaaatacatgaaaatacaaaaaagttcctactacaaagactactcaaaatgccttgaaatacaaggctaaaaccttatactactagaatggccaaaatacaatgcccaaaagaaggaaaaacctattcaaatatttacaaagaagagtggacccaaccttggcccatgggctcagaaatctatcttgaggttcatgagaaccctagggccttttttagcagctctagcccaatcctcttggagtcttctatccaatgcccttgggg

SEQ ID NO: 231671 - DNA, 394 bp, Glycine max
gtgtatggttaaagtctcacgattgtgacgtgctcatgctataattgtagtccgggtacacgagaattttgcaacaagcagtaacatactgctatgttttcttcatgctattgtacaaaggcattgatccagcatgttgatgagttggaaaatgatggccgcaattatactatgccaggtagagatgtatgtttcccttactttctttgacatcatgatacacttgattgtgcatctggtcagagaaatcaaatgttgtggtcctgtttatctacggtggatgaacccggctgaacgatacatgaagatctaaaagggtatacaaaaactatatattcagagcattattgtgataggacattgcaaagaaccatgaattttgtcaaatacttga

SEQ ID NO: 231672 - DNA, 252 bp, Glycine max
  unsure (1)..(252): unsure at all n locations
agcttgcttctacagnntttatctttgtttcgttagattgtcttcaaccaaatagaagtcgcttaaggtgttggacctttaaacgatcttttgattcttgaaaggagagaatcgttaaggcgcttgaccctttgaaaaatctcttgattctttttaacagagagaatcactaaggcgctggacccttttcgacgatctcttgatttttgaaaagggagaaagcaaagttgttgcgctctacttattcatgtc

SEQ ID NO: 231673 - DNA, 351 bp, Glycine max
  unsure (1)..(351): unsure at all n locations
agcccactacaatggttgtcttaggatgctattgaagcattnttcatgatgcatgaagaacaagttgaagcattccaaaactgtaacactgaatgcaagatctttgagtgagaaatctgtgttttagcttcaaccctctttgtgagagtgacctacttctgatttgtgcttacaaagcttgtaataatattagatagaactgcgagattaagtctctgagtggcatccttcttgtgaggtgaaaatctatattttgtgcataacagatctatttctctgtaaaagtctagcattggctgtgataggtgaaagcangttatgtaattggtctattcatggctaggattggat

SEQ ID NO: 231674 - DNA, 415 bp, Glycine max
  unsure (1)..(415): unsure at all n locations
atgcagctgcagctttgctctanaaagaagaaactgggtttgttttgaatgccataaatgcggggaaccgaataaccaattgtggctctcctggggtagcggggaataattgaatgaatcttttacttacgtgtggggcatctcttactgtgtaacaatccctaaagcaattagctaataatatcctcatgagagtttataccaaaaacgcgactaatgtagaaataactttgtcagcattaatacgcaatttgcgcgggtgccctcatatttatccctgcctaattcttgatggccaattttccattccaatctattttcgttatcgcttatgtttatcggaaacccatatatccccttctgtgctcttgtactgtcatgcgaatacaaaacaaaatcaggggaagaaacaaat

SEQ ID NO: 231675 - DNA, 369 bp, Glycine max
ttatatatgagatattatatataccacaccaccctgaacccttaagagccaccattagaaacagaaaatctacccatcttatcttttcggagccacgcgtgctataaatccaagccgaacatgcttgcatcaatgccaaatcaaccacttagtttttgcgttcttatcaagtagactctacatgccttattaggctgaatagaaaacatatcctctactcatggttcctagagacgcaagagtttcacatgtatgttggtagaaattacatatcctttatggaactggaaagtgaattggacaatttaaatagaagggtccaattaggttgttcctctcaagaatttaaggccaaatgagttcttcaca

SEQ ID NO: 231676 - DNA, 365 bp, Glycine max
  unsure (1)..(365): unsure at all n locations
tctatctgtaacatgatgtactctntataagagattcattatacgattattattctatgcaattctttgttgttctattacttatcattatcattatgtaaatgtcaattttgacgcttaattatgactcaattagtcatcagaatttatattgcatattttttagttgtaaattaaaacaaataaatcgtataaatattttttcactcttagaaaaactattaaaaataaagatattgattagttgatcatttctattgcttgacatcaacaaatacctttagtatattgattcaagatttattatattgaccaaactatcggaccctctaaatgtgccccataaggtcattgtaatatttatg

SEQ ID NO: 231677 - DNA, 421 bp, Glycine max
  unsure (1)..(421): unsure at all n locations
agcttgtangattatggggtacccgtcatatgtggtactaggtggcaatcgggcgatggtgcaaatcaactctcccacatccacaaatcaaacatgaacccaccatccccagntgcccaccttcaactgagctcacgtacccccacatagcccttatccttgttcctctcagcaccgggtccccatcaacccctccaagcttccacaacatccaagcaattcaatatccaaacatcatgaactatcttaaactaagaaaacagggcagaggcagacaactctgccaaaaacacattctaacaccacagttttccctactcaaataccccagtaacattccctccgtttcgattcgttaaccgttggatcgactcgaatattttactggaggttcctagtacataagtctacattttgaccg

SEQ ID NO: 231678 - DNA, 431 bp, Glycine max
  unsure (1)..(431): unsure at all n locations
gcggtggtgactgcgtgggcgtctccttcctttttcctcgcgcccactactgtggctcttctgttgttggtggaagcatatccgaacttgcctttccgtaatccagattcaatcctttctccggcgaagacgagatccgcaaagttagctggcatgtaacctatcagctnttcatagtagaacgtgggtaacgtatctaccataattgtgatcatctccctttccgtcatgggcgatacaacttgggctgcgagatccctccatctttgtgcatattccttaatggactcatgctctcacttagtcatactctgaagctggttccgatcgggagccatgtccgtattgactagtactgcctaatgaaggcagttgccaagccttccatgatcggatctgggaagcttccagaatggtataccatgctacag

SEQ ID NO: 231679 - DNA, 413 bp, Glycine max
  unsure (1)..(413): unsure at all n locations
tgcaaacttgatgaggataggagaggaatgcgtgtttagccatctaatgccataactaatgagtanaatttttagtataatcaatgtagttcggggtctgtaacctctgagagtaaattaactcactttgaagcggtgagtgtcttctatattatcaaatggccttgatatgggaaattggctgagggactgacctttggccataattcgggtgcttagtgtgaggagtgcttttaaggcaatagtactctttagcaacaatggaagcatcatatcacctccttgattgcgtgctcgataagatgatattcgaaagttctaattgtgctaaacattcgtgatatctaagaatccccttcagacattcatgggcacgtggtactggacatatcatatgtattcattgtacagac

SEQ ID NO: 231680 - DNA, 395 bp, Glycine max
  unsure (1)..(395): unsure at all n locations
agnncttagcttgaaagacaatggatactttatatttaaacaaaagagtaaagacaaatgtaagagtaaattaaaataacttccaattcagggcttgcttcatataaatgaaaacacggaaagtgtctacaagactatagatgtcaaacacactacagcatgtgacaacagaccagactagttccttgatctcactaaagtcaaggctacaaaaatctactgaaatcaatcttaagcagaaaaataaccaatcataattttcagcactaaattccagctttttaccacaagtatattattcatgcattttatccaagatagcaaccaaaatatcactttaaccatgtaaaatatagtatatatacctgacactgccatttagatgaaccggcata

SEQ ID NO: 231681 - DNA, 373 bp, Glycine max
cttaagagcctccttacttttcccactagtttctgaggagtcttatgatctatcaacaaatagaagtacagatggcttatttgctggtagaacgggctcttgatcatgtccatcaccttccagctaaatacaaacaaaacagggtaagttccaaaaatggaataattaattgaaagaagggacagatgtctgcatatggtggcgtatatttatcaattaaataaactagtccacaacaataatcagagatgagcttatagacaggatacaggagcgacaaaatatagcattatgacatacaccgcagaatatggaacagatgttagaaagggtttattcacctctctgacaaataaaattcatctgcaaacat

SEQ ID NO: 231682 - DNA, 417 bp, Glycine max
agcttgtatggcttaggatgtgcagtagtctttatgttgattttggcaaccatccctttgcttgccacattagtgcaactcccactatcaatgatagaacaaaccttctcttgaatgacacatctagtatgaaagatattttctctttgtcttgttcctttgttatggcttgacctcccaaaagtctccttaccattaacaagtctccatccatagcataggctttgtactccacttctccttcatttgttgttggggaatttggatatgagtcactagagattctttcattctccctcaacaccattattttcttgtttgggaattgagacactatgtgtccatttcccaaacacttgaagcacttgatgttcctactcttagaagaagaagattcattagtagaaggaaacatgt

SEQ ID NO: 231683 - DNA, 334 bp, Glycine max
  unsure (1)..(334): unsure at all n locations
ntgattaatcaaagggagtagaccgtgttcattgacatattattactattggtgtttgggaccatactatatccaaatgtagatggggtagtggacttagcaacgatcaacgcctttctcgcttatcatcacagtaaggaaagcccgatcatcgctattttggccgatgcatatcatacgttcgacctgagatgcgagaagagcagtgcaagaattatctgttgtgtgcctactctttatgtgaggttggtctcccaccgttttgtcatgaaggcaagcctgtctgtcctctacaaggtatggtaggagcagttattaactggttccctcgatg

SEQ ID NO: 231684 - DNA, 433 bp, Glycine max
  unsure (1)..(433): unsure at all n locations
cttaatcaccgcggctgcaacttgctaggagttttatggatgctgtttttgagattcaagaggtccttcaatgctgatttttcaccatggagatgcagcggaaggcaaaggataataggagaggggaggctccatccactagggaataagccatggaagaaggagcttcaccaccatgaatgtacctcatataagaagcttgaagaggatggtttaatggaggaaaataaagagagaaggggggagcacacaattgaaggaataaaagagggagagaagtggaactttgaagtgtgtctcataaaactttcattcatcaaagttacaacaagtgttacacatgcttctatttatagactatgtaacttccttgagaagctntcttgaaaaaacttctttgagaaaacttccttgagaagctagagcttatcta

SEQ ID NO: 231685 - DNA, 316 bp, Glycine max
  unsure (1)..(316): unsure at all n locations
gatctgcatagaccagagctggaagaggaagtcgctccgagagctngagatgagttatgttgagtgcactgtgagtgtcctcagagggcggagcgagacattcccgcactactctgtatgttatgcaatcctttcatactttctcttcttctttgttggaaaggaacgcttcccagttatggaaagctaaatccttctggtggatcttccttgactgacttgatgtaaatatttctgtatctatttaatgatgttctgtgcgtcactgtgctatcagaacttcattctaacatgcttttgccttgatcacgtagat

SEQ ID NO: 231686 - DNA, 420 bp, Glycine max
  unsure (1)..(420): unsure at all n locations
agctngaaattgatcaacagaagctctcgagatattcaaatggtcataacttggtacacggaagtccgattcacgcgcataatatatcgagacgctcgaaattgaaccatggaagctctcgagaaattcaaatggtcataacttatcacacgaaagtccgattctggcggatagtataccgagacgctcgaaattgaacaacgaaagctctcgagaaatttaaatggtcataacttttcacacggaagtctgattcaggtggataatgtatcgagaagcttgaaattgaaccaaggaagctctcgagaaattcatatggtcatatctttttaaacggaagtccgattcacgcgcataatatatcgagaagcttgaaattgaacaacagaagctctcgagaaattcaaatggtcataactt

SEQ ID NO: 231687 - DNA, 449 bp, Glycine max
  unsure (1)..(449): unsure at all n locations
actcaagcttctatataagctgaacgcatttatcaataaacacacgttgttttntattcanattattagagggtatctctcttatctgagtgagagtgattctcctaaattcttgagtgattcaagaacaccttggctgtatcataggactttcacaacctttgtgtgttgccctcgctggaaagagcgattctttccttcctctcatcatcacccttgttctttcaaaccacaattccagaagatccacctctgcccagaattatctcgtggccataactcccattttacgcactcaaattaagtgattcttgaatcttaattgaatttcaaaacgagaactctcacctcgttttggaatacctcatttggagccctgtagcttcagntatagacatttctataattctgttcagacaccccttaacctacgtttaccattccattca

SEQ ID NO: 231688 - DNA, 398 bp, Glycine max
  unsure (1)..(398): unsure at all n locations
agctngggatngnatttgggcatctattctatcttttttatgctgnctctacatacataaaacaactcctccatcccaattttgcaaaatcatattcatatatcattggggcatttcatcgagcacttgatgggcgcatgtttggacataaattgcaagagaatgggggcaatgtggcatgccccattgtttcagaatacaacataggcctaaggccttctcattcaaatcctcaacttcaaaaaatcaagcataaaaacaaaccaaaactgccccacaaatataatcacattctcacaatttggagcaccaaaagatgaagaaaatataccaatgggaagctaaaaacatcaaggattgtatacttacttgttggagtgaatagaaacaccataaac

SEQ ID NO: 231689 - DNA, 298 bp, Glycine max
agttgagcttatttatgagaggggtgtgtgttgctaagctctagccttctcaaggaaagtttctcgatgaatcttctaaaagaagttttctcaagaaatcttctcaaggaagcttcctagtttataaatagaagcatgtgtaacactctgtgtaactttgatgaatgacagtcctgtgagacacaaactaaaggtcaacgtctctccctttttcttccttcaatttcgtgctcccccctctctctttctctgcctctgtgttttcctccattggtagaaacctctccaagcttcttat

SEQ ID NO: 231690 - DNA, 415 bp, Glycine max
agcttgttggattatggggcacccgtcatatgtgttactaggcggcgatcgggcgatggtgcaaatcaactctcccacatccacaaatcaaacatgaacccaccatccccagttgcccaccttcaactgagctcacgtactcctacgtagcccttatcctcgttactctcagcaccgggtccccatcaacccctccaagcttccaccatatccaagaaatttaatttacaaacataatatactaccctaatccaagaaaatagggtagaggcagaaaactctgcccaaaacacagtcaaataccacagctttccctactcaattaccccagtaacattctcttcgttcctgttcgttaaccattggatcgacttaaaaaaattactggagggtcctagaacattaatctacattt

SEQ ID NO: 231691 - DNA, 399 bp, Glycine max
tgtgaacggctgtgcatgatatatgttctggggttggtttatccagcggatcacggataaaggaatatcccacattatttccatgacacgcgtgcaacaatgatgattcagaaattttatgcaaaacttgtcatgcatgcgcctatgtggacactcaagcatcaagttttgtggtcatgtgacactagggctcaagattcattttcctattaagtcatccatgtttcaaaaatgctctttatcaattatgcattcatccgagtccattttggggtcggaaaatttccagcattacccttacggtatactatttttaacaaacactttgtgtttgataggaatcttttcaaaaagggtggaatatttttttgaacatttggcttttacaaaaaatatttt

SEQ ID NO: 231692 - DNA, 417 bp, Glycine max
  unsure (1)..(417): unsure at all n locations
acctgcggcatgcaagcttcttatccaaggctcatcttgagggagaatctccttcttccatggctcatnccctagnggatggcgcctcctctcacctattctcctttgacttccgctgcatctccatggtggaaaatcaccattaaaggacctcattgaagctcaaagatccagcctccatagaagccccacaagcaagcttccatcaagtggtaatcagagcacaagagcttcaagtaggtgctccttaaacctccattattttttttctttaccttctcttccattgntgtttcttcatatttctccatgtatctcctcacatgtcttgttctaaatgttgttaacatgattctttagagtttccaccgattaaacttgctatagaagatagatttgattttctatggttcaaat

SEQ ID NO: 231693 - DNA, 458 bp, Glycine max
  unsure (1)..(458): unsure at all n locations
tacattctcccctgtatgaagcgagatctttattcttcttgttatcatcaaaatcttcatgatttacacgtttaggtcattctatcctactgggcaatggccaaaaaccggttgttctcgaaaaggtatactctgggacgctgacaacatctattatttggttgtctcagcatgagcctagaagatatgctagttgcggcaatgcatgaagttgttgtattagtgggtgcatcgagtcggcaacttacatgactgagtgttaggaagtacatgtggcagtatattgtgccattagacnttcaatgtgaatgcaactgctactgcaactncgcagcattaggaatgttattaataaatttaaagaaaaatggtggaaagcatgttctccaccaatgtgattcactactatgcaactgtactgctactcatatggaatcactacaagcttattcttctca

SEQ ID NO: 231694 - DNA, 407 bp, Glycine max
  unsure (1)..(407): unsure at all n locations
agcttggaatngcacttgggcacctattttgaatcttctatgctgtacctacatatacgaaacagtcccactctcccaattttacaaaatcatattcatatatcattggggcatttcaccgagcacttggtgggcacatgtttggacataaattgcaagaggatggggacaatgtggcatgccccattgcttcaaaaaacaacacaggcctaaggccttctcacacaaatcctctactcaacaaatcaagcatcaaagcaacccaaaactgcctcacaaatataagcccgttctcacaatttatagcacccaaagatgaagaaaacacttcaatgggaggctaaaaactcaaggaatgaattcttacttgtggagtgagttcaaacaccaataatgaaagcaaaatg

SEQ ID NO: 231695 - DNA, 449 bp, Glycine max
  unsure (1)..(449): unsure at all n locations
aacttgacaccacgatgtacncaccctacaccaagatgtatgttgggttttcttcgagccacacttccaagagcaatgtagggggatctgtgggttctagcgaggggtttctgacagtattgaatacaatgtgggacaacgtgggtgtcaaaggagcgtgtttcggtagaattcacgcgggaggagaaagagaagagcgatttcatgcacgatgacaaagagaagagggacggcaaggttttctagcacgcgggtgtgaaatgtcagtttaacttaaaacataacaacatccgttttttaatgataccaatgttaacgaatatagtaacatcggtttggaaaaatgatgttacatcaaatatatacatcagttttaaaaaaccgatgtaagatcaactcataacatcgactctctcaaaccgatgttactcatgaagtagcatcggttt

SEQ ID NO: 231696 - DNA, 397 bp, Glycine max
  unsure (1)..(397): unsure at all n locations
gagctttgngatggaatcaagatgagcgagatgttatatttcttaactattatacgaatagactacttgtttttaagaaagacaacttcttatgacaattattttttattaattaatcaactaattaatttttaaagattaactaattattccacgtggatcttagtcgatcacatcaacaagtcatcttgagtcaattcctggtagaccccctaaaataactatcaagccttgttaggctaacacaaaattcagaagattaatgtcacttgagacgcttgaagttgaaagtgattttcctaccattatttcctctcatggaatacaaaaagaggacatatatgatatatctccgattctttccttcaacgttaactattaataaagacagagcaca

SEQ ID NO: 231697 - DNA, 233 bp, Glycine max
tatcaacgcttgtctctactcgtatataataggtatctgaaatgtagccgcaatatatctttgtatttttttaaaaataaaaatcttggccttacaatcttgtactttgtatacccataaaagttgaaggaagatcctgcagttctgtgatgttgtcttccaagacaactactactctggcatattccacatcttaatagagtgtttttttgggaggcaaatagttatctttg

SEQ ID NO: 231698 - DNA, 356 bp, Glycine max
  unsure (1)..(356): unsure at all n locations
gagttcgttcaagtctaggattttgtgttccacaatgttgcaaatcctattgtcaacaacttcttggagatcattggatttcatcataccatacatcctgagaaatacctacggtttcctctattgactaaaaggataaagaagagtggttttggttacattcttgacctatgaatcaaaggcttgttggctggaagcagaagcttcttagcagaacacgtcatgtgagtttggctaagtctatctttacatttattctcatctactctatgcanaatctttggctgccacaggggtgtgtgtgatctactggatgctactcgtcatggttttatttaggggagacatcacttgca

SEQ ID NO: 231699 - DNA, 410 bp, Glycine max
ctcaccactttctaattcccttctcttgagaaattaattatcatgtaaggggggggaataggtcgctttaaatgctacctctcagagctgtcaatattaaccagcttactacacacagccttataccacatgagataggcaaaaagcctatatagctgaaaagcctacaaagtgcctaatgcccttaaagccaaaaagcctgttaggcatttaggttatgaccaactcatgggtaagctctctaacaaaaacgtagccgacctcttactgggtttccctagcatgaacttgtgcatatgcacctatgcataccaattgagataactatggacattaaaatgtaatctgcattaccaaatacattaataggaaccaaatgtggtctatatgactgattggaatacctgaat

SEQ ID NO: 231700 - DNA, 387 bp, Glycine max
  unsure (1)..(387): unsure at all n locations
agctntaactcatccattataacatctatcttgtacaaataaatacaagagacagaaacgccaccggacacaaatcaaactaaatgtgagaatttaaagcacacacaaagagggagaacctcacaacatggtatcacatgggttcaaactccctactttttatttaatcatagacgctcatgtagcactgaccattaatactttatattaaaatagttttagctaccccaaagtttcaaattgcgattatggttgtaacaacatatcttgatgttgtggtggtagagatcgagtcaaagttataccatctgacgcatgcacaatcggaaacctttgactcacttatcagttcggcggccttcttggtcccttctttcgtggaatgga

SEQ ID NO: 231701 - DNA, 360 bp, Glycine max
ctatggtacaaaacagccccacaatgccgagtctacaaaatcatattcatatgtcatcgaggcatctcaccgagcactaggtgggcgcatattgaggcattaaatagaaagagagtgtgggcaatgtggcatgccccactgcttcaggatgcgacatatgcctaaagccatcccttacaacccctcaattcaaacaaatcaagcatgaaaacaacccaatattgccccacagatctgagcacattctcacaatttagagcaccaaaagatgaacaagatgcaccaatggaaagctaataactcaaaggataaatacttacttgttggagtgagtatgagtaccaaagatgaatgcaaaat

SEQ ID NO: 231702 - DNA, 396 bp, Glycine max
tctacttatgtggcagggcgggcttccttcaccttcttgtctccaacgtgaactttgaccattgttcttccttcccgcgatgcttcttttcatgtccgcctgagtgggcttatagcctaaaccatacttcccacgatttccttgggtatttatcaggctagttatgccgccgttgttttttcctaaacccatcccgggttcataaccgttccccaacataactcgggccatcattaccgctgcatcggacagacaaggctgcccaaagagggagtccacggaggaaatgctgaccacctcaaaagactgaaaagcagtttctgacgattcttctgcggcttccacataaggcatggaggatgggcagcttaccaagatatctttcttgcctgacac

SEQ ID NO: 231703 - DNA, 413 bp, Glycine max
  unsure (1)..(413): unsure at all n locations
agccttgtataatcgattacacatatttggtattcgattaccagtgtttggttctgaaaaatctaaagatgtaactcttcaaaaaggttttgactctttcaaatgagttttaagcttttctaaaagatataactcttctgaatgactttcttgaccagacatgaagagtctataaaagcaaggctttgttttgaattttgaatcaattattccaagtctttctaacaatctcttacaatcctttacaagccaattattccaagtctttcttacaatctcttacaatcctttacaagccttgaatctctttgaacttcttcttcttctttgtaccaaaagttttctgaagatttctggttttctaaaccttgaaaacttgtgctattcatccttntcattctcttctccctttg

SEQ ID NO: 231704 - DNA, 455 bp, Glycine max
  unsure (1)..(455): unsure at all n locations
ctcagcgtgctgatcacattctcccctttgtaagcanattctttttngatatcatcaaaacctgcatgagttacattctccccctttttgatgatgacaaccacctgtaggttatgagcaacaagaaagaaaaaatatctatttgcatatagtttactcccccttggtttttcaatgtttgcttatatgagacaattgaagatttcatatttttcatatataaaaagttggctcataaaaaatagatattttttcttactattctatcttttatcttttctctccccctttgtcaacatcaaaaacaaatcatgaatagagaggagaaaaaaaatgttaccacttgttgtaatgtatgagaatcaagtgataccaaaggcattaaccaatcattaatattgatcagcaaaacaagttagaacacacaatcaaaacacatcaaagcatcacaaact

SEQ ID NO: 231705 - DNA, 406 bp, Glycine max
agcttcttatccaaggcacattctcgatggtgattctcaaagatcaagcctccatagaagctccacaagcaagcttccatcaaggagctctagtttcttggtcctccaccaaggaaccagtagtaacattgtcatcctatgaagctgagtatattgcagcctcagaagctgcatgccaagcagtgtggctagatgccccgatgaagaaattgcaactggaaaaatcatgtaaagtgaagttgttggtagacaataaatcttccattgatttagctaggcatccgacttctcatggaagaagtaaacacatagaaacaaagttccacttcctaagaatgtcagcaatgagaaactgaagattgaacattgcagaactgaaattcagcttgcaaacatactcactaag

SEQ ID NO: 231706 - DNA, 442 bp, Glycine max
  unsure (1)..(442): unsure at all n locations
ctaagcttatgcgcatattttctcacgaacgttcacttgcacaagatttcctatcaactaagaaaaatgcacccatatacaatcaaggtagcttcattacctagattatgtacttccaaggtgtatttgttatttacatcacacacgcctccttggctgaatttacatacatgcatactcaaagcattatggggtaccaaaaactgcacatgcgctcatcttggtatttctaatacccatacatatacaaacttcacgatgaatcttgactacctacacaataaggtgctacctttcatgcttttcttcaagttttgctacctaaagccacatgcaaattcaagcatattntcctttgctgactaagaatgtattcaaattagaagggatatatttttttgaatatgtggtcttacataacatgcaacactattatatatat

SEQ ID NO: 231707 - DNA, 412 bp, Glycine max
agcttgtagcctcctattaaactgtttgacatcttgattcctcacctataatagaaagatactgccgaaaggatgtatctaagatccttgggcataacgagatgccggttggccaatagcctgaaaaccaacaagtgagaagtgtcctgacttaaattgcaacccaagtaaaattcttttgtctcatacagtcccaagcccccaattgtaatctttgatgataaatttgacactgattggatgctgggattttgaaagcagaatatattaattttgtttgtggcctatttaagaatagatatcttaccaaattgctaatgcgtggatttaggaatctcattgttatgaagtatttacgccttctccatttgaatagagatgtactattttctatatgtaaaaaatcttgttt

SEQ ID NO: 231708 - DNA, 422 bp, Glycine max
  unsure (1)..(422): unsure at all n locations
agctngaaggggtctaacccaccattttccataatagattactagttatatgtctactatcattgttattatttctttgttcgtcattgagggaaacacttgggctgccagatccctccgcctttgggcgtattctttgacagatctgtgcccccttctttgcacatgttctgtagttgcatcctatccgaagacattatactgacactgcctaacggaggcaaccattaggtccttccaagaatggactcgggaaggttccaagttagtgtagcaggtagcagctaccctagtaagactttcatggaaggaatgtattancaattcctcatcttttgtgtatgcccccatcttctgacaatacatctttagatggttcttggggcaagtacntcccttgtacttgtcaaatccagcacctt

SEQ ID NO: 231709 - DNA, 357 bp, Glycine max
atcacacttcgcgaattgtgtttccttaatacaattctcatactgatggaacatgcctttaattagggatttgtctgctaactcgaagccgcaaagggctgatacattgcagcgctatggtcacaacatcagaagattactttagttgagtagctgaagtgtaaacaccaacttagcccatacacaaaatggtgcaaaatatccaattgggccttggtagatctaaatatcatgttattgacgataaatataaaataatggccaaaaccgcctccatgtcttattttgccagaactctatagctttaaatatgtttcctccacattttataggtcgtacctaattctattccctata

SEQ ID NO: 231710 - DNA, 406 bp, Glycine max
  unsure (1)..(406): unsure at all n locations
agcnttgtgcagcaanaacagagcaacggagttgctgtttgcaatccaccacatgcaaaagagaatgccctcaccaatgtgaaaagggaattcctaatacaaaagagacatatcataccccgcacccgtaataatcatctcaaaacaaataacagaattacattcaatactagtcgatagtctaggccaaagattacgagatcgtcaattcttaatttactacaaatggttaataacagcgagctaagaactttcaatactgcttaatactgaaattatctgaatcactattagcttcgttaactactcctttctccaacatataattacagggtgaaagtgggggattcaacttctctctttctatcttttcagcaaatccacaccctataaaataaagcttctc

SEQ ID NO: 231711 - DNA, 412 bp, Glycine max
atgacagaattaaaagccactgacatattcaatgactcagatgctccctgcaagagaccgtaaacacaatgtctatgaatgaacttatgatgcagactttatggataataggaatattgtgaatgtatgaatacagagttctgatgatgctaaagtaaaatcaaacaaggttgtttcaacaaacattattgctttaagattaattcaaggtcaaacagataagatcaagaaacagataaggtctcaaataatctcactggctgattgatttttgccttacaacaaatttgttccaagagatcaaacgctctagtattcgactactacgcaatgttatcgattaccacgagacaaggttacaaatcaacttttaaaataaatttgacattgaattctgatcttgtaacgatta

SEQ ID NO: 231712 - DNA, 58 bp, Glycine max
aaaaccagaaaacttctgctttaatacaccccctactcacccctcaactgactattaa

SEQ ID NO: 231713 - DNA, 181 bp, Glycine max
ttcatgacctaatttcgatgaaacattatgggatggaatgatgagccactatgaggcattgagacaccctgtaggtggccgtccccgttcctaggactacacatggatgggataagtacgatgaggggaccatgtggacttattgaatacgggggatcaagatgatctcattggtgactta

SEQ ID NO: 231714 - DNA, 349 bp, Glycine max
acacctactgtacgttgatttcaccaatgccgtatggaatgtgcgacaatcttaaaaccttatagatacattttgagaggatcgttgtcatatggccttatcgacggacttctctatcgtaagccatcatcgcattatcttttgagatgcgatcaatccatgttgctatggctggactcaatttacgaaatttttctacattctgatcaaatatgtgcttgcaaggagtgtatgctgcatacaattagttatgaataacgatttagagtgtaatgaaagtcaataaacggggcatccaataaaaaatgtacccatatcttaacatatctcttgtttgcattattgaatt

SEQ ID NO: 231715 - DNA, 429 bp, Glycine max
  unsure (1)..(429): unsure at all n locations
agcttgctaaacgtagagaaagaaagagtgattcatttttaagaactggcgccatgatgcttgcttttgctctgttatgttgtttaggatttaaaaagtcaacgaggaaataagcttgattttgttttgcaggaaggaatgtggaaagtttgagggatgaatttgttggaggtaattgttaaaagcagggagggaagaaatgaaggtagggaaaaattgtgtatagagtggttttaggcagggttagctactacctgttgctttaggcgggtaaaaattgttaaggctgggattatttcacaatagtctctatttgctgttatttatcttattttctttgnctgcctcaatttcgatagtgaggagtttggctccatcttacatcaatcaataagaacctatcagttcatttccaataaaatgaaaact

SEQ ID NO: 231716 - DNA, 376 bp, Glycine max
gggccatgttctccaaatgctcaaaatcaagatgttcaaaattaccaaccacaagatgctcagtctcaccaataacagaatgcttatgatgctcaaaaggtacaaaatgatgcctaactaatctatgaagtgtcctatctatcgcacgatcaaacgtgagcaagtcagatggattgcctctaatcatacactacattcagcatgcacaaataattgccttcttatgcaagtaacaatgtatgttttaactacagctaccctcatatgatatccaaatgacttataatcttttgagcctcaccctaagatcatgaacagatgtgccacaaattttcacgcagaaatttctagtctaactatggaaactacctaatga

SEQ ID NO: 231717 - DNA, 414 bp, Glycine max
  unsure (1)..(414): unsure at all n locations
gcttgccttaggtcgaatagaattttgtcctatcagntaagcgagactaaagggaatatgtgggccatcatcgatgagtgcaaagagaagctaaatctagcggcgactcacgaacaaaggctagatgatgagtacgctaagacatcaccagaaagggaagcgagggaaagggtaattgattcattgcaccaagaggcaacaatgtggatggaccaatttgctcttaattttaacaggagtcaggaacttccccgattgctagccaaggccaaagcaatggcagacacctactccgcccccgaggagatccacggacttctcagctattgtcagcatatgatagacttaatggaccatatgattagaaaccgctaggaagtttgtattgtcgctcaggtcttgactagttataac

SEQ ID NO: 231718 - DNA, 418 bp, Glycine max
  unsure (1)..(418): unsure at all n locations
tatctacaagcacaataatgttgtagatatctcatatttttcgtgagggtaatcattgtgcagtcaaacttactaactatggtctgcaagctgataattatgtttcatggtgtcgcaacctacccttctgcgggagggcgatgcgatgctcacgtgggcgtctctcatgggaggaatacacgtggagtcgccaccaacgtttattctggaaaaacgttggaaaaaccgaaacgtgtggtctatgaaacttaagtatgaaaggtttgngagttngttttatgcatggggaaagtatagaaccccacacggtcgtcacaatggatgacatcctttaatcaaatgtgcaattatgacttcaaactatgtatttccccttttatgtgtttatgttttcttactttggggttttatgttttac

SEQ ID NO: 231719 - DNA, 420 bp, Glycine max
agcttataagaacaaaatggcctcaatcattttttaatatgcatgtgaattatgacgcatcaacaagaatcaagccaaggctattgtgcaagcaatcaatggggcaaaacacaccaaatgattatgatgatggatggctcaaattctcacaaaggtaaaatcatcactttcaaattgagctttcaaaactatcatgacatgtagagaagaatcaaggatttcaagtcacaaaatgtcaagaacttttattttcaaaacaattacccatttcttgaacatatcctataattcaaagaaaaacatgcaaagtcgtactgtgcacacaaaattgacccataatattaaactaaagatccgacgaaactaacaacatttacaaattaacacaactaacaaattaacaaaaccaacacaactagc

SEQ ID NO: 231720 - DNA, 309 bp, Glycine max
tgagctttttatggggtcctttaatggagaatttccaccatggagagcagcggaagacaaggaaaagaggtgagaggaggcgccatccattaaggaataagccatggaagaaggagcttcaccaccaagatgaggcttggataaaaagcttggagaggatgcttcaatggaggaaaagatagagggagagaaagagagaggcgggagcacgaaattgaagacagaaaaagggagagaagttgaactctgagttgtgtctcacaagactctcattcatcagagttacaacaagtgttacacatgtttcta

SEQ ID NO: 231721 - DNA, 418 bp, Glycine max
  unsure (1)..(418): unsure at all n locations
agctntgtgctttatgcttaaaggccacacactgttcaatggagtgccccgagacaccactatgatagacgcatgtaacgttgagattataccatcggggaaatggaggttggtagatctttcctggtgtcataccctaatttcatccggggacaattgtttgttaacatgtggacctttagctgaccaaattgaggttcttaacactcatcgccgcataatccgtaaagttttgcgacgtttcggaaggaaatcagccagaaacatgaaaatggggggtgaaatgatcaatttaggggggtatgcctagccctgtgcccatctggaatattttggagggaggttgctttaggtgaaagctacccacctcacctgtgcgagttgggcggcaaccacctcccttcattttgtataaaat

SEQ ID NO: 231722 - DNA, 414 bp, Glycine max
  unsure (1)..(414): unsure at all n locations
ttgttctccgaagcaactcattaataggccttccatctntaatggagtgggttatcactattggaaaacccgcatgcaaatcttatagaggctatagatttaaacatttgggaagccatagaaatagggccttatattcccaccatggtttctggaaatacaacaatagataagcctanggaagattggagcgaggaagatagaagactagtacaatataacttataagccaaaaacataattacatctgccctaggaatggatgaatattntagggtatcaaactataaaagtgcaaaggatatgtgggataccctacaagtaacacatgaaggcacaacaaatgttaaaagatctangataaacacactaactcatgaatatgaactatttatgatgaatgcanatgaaagt

SEQ ID NO: 231723 - DNA, 423 bp, Glycine max
agctttaacaagtttcttgacagataactattttgaagcagaaaactcgcaagactacccatcatatctcccaaaaccccatacccacgaaatttaagagagaaagaagtccacccaaacctgaaatttcgaagtcccactcgtagccacgcacttcactactccaaaaacgccctcctttcacgatttggggcagaaatgatggccaaaggttgaagctttgttggggtttcaatggagaatggaggagaagaggaagctacgtgagagagggagagaaaaggcttctgaacttctttcttttggctgagtgaggagagagaaaagctctttggttttaaataaaagggttctctctttctctattattatatttaagcaatgccacatgtctccatttgagtggagcaagaagggcccact

SEQ ID NO: 231724 - DNA, 372 bp, Glycine max
  unsure (1)..(372): unsure at all n locations
ttaattaacatcctcaaaactaaataaactatattttctttcttcacactatcatcttttggaggtaatgttatttgagacattgtctcattatctggtactaaatgtgagtattctttccacaacgcttanaattgtgattcgtcacgttttaggagactaaccctttcgctaaacctatttgttattcgtcttcataaattaattagtgacatcttttttggataaactctaatgttagatttattcattgttcatgtgtattgggcaacatatggaacacatatgaatgatgatatatttgaaaatccacacaagtctgatccatcatgtttcgagaatccacccaagataatatcaccttattcttac

SEQ ID NO: 231725 - DNA, 299 bp, Glycine max
  unsure (1)..(299): unsure at all n locations
acctgcggcatcaagctcccacgaaagataggagattttatttatnaaaaaaaaggcatactgtcaagctaagtgaaaacccccttgagagggcttgaatactatcctccccgggtttttttacgagactggcttgactcaacttcatcgccaatgtctatgaattcacagacttttccttcttttggcgctttttttctttctgcaccaaattaattcttttcttcagcatttcattgctttgcaactttaaccacccccatggaaattaacacgacattcttttaattctcttttta

SEQ ID NO: 231726 - DNA, 383 bp, Glycine max
agctatttgctgcaaaattcttttttcgtggtgttgtgttacttatggccggagctaaaggtggtcttcgccataggaagagcggtacacaggctttgtggttgatttatggatggcctttgtggataattgggtggtgggtaaggaggaggttcgttattggctgagtaatgacattgttgggttggtgggaaactaggccgtataagaatggcagccacagcatgggtttctccctctttctcaccctcttcatgtgccccagttttctcagtctgcctagagggatgaacaaatttgcccttttttcatattccatctgtccttttcctggcgaagaccaaatctgtcaagcttttgagggtgcgcaccccaccatcttt

SEQ ID NO: 231727 - DNA, 416 bp, Glycine max
  unsure (1)..(416): unsure at all n locations
ctgaaatgagagtataagattatcttattcataaactggaagtactaagtatttattacctatactaaatagaaaatacttataacactacataataaccataaattggaagagtttgatacaatttacacaagttttatacataaaagttagtcgtattcaccgattaacaactcctccgaatatacagttttgcttgtcctcaagcaaaaagagaacaattcacttgtcctcaagtgacaaaaacatgcagtgactatgtacaaaggtgtatacaacaaaagttactgattgcatgataagagaatggagtaaaatgccttcatcactngtctctcacaaggtatgcagttatccaaagagaagaataaaatgtaacctgaacaatagatggagctaatcataagacaaatatt

SEQ ID NO: 231728 - DNA, 399 bp, Glycine max
  unsure (1)..(399): unsure at all n locations
agctntagaattgaggagggatatttattaatttatcaaccacatttttagtcagttaaaataaagaacatagtttaatgttttttaaaaatatgatggaacacataacttaattattaacttttcttatatatgtatgaatctatatttatataaaatattaaattaggagaagttacttttttcgtattttaaaaatgaaacatatatatatatatatatatatatatatatatatatataattttttttaaaatcatctgtcttacgcaaaaggcataatttaaattttaattttataatgttgaatgaaataaaattaatagaatgagaattcattaaaaaaatctctaatgttaataataatatttaatgcccgcttaattatggcccgttaaa

SEQ ID NO: 231729 - DNA, 438 bp, Glycine max
  unsure (1)..(438): unsure at all n locations
gtcgtagacttgaagttctanatgggtgggatatgnntgtttgtaaagaaanggcatgctcaccacatggttntcctcaactaaaggttctagtacttcgtggcttacctaatttagatcagtggactatagaggaccaagccatgcctaatctttaccgattgagtatatccgagtgcaacaatntaaagacagttcctgatggactaaaatttatcactagtcttcgggagctggaaatcagatggatgcctaaatcattcaagaccaggcttggaactgctggagaggattaccacaaagtccaacatgtgccatcgattgatttttgaactatgacgtaagtgaaaagattaatttcatgttgaaggacttctttctcaattcttcctatagcttctattggatgtcttctgctttatgatggctgactcttct

SEQ ID NO: 231730 - DNA, 422 bp, Glycine max
  unsure (1)..(422): unsure at all n locations
agctntanccttggggggttcaccatgttgctcatgttgctccccctatctctaacagatttggataacagatttgaatgataacgacaaaaatttaccagggataaaaaatgaaatgtaaacatatatcatgaaacactaacatatttaaccctataatttatatataaaaaaatcaagattgtgtcatctaaaactatcactatgttaaaatgatcttaaattatttggttttgattatttataaatttaataaaataaaattaacatggtcatgatttttaactgtctaaaaagtagccttgaaaaaattatattttttagaatttaggttgtgcaattgggatatgaggattgggggatggaggttcgtatgagctttataattttttaaaaattaatatanaaaatacaattataat

SEQ ID NO: 231731 - DNA, 410 bp, Glycine max
  unsure (1)..(410): unsure at all n locations
agctntaacctcatcgcctctcacaggctttagtattgtgagccaatccaatccttgtgtccggactctcagccacttatgatagccgccgatgctcccattactgcttcccctaagctctttgtcctttcttcacgccgcattccatgccttgcgaactccttggagtaccctcgcgttgtggtcactaaaacctcgtgcgatgaaaggcgtgatgctttcgtctgatggcactcctctcatgggacatccttcgcatgaagattgaatcctgaatcttccttccttctagcgagggaaccatttaacaaacgcccctccatgctagccaagagttggtcccaaatcgtctttctttttcgacgcacaagcggtgaccttgtagcagatagacgggcctaccttcttag

SEQ ID NO: 231732 - DNA, 469 bp, Glycine max
  unsure (1)..(469): unsure at all n locations
cccatcacatgtggtactaggtgttggtcgggcgatggtgcacaacaagtttttcacatacacaaagcgcgcataaacccaccatcccctattgcccacctccatctgagctcacgtactcccacgtagcccatatcctcgtttctctcaacaccgggtccccatcaatcctcccaagcttccacaacatccaagtaatacaacattcaaacagcacaagctatcacagccaagcaaaacagagcaaaggcagaaaactctgccaaaacaccaaccaaatcacagcttttctcacttaaagaccccagtaccaattccttcgatccaattcgttaaccgttggagtcgactccaaaatttactggaagtctatagtacataaccctacattgtgaccgttgggatcttctagcanacatccagaactcattctgtactactctntncacagccaaccacacacaagcat

SEQ ID NO: 231733 - DNA, 414 bp, Glycine max
  unsure (1)..(414): unsure at all n locations
agctngctgtcaatgctgaacccaacaccttttagttggattatactcccaaccagctccgcgaacggcccgctagtataccgggaaagctctaaactaattaaactaaacccaaccagcgatacacactatatttctgtttgtagatagaataaattctgaaaaggacgaggtcaaaacaattgcaacttatcacacatgccatggctattcagatcccaattgattctctgactaaaataagaatattaagaagaaaataacggttggagagtgatacaaaaaatccatgatgatgacctggagaatatctgtctcttgtacacgtgggctctggcatgagacctttagcaaagaagttatctgcttatcgataagcccttttgatatctctgacccccactatctacatgc

SEQ ID NO: 231734 - DNA, 454 bp, Glycine max
ttatacatgatgaactatgggtatacctagtgcaacagagctattgttctgtacatgagatgtattatagcattaattacatgttattagataaggagacttatccttggtaataatcgtaaaaatagaagctgatactatgtattctttgcatttgttttcttaccagctatatataccctctgttcctgttgagtactactagatgtataaagaacgcaattattctgacttcttggtgttgcgttgaagctagaaaagctattagtattattatgggtattctaaatctaattatctgaaattgtgaggctatattagcttcaggggtgacatagttcaagtggacactcgcgtttctggatcaaggaagaaaggtatgcgccgtgataggctttacctgactgaatactggtgtaatttggacagactttcaggacaaacattctctgaa

SEQ ID NO: 231735 - DNA, 428 bp, Glycine max
  unsure (1)..(428): unsure at all n locations
agcttgtngaaattgccatgtttggatgagttaaacatacccattcntgtttagggtttttgtgatgatgtttgtgatgtttatatgctgaaattgctgatggaaatctgttagggacgaagggtaaaactaacctatggttaaaaagtgagaatgtgatgttatgagtggaaaaaaaaagagtgagactttgagggttaaaaggctaagtctgaattctgtggtaaatggaggttaaagtgagttaatactagcttgaaatgtcatttatgacttatgagaaagcttggactgtgctagagagaaaaataaatgaccaaagtgaacaaagagccatttctagggcaaatttgggtgttgaagagtcaaattttgattcggagagattttaggtgtaaatccagtttgaacaagtctaaatggatgtt

SEQ ID NO: 231736 - DNA, 370 bp, Glycine max
gatgtatcagtaatgatggcctgagttatgttggggaatggtttcgaacccacaatatgtttaggcaaagacaacggcggcataactagcctgataaatgccaaaggaaatcgtgggaagtacaggttatgctataaacccactcaggcagatataaagagaagcatcgcgggaacgaagagcggtagtcaaagcacgcggttgagacaagaaggtgaaggaagcccaccctgccacataagtatgagctttataagcgcgggtctggtggacgaaggtcaagtggtcgcgatatacgaagatgatgttccgagtacattggatgtggtatgaccatgccctcctgattccagctgggaaattggcgagt

SEQ ID NO: 231737 - DNA, 365 bp, Glycine max
  unsure (1)..(365): unsure at all n locations
catgcaagcttacatttgtcatcagtatcaaccaccggttaatctgcggtgatggctttttgacgagctacagacaaaaatgcattcgtcattgattagcccggctagttgtcgctattgccgtgactgctcttaccacctttnttacctgcttcagatgcgcgctgcgggtcattcttgaaattacccccgctgtgctgtccaccttttttacctgcttctgatgctctttcgcggtcttctgcaaaattgccggaaccgcctcgatggtttgccattactgacctccgtctgggtatagacatcatattgcataaaattaacgcggcgtatggcggctgccatattttcgctacgtgggacta

SEQ ID NO: 231738 - DNA, 350 bp, Glycine max
  unsure (1)..(350): unsure at all n locations
gtagcgaagatatggcagccgccatacgccgcgttaattctatgttatatgangtctatacccagacggaggtcagtaatggcaaaccatcgaggcggttccgtgcaatttgcagaagaccgcgaaagagcatcagaagcaggtaaaaaaggtggacagcacagcgggggtaatttcaagaatgacccgcagcgcgcatctgaagcaggtaaaaaaggtggtaagagcagtcacggcaaaagcgacaactagccgggctaatcaatgacgaatgcatttttgtctgtagctcgtcaaaaagccatcaccgccggttacccggtggttgatactgatgacaaatgtaagct

SEQ ID NO: 231739 - DNA, 355 bp, Glycine max
catagtgcctgttttctgcctcgccattgtaagctaacatttctaagacgccgacaccaatacaattataatgtgatatccgtacatatcgatagtgtatggaaacaagataatcatatttcataatgatatattcccgttcaagaccttggaaaggaacacattatatctctatatgaagagtgtgaagttgcgggggacttatgttgaagcgagagtgtataaatgtatcttttcattctgaaaaaattacaaatatatatatatatatatatatatatatatatatatttcttcttttggtttcccttccccatctttatatatttgaacatagtgactttaatttctcact

SEQ ID NO: 231740 - DNA, 354 bp, Glycine max
  unsure (1)..(354): unsure at all n locations
gctgatgaaccaccgcnggagatacttaaaccttcaccggtgcctatgaacatcatctcaagtccatcacaacgaagaaatcattcaataatttgagaatcaccagtaacatgaaaactgactccagcatctgggatccaagtagagctagatgcaccattatcatgaaaggaggagtttgagagcatggcactaggctgactgggaccaggaatagtggaattagcattgggactaacccacagattggaggatatggttgaaccaataaaatacgggataggttgcagcatggcgggataaaacaagggtagggactcatgtggctgaaaactaatatcagctttgaaatga

SEQ ID NO: 231741 - DNA, 405 bp, Glycine max
agcttgcctaattagcgctgaaattgagggaaattgattattaaacacccaaaatggaaggactaagcatttattacctatacttaacagaaaatacttataacactacaatttacacaagttttatacaccaaagttagtcgtattcaccgactaacacaagtacttgatgtaaataccagtatatctatttaatgatgttttatgggttctctgtgctatcagtacttcatttcagggtgcttttgccttgatcacgtagatgcatgctttgttaggatcattcaacaattgaaactggtctgattcttagaacttgataggacagggctagtttatcgtattatcactagggatcggggtacgggaacctagttgtttgtatgtttgtcttaatgcggttct

SEQ ID NO: 231742 - DNA, 369 bp, Glycine max
ttacgagatatattacaatcattacaaacaagggccaaactacacttctcatggcacgagtgtcaacatgcactttataaaataatcatattggggtcgtgctatattatgacacatacgtatttgcacacataaaaaatttgtgtgaagcattgtacgacacctatccatgtacatattgtttgacaaactttttcatgctacatcctatatatatatgcacatctttttggaaggctccttttgttacctactcacaaatacacatattttgaataacactgttacgctacccatccaacactttgtaaggcacttcatgctatatatattcatattatgcaaggcattttcatgctattcatattt

SEQ ID NO: 231743 - DNA, 368 bp, Glycine max
  unsure (1)..(368): unsure at all n locations
atcttaagccacgcagctgcaactgctaacgttaagagaagaaattatttgttctacgcctngcacggagagagtgaattctgtgtattgtgaatgacgatagaaatgcgtgagtgatgaatgacacaagtgatgaattaatgcgagatatgctacgaaaatgaaacggctccaaatgctgcgaggcttctctctagcagttagaaaagtgaatacttcctctcggtttgttgtttgaggtgggatactgtgatgaacttgaactttgtgttctggggagcacactactaggtgaattgcctttaggaacattatgtcgaatgacatcgagacacaacactcttatttatagtgacagtgggacataa

SEQ ID NO: 231744 - DNA, 353 bp, Glycine max
cgccacaactaatgtaagtcttctatgtaaggattgaggtcaccatggccatctacgtcaatcttgacaacgcatgctgaatccaccaccgtgtactctgtgaaagttgaagtgttcaagatatggaagatgggtgttccatctgttgtagagaaccttgtggcaccatcactagccatcaccttcttcataggatccaccccaaatctctcacacatgttggtcttctcgcacttgccatatatgcaatccgcacatctcccattgaagattggcaccaccaatgcccctctcttcatgtcatgttacaccttttccacactctccgcaattctaataatgcatagcacaca

SEQ ID NO: 231745 - DNA, 422 bp, Glycine max
  unsure (1)..(422): unsure at all n locations
agctngaacctcgaatcttgaggcttaaaatcttatcncctcttgaacctngaagtgttcttgattctatcttgaacatcttcaacatctggaactcattctttcattatcatgaatggaccttcaagacttttgctatcaccattgtaatcatcaaaacatctttgaatcaatctagattcatcatgaagctttgcttctacaggatgtaccctccatttgttctctttgaacaacctagtggatgcaccctccactaaaactgatcccaagagatgtaccctctcttgttcgcagtacaacaacccaggtagatgtaccctctactcgcaccacaaaggatgtactctccaatatgatacaacacaggattctcaagcggttagtactttgactctttgtaacgggaaacaaaagatatc

SEQ ID NO: 231746 - DNA, 393 bp, Glycine max
  unsure (1)..(393): unsure at all n locations
agcttcatgtgtaaatcacttgatattggttgttcatggagntaggcgcatgtagttcaaagaggcatatgaaatggattatcaagagttccagaggtcatcacacttatacatggcaagaaaacccgtactcgtgggtacccgtctgaatccgtcccgactttgacgggtaatacccgagttgaccgggtatgggttcgggttcatgttttccccgataactaaaagtcgggtacgggtacgggtatgggattactagactcgtctcgaccttgaacccgaacccgccccgccacttaaaatctttagaacttttgcataatttaatcaacaggtataaaaattttattactaactaatattatgttaaatattttacataacttaatatta

SEQ ID NO: 231747 - DNA, 280 bp, Glycine max
tattaacacaggcgatcaattatacatcttccttggaagtttgaacggcaaacaaaggtgatgtttgatgctggtgctagtggaggaataattacaaataagacactctattaggcagcacaagtgattgagaacataacaaatgtataattgaccaacctcatcaactccatgattggggcaattcatcaagagtatcttgtacctctcaagcttcacacaatggtttatttttctgacaaaagctcaatatatatttgtcttagcttgacttcttttt

SEQ ID NO: 231748 - DNA, 361 bp, Glycine max
  unsure (1)..(361): unsure at all n locations
agcttgaatattgattatgattcaacattgcctaaggcggtaccgcgcggccgatacaaagaaattatcctctccaatgatgacctagaataaccagtggtatttcagccaagcttgagagcccttatgacagagcacatcattnaaaagattattcatatgggatctgtgcttgaaacgaaatggagcgggctttgatgcgtatagtttcaaggagtaggcatatcgggacaataatgtagggagcctgaattattggaataatgtggtcaccagtttgcctgccgtgtgcctctaacagaggatcatccaggcattcgatgcgcattagcccccttctactagttcaaatagactctca

SEQ ID NO: 231749 - DNA, 409 bp, Glycine max
  unsure (1)..(409): unsure at all n locations
agcttttagatcttttatgattattataactttgtgtctagnaactagtaaaacttgtacaagcagtaaaaaaaaacaagcaattacaaggttgggactaaattatggttttgttttattttaaggacttcatttaaaaatttcaaaaattcaggaacttactaatgcattaaacttaatttatatttgcaataagtgtacactgagcgtgtaatttcttttacaataaatgtattccacatatttaatataaattcattttatttctttttgtttgcgtgaacaaaaagtgaaaagaaagaaaaattcagatgtaatgcatatgtaatttaccgttaaaaatataatcgtacatgtttcattgcgaatctaacttatgaacgaaaaagtaaggatgtagatgcattga

SEQ ID NO: 231750 - DNA, 413 bp, Glycine max
actcaatcatactcgataattagccaaaagaaaaccctaaataactctaaaaaagaaagtgcctactataaaaaaactcttacaaaagaaagcatacaaaattcaagtataccaaacttccatttaacattaaaacgtcaaattacatagtaccgcatcattactaaatcgaacaaaaagttactccattccatgtgaaataattaaccgccattccaatattaataataacaatacgatttatgatttcgaaacattccattatcaataacccccattctcattttcaacaacccacagaaactaaagccactataatagaattttaaatttttttatttagatttaaaatttgttctttacgccaagtcaatatttgcgttatttattgattaattcgggactgatataac

SEQ ID NO: 231751 - DNA, 416 bp, Glycine max
agcttcatgatgatgaatagcaattgtgatgatgctcataagcccaaatgaatgattcaagatgcattccagattttaagaatccaatccacgattcaagattcaagagaagaaatcaagaagcaaccagtcaagacttcatataggataagtattaaaagatttttttcaaaaaccaaatagcacagttttgttttacaaaagaattttctcaaattttctaagttaccagagtgattactctctggtaatcgattaccagttggtagcaatcaatttccagtgaccaatttggttttcaaaatgctttgaaatgatttgtaacgttctcaaatgattttcaaatagggtaaccgattaccctatattagtaatccattacacgcgaatctgaacgttggaattcacacccattg

SEQ ID NO: 231752 - DNA, 443 bp, Glycine max
ctttcgaagctgtaacctcatcgtgcctcacagtctttagatttgggagccaatccaatccttgtgttcggactctcagccacttatgatagccgccgatgatcccattactgcttcccctaagctctctgtcctttcttcacgccgcatcacatgccttgcgaactccttggagtaccctcgcgttgtggtcactaaaaccccgtgcgacgaaaggcgtgatgctttcgtctaatggcgctcctctcatggggtagccaagctgtcttatggcgagaacgggattataattaatacaaccccttgttcccatcaagggaacaattggacatccttcgcatgaagatagaaccttgactctttctttcttctagcgagggaaccaattaacagacgatcccccatgctagccaagagttggcccaattctccttcctttttca

SEQ ID NO: 231753 - DNA, 354 bp, Glycine max
  unsure (1)..(354): unsure at all n locations
agctggngtttcacctatggagattatgaattataggtgtgtgccacccgcaactcataatatcagttgtaaagcttggcaccttcgtctacttaattcagcgtgataacgaactgattgatgctgcactttgactgtatacacagcttctgtgttatctacatttctcatgccacccacaccattatatatatgcccttctctgcctttctcttttttcccccatacgttctgggtcctctggccgcttcaagactcttcacttgcacaacatatccacatgatttttctccaccgtccaatatatgccctttcctccacgagccaacagtcttccaccctataccctctcaa

SEQ ID NO: 231754 - DNA, 430 bp, Glycine max
  unsure (1)..(430): unsure at all n locations
ctaagcttgttntcaatatgaagcatttggaactgggttaatatcactgattaaatatgctacttgaatgaatacagcacttttaatgatgtgctacccttttcttggagagaaacactttggtaaccctttgcgcaaaattacagtcatgtaagtaattgatactgatttcgaggagtaccccatctatacaggcagcaaagagaatacatgaacagtcaccatgatgattatgttcttggatttgagccaagcaaatcttaaacatgagaacaaatnctataggaaacacatttgcgaatttgtgtagagacatacaatggtataagcacaacggcacgtttctctttcagcatcagaatcgtctatctacattcttacaagaaacagattattgagctgatcctgaatgcgatatattccatactca

SEQ ID NO: 231755 - DNA, 429 bp, Glycine max
agctttaaggtaacaacaacaattatagagaattaaataaagaagaaaaaaaatatcaacacaattcaattccaagtagaatctcaaaagaatgaatgaatagtatatacccattggcgtggcggtaaacgtactgattgtgagctggcttcatgaaatctgcaattcaaattaattaattaattaattattctcatcagaattaagtgttaaccgaactagaatctgcaattcaaaatataataataataataataatatttacattgtatttacctggcataagagtttggttagttgactcagcattagcttgttcttcagcattctcattttgatcaatttggttagttgacttctggatcatgccagcctcctcatccaaatcaaggagatccaagaaaagataagaaagctgcaaaacatccc

SEQ ID NO: 231756 - DNA, 393 bp, Glycine max
  unsure (1)..(393): unsure at all n locations
aatgaaaanaacactataataactaatattggaaagacgtccacttataaggactaaaattagaanaataaacttatagagattaaaaattaanaaaaatgctaacttacagggacaaatacatatttaagcttaaaaataacattattctaaaattaaaatttgggctcctagttagcatcataacagtccatttattacaattaaaatcagtccaaagatacttaaataaaattaaataaaaaatagtgcattattaggttaggccttcttccacttgaagcaagtgcaccatctagagttttctactctcactctggccttgagattgaagtgtgtttgatcacctctaaatgctctntaggtctctttactctacccctcatagagtga

SEQ ID NO: 231757 - DNA, 423 bp, Glycine max
agcttccccaaaaggcatagttattttcagtttcctgaaaatatcaaggaatctcgctagatgacagtctttgtccttcttggaaggtaccacaagatatggtacttccatatcctcatttgaagctttttctttcttcttctctcttgttttctcacttatactcttttctttcccttctttatttttttttcaactttttctttttcttcattttctttttatttttctacctctttttcttttcttggtcgtttatttctttctcctcaaccattattggtttttcactctcatgatttgtcacattagttacctcctctttctttttctcagtgccaccctatcctcatcctcaactaccaaatgcttcttgtttcttgtcatcacaacattacattcctctttgggattcttttattt

SEQ ID NO: 231758 - DNA, 474 bp, Glycine max
  unsure (1)..(474): unsure at all n locations
cttttctgacccctggctcactcaggctagcctctagctcgtctgngcccccatataacttatgggtgaagtaactagctagcctgtgcgagcaaggttacttcaggttgaagcaacaactcgcttgggcgagctgcagatcaactaagtcccctcatttcctataaataggagggagggggctgaaggaaggggttcaaccttcatatattgaaagaaattgagagaaatcagagagaagaaggagaaagaagagaaaaatgaggacgaggcgctactgaattgcgtccataatcgacttttacattgttcttcattcattcttcattcttcatcgggttagagtttgtctataaggttttggacatgagttatggacccttagcaggcctctttattggtttgtgcatcttcatctccttctcctatcatcgataatcgctgttctcttgtaaagagagttttaaccgatca

SEQ ID NO: 231759 - DNA, 130 bp, Glycine max
tttcaatagataaagtgaataaagtaatattcttcatggaacatgaagaagttattgaaaattattttgaattttaaaaattatttccataaaatattaaaatttaatcaaacatattaaaagataaata

SEQ ID NO: 231760 - DNA, 385 bp, Glycine max
  unsure (1)..(385): unsure at all n locations
tcacgcgacgaacgtgatatgatctcattgtagccactgtcttccatggagtaatttgcaagatcagaataaatgtaaaaggtattattatccttcaggtctctatggaatgcttggacaaatccattcttgtatttgacagttattgaattgagagcctttttaccagcaaacagcgcccacgttacagccctcatcgcctcatacatctggtaagagttggaatcaaacataagaatataattagcaagagtataaacaatgaaaaaaattaacagtcaactcaacctcaacttggtctgcttgagtggcaaaggtggtggtgtttctgatcacatactgagacagcttaacctgagcagtngtaatttcagcagtagaattc

SEQ ID NO: 231761 - DNA, 396 bp, Glycine max
agcttaagctaagagcagatgtaacgtttattctccaggcaaagcctccactgttcattctccaaacatcacatggcaccgttctctctttaccacaggcgtactgcaccctcaccctgcacgtgaaacctctgtacaaacacggtacggtcaccttcattgccaaccatactcctccctctcccataatttccctgtacaccccattcgtacacgtcaccctcccgtaaccgtccgatataaaccccggacacgtgtcctcctcaagcttaaccttccgttccacgtctcctctccccaaccctagtccctcctcctgaggctgccacctgttcatcacgcactccaccgtcaccaccgatcccgctgccggagagtaccagcacggatccacct

SEQ ID NO: 231762 - DNA, 444 bp, Glycine max
  unsure (1)..(444): unsure at all n locations
actaagctaacattntatgtatcctccgaactattatctttaatattgtatcaatcctgngtaatnggaaaattcaacgcgtgccaaatcctgngtgtntacttggataggtaagtgtaatactacttaagtttgtgcttgaagagacatactgaaaaaataaaaaaaaaacttgtaacttgtttaagttataatggtactttgtggtttttcattggacatagcctttatcctttcatcttatatttgttaaacattgtctttcaaatttgttttaatggctgttagacaaaaagattctcataagcgatttaaaatagcttatttttaagcatattgcactgtcttataagcaaatgatacaaagtcttttaaaatngtagcaaagggtatctgaaatacaatttaacccccttactattgattcttgtgttacaaaattga

SEQ ID NO: 231763 - DNA, 415 bp, Glycine max
agcttagagagaaagattctatggaggaagaatatgcgagatatagagagagagagagagagagatagagagagatgagggagcatatgaattgaaggagatgaggaacagaagttgaactttgaagtgtgtctcacaagtttcacattcatcaaagttataacaagtgttacacatgtttctatttatagcctaacacatgggaagctttcttgggaagctagaggaagaaagtttccttgagaatgtagagggagggctactcacacccctccaatagctaagctcacccacatgccaaaatacatgaaaatacaataggaagcttccttgagaagctagaggggggctactcacacccctccaataactaagatcacccccaagcccaatatacatgataatacaaaaaaag

SEQ ID NO: 231764 - DNA, 427 bp, Glycine max
actcaagctgaatcgttaccatgagctgtaatcgattacagctcgtccatgcctacaatactgctttgtcttttccttgacagcacctgttttctccctctgtcctttacggcacccttcatgcctaaatcgtcaaatcttcataacttgctcatttcttacccaaattacttcaaacaaagtgaaaacttcatctttttcaattctctacaaaccccactgaataaaatctacagaggatactccaaatggcagaatcatctaagaagagaaaaagctccacctgcaccaccaccgctgcaggacaatgccgccacgccacttctggtgacccaccagcaccacctaattcctctcttttctcaccatgttcattaactctattttcttcaaacgaacagcgtcaaaggtactactccttattttc

SEQ ID NO: 231765 - DNA, 360 bp, Glycine max
cctgaggcatgcaagcttgcttatggagattgtatggaggctgtatctttgagaaccaatgaggtccttcaatgctgattattcaccatggagatgcaacggaaggcaaaggaaaaaacgagaggggaggcaccatccactatggaataagccatggaagaaggagcttcaccaccatgaatgtacctcatataaaaagcttgaataggatggtttaatggaggaaaaaaaagagagaatgggggagcacagaattgaaggaataaaagagggagagaagtggaactctgaagtgtgtctcataaaactttcattcatcagaggtaccacaagtgttacacatgcttctatttatagact

SEQ ID NO: 231766 - DNA, 379 bp, Glycine max
  unsure (1)..(379): unsure at all n locations
ttgagagatttcgttgtggaagatctgcagagaccagagctggaagaggaagtcgtcccgagagcttgagatgagtttgtgagtgattgcgaggtcctataggtggaggagacattcccactactngnatttatgcaaactttcatctttctcttctctttgttgaaaggaagcttcccagttatggaaagctaaatcttctgttggatcttccttgtatgtacttgatgtaaatattatatttatctatttaatgatgttttgtgtgttcactgtgctatcagaacttcattctaccatgctgttgcctttgacacgtagatgcctgtgttttatgatcattcaacagttgaaactggtctgaatcttaaaaccttga

SEQ ID NO: 231767 - DNA, 424 bp, Glycine max
  unsure (1)..(424): unsure at all n locations
agcttcttatccaaggcacattcttggtggtgaagctccttcttctatggctcattccctagtggatggtgactcccctctcctcttctcctttgccttccgctgcatctccatggtggaaaatcacccttgaaggacctcattgaagatcaaagatccaacctccatagaagctccacaagcaagcttccatcaagtggtatcagagcacaaaagcttcaagtaggtgttccgtaaacctccattaatttttttgctttaccttctcttccattgttgtttcttcatttttctccatgtatctcctcacatgtcttgtgctaaatgtntttaacatgattctttatagtttccaccaattaaacttgctatagaagctagatttgattttctatggctcanatttcttgttcttgttcttgaa

SEQ ID NO: 231768 - DNA, 359 bp, Glycine max
  unsure (1)..(359): unsure at all n locations
gttaaatctcgaagatatgncttatgtcttagtnttggtttatataatttacaatgccaaaaaagttntatagatatggcatatgtattgattgttttagactaaacatgatgattgttataggttaagtcttcttttatacattcttaatatgattctaagatgttaaacaaattgattcatctctaagtttcttaagagcaatgagttcaacatagtgtaattgattataatattttgaaatcaattacaaagtgttacaacaagcaacatatctctcttctacttgaaatttgacaatctttgatgaattaatcaattattagttttagtaatcgattatagaagccaattttaca

SEQ ID NO: 231769 - DNA, 398 bp, Glycine max
gcttgcaacgaaaatattttcatatcaatatcataattaaaaaaaagggcgatactgtaaatgcataatgtgaaaaacccgtcgcgagagggcattgagaccccacgcgcttcccgtgtcttttctttaacaagacttggcttcgacttcaacttcaatcgcgcaatgtcttatgtcattcacatgtactttctcctctctttccgttccctcttttttttctttcttgtcaaccaatatttaattcctttttctttaagcatttcaattgcgatttgcaaactttaaaccacacccccataagaaaattaaaaaagagattactttttaattctcttctttatgcacacaaatgtatgtgtgtggtgacaggttctgcaccctgggatatgggaatt

SEQ ID NO: 231770 - DNA, 294 bp, Glycine max
ttactaactactctccctctatatatcatttttttcgctgcaccgatctatgagcatgccatgactgattactttgttgaatttacctgattggatatagaggtgaaatgtcacccggcagaagaactgatagggatttcaaaaatgctcagacctctgtgcatcagggagttcccaaacaatatatttgcttgaagctgtttttgggggtggagttataactgaatcttgttcttaaaggagcctcttcttgggttggtaataagggaaacaacaattgccttttggtttttt

SEQ ID NO: 231771 - DNA, 408 bp, Glycine max
agcttgatagagctatcatcacatgacgcgttattggcacagaacaagttgctttctaagcaactggaaattctaacagaaacacttggtaagctgccaactaagttgtctatgggtcaacctacacactcttatattttgcaggttacaagttgtaccatctgtggtgaggctcatgaaacaggccaatgtactcccactgaagaaaacactcaagaaattcattatatgggaaatcaacagtgacaagggtatactcaaggaggatttttaggcttccagcagggtccatataatcaacaaggatagtggaggacacaccctggcaatcagttcaacaaagacaagagtgggccttcaaacaggccaatcgaacaaggacctaacatattccagagaactactaag

SEQ ID NO: 231772 - DNA, 425 bp, Glycine max
  unsure (1)..(425): unsure at all n locations
tatcctgactcaccatatactctgacccattgtgagaatgtcaatccttaccctcggaagcgganagaatagaagggaaatntccaatcaaagaaaaggaaagaaggaagatttccaatcaaagagaaagcaaaaaaagaaaagaaggaaaattccccaatcaaagagtgggagaaagcaaaaagaatagaaagaaaattcccaatcaaagaatgggagaaagtaaaaaaggaagaagaagaaggaaagaaagctcctgatcagggatcgaaggagaacagaagaaatgtgcagaaaggtctttggaccggacaatatctgaacaatacagaattgtcaccaaatgaacaaaaagaaggaaaggaaaccacgacctaaaatggtcttctccctttgattaccaaccaaaatcccgtgcgctagcg

SEQ ID NO: 231773 - DNA, 292 bp, Glycine max
  unsure (1)..(292): unsure at all n locations
agcttgctataattaaaatgttcttttatatattgtcatgngnctattcgcnctttgtatggagtgaataatctttatattgaaataactctgattatttttatgttggattggctcatttgcctagaaagatcaagagcttgggttggggatgctcttgcggaaatcaagtctcaaagaaaaaggggtcgaagaggcattctatgtccttgataatatggaatagggtcaatctttgtgaaagagctcattactgcatacggtctctcgaagagatatttgtttcctctca

SEQ ID NO: 231774 - DNA, 249 bp, Glycine max
cttccaagaattggagcttacacgtagcttgatctagagttgtggagctttattgaatttatgaaaatatttgttcaaaaaaaacaaacactttgaaggagttgacaaaatgaggaaaaggataaattttgtttaataaaactcagatacattaagaaaatagttatcaaattagtgtcctttcctttatctcaagcattaattattttattaatatattcaatgggagaaattggggaggtaccactt

SEQ ID NO: 231775 - DNA, 140 bp, Glycine max
tctgaggataaaacacccgctattaaagacttcacacttgtggtgcctcccgaaagaggatattctccttatttcaacctgtctcaaccacattaaatcatttgccaatatctggcctaccccgttatgcccaataggat

SEQ ID NO: 231776 - DNA, 362 bp, Glycine max
ctgtagctggataaacgaacaaactaaaaaaatgattattatgacttaccgatcgtgaaaataaagcctttcttttttctacttatgtccttaaaggtaattcttaaagggattaaaacaaatactcagcaagtatgcaaataatcgacaagctaagcatgcacggtgtaaaagactgctcataaaggctttagcgctttgcacataattaacaagacaaatatgaaaccatccaataagcatgatttttaattttacacgagactaaaacgttgtggacatcaagacgtagtgactgaccttcgtcaggaatttccaaatcaactggtgcaaaaaattgatattcaagtatgattatgcac

SEQ ID NO: 231777 - DNA, 455 bp, Glycine max
  unsure (1)..(455): unsure at all n locations
caagctgntntatggtagtagtaacaaaatgttttattatgtattttctggccacgaaataaagataaaaatcaagaatacaaaataaggcactgtcaccataaaaagtcttcagatatggataacgtgatggattaccaagagtatttcacaagaaaacaacaatcaatgagactaaatgctatgaaagaacaaaaccaccgaacttattcgacctttctccttttctaatgataatgaagtatgggagtcacttctatggtcctacttgaaactgtagcacactgtatatcttaatacaaatatcaataatcagtaataatcaaaggaaaacacagtcaaagatcagagagtcagagatataagaactctcatactctatttcttctttttgttcactgatactatctacaacagggtctttaaacaacacgaagtatctttggatcttattt

SEQ ID NO: 231778 - DNA, 300 bp, Glycine max
acatagctcttattttgtaccttcgcagatttattcattttaaaatagggtatgcaaatgtgctttgtaatgaactaacgttgaggttgggtcagagtgagaggaatagtcgaataaagtggccgagtattggagtgtgaataagattaacccttcgttagttcgcagtgaaagaaaactgaaaaaaaagaatgaaataaataataaaatgagatgaaatttatatttctacgctttattttaattgaaaattttcattttaattaacttttttttttccatttcattatactgaatgga

SEQ ID NO: 231779 - DNA, 323 bp, Glycine max
aagtcggggcgtgtgagcaacgggcgttagcgctgggccagtgtgtgggcggcccgcgggtccggggaatatgtcccgactgattaagcgacgggtcgagttggtgagctttggatagattgagatgtggtttggttgtggggaatgaatgtctttcggaaagtacgagtcgctgggtctggttagcggatgtattgagcgacttatcggaagttgggacgttgtggaggtccgtcagaagacgcgattagagacctgacggattcgcgacccgagagatccgggagcgtgcgtccgggaacgtttgacgtggaagagtgagg

SEQ ID NO: 231780 - DNA, 261 bp, Glycine max
ttctccccgagcctttttatgacgcccaatggggataacctaaactacttccacaattgctcggtttataagctcctatgccgcgacgtttggctaacccatccgggtcataacgtccacaataacttggccacattacctgctcggacaacaggtgccaaaaggagcccagagaatccgacactaaatacggaagagtttaaatctttgggttcaaaaggatgagaggcacccacaaatttctgccgcacagacatgccc

SEQ ID NO: 231781 - DNA, 334 bp, Glycine max
  unsure (1)..(334): unsure at all n locations
agtgtagtcctttattattctcctgcggagacttgggctttgttagcaggaangattgatggctgtgattgactgggcggataagttggctgcgccgacttatgtaggtgggtgtgagacttctgttacgaccggcgcaatggctcggtgaagagattacttgagaagtagaactaccggataattgacgataataggggggactggtcgcccgagccgtattcggacttttagggattagggcttagtttccgagctgatggtgtactcctcgtgggaggtgctcgctntggtttcgggatcgggaccgcttcgtcgatntggagggctcgcg

SEQ ID NO: 231782 - DNA, 270 bp, Glycine max
cgttattcgtgtgttcgttgtttcaggttatatgtgagtcccggtggccggttcttcttatttgattgtcgacggacggatttgagcgtgatttttccctttcttgtgaaagtctgtggcgattctccccgttattgaggatttgttgtggggtttgggtgttggcgtgggtgtgattgagtatttcgtcgatttgaaaacgggacggcgggtgtgagcgtctcttgtttgtgaagtcccgcttgtgttggtcggtctgtgtccttgtgg

SEQ ID NO: 231783 - DNA, 392 bp, Glycine max
agcttggtcttcattccctctcgtcagcgcctctggtaaatattgctctcaatattcttctcctcaccgtccatatcttccttccttccttccttcgtcactcattctcacctacatgcactgtacctccaggtatatccagagcacatgtgccacatctggtgaagggctctatgaaggacttgactggctctcaaacaacattgcaaacaaggttagtgctgaataagtgaataagtggatgatttgcagactgagcaatttagattacaccttggcagtttaattcatgccttttattttttgaatgatttgcaggcgtagagatttgtagttaaacgcaaggaagttgagtttacttcggccattatgaatctcagtctctaattttc

SEQ ID NO: 231784 - DNA, 232 bp, Glycine max
tttcggagccttttcctcctttgtctacgggcgctcggtatccgctattcttggacggcaggcctaagcaggttccaggaatgcatcgcattttggagtcgaattagcgcgtagtctgttagcgtctgggaatccaggaaatgcgtcgtagttctgcctattcgctggcgactggtcgcgggcctcttcctactttgtctgtactggcggcgactcggtgacttttggcgtc

SEQ ID NO: 231785 - DNA, 327 bp, Glycine max
  unsure (1)..(327): unsure at all n locations
agctggaattgcatatgggcacccatttcttatcctctatgatgtccctatgtatataaaacagtcccacaatcccaatcttacaaaaccatattcatatgtcattgggccatttcaccgagcanctggtgggcgcatgtttaggcatgaatagcaagagaatggggggaatgtggcatgccccattgcttcagaatataacataagcctaaggccattccctacaacccctcaacttaaacaaattaagcatgaaaacaacccaaaactgccccacaaatttgagcacattctcacaatttagagcaccaaaagttgaacaaaatg

SEQ ID NO: 231786 - DNA, 136 bp, Glycine max
ttaatgtgtttggattaattgccttgatacactttaggaaccctttgggttagtttttagcggggttctttggtcgcgggaagtgctcgtctcttatgaggtgttggtctagaacctttcgatggtcttctacgtg

SEQ ID NO: 231787 - DNA, 327 bp, Glycine max
aaccatatctcatcatggacgcaatctttaaatcgcttcagaactagctgcctccaatttatcctactattagcacatattataatctcaacagcaacccgggaccctgctgatcttaaaatgtcatcagctaagccaaactttttctggtgcaagtggtatgtgctaattgtagtaccaaacttgattaccagccatcagacatacatgaatagtgcactgtctaaaatttactaagtaaatatccaaaacataactcatccagagacatatataagatttcctaaacagtacacaattatggatagttctcattagccaacaaaa

SEQ ID NO: 231788 - DNA, 331 bp, Glycine max
ctgtgggcgggaaccgttgtcattcgccttgtgggggaccacggcgatgaggtgatgaaagggaacctctccggcctctgagtttagctgacttggggcgcgggtaccgtgagccgtgatctggagcggctgcgtgtatgcgccggcgttggggcggttaccggccgcgggagtccgggggtgagaagaattgaaaggagactgaggagtccgacaccctgtggagaagccggaaacgaaggcttttttgaagatgtgtgcggtggtgttaccgcgtggatctacctcgctgatctctgagccgcgtacgggtcgccgggagatcggtgga

SEQ ID NO: 231789 - DNA, 383 bp, Glycine max
  unsure (1)..(383): unsure at all n locations
gagcggaagatagagggaaatttcccatcaagaaaaggaaagaaggaagatttccatccaagagaaagccaaaaaagataagaagggaaactccccaatcaaagagtgggagacagctaaaagaaaagacagaacattcccaatcaaagaatgggagaaagtcaaacatgaagaagaagaaggaaagacagctcctgatcagggatcgaaggataacagaagacatgtgcagaaaggtctttggaccgaacaatatctgaacaatacacaattgcatcaaatgaacaacaagaatgaaaggaaaccacgacctanaatggtcttctcctttgattaccaaccaaaatcccgtgcgctagtgactttttcgccccgcactaaac

SEQ ID NO: 231790 - DNA, 430 bp, Glycine max
  unsure (1)..(430): unsure at all n locations
gcttatagccccgagagcatttggcatagttaacttaatagccgctaattgttcttgaatccatatttctttcatgcggcctataaggttatgcctcagtcggacaaccccaaatatgcaagtgtttaatgctgggctttttgtcagtccaaagttcataaggggttttgttaactgctttacttggcaccctattaaggatgtaagttgtggtctttaaggctcctctccaaagcgactctggcaaagaagaatgactaaccatacttctcaccatatccttaagagtttggtttcatcgttctgctacaccattcatgctangttttcctgacatagtgtattgtggaacanattaacactctttgaanaaagtgccaaaggcctgaacgttgtctcctgaccatcataattgcatagactcaccaca

SEQ ID NO: 231791 - DNA, 375 bp, Glycine max
  unsure (1)..(375): unsure at all n locations
tgtggtagtattgactactggtgtatgagcggtcatgagtcttttatatcgtgacgatcggtttgatgatggattttgagtccgggattgattgatgctggggattggattgcgatctggtataggtgggagcgcgagggtgggaggtgaggttcagtttttggtggtaggttggaggacgggggcatttttttgttggaagacttcgttctgtttagtgactgagtgatgtttgctggagcgataggatcttgtctggaaatttgtcttacagaggttctgtntacagatcttatctcgagttatcggatcgtctctggtgagtttgactccagaggttctgtttacagttctgatctcgagttatcggatcgt

SEQ ID NO: 231792 - DNA, 456 bp, Glycine max
  unsure (1)..(456): unsure at all n locations
agctcttctttcttaatcaacctgtctattgactaacaatgctaattgcaagttcgcattcttgttctttctttgtctaacatacatacttgctcaaactcatgaaaagaaacacaaactccatcacaatcatgcattcaatccaaaatcaattcataacaccaattttcacaaaaagataaaagtttttcactgcaatatcatcaaagttaagttaaactgttccatatgcttcaaaacaagcatactagctaactacatacaaaaacagcagtgtatataaacattgacgaanatcactaaaaaccaatgtactgaaactataatcaatataataataatccaaaaagcatcaccaggaatttagaaatcctgtgactggtcctgagtatcctgtgtctgaacatcctnctcatctgtcagatgaagtactggagtagctggaggagaagtgtc

SEQ ID NO: 231793 - DNA, 239 bp, Glycine max
tcgttgcgggtggatattgtggactcgcgtatccaccgtacaatgacggcgcgggacgcgtttcacaccaactccgcggtgaccaagccatccaatgttgggatgtccattcttgtgggacaactgggaaggcacctacaacaagcttcctgcggactctgagtctatccctgatggagcgggtgctttgataccgctaacgactgtacctcgacgggtcggcggggccagacccgtcg

SEQ ID NO: 231794 - DNA, 261 bp, Glycine max
gtgggttccactcctcattattgtacaaaattcatcagagttgattctaccatcctgagaaatcacaaaattgagtgtccactatgaatggaactagaataaaaaattgtagcaaggcaaaagaaaaatacgcttacattactagaatataacgtttgtttgctatgagttgcgtttggtatgcatgattcccctaatatgattcttttcgtaatggaattattctaaactacgtatgtatcagtggccaatgacacaact

SEQ ID NO: 231795 - DNA, 222 bp, Glycine max
gtttgggcaggttccaggttgcatcacggttgtgtgggccgtgagctgggatggtgggttgcgtgcgtatgataggatgagaggagagatttgtccctgagagatgggacggatcagaatgagggtaggtgagagatagggctggtcgtgacgatttggtgatattggctaggggtcggtctccgaggcgatgttttctagatgcccaatcggcggttcctg

SEQ ID NO: 231796 - DNA, 386 bp, Glycine max
  unsure (1)..(386): unsure at all n locations
acatctattaatcaaatatgctggtgtgttgcagcttctccccaaaaagtctttggcagtcctgcacttagaagcatgcacctcactctttccaaaatggtcctattcattctttctgccaaaccattctgctgtggagtgtgagggactgttttgtgccttttgatgcctattttcctgcaaaactcattgaactgctctgaaacaaactctaggccattgtcaggtcttaaaacttgaaattctgataccaatgacagatgtcgtaccggatgtcacgacatcacgcttcagaacatgcagatgatgttngacagtatgaacagattaaacacagtaataacacaagaaaattgtaacccagttcgggcaacgtccctacatct

SEQ ID NO: 231797 - DNA, 212 bp, Glycine max
gacagatacgcttgggtttgagaaacttcgaaaatgaagagacggtgaccgatcggagaatttgaaatataggatgggacatgcacccatgcacctccgttgtcctctgtgatcaaagaccctgttgccttgttacgcatgagatatttacagaattatagctagcggccgacggggtgggaggatcctctatagaagtccgagtatgtgag

SEQ ID NO: 231798 - DNA, 335 bp, Glycine max
  unsure (1)..(335): unsure at all n locations
cagttttaccttctcctccattggtgtgtcttcaattttctgcaaggatctcctcacatttcttgntataaatgttgttaacatgattatttagagtttccaccaattaatcttgctatagaagctagaattgattttctatggtttaaacttcttcttcatgttcttgaaccatgagttgtgttgagtttacgttcctttgagttttgtcttgctattttttgtggctgaaacctaaaccataaaattcttaaaaaaaatttaagtagaaataaaccttcaaaatctagagtgacttgntcacctattgtaggtttgtcataaaagtcatgtct

SEQ ID NO: 231799 - DNA, 384 bp, Glycine max
  unsure (1)..(384): unsure at all n locations
gggtacgccgcgcgccgcgcgcggcgtgggggcacgtggtaggggtcaccgcgcggcgcgggcgcggggtggggcaaggagggtcttggcgtacgctatcggggtaggggtgcttgttttggccaggcgcgtgggatggttgaatttacgttagccactacaggaggggcgcggataatgcttactctaggcgcgggataaggcgtggtggtggaggcttgnggaggctaggcgggggccgcggctcgttggtcgcgattagcgagacgtggttggctgactgacggtagaangatggttggagcgcgacacggttgggtcaggctgacggttgatgcanggtgatcagttgaagagtgagatgagggttgctctgtcgattga

SEQ ID NO: 231800 - DNA, 306 bp, Glycine max
ctactcaggggatattcaaatgaagatgtacccacttgacctagaataggcaacattcatcactaggggagccaactttggctacaacgtatgccctttggcctataaaatgcgagtgccacttatccaaggctaatggacaaaagttttgtgacaccttttaccccaacatgcatataaatgagaaaaacatataaaatgcggaatctaattaaatcaattatattccataaaattgtaagtaaatccacactgggagaaagggcacattctgctcactggtaccaaatgaaacttctcataaac

SEQ ID NO: 231801 - DNA, 373 bp, Glycine max
  unsure (1)..(373): unsure at all n locations
agctatgctgcctctctttatttcgatgctatttttttcttcgncctcaccattgatgcgtcatcaaagctccaacctttgcacaccatttctgctcctaatcgcgaaaggaagccattttcggagtcgtgaagcgcacctcctcattgtgggactctacattttacgcgtgggtagacttcttctcacatgaattttcgcgggtattgcgttttgggagttatgatgggtagttttactaggtttatgcctcatgatagctatttgtgaagaaatttgatgaaagcatgttaaactttgcatgtctggcatgaggcaagcctaccctttctattatcaggttttatgatgatgctcgtgatgcttgtatgct

SEQ ID NO: 231802 - DNA, 258 bp, Glycine max
actgggtccgacaagatatttcttcttcttaccgggacgggagcgtttattttacggtcgttaactccgaggcgtacgcggtcgatcggtgggttttctgggatacgtattgagatgaccgcgaatagaaataggtataggaggggagttcttcacaaactcccgtggacggttgggtagatttttcggtgaagacctcgcgttcgtcccctacgtgatgttatgcgggtgaccggttttatacccggcttcgaaatt

SEQ ID NO: 231803 - DNA, 183 bp, Glycine max
acatgcacaacttcctagcttggtgacggtacctcataggtgtggggagtatacttctacatctatgctcgctcaaggtgtagaggtaggtatctcgatcaaggaaagaaaccgtcaattgtggattttgaaatttgaaattctgaaaaaaaaaccaggacatatgaagaagaagaatagaga

SEQ ID NO: 231804 - DNA, 266 bp, Glycine max
  unsure (1)..(266): unsure at all n locations
gtgcttgtcgttacggttctacataaggctatattgattgtccggtcgagaggggttcagtgttcattgcaatgctggaagcgagacccctcatgacgtcgatacgaggngtgggcaaaccgggtcccaatccgccacgacattagccttacgcgacttccgtgaggctgtccactttccaggacacggacctaggagtgattattttatggctactccagcaggacctggcccactctgccgtgtccccggcgaagccacctccg

SEQ ID NO: 231805 - DNA, 400 bp, Glycine max
agctggaatcggacatccgtgtgaaaagttattattctttgaatttctcaagagcttccgttggtaaatttcgagcctctcgacatattatgcgcccgaatcggacatacgtgtgaaaattcatgatcatttgaatttctcgagagtttccgatgtttaatttcgagcgtatcgatatattataaccctgaatcggacctcagtgtgacaagttatgaccatttgaatttgacgagagcttccgttgttcaatttcgaatatcactatatgtgatgcgcctaaattggacattcgagttaaatgttatgaccatttggatttctcaagagaatctgttggtcaaattcgagcctctcggcatcttatgggatcgaatccgacatccgtgtgaaaagttat

SEQ ID NO: 231806 - DNA, 460 bp, Glycine max
  unsure (1)..(460): unsure at all n locations
agcttcaacaagtttcttcacacaatactatcatgaagtagtatactagcaagactacccatcatatctnccaaaaccccatacccacgaaatttaagagagaaagaagtccaccaaaacctgaaattttgaagtcccactcgtagccacgcacttcacgactccaaaaacgccctcctttcacgatttggggcagaaatgatggccaaaggttggagctttgttggggtttcaatggagaatggaggagaaggaaaaagcaatgtgaggaagagggagagcttctgaattttctgctttggctgagtgaggagagagaaaagctttttggttttaaataaaaagggttttcctctttctattattttatctaagcaatgccacatgtctncattngagtggagcaaaaagggcctactttccctttntgactgtgacccatactcagtcacaaaagtga

SEQ ID NO: 231807 - DNA, 345 bp, Glycine max
attggcgtgttaccgtagggttactgcgcagtgcggcgtggcttctccccgtagtcttgaagctaggaatgacttctttctgaaggtggcggtttacccgtctctcttatcgtatcttagcgttgaaggtagaatttataattcgcacgtactgtggtgaaactgtgctggaggctcccctttcttgagtcttcttttcgccggggcaccggtgatgttagacctgtgtgtttggtggggtgatggttttgaggtaacacgctgcgggatcgagttgtaggggcggtgttcgggccggttgcgtaggggagtgtgtgtggagtctgggagctgtcccgttgggca

SEQ ID NO: 231808 - DNA, 407 bp, Glycine max
  unsure (1)..(407): unsure at all n locations
cgggtattagatttggatattgataagtgttggattactttcgcgctccgctctcttagcctgttctgcttgcgtttcggacgctttcgattgggtctccgttttcgcctccattgcttttgggatcgccgcttctcccttggggacccgtacttgaacgcggaaggctcgggaagctcggagggggcgcgcgtacgctaccgttccgggcgctctgaggcgtttgatctgggcttacgtaatggttcgctgggttccgccgggtcctcattgcctatggtaccgggttcgcgtntaccgtcgcggggcccgctgtccctcggcgtcggggatccgtgagttcggtccgggtgcggttctagggccgttacttggtagtctgttctgtcttacgccgtgttttccgt

SEQ ID NO: 231809 - DNA, 483 bp, Glycine max
  unsure (1)..(483): unsure at all n locations
taggtgcagaacggttggtttgtgatgttgtggtgcaattctgggtgtgagtgttagtctgtttgcttccnagagctataaagcgattgattacttcttcgcttccattgcggaatttatcgtttctttttaaatttatttaaattgaaagtgcgaagtgtcctttaagtcgtgttctcctgaggtggttttacggtgttatcttcttccgcgtactgcatttcctcctacgcgggcggggcgggacttcgcttgctcctgtgacccgtttctttcttaggttgtcgtgttgggtggcccgcgagcgcttttgaaagcgacggggtagggggatttntttttgcgtttggatcgatgtgggggctgggggttggtttgtgggtttctgcgtgggttggggagctgcgttgtttgtgtggtgcggatttgtcgttgttgtctcggtgttttgtttgttaggtgggttgttttgtgggtgttgtt

SEQ ID NO: 231810 - DNA, 300 bp, Glycine max
actagtcatcgattaccttcaccatgttattcgagtcacaatgcattttatgaaaagatatgactcttcacaattgaatttgaatgtcaacggtcagatacactggtaatcgagtaccaatatattgcaatcgattacactatttaaaaatcatttggaacgttgcaaattcagttaaaaacttctttgaaatcacattttatcactggtgatcgatcacaggaacactggaattcattaccagagagtaaatacgtcttgttacttaaacaaaattgagaaaactcttttgcgaaacaa

SEQ ID NO: 231811 - DNA, 433 bp, Glycine max
agcttcaagccaaaatgtgtgttcacgagtttctatcttgagtggctcttccactcttgtattcttagaaacaaagaagggtcttaacttttaagagattgtatgagaaagaaaacagcaaaattatccttaaactatcacgcacatgatgaattatcgttaacaaaaatcaaactatgacagaaaagggaatgtcattataatgaaattgtaaaagttatagaatctactatatataagaataatttacaaggagattctcttgtaataagtattaaatgaatgaaagataaatataatttaactctaaaatttaataatctagcaatctggattccctctcttaaggtgggagacatgttggctcttccaccttagctctcattgccaatatataatgtacctgtttggtcatgcatagttaagatacttt

SEQ ID NO: 231812 - DNA, 321 bp, Glycine max
agggcataaaaaagtttgtggttaatctaaaagaacatacatgttcttgtagaaaatgggagttaattggaattccatgcactcattcaatagcatgcatgtggattaatggtgtcgaacctgaacttaatgttatttcttattacaggtcttgttttctggtattcctatattgctgtttttggagtgtatctggtaattggtttgaatcgaatatctttcgattgcatttgacaagaaatctactatcttgtcacatattcatttattatctttccatgtaatggaccaaacttatggcctcctttacaagaccagtca

SEQ ID NO: 231813 - DNA, 378 bp, Glycine max
tgagaagtgaaatcgacaatgggacaaatttgaagcaaactctcacctcacacaagtccataacatcaatttaaacttgttcaaactggatgtacacctaaaatttcaccgaatcaaaatctgactcctcaacatccaaatttaccctagaaatggctctttgttcactttggtcatttgtttttctctctagcttagcctaacctttctcataaatcctaaatgacatttcaaactaggatgaactcattttaaccttcatctactacagaatccaaatttaaccttccaactctcagagccttactctgtttcactcataacgcacattctcactttcttacgctagggtaactctacccctcatctgtaacagtt

SEQ ID NO: 231814 - DNA, 155 bp, Glycine max
tggcgcatatacgggaggaggcttggctacagcgatgatagtcaggccattgcctctgccgagattttagggatctggcttggcgcaataaggccggagattcggtacaggtatttggtgagccatttgcaacgccgagttttagggatccggga

SEQ ID NO: 231815 - DNA, 420 bp, Glycine max
  unsure (1)..(420): unsure at all n locations
agcttgtcctctgtactgtgtacacaatttatcattcnatccagacctctttcacatcgtcacgctctcgtcatgctctctcttttttttcctgtgcaaatcaggcttaaaaagagctttctgaccttgaaggcacgcttagcgccattctcgtgcttagcgtgagtaagtgatatttggcttagcaccaatcttgcgcttagcgttgaagagacaaccacctcgcttagcgagctgcatacgcgctaagcgcgtgctggcatggaggaactctcttcaggcttatcctcaaacgctaagccactgctgtctcgcttagcgtgttggtctcgctaagtgcatggntcatgcttagcgagacaacactttttgaaccttcataagttttctcctattacctcgaattgaagtgaaattaca

SEQ ID NO: 231816 - DNA, 382 bp, Glycine max
  unsure (1)..(382): unsure at all n locations
tctcgtgtattgtcgctacgagctttcgcntacttgctgtgatcgctggnattgagtggagggagttggatggacgaccctgctggtggtcttcttctataagagtttggtgcgtggtccgggctcgactgggttattgtgcggaggaggatgagccgattcatgtgatcttggttctatgagtgttatcgggattaatgaggagttcattcgcgtggtgttctttgttggttatttgttttttttttggattatcgttgttcgcttccctatgagattggggggggtgcgagtaattgcattatcttgagctgaaaggttcttgttcgctcactcccggccgcttccatcgttacgtatcccaggtccccgtatgagattg

SEQ ID NO: 231817 - DNA, 396 bp, Glycine max
  unsure (1)..(396): unsure at all n locations
agcttatcaaagagaactctacatctaggacttaatgcatgactttcattgtgtttggtttgccgttccacaaccctcagcgtaagtttattttcaagattcgtctcacatacatctccatagaacggtttcgaaattggtgttgccagcaaacaaaacacacactttgtggtcatgcctcattatgtcggcaagaaattaaaaaaagtgtgtaaatagataaatagatagatataaagagagaaataggagtgttaattaagagagtcattatcattttaaaaagaatattatcatatcacattacaaatcatatcaatatatcatttgtcacatcttttcgatctcactcaaaatgtaaatacctaatganttttcaacnagtcgttttctttt

SEQ ID NO: 231818 - DNA, 238 bp, Glycine max
  unsure (1)..(238): unsure at all n locations
tctcgtgtattgtcgcttacgnatttcgatattccgactggtgggagagggcttattacgggcggttattcccttctttagattgcgcggcctccgacgcttgcttacccccttccccctctctaatcctttctctatggtgtctgaggtgggaggtatagctagtttgtctgaggtgtgggtggtggggtgtattctggctgtttggctatttcgtgaaaaaataaaaaaaaatgtt

SEQ ID NO: 231819 - DNA, 409 bp, Glycine max
  unsure (1)..(409): unsure at all n locations
ctgcagctatgagaaagaaataaagattggtacgttttcattaagcgcagttaattcgaccaacaaagaacgttgtcataataataaaagccaatgagaacgaggttgtggtggagattaaagaacaagatgagggtgaaggccttatgataaaaactacaactttcaaagaggaggaagcttaacaagaggttgtgggcaaggcaactcaagatcggggtacgacaagtcaaatgtgaaatgttacaattgtgagaagtttggttattatgcttttgaatgtaaagctcctagtagaaatagagttgaagagaaggcaaaccatatggaagaaagcatgaaanaaaggtgacaccttattcatggattgcctgtngtaagaaagaagtgaagacaatagatgatacct

SEQ ID NO: 231820 - DNA, 227 bp, Glycine max
gagtgctggtggttcttgtagtgcgttttcggctcatgcatgaacggatgtgtatgtaggcgggtgcggctgagctggctaggaggaggcgggctgaaccggttaggctacggcgatgactaggaggggtgggagttctgaatatgccctgacgcgtcctattgacttgtcgccggtgtacattattttggcgcctgatagggcaccctgatgctgtgacctgcttg

SEQ ID NO: 231821 - DNA, 432 bp, Glycine max
  unsure (1)..(432): unsure at all n locations
tgatttaactaatttttagatatgattatgaccaatttgatatatacaagnttctcatatatctgacttaccattcaaattgtaggcactatttgtgttggtggttgcatcgtcatcacgacattttgtggtggacattatattgatcatcattactggtacgaaagtttttcataaacttttgatgctaatttttggtactaatgcttttctacattgttgtctatgattaatgaccagtgttttaatacaagttttgttcatcatgagtgaatcttagattcctggttgagattgaatacaatgattcttacaaacagtttgcattaattgttgaattgagtcttgaattgtctgttggacaagttgggaagagcatattttatggtagaacatgcattaangtaagaaatatttgtgaattgatgaaat

SEQ ID NO: 231822 - DNA, 437 bp, Glycine max
  unsure (1)..(437): unsure at all n locations
acggttntcttccgttgtggcgggaagcgtcctttgctcgaggaacgcgtttctttgcttctgtgggataagggagggacgctcttttgttcgcggttggagcggtctattgatgtgattttcgtttcgcggtagcggggcgcggtgatgtgtcttaggaggggatttactgggcttttgggtcttattgtgtatttttacgggggtgtttttattgggattgatgtagactctttgcgggtgcggtagttcttgttcactgaagggggggggtctcggatgcggcttagaggattgtggccgggagacggcggtgatggctatatgccgtnatgagctgcgttatctaggcggagctctgtatgcggtatctcttagtggtttgattcggggtttgactgggggttgaggagtgctgtgtgaatagtgcgcgacgt

SEQ ID NO: 231823 - DNA, 414 bp, Glycine max
  unsure (1)..(414): unsure at all n locations
cagcttcaagaagaaagatggtcttaacaaacttcttatttccagaagggaattctatcaatagacctccaatctttaatggagagggttaccattactggaaaacccgaatgcaaatttttattgaggcaatagacctaaatatttgggaagccatagaaataaggccttatatacccaccacagtagaaagaattacaatagatggcagttcatcaagtgaaagtataactatagaaaaacctatagatagatggtctgaagaggatagaaaacgagtacaatacaatttaaaagccaaaaacataataacatctgccctgngaatggatgaatatttcaggatttcaaattgtaagagtgctaangaaatgtgggacactcttcgattaacacatgaaggaactacagatg

SEQ ID NO: 231824 - DNA, 456 bp, Glycine max
  unsure (1)..(456): unsure at all n locations
tcgcgncgtgtggagagtatgagctatattgatgcgcgcttgggagggggaaaactgtcgcttgatggattgcggtttatggtgctgggtggcatcttctggcttttatctgggattttgtggggggttggaattgtcttattaggaggatgttgaagatgaggatgacgtggtcgtggaagacgtaaaggagtggaccggctgccgggaggatgaatcggcaggtgtgagggttgttggagctgatgacttgatcctgtgagttccaggagaaggtgcctatgggtgggggttcttggtctgacttgccgtttgaaccgttntggattatgtgagatcggttttatggatgtcaggatgctgccgttgtgggtgtgattgagagtctgttagacattatgtgtgatcggttttaaatttggggagtcgcgtggagaatgagttcgtggtggaggt

SEQ ID NO: 231825 - DNA, 336 bp, Glycine max
taggatcggtattgattccaattcttccaaaatccacattatactgatccacctggatccttggaatatattcttctggacaatggatggctccattccattagcatgtcattgtaatttcaacacacttctactttttatttctcttttaataaatttatttcaaacatttaaacgtaataagatttattaaaaataaaatatttcttatactttatatttttaatataataaatactgtttaaaataagaatttatcgctctaaatcgctgaaaatcaactttaagtcttcgtttggtatcataaagaaagagaagaaaaaatagtcatggaaa

SEQ ID NO: 231826 - DNA, 334 bp, Glycine max
  unsure (1)..(334): unsure at all n locations
agctnttcgtcttacagacagcaaanaagaatgtttatacggataaccactcgggtatttccgcccgtcagcgtgactcanatgtgagtatgacagatcttgtgatcgtggaagatgacgtaaatctccgcgtgtcaacgggcttgtcggccgcgattgacgaagggcgcagaatacgacattagtctctgcgtgctattaggctnttcgtcttacagacagcaaaaataatggttataccgataaccactcgggtatttccgctcatcagcgtgactcaaatgtgagtatgacagatcttgtgagcgcggaagatgacgtaaatctccgcgtg

SEQ ID NO: 231827 - DNA, 318 bp, Glycine max
  unsure (1)..(318): unsure at all n locations
tctcgtgtcttgtcggttacgaatgtactcactatatcgttcagctgcagcgacacccggcaggttgcagcagcatcttaccgaggatctcccaatatgggtcagctgcggccacacgctcttttgcgagctgtcgatctgggatagctcaggatcaaacaatttgtcccatagaaggtgccagtgtttctggcggggngacgangggagtatcattctaccgatgtactcactctatcgtcctgcagcggcgtcacccggcagcttgcacaaccatcttacccagatctcacaatatgggtcagctgcggccacacg

SEQ ID NO: 231828 - DNA, 420 bp, Glycine max
  unsure (1)..(420): unsure at all n locations
tacggtatcaccattaaattaatcactctctaatatgcattaaattagaaaaatatcaggattaagttaaggattcatacccccttaacgtctctatataaatgagcaagttcctagcctattaaacaaaccagcacctaatttcacaaacaagaaaaaacctaccaattacgtgaagtcagtgagtgatattcaaggagatgagtggccaaaactcccatcaatcaaacacctcaaaacattattccagttcccttcaaaatcacaagcatggcaaatctgtgatccctagtgatggtgatcacacatcattgcanaggttcatcagctctagtcatcattntgggcaatcgcggaactccaacatcataagttatgaacaacaagtgtatcaagcaattcagagtgcanaatacacta

SEQ ID NO: 231829 - DNA, 409 bp, Glycine max
  unsure (1)..(409): unsure at all n locations
tctcgtgtattgtcgcttacggactntcccggtgctggngatgagggaccgctgctggatgaagtggctggacgaatatcgtggatgtcgatagtggtgctcaagtcgnggcgggacggaacggtgaggtctagcctgggggtgaggaggggtgagatggttgatcgtggaggagactgtgtaggttgagggtgctgatagaatccggtgtgggcgagggatatggcttgtctagatggcggagaatgtagggactggttgcaggagtggattgcggattgggcccagggaatcttgcggaaatatcgctcgtggggtgaagtatggctgactggttgacgttatgggcgggaggtttggagtgatttaggcgagtcttgactgggcgtaggaggcgcggtagactgtc

SEQ ID NO: 231830 - DNA, 441 bp, Glycine max
gctgagagaagaatatttgtgtccccgatttatatcgcataccgaaagagcactctacttgcaagccccacacacacaaaacacacaataccaccattgtggacccactccacctccttccacaagcaagggatatattcccatttctcacacgcgccattgctcatttgcttccatcgccatgccctctttctttcctagacaactgactctctctatactttaaatcatgaggaaattaaacatcgatttgattatgcaaaagatctcaatttagtattagaggcaagtgatgtgaaaaattgaaaatgcatgagaaaagatattaatatacaatattcattagttttattaataattaacttttgttaaaaaaaattattggtcatgtttaactaccatctttaattatattattcgaaatcaagacgttatatacta

SEQ ID NO: 231831 - DNA, 450 bp, Glycine max
ggctggtccatctctgatttcgcttacggaggattcacctggaaacgatatacggaatgggggcgggaggcgtattcctgggggctattggtcggcttactggtcggggcggggggagtcccgctttggcgttttggccctggagtcccgctcgcgtggtcgtttgatcctgggctatttgagtgcccgtgggtgttctccgtggcctgtgtgattttgctgtggagtatggcgtattgacgcgggttctgggagagaggtggcgcggctggggccggaatctggacggttcgggtcggggaggggggtgtccgctcccgcgcgcgtgcgtgggcggcttggctgaagatgagcgctcgcgtgtgcgagcatattccggtgccgcggggtcgtggctacggctgtgggcgttatgaaagagaactggcctcccttgcgtgagaggcctgt

SEQ ID NO: 231832 - DNA, 371 bp, Glycine max
tggcaacttcccaccttatgtgttcccggggaagtgatatgaaaacttaaaaaaaaggttttctatactgggtttgatggaattattaagctaattattgtgggtggaactttggtacttggcacgggagaatatgatggttccttatgctaatcacacttggttaattggaatatgtggagagatggcaagatattcttgttacaagtataaagattcttggttggatttgattaaaaatatagtggcgattttagatataaattaattattttaaaaatttaatggtaacataagacaatgtttaaacgaaaactgaaaaggactaatgatcatttaaaacataaggaccaaatggactttaaactaat

SEQ ID NO: 231833 - DNA, 285 bp, Glycine max
  unsure (1)..(285): unsure at all n locations
ttacacatccttttcccgatctttcacaccagctgctatacgggctcacaccgcctcacacaaggtcttcggcagagcgcggcgtacacagagttggctcacaccaccagaccagctgcaattgcggagccataggacgcctactaccgcagctactccgcagaacgactggcgttagaagaaggggcgaggggatctcacggagagaactacggagacggtnggcgtcccgggngccaggtcaacggcgagccggattnctttttgatcggcgacggatccgtc

SEQ ID NO: 231834 - DNA, 394 bp, Glycine max
  unsure (1)..(394): unsure at all n locations
agcttgtaagtnggaacaatcaaatatgcttatcctgtctttagntacgaagcacaaataattcacacttgattcatattagtcacgtatcggcttcaatgtcttgtcttgctcaagtcgagctgggcctagagatgaaatcacaccacatttaaacgaatttatttctctattgagcacgacaaacttgtttacatattgctttgctcactctagtaatattggaatacttccctttatttctccctagcatgttaggaccatattatctctaacttgaaccccncctcttctgtcttcgaccagttacaaaatatgcttcatcgacattacagttaaaattattaattttaaatttacaccacatagtaggtgtaatggagaacatgaatta

SEQ ID NO: 231835 - DNA, 354 bp, Glycine max
atctcgtgtattgtcgcttacgggttatccgctaggtgtgcggtctatctaacgacttcggggggtggaggaacatcggttcttttcgtttgtcttttggtttttttcgcgggcgaggtaggattagtctggtgggggagggttcttttatctagattgattttaaatgtttgatatgagggggggtaggtgggaagtgatttattttgttttgatttatttatgtactgtttttttcgggcgcgggcggagggttgggttattgttcttccatgatctgtttgtgtgtgtggctgggggtgattagacattcttttttgcggcggtgttgcccatgttgtgcgaatgatattg

SEQ ID NO: 231836 - DNA, 412 bp, Glycine max
  unsure (1)..(412): unsure at all n locations
tggatgagtttaacatacccattctgntttanggtttttatgatgatgcttgtgatgttcatgtgctgaaattgcatatggaaaactgttagagatgaagggtagaactaacctatggctagaaagtgagaatgtggtgttagaagtggaaaaagagtgaattttgagggctggaaggccaaatctggaattggtagtatttagaggttagagtgagttaatcttagcttgaaatgccatttangacttatgagaaaggttaggctgtgctagagagaanaaaaaatgaccaaagtgaacaaagagccatttctagggcaaatttgggtgtngaagagtcaaattttgattcggtgaaattttaagcgtanatccagtttgagcaagtttagattggatgtatggactggtg

SEQ ID NO: 231837 - DNA, 303 bp, Glycine max
  unsure (1)..(303): unsure at all n locations
cgatctactgatggtccgtggtcggtggtggagctggcttgttttgattttgcccttatattttcagccatggatgggggcacgggtgggctcgttttaaactggggggatggtggtggggtccgcggggggatgggccttcagaaggtcaactcttccattcaagcaattggctgggtttccatttggttcaatgatgtcatggctttcatgctagaatttgggtggngtgggggtatggtnacatatttgatcggtctgtttgaacggttactcaggttttaagaagtgtttttacattga

SEQ ID NO: 231838 - DNA, 358 bp, Glycine max
  unsure (1)..(358): unsure at all n locations
agcttctacttatgtggcagggcgggcttccttcactttcttgtctcaaccgcgagctttgaccaccgctctttcttcccgcgatgcttctctttatatcctcctgagtgggtttatagcctaaaccatatttcccacgatttcctttggcatttatcaggctagttatgccaccgttgtctttgcctaaacccattccgggttcgtaaccgttccccaacataactcgggccatcattactgctgcatcggacaggcaagcttgcccagagaaggagtccacggaggaaatgcttaccacctcaaaagactnggaaagcggttctaatgactcctctgcggcttccacataaggcat

SEQ ID NO: 231839 - DNA, 257 bp, Glycine max
  unsure (1)..(257): unsure at all n locations
gtgaaaccctatctcttgtgtcactcccgagccctccttgtttaaaggcttataattaacctttatttttgtgttgatatgcgagtgtgattatcntgagctctgatctgttacgtttataatttggaacgatagggtctgagaattgagagagaccttccttgctgttctggtattacgagtttttgtagaataggccgaggtgacctttatttgtgaggactcctgcttcgggtttgatgatgatcctccgtggt

SEQ ID NO: 231840 - DNA, 402 bp, Glycine max
  unsure (1)..(402): unsure at all n locations
tttattcaaaanattagagtttatctctattatcttagtgagagtgattctcctaaattcttgagtgattcaagaacaccctggcttgatcaaaggactttcacaacctttgtgtgttgccctcgctggaaagagtgagtctttccttcctttcatcttcacccttgttctttcaaaccacaattctagaaaatccaccacctctgcccagaattatctcgtggccataactcccattntatgcactcaaattaagtgattcttaagcctaaattgactttcaaaacgagacctttcacctcgttntggaatcancctcattggagccctgtagcttcagttattgccatttctatanttctgtccagccaccactttacctacattnntaccatctattca

SEQ ID NO: 231841 - DNA, 396 bp, Glycine max
  unsure (1)..(396): unsure at all n locations
acgacgangcgcagtaggcccagatacgtgaaaagggtgtttagataaaaattatagggcgaagattattttcaggcccccgactccccgggtgtgggggagtcaaaaggacgcaccctcacatacgttccgagtccccgggggggggggaggggttaaagactggttcctgagcgccccccgcggtgaaagggacaggggaccgttcggataccgtcggttaggtattggtaagagcatggtcggtgggttttctttcttgtagttttatttcgagcttcacttaatgtcgaaacggccggactacatcaggcgcgacggagggtacactcaatttaaagaacactgaagcaagcacatgccgttgccggtggcacggcctgcccgttagtccga

SEQ ID NO: 231842 - DNA, 354 bp, Glycine max
tctctcttgtttttcactttcttgaaaagaagcgatactgtgtggtagtagtgtgagctgaagtttgatgtctgtgtcattggagcaagaaagctatgtaggcttatcagaggttcctgcaatggaaggctgttcttagaagactggtggtggcttgaacctcaacgctactgagctgaggcttggtttgccaggttctgagtcaccacagagagaagagggtgtggaggacaagaatgtgcaccctttatgcatggtgaagtggttggtgtcacggggcaaagaggggtctcttagacaccattgatgggggttctgggaatggcttcttctgggatactggactgagtgggt

SEQ ID NO: 231843 - DNA, 360 bp, Glycine max
tctacgggctatcaggctttttgtcttacagacagcaaaaaagaatgttataccgataaccactcgggtatctccgccccgcagcgtgtctcaaatgtcagtatgacagattttgtgagcgcgaaagatgacgtatattttcgcgtgtcaacgggcttggccgccgcgattgacgaaaggcgcagaagacgatgtcagtctttcgatgctatcaggcatttcgtcttacagacagccaaatagaatgtttatactgataaacactcgggtatctccgcccgtcagcgtgcctcatatgtcagtatgacagatcttgtgagcgccggagatgacgtaaatcttcacgtgtgaacgggcttg

SEQ ID NO: 231844 - DNA, 242 bp, Glycine max
cgacggggatactgcggctttcacggatattactccggctgacgactttggtttgcttattgtgagcgtgtggtttctgcctccgtcgaattttgtgtttatatggcgacgcctctgagtgtattagttggtggtgtttgtttgttagactgccccctattgcgcatactgacgagtctctatgacccgcgttgtttagattacgtttcggaaagagatccgagacgtcgtcgaggtgatgg

SEQ ID NO: 231845 - DNA, 312 bp, Glycine max
  unsure (1)..(312): unsure at all n locations
ctgcaagatgaagcttggatgggaagggagaacggagaattcttctgctttttttccncgaccatagaggggtacctggagatatgtcgcgggggtcaagaaaccctggggtacgcatgtggggtgcctttgcgcacaacccagcctgagcaatcccgacccaacccgggcatattcaggcagcgagaaactgtgatgtacctaaacaggcgagctcctggcagtacacaggataaacgaacaaagaccaccaagcaacgatgctcgtgtggtggctggccaactgtgaactttgatntatatgtgagatat

SEQ ID NO: 231846 - DNA, 339 bp, Glycine max
  unsure (1)..(339): unsure at all n locations
tacagaagaaaatgcttcacaaacattaagaaagctagtagatgggcctaaaagaaatggtataacttgacaaggatatgacataaacaagtattcattttacacaaaagcctaagatgacaaaagtacaatgcagaacagtggggtcaccctaaaggctgaatctcaacacttcgcaagtgtgcatgacaccaatccctgtgtagcttccatcccttactctgggntcatngataaaatttgggagcttaactatgtgacatttactggttgtggtttcacatgtcaatgggttgacagcaacaccggcgtgcgcaccgatgatatacgactcacggt

SEQ ID NO: 231847 - DNA, 229 bp, Glycine max
gctgagaaaggcggagaatagacgacggacttatatttagggggttcttagtggtgtctagaggaacggccttaggtgacatactgatctttttgctcttacggtcgcgtgtcagtggttggggcgcgccggagtaaatggtatgatattcgtttggagcattgcagagtagtgggacggctgatagctttactaggtctggggtgctcgtcggtctgtataatttttg

SEQ ID NO: 231848 - DNA, 283 bp, Glycine max
gagtataaactctggccacttacaacattttgagaaacactcttttgaaaaacacaaatgtgctatgtttgtcttttgaaaaatctttacaatacttcctctgcgaagtcttcttgatttcttctcctgcatcatgaaaaaaaactcctcttgactcatgaatattcctgacctcttcttatgaaaatcgaaactcatcttgatccctaactcgcccaccaatcatgagctataccctgggatatacgcctctttgcaactacttgaatcaacttgattcata

SEQ ID NO: 231849 - DNA, 231 bp, Glycine max
ccgctgagggtacggtccgcgcgcctgagaagcggctggggcgcctgatgcgccgctctgagcggagacgtttgacgaagttctgatggggggtgtttggtctccgtggtttcggacgtgtcttacgtatgtgatggggcgtgtggtcttgtgcgaagcggaagcggattgctgattggagataggtgaggccgggattggcgaggggacgtcgggtgagaacgatttccg

SEQ ID NO: 231850 - DNA, 418 bp, Glycine max
  unsure (1)..(418): unsure at all n locations
agctctacgatgattaggttgtcaaacgacaataaatatgttggnatcncagataaccgatccaaaagcattcttatgtgagaaattattcttgacaaggaacttgaacaaaaagaaatttaataaatgagagaaaaagacaacattatatattataaatgtaatacaaaaaaattatattataaaatatgtggtaaaaatttaatataaataatatattttttgttatttaagtgataacattcttccaatgtgtttttgattatcatgttatttattcataacatttatcaatnttactaataattaatttttatgaaataatcgattatttttagtgaattttntaatcattcttcttcttgggtttgaaccgcatacaatatttatctttcatgttattggtttatccaataat

SEQ ID NO: 231851 - DNA, 378 bp, Glycine max
  unsure (1)..(378): unsure at all n locations
tctcgtgtattgtcgcttacggtcttgttggagttggcgggtcatgatatcgtgagtgngggagtgtgtttttttcgttgtgggggcgggattttgtggcgtttcgtagtggggggggacccgtggagttttgtgggtgaatgccagctcgaaggagacgtgggtggttattgtcttttgactcatggtctctggtctcggttctattttttgcgttgcgatatttattttcttggggtataatagtgtttggtggttgggtgtggcagtgtgctggctagtggtggcggggtctgttgttggagggactccggacggggtgcccgtgttggcgggtttctgtgtatgtgttcttgtgtgggcgggaggggtggtggt

SEQ ID NO: 231852 - DNA, 421 bp, Glycine max
  unsure (1)..(421): unsure at all n locations
agctnttcctctgttctctgcacacaattcatagtttatccagacctctttcacatcgtcacgctctcgtcatgctctctcttttttttcctgtgcaaatcaagcttaaaaagagctttctgaccttgaaggcacgcttagcgccattctcgtgcttagcgtgagtaagtgatatttggcttagcaccaatcttgcgcttagcgtagaagagacaaccacctcgcttagcgagctgcatacgcgctaagcgcgtgctggcatggaggaactctcttcaggcttatcctcaaacgctaagccactgctgtctcgcttagcggtttggtctcgctaagtgcatggttcatgcttagcgagacaacactntntgaaccttcataattntcttctttttacctgaaaaatgaagtgaaattacat

SEQ ID NO: 231853 - DNA, 407 bp, Glycine max
  unsure (1)..(407): unsure at all n locations
cgtggtcanatctcgtgtgttgtcgcttacgggctnttcgctttacttgctgtgttccttggtattgagaggaggtattgggatggacgaccctgctggtggtcttcttctataagagattggtgcgtggtccgggctcgactgggttattgtgcggaggaggatgagccgattcatatgatcttggttttatgagtgttatggggattaataagagtttcattcgggtggtgttctttgttggttttttgttttttttttggattatcgtttttcgcttccctatgagattgggggaggtgcgagtgattgcattgtcttgagctaaaaggttcttgttcgctcactcccggccgcttccatcgttacgtatcccaggtcgccgtattgagattgggcttgtttcc

SEQ ID NO: 231854 - DNA, 374 bp, Glycine max
  unsure (1)..(374): unsure at all n locations
tctgcttaacaaaatttgttgtatcaccacaaaaattgtccccaaacttttcttgaaccctctctccctcatgttcgcactcaccataaaaatggtcccaaaaccaatcttagtcacaacaccaccatcggcaacttatggaccctctccaccgctcaacgcagtttcacccctcagaacagaagaaaaaccccaaacacaaaccctaaacccccaccaccaccattcacaaagctaaaaccaaacaaagcccatcatccaccaccaaaacgatggagctaaaacctgcaaataaacccacgctttgcagctgctacgttaaaacctgcanatacacaatggaaaacgacacttggttccttacgccgtaacgt

SEQ ID NO: 231855 - DNA, 324 bp, Glycine max
tggtcaatccgtgttttcgctacgggtaaggcgtgcccgccggcccgaaatttcgaggcttgagcggtagcccgaatgtggtacttcttggcccgctagaagttttgcccgccgtagggtacttatgcggcgtaatgtggctgatgcttgggatacggcttcgctcgggccaatgcctggccgtagtagcgctcgtgagcgccggcgcgttcctggcggactcggcttctcttcttgcgcgcgaaggggtgccctatggcggaaaagaattcgaatttattatttacggccctacggctaggggatcccggatgctcttgcggt

SEQ ID NO: 231856 - DNA, 318 bp, Glycine max
tcaaatccttttttaggatttaagggtgagaaggaatgaaatgaggaattggaccactctacttcacagttatacctcatttaacttgtcaacggattacccctaaatcacgatcaaattgactctcacaccaatttacctaaaatggttttgtcatttggcatttgttttcttaccagccaacttctatagtctaatgactttaacagatactacttacctcaaaccataatcaattggcttcacttcaaactactcttttcatctacactatttacttctacctagtacttacttatctagcgttctaacattcac

SEQ ID NO: 231857 - DNA, 425 bp, Glycine max
tctcgtgtcttgtcgcttacggcgccggcgggggccgtgtgtgtaaaattaataaattattcttttgtgagggcgtcccgccgaagtgcgatatcgctcgattttggtagatatttttggagggcgagattattttgcgttgccataacacggccagttcacggccagatcagggccagaaagatgggaactttatggggcttccaggcggcaggcggcggcagcggttccaagtaggccctttgcttcggggctggtggcgtgagtcccgtaaaccgctgaagccaacgggtggctggtggtcggggcgtccccggggatcaacggtagtggtgggttgccggggcacgtgcttttgtttgttgggtcctgcggatgtgtcggggtgggagttattggatcggcagcgccgtcccggtttcctt

SEQ ID NO: 231858 - DNA, 306 bp, Glycine max
  unsure (1)..(306): unsure at all n locations
taagatacagaaagtatagctgaatgtgaagtaagttaatggcggatccaacccatttgagtttgttccaaaccacacacattattgtcatcttacacttccaagtctacctagctttccctcatgccaccatctcncacttttcttagtgtcacaatgctttctctttctaaactgtatgaaaaggagtacttttgcagccactttggggaaaaatattctcccactgtggatgtggctttctcaacttttagtacaaaccccttagcttcctactgttgtgaatgattattggaagaagaattg

SEQ ID NO: 231859 - DNA, 424 bp, Glycine max
  unsure (1)..(424): unsure at all n locations
ttttcgctacgttctactgggggtgtaggagacagaaccacaatgcgggtggtcgaggttcttagggatacgcaagcgggtgtagtttcttaccataccataccggtctgtaaccataggtttatcccggatcatacgacgcatcgctgggcctccccgtgtcactgatgtgtgaagactcgaaaggatggatttgtcaggttatttcttggcttgggggtgagtgcgtaggttaatttattttgtttttgtattaaggcttcttctttctttgaggcttgaccgttgttgatacatatttattcgtggaatggtgtttggttggttgnggagggtcttatgtgtgtgttttattaggttgagaaagggtcccggtgggaggaggttgttttcgtgttaatgagttcaagatgtctngttgtag

SEQ ID NO: 231860 - DNA, 383 bp, Glycine max
agctcgggaaagatcaaatagactcaaccttatgcttattataatgactatcgcaaataacattaagacatttatccccaagaccgaaaatgctataagaattatcaggttagtggaagagcactcctaaacaactaataagtctcttgctgggacattaatgagtatgttgaccactatgaagtttgatggctcacgtactatgcatgagcatgtcattgagatgacaaacattgtagcaaagcttaagacctcggaaatgactatgaatgagaatttcatggtacaatctattcttaactcattaccatccgagtatgatccatttcaaatgagctataatactatgaaagaacaatggaatgtgatgagttgcacaatat

SEQ ID NO: 231861 - DNA, 375 bp, Glycine max
accacagagtggtacctggagatatgtcgcgggggtcatgagaccttgtggacgtcaagtggggtgctattgcccaaaaccaagcttgaccaatcccgacccaacccgggcatagtcggtcagtgagaacctgtgatgtacctaagcaggcgagctcctggcagcaacagataaaaggaaaacaagaccacaaagcaaggaggcttgtggcggctgcgcagctgtgaatattgtgtaatatgtggatggtggcctctggtaatcgattacaaggcttaaaactgaggacaggaggctaagatggtctctggtaatcgattaccaacgggtgtaatcgattaccatgcttgagaacgaagtcaggaaacttatgga

SEQ ID NO: 231862 - DNA, 370 bp, Glycine max
  unsure (1)..(370): unsure at all n locations
tctcgtgtgttgtcgcttacggatatgatgattagaggattgaagatttcggccgaggggtggaggatcctctatagaagtccgagtatgtgagcacaaaaagctgatatccggagaatcagctgagaaaagacgtggaccctttccttgcggatccttgcccatcccttcccaaactgtgagcagctagatattccgagatgagtccgttaccgacatacgccgaactagcttctatgttttgattctttatcgcctttagctaataacggagaagaacgaacctacgagatttcggatggatgtgagatatgtgaagcgcgaagttgcatggtcgctaaagaaagntgcatggtctaacggtttttga

SEQ ID NO: 231863 - DNA, 393 bp, Glycine max
  unsure (1)..(393): unsure at all n locations
cacattataatggatacgtgaataggttttaatcatatccaatgttttggtgaacactagacactagataacatcattgtgttatcatgtcctatatttgacgcggaccaaatatttataggataggatataaattatgttcaaatgaaaaaaataagatttcaataaaattacatataatttttaaaaatgcaactcttaatttaatttttacaaactataaaaagattacaatntaactaaattatacaaaattattcttaattatgtatgacgtaatttttaaagttatagaacaaatttatataagactcttaaacttataattattgctcaaataagacaaatatttgaataagacatagttagttcttaatggaggttcattctctg

SEQ ID NO: 231864 - DNA, 281 bp, Glycine max
cggacgcctggtggaggtggtgggcgaggttggagtcggggtgtgtggggggagcgcggcagggcggtttggttgacgctggtttcgggagcgggcgcccgacggaatagagaggtgtcggacgggtgcggcgcgccggggagcacgtggtttttatctggcgctgatagcagagcgcgtcgtcctgggtgggggggtgtttcttgttctggatctggtgtggcttactggcgttcctcggcgtgtgtgactgggcgtctcggatggtgcacctttctgat

SEQ ID NO: 231865 - DNA, 329 bp, Glycine max
  unsure (1)..(329): unsure at all n locations
tctcgtgtattgtcggntacggggatntaaggagagaacatacgccaggtggatgagaggggtgagtgaattttatcgaatgttcttgaatggatgccctgttatgtagaagaatttgaggatgcgggagtgaagagaggatgatacgctgagagggtaggatcgagcagccaagtcctggagacaataccctctctatccgtcttttatcttgcgcgtgaagattcagcaggatgatggcctcccggttttagaagaatgatcgactattgatgtgccataagtgacggangaacggtggatgccgggaaaagagaagaggataggga

SEQ ID NO: 231866 - DNA, 450 bp, Glycine max
  unsure (1)..(450): unsure at all n locations
agcttgtgcttaacacttttctttacttgaatatattcggaaagatcgatatgtatgaggacttggaattaggataaaatctaagtatctgaatagcatcaccacattaacaaataatataaatgtcatgttatggagagcccgataaaaacaaaacaaattaatgaagcctacactaaaaaaaaagtcatgcatgattgcatgttataactattttgttataattatcttgataccatttaccaactgtcgctgttgtgcctaacaaccaagtgtcaattagtggctgtgaagatcaaccacacaacgaattaatgactaagaccttgcaacaagaaaaccaactgaaatgtttaaaaatgtgctcatttgatcttttaattagcgtttacaatntccattctcctacattatgaaatctgtactttagaagaaacaatacaccaatac

SEQ ID NO: 231867 - DNA, 315 bp, Glycine max
atccgtgatgtcgctacgggcagtggtgtctctgtggggataactgatggagggcgggccatagcgcgtcgtggtgcttggtcataagatgtgatgcatggtcggcgcggggttttagagggctattagatggttattctcgggttggatggtctgcttattgcgttgcatgggctggaggcggatgtacgggactagggggaaattattgtcgggtggcttggatttgatgttgtgttggatgctctggagtgtgggttggatggtttatgaaggtgttcgaggagcgcgtgtttgtacctccggagaggcgct

SEQ ID NO: 231868 - DNA, 445 bp, Glycine max
  unsure (1)..(445): unsure at all n locations
gcttagtgcgagattggcgnctagctgtattctcttacttgcgctaagcgcgagaatggcactaagcgcgacatcgagattaggaagccctttntaagcctgatttgcacagaattgagagagagctaagagaactattcactactcagagacctgaagagtgtgaatttccgagagcataaagtagagcaaaggggccaagttttcatcttttagggagattagtgagtttttgagtgattgtgagattcctagaggtggaggagacatccccactcctttgtaagcaagcaatatctcttgattcctcttctccagtgtaaaaggagcttccttgccatgaaaggctaaaaccctcagttggggattcttattgagtagttgatgtaaactcttttttatatctaattaacgctgttttatgtgttcactacttctatctatc

SEQ ID NO: 231869 - DNA, 359 bp, Glycine max
  unsure (1)..(359): unsure at all n locations
tccggttttcgcttacgaattttgccggactctatatagctagtagtactcgctgtgtgatgtgcancctctctgtccgaatcatgctgattggatgggcctgttgcgggacctgtctttagtagagcgtccgggccgcggtgttttcctgggggttggttttttctcggttcgggggtgtccttacgcataatacgaacgggtttcctgtctaaacgggtggttagggtttttctgatgatagagtttgtatcggcggccggttgttatcgaggataattctctcgngggtcaggctgggatgtcttctgctgtcctgttgaaactagttaattgtagttttgtcgatgacttgccgt

SEQ ID NO: 231870 - DNA, 398 bp, Glycine max
  unsure (1)..(398): unsure at all n locations
agcttaggaagtacctctgcagaaactgtatattaaagccaggataacaacagttgatcctaagattcttaagcaagatacttaggagaagtgattccaagattgcgatccactaggcttctgaatagcggaggaattgtaggattttcaaggaagagatgaaggcaatggcctttcatcctctagttctacttgctgacaccacaagtagtttgtttttgttaatttcgtagagattgcatgtgagaagcaagtaaaaggttgcgattgcgatgaccaaggcgtcgcaacttccagaataactgttgaagtcaaagttagagccaaccacctaaatcggtgtcgcaaccactagagtcagtgtcggagtcaactaaggaacagtcactangaatcag

SEQ ID NO: 231871 - DNA, 365 bp, Glycine max
tctgtgttttcgtacgggggtagggccgttattcccttgcaatacgggcggggaatgatatgggggtaaacgcactcgtccccgagaggcccttaccttcatttaggcctacgttaatcgcgctggaagcccatgatatcgaatctcctacccccgcctgtacttttttgatatgtgcggaggggaagaaagcgcggcctccgcgtgaacgccgcctgaacgttcggcggcgtggatgcgcgggagaccggtgttttgttaagttcggggtattcggaggatcgtggctcatacttcccgcggcctcgggcattggatgagtgtggaggccccctggggaagttcgcgtacgtttctatatttcc

SEQ ID NO: 231872 - DNA, 329 bp, Glycine max
tcaaccctataacgcaacgtggcggacaaaagtgggccagtaacttgaatgatcgtcattgtcaatgcggaaggtattttgcgcctcactatccatgttcacacattattgcagcttgtggttacatgagcatgaactactacccatatatagatgttgtttatacaaacgaacacattctaaaagcttactccgcacaatggtggcctcttgggaatgaagcggctattcctccttctgatgatgcatggacacttattcctgacccaacctacaatcgtgcgaaatgtcggccaaaatcaacaaggataagaaatgagatggattgg

SEQ ID NO: 231873 - DNA, 339 bp, Glycine max
  unsure (1)..(339): unsure at all n locations
tgtcggggttggttgtgggattgggggtggccgggtggttgtctgtgagataaaagtataaagagctgtagggggaggtatttgagcttgaaataaatgggatagccacatccgggaccgccgcccggcgcccgggctgccggttatccccgggccctcccgtgggaggtagggggcggtacgactgaaagttgcgtcggaccgcccgggngagtgggaccggagcgtactctcgcttggtacgactcagcgcgccggtgggagagtgctcgcttcgtctcctctctttggctactgctggtccttattacttcttttggctcccttttcctcttatat

SEQ ID NO: 231874 - DNA, 355 bp, Glycine max
cccaccaggccccattctccacatatggccaataaggaaataactatattaatcttcacctacattgcttatatcttctacaatgggcactttgaaaataaacttcagcagataagcttagatgacttaagacagggccccaaaatggcatatacaaattaacaatgagtcagataggctagaaattatcagaaaaaaacgttactaaccttttcaaaattttgaattttagtttctaaataaaagcttgactaatcttaatttctgaacttttatttcgttaatgtttcaattcttgtgatcaaatatcatcggcatgatgcatattagttgcataatatttatggtaattata

SEQ ID NO: 231875 - DNA, 360 bp, Glycine max
acccacttgaccgctaagccgtacctcagctaccctgactccacagaattttcgctatgctcctgcaacactgactcttgggataagcccttcatgtcatggtcaaccaagctcctcctcatgtgtagctaccatggccacatcaaggcaacttaaatctcatgcccttaatgaacgaacgcgggtctgttccttgaagaaattcatgaccacaaccttagcttgaggtagcacctcacttatcgaaacctatcttatctataacaagagaccatgatgtagataacatcgtcacacatgttgggcaacctgggaatgaaatcaaatggtgtgttccagcattattgcatgacatgggag

SEQ ID NO: 231876 - DNA, 280 bp, Glycine max
ctctatgatagtggttgaaatcgatcaagcatgttttagtctcactgcccattaacaagaacatctttaactacaagggtggtatcagagatgtggagatagcccaacataccacaaattggtccctcataataatacgagatatccgctctccccactctgtatataaagcccttctttagaaactcaagagccttaatagttgaagaccaagtataggaacaccatgcatgcatgatggatgtgttagataaatactcgtgcttaacatatcaatcca

SEQ ID NO: 231877 - DNA, 384 bp, Glycine max
  unsure (1)..(384): unsure at all n locations
tcgtgtnttgtcgcttaccggatggtcaggccaatgtgctcctatgatatagagacccggtgatcgatggcttatcgacgggccactcgaggatgaaacttgggataggccgtagatgacctgggaaaggtgccttgactccggcttctgggctgacatcgtgattgatcgaggggcacactgggggacattttggcagacgtggtggggtgatgatctgcggatgcgtctagcctgctgaaatctggctgtggctactccgtctactgaggggtatacgtggtgtcctactggctggagggacattacggggctagacatagtgacgagaccgtcgaggactgtgggtaacctgtgtcgctgctcatagaataggcgaggatc

SEQ ID NO: 231878 - DNA, 154 bp, Glycine max
taatgcatgtggatatactgattaatcaggtcaaatgtgctgatctatggctatgccctaagttgtgacctgatggttccctttaactgttatttccgtaagaataaccttgatctgctaacattgtctgtatttactacatttgtgtattcac

SEQ ID NO: 231879 - DNA, 363 bp, Glycine max
  unsure (1)..(363): unsure at all n locations
tctgcttgggacctcagntaaacatacaatatggacaaattgatcttgaatctaaaaatagaattaaattgattaagtagggataaaatttattatctaaaaaaattatttctcttcctaaatctagaaaaatataggaactcaatctggattctgttcgagttgagcaatctataaaaatcgatatctattataattatatttgaataaagttgattatcctttgatatttttataataaaaataaactataagagaacttaatataaaattttatatccacttaaagctactcaattatttcactcaaattaatttaatccaaataatttataacatgcttcagaatgtaacattactcca

SEQ ID NO: 231880 - DNA, 355 bp, Glycine max
  unsure (1)..(355): unsure at all n locations
tctcgtgtnttgtcgcttacggcgatttcaagggacctgagtaatcagattggcgttgtcgagggctcccttctgtctgctattctgtcgatgtaaatacggtggtctggcggttggaatcttagtccttgtggtttttagtatttctggattgttgttttcggtgagtcttctagctgtgatttgtcgtatgtgatggatcctttcttgttattgggtggaggatttttgaaaaggaaaaaacggcttttggctttggcctgaacttgcaacgagattttttatggatggaactgatttcgcaagttgggcggttataggctcaagtgactgtttgctcttggggggggtggcg

SEQ ID NO: 231881 - DNA, 420 bp, Glycine max
  unsure (1)..(420): unsure at all n locations
agcttgtntaagaaatgatttgcaattttattttttaacttctcttaaatatccatctgtagaccgtatgtaaacgttcacgttcataattacatacaattataaagcaaaactctcaccctaattgtacgcgttttcatgatttttatccacaactgcgtnccacaagggtttgtgtaatctctnngacataatacatggtatctccggtgcgctctcacttccgacagaaggttcttcaatattctgagaacaccgccacgttggcttctggaagcagcaagtttggtctagaaagatcccaaggagtcggttcgaacgaggatccaccccctttcttgacgaacacagagacgtgtgtttaggattctatatgtgccgtgcgttgagatttagatgcaaattaatatataccctgtc

SEQ ID NO: 231882 - DNA, 231 bp, Glycine max
  unsure (1)..(231): unsure at all n locations
ggtggggtgtccccgcttcgtgagagtctgtaatgaattttaggcggagttttggatggttatgtacgttcgggtgatggttgggaattggggatggttttggggagttgctggttgttagcccgcgtgggngtttttgttgctttgggggcagcgggcgagcttccgggggggcccgtcttttcccgatttggtggtggtgcgtgcgtttgtgagttgtatcgtgttgta

SEQ ID NO: 231883 - DNA, 348 bp, Glycine max
  unsure (1)..(348): unsure at all n locations
ttcacaaatgcaagcagtgatattgtcttcataaaatgtcaaaaatctgcaatgtgtttaacatatttatttataagactaattaaagaaccacagaagacgtttatacaactgtactaactgaaaagtaggcggaccaatattaataaaaagaaaccaaanataaaagagtgcttcatccaataatatataaggccaactttcttgctctgaanagaaacttacatatatgaataaacttcaaccatcagaatgagatgtatgccatgtgatcctgacataggcaaactcangtaacaagagtaagcaagcanacttacttgcatangcatttcttgcatgacaata

SEQ ID NO: 231884 - DNA, 377 bp, Glycine max
tctcgtgtcttgtcgcttacggtggtattggtagctgtggagtgtttcaggtggcgagtggtggacggtagggccggttcggtattagtacgacggtattggtttggtcgggtgacgggttgcggggcgggtttgcggggtgcggtgcgtggtgcgggcgggagcggggtggggtttgggcggtgcccggtcgtatgggtttggactgggttggcgtatctcgtttgggtctcgagacgttcgattttagtcggctctgttaggactcttttgcgcgagaagtcttctcgatccatatatggtggtcgtcatacatgggaagtgtcggacctgtatacgttctcagcgggttttcgtgatgtggggcgtttgtccta

SEQ ID NO: 231885 - DNA, 302 bp, Glycine max
tcccactggcgacttgcagggaactcgccattcccactggcgagttgccttttgaaaaaaaaaattgcccttataaaacgtgtaccaacaccgggagccggtcccttactccttcttgcattcacagggcattcctttcttctcttttgatccctctttgcaatgcattctttttttctctttctactacaggctttgtgtgctttgtgttcttggtaagtattttcttaactgataaatttaaatattttttatgttatatatatggtaagctaattctaatcgatatattaatattattt

SEQ ID NO: 231886 - DNA, 427 bp, Glycine max
  unsure (1)..(427): unsure at all n locations
atctcgtgtattgtcngcttacggagtgtgtgtttttatttttctgttggatataatatatccctggtgtttgttctttggtatggtgggatgattcttgtagcttgttttggtagtttgtggggagttggtgttctgtgatgtttttgtttttgtttttccgctgctggtggggtgtggattttatagtggagtggtttttgtggtttttttggttatccttttgtttctagttcggtttggtgtgggacggcaagcgatgggagatggagccctgggggtttgccgtgttgatttgggttagggaattttaatcgaaatagctggtgctcggggtttaatttttttttttttgggcggagcgtatctagtaaacagtgcgggtgcgcgcagcggttgacccgccgacagggatggcgatggattg

SEQ ID NO: 231887 - DNA, 430 bp, Glycine max
  unsure (1)..(430): unsure at all n locations
gcaagctcacctttgggcctcctcatagntgtttatgaganaacatgctctattttcatcttccactccaagtaggcctttggatcattctttcctttaaagggaggaatgttgagtttaataccatcaattcggttttgtctaggaacaccatcattccctcttcttctcctttcttcttcattatgatctctggtatccatttgatccagtctctcatggagtgcatcatctcattgtttcattaacctctccaaatgttgcatcaaagcttgcatttgaaatngcaaaatcccccctccatcattangatntgttcctgccatctcanacaaacaaatcaaacgtaacaagacaattatagttggtggttgaatacctcaccactcaagtgtttacacaattatggctcttctctaatgaaacactc

SEQ ID NO: 231888 - DNA, 401 bp, Glycine max
  unsure (1)..(401): unsure at all n locations
tctcgtgtcttgtcgcttacgggtgtgactcatctttatcatggttgagaattttgctcagcgcggggtgctgcgtgtttangggcgcggcgggggtaatgggggggttagcgaggtttccccgggggggagttaaaggttagattgggcgtgagttcggtgattcgcgttgggaagtggggtttgattttgggatggggcgggcctggagagggagttgcgggngtgggttgtgtgcggtttatcgngtgctcccggtgaaaatggggcttgtgcggattgattttgggtcggctggatgagtcttgatatgtctttccgtagttgccgcgctatgttgtcattgggagggcgtgcggtgggctctgtatatgtggtccgggtgggtcgggattctgtgg

SEQ ID NO: 231889 - DNA, 445 bp, Glycine max
  unsure (1)..(445): unsure at all n locations
agcttatgaaattctttataactaattgcatgttctgcacttngtcggaaacactatcattgtccaggagtaatatatagcggttcaatcaccaaagcaaagggaccttcaagttctttttggttttgtatcacctgacaaagttctttttcttcttattgcacctatggataatggatctggatttttctcatcccatgttcatcaatggcaataaatgttcccttcattgcgtcatgttcttgatgggatgggatcatacgtatcttctaatctacatgtgtatgaggtgctttctgaacatgaatggaactatttggaagttgcatgtgccagttttaattgtgaatatacagaacaatttcttatttgctctaaataaatcatttacgctcgtttacaattaatgtctaccacgaatctaacccaatggtgaacatctgtc

SEQ ID NO: 231890 - DNA, 348 bp, Glycine max
  unsure (1)..(348): unsure at all n locations
attcgtgttttcgcttacgggtgggtgcttactgnactgctgtgtgattgttatcttaggtgggggttcttgtctttaggatgtggtttgtctccggtgaggtttggattcttttcggctaactgtagtactgtgttgggaacgatcgtgcttcgcccgtctttgggtctgtctgttgtccattataagggtttagactctgaggatgcttggttgttcctgacctccattcccctggcggaaatcctaatatagctctggtgccttgcgttttgtcggagatgtgtgtttcgaatgcaatgctctctattntttaagtgagtcgagttctgcgctggtgttgcccga

SEQ ID NO: 231891 - DNA, 465 bp, Glycine max
  unsure (1)..(465): unsure at all n locations
agcttgagcagntaaatatatatggcttattattgcaaaacaaagaaataatttcctgcttccttttttctaatgcacttctttagcaaggtacacacttttctgcctctctcaagtcattaaaattccctcaggcctcggggcatccttaactgcaagacaagctaacaagaaaattcacactttcgcaagacttctttcatcacggaataaacacaacaacaaaagtcttatcccaatgggtgaagtcgatcacataaatcacacaatgccattgagcttaattaaagaccaaattcttacgaatattattcactgtgaaattccacttaacaatttgctatcatcttttcctcaattaatgtcacaccaatatttcctcacacacatcatggaataaacatattcaagaanaacactaatcctctggccccttgagacattacaatncanatcacaaaacac

SEQ ID NO: 231892 - DNA, 262 bp, Glycine max
  unsure (1)..(262): unsure at all n locations
ggtcagatctcgtgtattgtcgcttacgngtctgaatctggcttgctctttgcttgctgagtggtgatagggaggttcgcggttttgttggtgcggtttagttggctttcttcgttgggagtggtttgatcgaggtttcgaggggactcgctagactgtatctggtttggcgttgttttggtcatgtcgggggggtggggatggttttatattctttttatttctgatcgtgcttggggggggtcttgttgatctttgtttt

SEQ ID NO: 231893 - DNA, 352 bp, Glycine max
  unsure (1)..(352): unsure at all n locations
tgcaagcttggatttccttntactattgaatctattcttcctaagaaggatccaaacccagtcaccgtcattaagaactagcttttttcttcctctattgcctttagttgaatacacctttggttggttctctatttggttcttaaccctctcatgccaattctttacaacctatgacctaaattgcccttctttatgtataaaagaagggtccagtgggaggggaatgaagtctaacggtgttaggggattgaacccatagacaacctcaaaaggggatggcttggtggttctatgaacccccctgttgtaggcaaattctacatgaggaagatactcatcccaagactta

SEQ ID NO: 231894 - DNA, 412 bp, Glycine max
  unsure (1)..(412): unsure at all n locations
ggtcagatctcgtgtattgtcgcttacgngtctactattgggtagttgatccctcgttccgtgttggtggtgttcggttgacctggttccgtgaattggttttctttcgtttgatcgatagagttcgatttggaggaacttccttntagctcccgcttctaccttcttagctagctcctgggaagcgcccttttaacgatgaccgtgaggaccttggaaacccggtggtcttcggattcgtttacccggggtaggatggttcccttttctgtgggggtagctaccttcgggtcttaatggaaacctggtgngtgtctttcgtttctcgcgttttggatttgtttagaagagctgggtagccgcctgggaaacctgatgtcttcgctcttccggaatcggggcgccggatttc

SEQ ID NO: 231895 - DNA, 395 bp, Glycine max
agctcaacattcaacttcgagcgtctcgttatattatacgactcaattagacatccgagtaaaaagttattgtcgtttgaattggctcagagcttcaacattcaatttcaagcgtctcgatatatgacgggactcaatcagacatccgagtaaaaagatattgtcgtttgaattggctgagagcttcaacattcaatttcgagcgtctcgatatgttacgggactcaatcagacatccgagtaaaaagttattgtcgtttgagttggctcagagcttcaacattcaatttcaagcgtctcgatatatgacgggactcaatcagacatccgagtaaaaagttattgtcgttagaattggctgagagcttcaacattcaatttcgagcgtctcgata

SEQ ID NO: 231896 - DNA, 413 bp, Glycine max
  unsure (1)..(413): unsure at all n locations
agccgagttgtgttcatatcacgcattaggattgaggattacgggatactttgggtttcatcttgttcgggngtcgcaatgagtgatggatagcccagttgtgtgcatatcacgcatttagattggggattatgcgatactttggctttcatgttgttcaggggtcgcaatgagcgatggatagcccagttgtgtgcatatcacgcatttggattgaggattacgcgatactttggctttctcttgttcgggggtcgcaatgagcgatcgatagccgtgttgtgttcatatcacgctttggattgaggattacgcggtgctctggtttcgtctgttcggggtagcatgagcgtgatagccagtgtgtgctatcacgctttgatgagcttcggatcttggcttctctgtcgggg

SEQ ID NO: 231897 - DNA, 468 bp, Glycine max
  unsure (1)..(468): unsure at all n locations
gcttgactatntaatatagaatctatttagtttanaaaatttgtttagacttataaagaanatctatttaacccgatagaacaatctggttatttatttaaatatatatgataaaaattaatatatatatatatatatatatatatatatttatatttaatatcctttatattataaataaaataaatatttaaaaaaattaagtaaattaattgatcatgccaaatcaaataaataaactaataggacaggtgaagccttaattcttggtttagagcggatctaggctcttgctctttgcatcccttattgttnttatgtacaccatcatacttctttatacctttcaattatctatgatactttntttcttaaagaagtatctattttgctgtctagacatatctttatgcaattacatataccatatttaaaaatatatctntagaactataattcatacttccg

SEQ ID NO: 231898 - DNA, 203 bp, Glycine max
gtgtgaagtgggtttcttgggtcgtgggccgtgggactgaagtgagggattctttgtggttagggacgtgggatcgtgtgaaaggcgtgtaagttgcgtgggtgatggaggtcggctgatggcggacggctgaagggaaggatgtgggggcccgattatggagtgaatgagggttaggtgtgcggagtttcggttagggatgt

SEQ ID NO: 231899 - DNA, 110 bp, Glycine max
atctgtcaatggttctaacgttaattaattatggaactcttttctagaaatctatacttgggataatcattaatatcagcatcgcgatattcgttcatcccattgtgaca

SEQ ID NO: 231900 - DNA, 423 bp, Glycine max
agcttgtcaaaataacttataagttaatcattctagcttataagctactagaatgccctacaaacacttgtgacaatataatgatccaccacggaaagttgaagttgcatttcatttttgttactgcgtttcattgtcaaatgaagtcctttaatttataatgttttgttacagatttcgaaaacattggaactttcgccgtggacttttgctactcgatttgtaatatgattgaatcagatgaagtttctacaagtagcggcacgaatgagttgccttcatcacaggttagaaccagccaatctatgcaagttaacctacctaaatacaatcacaatgataatgaaatcaaataggataactcatcaactacttcactaaactgtgacagcagtataataatacatggcattgcttcattac

SEQ ID NO: 231901 - DNA, 285 bp, Glycine max
  unsure (1)..(285): unsure at all n locations
agcccgcatccggaactgaccatggattagtcgggtgatgactatagcggagtttggactgtcggttttatcttttgagtgaccggacggatgttgtgggagcccccagggcctttggccgttntgattacgattcgctgtgtatagatccttgagggatgtctctctcgcgcaagtacgacgttagaaaacgtaacggtttcgcaagccttggtctgggcgatttggggtccttagggctgatagagagggcttttccttttacgcgttgatatacacggatcg

SEQ ID NO: 231902 - DNA, 414 bp, Glycine max
  unsure (1)..(414): unsure at all n locations
agcttgtaggattatggggtacccatcttatgttgtactacgcggcgcgccggcgatggtgcacaacaagntttccacatccacaatgcgcgcataaacccaccatcccctgtttgccaccttcatctgaacttacgtacttccacgtaacccatattctcgtttctctcaacaccgggtccccatcaatcctcccaagcttccacaacatccaagcaaaacaaaattcacacagcacaagctatcacagtcaagcaaaacagggcaaagccagaatactctgctcaacacaccaacaaaatcatagcttttctcacttaaagaccccagtaacaaattcttcgattccaattcgttaacccgtggatcgactccaaaattttactggaaatttacagtacataagcctacatt

SEQ ID NO: 231903 - DNA, 368 bp, Glycine max
  unsure (1)..(368): unsure at all n locations
acgaacctagttcacgtcgatgcaaagagcgattgttccggggtctgcttcgcgtggttacgccatcaagcgtgctgatgttgattggaaaacccgtgctttgtagatcacctggggcactcctgtataagatgaactgacttcgcacattgagttaggctaccgaggactgccggaaagtttaggtcggacgatttttcacttgaaaccggatcggcgaatactaatcgaccccatgtacaagaccatttactgctaggggctttgattgaactccagattaggtaagattacttattgtgataccgatagctggtntaggggctattgagaattgagtagagatacggcggacagcctgtgattac

SEQ ID NO: 231904 - DNA, 458 bp, Glycine max
  unsure (1)..(458): unsure at all n locations
agcttgtgcctcttcatgtctggaatatgaatgtagcatatagatccaaagacccttaggtgctttgctaatggcttcttcccgttccaagcttcaattggagtcttgtcttttacagacttagttgggcatctgttgagtatgtaaacagcagtgtagactgcttcagcccagaatgtgttaggtagtcccttctccttgagcatcgatctagccatttccataactgtcaattctttctctcggacactccattntgttaaggagaatatgcgactgtaagttgtcgttcaatgccttcatcctcacaaaatctttcaaactcgcgagaggtgtactctttgccgcgatcacttcttagtacttttatccattttccactttgattntcagcaagggccttgaactttttgaatactccanagaacttttgattttcttttagaaaatatacccat

SEQ ID NO: 231905 - DNA, 309 bp, Glycine max
  unsure (1)..(309): unsure at all n locations
gtggtcagatctcgtgtattgtcgcttacgganataatggatgaagatcccaagaggatatatttcgtgatgtgaaacgtcagaaatagtcagatacgctttgaataagagacttctaagatgaagaaagggtgacagactggagaatgagaattttcggaggagactcctgcagccatccacctccgtagtcctctgagatgaaagtcccctgttgccgtcttacggatatgataattagaggattcaagatttcggccgacggggtggaggatcctctatagaagtccgaatatgtgagcagaaaaa

SEQ ID NO: 231906 - DNA, 345 bp, Glycine max
  unsure (1)..(345): unsure at all n locations
gtaaagtctttttgggaagcaattgccatcttggtgagctctagtgaattcttgaggtagagaaaccacataggtgttcttgagactatgatcattatacccatttaagagataaaatctctaggtcattctttgaaaatggttctccagatctctaanttttaaagagcaacacctcattccaaaatattcatgcctaatctttttatcaatgatatcactatcaccaatgaattcctggtgaagtatccctagtactttngtagtagagcatgtgttgtgaaattcatctttgataactggtcgtaagttacaataccattctttaagtgtgacaatcattca

SEQ ID NO: 231907 - DNA, 486 bp, Glycine max
  unsure (1)..(486): unsure at all n locations
ctaacttctgcacggagaattaacttgctttcatcggcctaacgtatactttaaacctttnttntttctcctctcatacaaacaaagctgaaaaatagcattcatgtattgcaaaaacaaaacataaaaaaaaaagagcagttacattgtacaaggtagagtcacatggaaaacacttggggacttaggacacccaccttaatggcagcctaaaggaatcangcaaaanagaagcacaacctcatatttctgggggaagacaaggctgctaaagtaaattttgtacagttagtaaggcttgttgtaaaggccgagcaagggtttctccctctcctgtacccttttccttgcagcctctcttgccttgagagctgctttntcttcatcagagataaccttggatttttaccangtctctttctttttcaactgaagagataaggagcagcttcacattcttttggattcaaagtgtacaactgccct

SEQ ID NO: 231908 - DNA, 288 bp, Glycine max
ttttacttaatgcacctttataattaacatcagcttgagagataatattgggtttgatcaaaaataatgttaacgaacattgtttattaacgtcgtcaaaggaaccttatgatgcaatgctacccgcctagggcattggatagaagactccatgaagatgcgtcagaaagcaagagaagccctagggtctcaaagccttaggtagattttggaccatgggctaagtatgagcccacttatctttgtacatattatattatgatttcattattcttgggtcttatattt

SEQ ID NO: 231909 - DNA, 461 bp, Glycine max
  unsure (1)..(461): unsure at all n locations
tgtagctaccttagcactcttctaatgactatggcatcatttctggcgctaaactgctgtgagttggaggccatcttctcaattaaatttctggcttcagcaggagtcatgtctccaagggctccaccactggcagcatctatcatacttctctccatattactgagtccttcataaaaatattggagaagaagctgttctgaaatctgatggtgggggcaactggcacatagtttcttaaatctctcccagtactcatacaggctctctccactgagttgtctaatacctgagatattcttcctgatggctgcggtcctggaagcagggaaattnttctctaagaatactctcttaaggtcatcccagctcgtgatggaccttggagcaaggtaatacagccagtcctttgccactccctctaatgaatgaggataagccttcagacatatgtgatcctc

SEQ ID NO: 231910 - DNA, 404 bp, Glycine max
atggatggttttatatatatgaactctctttatttcagacctaataacataggaagataatagttgtgcggactcattaactaatttcagactttctttaaaaaagactgtgccgaatctataacaattcttttctaagaattggatttccaacgtgatcttgaatgatgttttattattctaagatttaagatgctctaataggttatcttttttgtgggacataggttcttctttttgctccaactataggcttactcatctgtaacatgggtttggtgttgtccccacatggaggttgtctttcttcctttttgaccaatatattctggcggggagggtttagaggataggctgaaattgagtgccaacatacgcttataactaatatgtattatatcaag

SEQ ID NO: 231911 - DNA, 463 bp, Glycine max
  unsure (1)..(463): unsure at all n locations
gagctgacactccaatcatagttaatattacctatcttatggngcgtagtgaagttcagctcctaattgctcttagttcttctatgggtataataaattatgatcaattcttctttttcaaacagtatatatgcatgttctttggtttccagatgaaaaagtacttctgaggaaaaagtaattttgacaaaggatcaagaatcttgtttttactttcattttgcatttatctgttgaatttacattggattgtgcacacaccatttctaacttcaatccaaccgttggacttacattggaatgtacacacaacatttctaacttcaatacattggattgtgcacacaccatttctaacttcaatccaaccgttggatttacattggaatgtacacacaacatttctaacttcaatccatacatgcatgcactatgtatgtggatattgcaaggcttcacatct

SEQ ID NO: 231912 - DNA, 330 bp, Glycine max
gtcatcccttagcacttttctcttcgaattgcagagaaaatatttccgggagaatatccaaccgagggcttctgaacgttccggagtaatacgcaaaatttcgaccgtcttcagaaccacgttcgttctcatttcttcagctacacgggtaagtcctcaaccatgctttcaattcgtctatgtacccggggggccacattggtgcaggatttattctgtttattactttataccccttgatggctaagcattattaagcattctgctaatcaaaaaaataattccacgacgttgatgttcatcgtatttggtgaagaatcgacgacgcgg

SEQ ID NO: 231913 - DNA, 443 bp, Glycine max
  unsure (1)..(443): unsure at all n locations
cgagctattagaagactngcttattcatttagtgctaatttctcaactcttcacagnttagtcagtttaagatctcttataattntcagaaggagaaatggtctcttaatgagctcatttcatactgtgtgcaagaagaggaaaggctgaagcaagaaaggactgaaagtgctcatgttgcaagtacctctaaagacaagggcaaaagaaaaagaactaaggagcccaagaataaagctgttaagggtccaacacaaaagaaataaaatcaaggtgacaactgtttcttttgtagtaagcttagacatgtaaagaagaaatgtaccaaatatcatgtttggcatgcaaagaaagggttgcctaagctaccggaagccaactgattcagaaagatgaatatatgttggagctatagggcattctagattattattatgtactag

SEQ ID NO: 231914 - DNA, 369 bp, Glycine max
tccttgtcccgcgatgtagagggcccatgaaaatagctttgatccaacaaacgtcaaatgctaactccccaagttaaaaatatattttttacttatggtaaataatgagaactcgctgattggggttattgttacttctattcattcactttccccctttgtgtttggatactatgagacatttcagaaatggtgggctctcttatgaccaattactcaagttctgctagcttctaaaattcgaagtcagatacatgttttgtagtttctacagcatctttatgtgaatcgctgctttaattcttctcgatgtggaattcgtatggaactgagttatagtgatttagatgtgaattaataaatttattt

SEQ ID NO: 231915 - DNA, 502 bp, Glycine max
  unsure (1)..(502): unsure at all n locations
tgaccttagacactcagcctgctggacttctttatgttagagcaagctttatgttatatgttgtnctatgtagtagaggtcttcttttgatagcgattgacaaattctagaccttgatttcatttattcttcaataagatttgacaagatttgacatatcctagaagaatctttctgcaaaagagatcctagatataaaatattaaatgaagtcttaaatatcatcttaagtcgtatcagatatgactctatttgcttatggtctgaagcatcaaacgcaacttttccaagatatgttatgataaagcatcagatacgaaacattagacacaagtttcacataagatgcaactnttaatttttatatttgtatgcatctaatcaaattaattaagaaatttgatccatcttaagacaaaaatatcttttaacttaacatagatagaaaaaatgagtaatactaatgagatattagagtataagataatgttcacatatttgt

SEQ ID NO: 231916 - DNA, 315 bp, Glycine max
  unsure (1)..(315): unsure at all n locations
tgccgttttggggcatacccttgtcaaattattgtagtcggttgacattcgccatttgccattgggctttttgaccatgacgatgttagcgagccacgtagaaaacctgacttctctgatgatttttgccttgaagatctttttgacttcttctttgacagctntacgtcgttcttctcccatctttcttttcttttgtgatattgggttagcctcggggcaaatagcaagtttgtggtagatataccaggatggattgcggcatgtagatggctgcaagcaaaaaattcgcgttctacgtgcacataacaatgc

SEQ ID NO: 231917 - DNA, 438 bp, Glycine max
  unsure (1)..(438): unsure at all n locations
nntcctctggttgctctactagggtttccaagcgttagttatatggagaaggattgaagcctttattccactgtctacgtgcaatgagtatttctccatccacagatattaatttgaaaatcctaacggtgaagatgtgtgcaaatgaatttagaacctggtgtccaaatttcacgacgatccaatagttaacgagtccgagattgtagttttactggaatagatttgggtatatacgggaaaaagaaagctatgatgcgaagggcatttatttcatcttagacattgtttcacaaattgtgatggtgagaatgttcgaagataagttctgaacctggtactcagttttcacaacgatccaacaattaacgagtccaatatcgntattttactgagacatgtntgggtgtatgtgggaaaaaaagagggttttgggag

SEQ ID NO: 231918 - DNA, 395 bp, Glycine max
  unsure (1)..(395): unsure at all n locations
agcttattacgtgttgatgagtggaacacatatatatgtatatgaattggtaaaataaattatgaattaatagttcaaataataaaattaaattaaagtaaattaatatattaagattcaacgataaatactttcaatgcatttttagtttaattatttattaactttttttaattgaaaataatatatacatgttttatgccatgtaaatattaatattgtgtgatgtttatatgattcatgaggcgtgataacatattgtgttgggattataacattgtgaatgagattgtgtgtatgtgataaattgagtatgtgttgaattggaagatacatgtgtattgagatnttgtatgcattgatttgggagctatgaactatacaatcacacgact

SEQ ID NO: 231919 - DNA, 487 bp, Glycine max
  unsure (1)..(487): unsure at all n locations
ntcattccttagaaaaccatgatttctttgttagcccagtcacgttacaagcctaataaagtccttagcgatccacattatgcatgtatgatagcattgactgagatgatgtgcaaagttgggaattttactattcaattgttataattcaaacacttttaccgagatacttgtgggattgagagaaacactagccttgcgagaactaaagtttggtgattattccttatgatctgtcattcttactaactatttcatttgaagtgcatcttgttatgctcctttcatgaacttatgacaactgtgaacttgagaattggccaatgaagctttttggaatgtatgaaattatcttatgactgtgatcggtaaactctgaactttttcctttngcttaaggacaagcaaagaattaaatttgggggagtttgataactgctaattatgagtatatnnttgggttaaattaacataacttaagtttagt

SEQ ID NO: 231920 - DNA, 457 bp, Glycine max
  unsure (1)..(457): unsure at all n locations
cgctttaatggaagtcaagagcactatactactccgatgttgttgattggtgagcaggtcttttagcacgttgaacacctgaataatgtatttggaaagacccaaaagaaggataaaagtaagacttgcatatggaagaagaggtccattttctttgatcttccgtattggtttgatccagatgttagacattgtatcgatgttatgcatgtagagaaaaatgtatgtgacagtgtcattgggacactccttaacattcaaggcaagatgaaacatggtctgaatactcatgaagatctagctgacatgggtataggatcgtagttgcatccaaggtctgatggggaaaaatatacttgcctctagctngtcatactctgtccagaaaggagaagaataagtnttgtcagtgtcttcatccggtcaaggtaccacaaggatactattcacatataaa

SEQ ID NO: 231921 - DNA, 300 bp, Glycine max
  unsure (1)..(300): unsure at all n locations
aactaaagcatattatacaatcactacgctctctcatctaggtgtatactaccgttgcatatcaacccagatcagtccttaacgcaacgtctcttgtttcttcagatccccaatgttntcattgtcttcactcctacattgatatgccactaaggcactaactagtgtgatcaaaattgaattggagtattctgcattttacacgaatcatttgaagaaattctcctgcgctttattggataatacccgggatattgtttcatgtgtattagatagatgacggctatcaaaagccgattt

SEQ ID NO: 231922 - DNA, 372 bp, Glycine max
  unsure (1)..(372): unsure at all n locations
ttaatttatagaaggtaccaaatcttgtgtcaatagcaatcggatgacattcatttcctttaattaccatatccgtcaatccatgggtttgattctttgtaagttcaaaagcaaagccatgaattcaaaccttgttacctgtggatttcatgttaactcaatactattccctgcatgcctatgtcacgtggatttgggctatatacatgtaaagacaatctgctgccatgttgcgaacataaggaacatgaaaatattgtgttgcgaaaatatggtttatgcgatagttagtacatagatgatactgtcattntccattctgaactgttattaataggttgcatggattccaacaactctgtctataatttt

SEQ ID NO: 231923 - DNA, 480 bp, Glycine max
  unsure (1)..(480): unsure at all n locations
tacagaagtgggctactctcacaatgngtgttgatgctaaaacatagatctctctctaagatatctagcacaatgtgttgcatatttgaaatgcttcaacttattcttcatggcctttgaaaatgtcttataaagccctcaagaagattgttggagtaggcttcacatagtttacaagtttctaaagtaagtaggggaattttccagctatcaagatgtgatagcaaatagaaccattttgaggaaccttttcaatgggcattctgacaaaccatcataatagtcattctaaagcttcttgagaatgaatccatactttatcacattttgatgtagtgcagatttatcactcttaacaattcttcacaacttcaaagcattctgaagttggttacttcanaaagacttagtaacaaaatgagttggtagtgtgttagtgcactatccaagttcacattaagtagttctcttcagtctttc

SEQ ID NO: 231924 - DNA, 269 bp, Glycine max
gagctgacaggtctctccacctttaagcgcattcttctgggacattcacgcccgctattatcgcgcatagcttctacatgcatcctgtccgcacccattctgccgacgctgtctaaacgaaggcgaacattaggtcctccaggagtggactctggaacgtttccagttggtgtacaagctaataactgcgtcaatacgactccattggctggaatcgttgaacagttccgcaagctttgctaacgcacacttactgcgacagtacatca

SEQ ID NO: 231925 - DNA, 437 bp, Glycine max
  unsure (1)..(437): unsure at all n locations
aaactccgcttcatacatgctcattgttaacgattgaatgatatactcatatgaagggaacatacaaataagtagatgactaatattatttctacgttttatgtttatctttaattagtatattctattttatatgaatatattatgttatttttattttaacaactatttttattatgaaattattctatgctgttgatattaaaataatttataaaataaaattaatattatttcataaattataatttagtattagtaacaagaagaattaatatttttatttaaatttaagtctttctaaatttaagtattttacattaattnttccatcttaaaacaataaaattcattaacattactaaacatattaaatatataaaaatatattaaataaaacaatgttataaaatattaacaacatatgaatatatata

SEQ ID NO: 231926 - DNA, 261 bp, Glycine max
ttttatttcgatgtgcgattcagtgacgtaatatatcgggacgctcgaaattgaatgttgaacctttagccaactaaaaacaaaacttttactgatgctgatgatatgaataatcagacgctaaattgatgtaagcctaacaattaaacacataactttctcgatgctgatgagccgacattcagagctcaatcaatgttaccttatctatcaacacaaacttttctgagttgtgatccttaatacagacctaattgattt

SEQ ID NO: 231927 - DNA, 471 bp, Glycine max
  unsure (1)..(471): unsure at all n locations
tctatataagctgaaccatgttatcaataaacacttgtttgtgtttattcagaacattagagtttatctcttttatcttagtgagagtgattctcctaaattcttgagtgattcaagaacaccttggctgtatcaaaggactttcacaacctttgtgtgttgccctcgctggaaagagtgattctttccttcctttcatcatcacccttgttctttcaaaccacaatttcagaaaatccacctctgcccagaattatctcgtggccataactcccattttacgcactcaaattaagtgattcttgagcctaaattgaatttcaaaacgagacctttcacctcgttttggaatcacctcatttggagccctgtagcttcagttattgccatttctatatttctgtccagccaccacttaacctacgttntaccatcccattcattcattntatgccaagaaccaccttatta

SEQ ID NO: 231928 - DNA, 266 bp, Glycine max
ttttggcagctttgttctacctgctttgacgaaaacatacccttcatgtacatatatggtttgatacgattgttatagatagggaccccattccctcaatgaatatcctaaattataattgactaacattgactaatgaaacacctgctttcaataactgaccttacagaatctattacaagcccgggatttacttgggcgtgctgctcttctttcttatcttgggaaacaaagaagactactacttttatattattactgtgaaa

SEQ ID NO: 231929 - DNA, 436 bp, Glycine max
  unsure (1)..(436): unsure at all n locations
ctctgctctctttattctttaggatcaccatcatggtattacatnnntcatcttaancnttaatggaactacatttccacaatnttaaacttgaaatcgatggataatttaatagctccacctaatgtacgcaatcagtttgatggtacgagtatgacagttccttgggcccagatgttattactagtttactatgtattccactttaattaagtaaagcatttgtacgttctagctatatatgaaatattaaaatatagggagtatctcatcacgttcttgtagatatcagatgctactaccagtagttgcaatatgattttatggacaccagaagttcaagaattcttctctctcactcttatggngntcaactatctttcttcattttgctattctggtagtagtatatattcttctagctagatatgaatgt

SEQ ID NO: 231930 - DNA, 472 bp, Glycine max
  unsure (1)..(472): unsure at all n locations
tacatcanatatccgctatataagtcttgtctatagtttcgcatggnataattnatcagaggttcaaccctccactaggccacctaaaatcattgtgtaaactaaaataatgataatagaccacagattatatctagtaggattcatatgaagggtttcggtaattgatagttatatataagaaaaatattcaagttcagatacttttcaaatcttataattatcttctaattacaatattacaattaaaaaataattcaatacatattattgtctcatttcttaaaattagggaaaaaataatataggaaacattctctatctatgacaaagaaatcttatacatgcatggagaccatttataacatacttaccccttgtgtgaacgatactattatagacatcgtctcttatgacatcgtgagcgatgaagcattgatctcagacacttatctctgtgaatgatatcctt

SEQ ID NO: 231931 - DNA, 224 bp, Glycine max
gctcactgtggctatgtcacttttattagcttacatcttcaactggcactaaaagctaataaatggttgcccgagaatccatactgtacattcaatgtgaataattcacactttcaagctacataggaaaacgacactccgatgttctggacacttacatgcctccatactaattgggcagtagggaacccacaaagatcagcactaaacctatggatattcta

SEQ ID NO: 231932 - DNA, 453 bp, Glycine max
  unsure (1)..(453): unsure at all n locations
aacggaagaaagataccaaattgatcgatatttatatgaaagccaagaaacaagaaatgaattaatagtctcggatntggaaacttacccgttgaagaacgaagaacggatgaagaacggtgaataacggaggaaaaccttcacggatttgcttacggaaacatctcgaaagcgttacggaagcacctcggcttggattttcttcacggaaacaatttttttcacccaaaacagctgaaatacatcaccagggggatctgggacccttagaacaacccccttcagcctatttataggaaaaacggngaggaggttgtcacccagctcgcccaggcaagctgggttgcttcctccagaagaagcaatccagcttcaacaatactctggaaggccaagattcacaatggctatttgcattccccattctttatatgttcacnccccttctttcgt

SEQ ID NO: 231933 - DNA, 303 bp, Glycine max
tccctctcacgagaagatgaggggtatgatcaggatgagggatgtacgatgaacactaggtatatggagagaacaccattcatataatatatggaattacacacagactggaacggatcgacggactgaatgtgaacatccctacttctaaagggacttatgatctacaattgtatcttgagtggtagatgataggtcagaaagtctttgcttgctacatctacactgtagagacgatcatcactctgccctctttggagtctgatggatatgctctatcgtggcgcaatcacgtgaggagtg

SEQ ID NO: 231934 - DNA, 374 bp, Glycine max
  unsure (1)..(374): unsure at all n locations
gctctattntcatctcccactccaagtaggcctcccgatcattctttcctttaaaaggaggaatggtgagtttaataccatcaattccggttttgctaagaaccccattcattcctcttctccctcctttttctttcattatgatctctattctccatttggaccaacctctcatggagcgcatcaatcctcgtgttcttaacctctccatatgttgaataaagcttgcatttgaattgcgaagcccactccatcataagattagacctgcatctcaacaacaatcaacgtacagacaatatagtgctgttgatacctaccactcaatgttcaacaatatggctttctctatgaacactctgcctttacactct

SEQ ID NO: 231935 - DNA, 467 bp, Glycine max
  unsure (1)..(467): unsure at all n locations
ntataacatatnttagtaatgacccactaacctagaagtaatataacttattgccattaacctanggaattaataaaaacattatggctgagtgtaaatgaaattttggcaaccaaaagttacccccaacagccaacaagtcagccaccatttggtctcccaaaaggctgatgcctatgttgccaattgggcccttattacaacttgaactaaacctactaaagcccttttagttgattaacccaaaacatatttttggtcagccaactttacaaggattgagccattatttagacaaactaaacactctaaaattgagacaaagtggtgccatttagtcctcctccatttgggccatgatacaactcacaaccttggactgttctccttgaaactagcgcttgtattcaaatagtatggacagcacttgttgaagagcttccttggctttccttgctctagccctt

SEQ ID NO: 231936 - DNA, 261 bp, Glycine max
ttgggagcgttaatatattaacttttcaaattgggctatggggcgattaaattacagtatctaattttggaaaaaggatgcacctttattacttttttccatcctcctggccaaaaatgaaggaaattatattatacactaactaaaaactaggttaattaaaatgaataaatgttttataactattttaacataatactaaaaaaggattgcaaccttaaagaaaaataagccagatatttaaaatttgttagaaaatat

SEQ ID NO: 231937 - DNA, 437 bp, Glycine max
gaaaaatgtgtcactttacctctagcctctaatgaaggtcaagagacaaacattggtgctaatccaactaagaaacatcctttggaagtttctttcaatgtgcaaggtagagtttgaagtgaagaccaaagtcttatagcaaatggagtacatcaagtctaagaagctagagttggatggattgagaagaggaaagaaggtcatacataacaagaagaagcagatgagaagcccataagcccctttgaacagatgatgctagataagattgatgacctcatgagagtgcataaaaaggactatgccaagcttaaggagtgctttgagtctatcttataaaggttgaaggctatggaagcagcacatgtggatgatatctaacccatagttatcctttaggatccgcttagaatcttaagataagttagtctcatagc

SEQ ID NO: 231938 - DNA, 413 bp, Glycine max
aacacatgaggagaatggtaaatgcaaaaatgacaaaatggctggcaacacatgtaatgaagtggacaatgctcaagcaacaaagtccatgtcatactcatgcaagagtgcctaagcctcaagaggaggaccttaatctaccaatatcaagaaatattgctactaccaaaaatgacactctgtatgaatctctttcacctaacaaggaaactatgtacttcactgggtgccgattcagtcacaaccccttcacgctccttatgctctgacatacatgtggaggtttctgaacgtggttcaccaacactgacagttgatgagaaccatgagaacactacacatgcgagaatcatgatatatgatggagacttgacaaagatgctactttggtatgaagatattgggagcatact

SEQ ID NO: 231939 - DNA, 356 bp, Glycine max
  unsure (1)..(356): unsure at all n locations
tcaaccgcgagctttgaccaccgctctttctctccgcgatgcttctctatatatcttgactgagtgggcttatagcctaaaccatacttcccacgatttgcttcggcatttatcaggctatgtatgccgcctgtgtctttgcctatacccattccggggtcgtaaccgctccccaacataactcgggccatcattactgctgcatcagacaggcatggctcccagagaaggagccacggaggaatgcttaccacctanaagactggaaagcagttctaatgactcctctgcggctctcacataaggcatagaggatgggcaactcaccaagatgtcttcctcgcctgacacgatga

SEQ ID NO: 231940 - DNA, 466 bp, Glycine max
  unsure (1)..(466): unsure at all n locations
ccttcctcggggccattcctgcgaaggcaaacatntggaaagttatgtttagcgggacattactcttaaagcaaaaatggcatgtaacctcctcccatacaaacatcaatgtaaatttagaacaagcttatgcgcatatttccttacaaacgttctcttgcacaagacatttaaccgataaaatgcacccatatacaatcaaggcagcttcgtcatctagattatttacacgtacctccaaggtgtatttgttacttatatcacacacatctccttggctaaattcacatacatgcatactcaaagcactttggggtaccaaaaattgcacatgtgcacctcttggcatttctaatacctatacatacgcaaactttatgatgaatcttgactatccacacaataaggtgctacatttcatgctctttttcaagtttttgtacctaagccgcttgcaatcaacata

SEQ ID NO: 231941 - DNA, 416 bp, Glycine max
  unsure (1)..(416): unsure at all n locations
tggatctgcaaacttgacattcttgatattgncttaagcacgaagggtgtgttaagaataaagatctcccacattgcctgggaattcagacaaaatactccttatcttgggtttaaataacatccacaaccacaattgtggctacaataccaatgtattttgactcatcacaatgcaaccgcaaccgtaattgtgatcgcatcagctgcattttcccgtaatataaaggttttttaactcacctatatgtaaccacgatcacaaccacaatttanaacaatgtttcttataaaacatgggcaagcctcttcccaatggtagnttttgagaatgagttaagtacattccatatattgtcttacttctactatagaataaaagtcatgtgcttccaagtttgtctacacatctctaac

SEQ ID NO: 231942 - DNA, 425 bp, Glycine max
  unsure (1)..(425): unsure at all n locations
tgttagcatattctttaattgtttcagactccttcattttctgcatctcanattctctaacaagattcagggcttgcattcccttaatcctttcatctccttcatattcattcttgaggaaactccagatttcatatgctgatttgatggtcattattctagtgaaaatttcttttgagacaacaacaaataaagaagctcttgcctttgactttcttgctttcctctccttttgattttttatctgagccattgttggattggttggtaaaggaagaactttgtagtcttcctcaactgcttcccagagatcatttgcctccaaatgtgcctccattcttgctgcccagaattgataattatcaccatcaaacacaggtggtgctagtgttgtgtacagtggtttaaaatccatctatttgatg

SEQ ID NO: 231943 - DNA, 370 bp, Glycine max
tacgacaaacatagtgctgttacgttgccaattcatctggacgaaagaatgttattcaaatcgatgaatcttatctcttctaagttggcaagattcattgtatttagcttatttgtgtaacacgtctctgcgcgagtataatacttttctatcaaacatttattgcttgagaaatgtatgagtgactcatcgacaaagaatacttgattcttattctaatggagagattaatgttgtgctatgagtggcctacagagtactcattgtagccctaagtggtctatacattacttggttggtatcacacagttgattactggaacctttcaagttgtgtactaacactggactttgcccattagttggggtg

SEQ ID NO: 231944 - DNA, 372 bp, Glycine max
  unsure (1)..(372): unsure at all n locations
taacacnacgcgtcacatttagccatattatactttcataccaaaagcctcctaaaagatatagttcagcacagctattcttctaacttgggaaattagccttattgaaagaagcacaatatcccacatgtgagatagatgagctatactgagatacattggcgcggtaccaactctttgtgcgtccaacactccaaatattttgatgttgcagtcaaatcccgatccataatatatctaataaaatcttgaataatctagatggtgggctagacacactgatgcatgtccagaaaaagtgaactattattgattacctttaaattcttcaccatccatcctgtttttattatcgactattctacgaattaa

SEQ ID NO: 231945 - DNA, 431 bp, Glycine max
  unsure (1)..(431): unsure at all n locations
gaggccatccagcactttattattattgtcaatgtnttgattggcgtaaaagaactctggatttagataataacccgctgcatgcaaagggtggtggagttggctatcccatcttttatcaatgattgcaaggatatccttatacttcccttcattgttattgaaagctcttagaattgcttctttgaccctatccattgcttcataaatgaaacccattgcaggttttttttcattatccaccaaccttaacacacttacaagaggccccatagctctttaagcataaacaacatcattccacaatgatggcataagaacaacatctgatgcttgctttccctcgtgctctttagctgccttagacttcaaccattcatctgaagtaaacattcttctaagattggcctcttgcttatgcaatctttgca

SEQ ID NO: 231946 - DNA, 429 bp, Glycine max
  unsure (1)..(429): unsure at all n locations
agcatattcgatcattgagtgatctgaggatttttaattgctttgagacctaaacctctatttggaccatttggtccttgaagtatttgatttcattgcatattggctaagacttcatctgcatttcagtttctattaaccaaaacagagnttggtgtttctttatcattcattattcaagccgagatattaacatcatttccagcattattattattaataggtctctcttgtattggtatttcctaaattacatgtctattccaaggttgatttctaggaatggccaaaacatctcctattcgagttaagatgccattcatgtngctaataactttgttggtagttcttgttgtacacgcggcctcagaaatattaagaaggggggttgaattaaaattcattgctattctaattgaaattctcttc

SEQ ID NO: 231947 - DNA, 488 bp, Glycine max
  unsure (1)..(488): unsure at all n locations
agagcttgagtcctcttcagcagatgagctgttctcacatggtgttctccttcccacacaaatcaagaacaataacatcaacaacaatgctattttgaagccaaaaagccaactagcaccgccaccacctcaacctcaacctcaattaccacctcccccaaaagctatttgtgacaatgcttcttccaccaccagaaaaagctcaaagaaagagagtcacaaagttggcaaggagttgaatgatgaagtggatgagaagcaaagttccaagtcattttggaggttcaagagaagtagtagttgtggaagtggatatgggagtagcttgtgtcctttgccactnttatctagaagcaactcaactgggtcttcaccaagtgttaaaaggataccactttcaaaagaggttaagcaaaattctcagaaacgttcttcttccagcacaagggtntctcagtctcaccacttggcttcacacaatcatcaaa

SEQ ID NO: 231948 - DNA, 417 bp, Glycine max
  unsure (1)..(417): unsure at all n locations
agcttgtctgtccgatgcagcagtaatgatggtccgggttatgttggggaacggntattaacccggaatgggtttaggcaaagacaatggcggcataactagcctgataaatgccaaaggaaatcgtgggaaatatgggttaggctataaacccactcaggcggatataaagagaagcatcgcggggagaaagagcggtggtcaaagctcgcggttgagacaagaaagtgaaggaggcccgccctgccacataagtataagctttataagcgcgggtctgggagacgaaggtcaagtggttgcgatatacgaagatgatgttccgagtacattggatttggtacaaccatgccgtcctgatttccagctgggatnatggcgagtggatgaacgccccgcatttacgcacgagcatat

SEQ ID NO: 231949 - DNA, 474 bp, Glycine max
  unsure (1)..(474): unsure at all n locations
tgtgcagagttgtgagcaacacaggaatctaaaaaatatatactaataattaataatcaaatagtattgataaaaaatatgcataaatcaagtacaaatccttcaaaacaaagtaagatcaaatagtaattttagcagaaaagagaaaaagaagcaaaaagaaggataagcaactaaagttagaagctaaacgtaagaacaaaaccaaaacccttgaaatttaaggtgtgtgagagaactgaaccaaaggaattgtgacctatgaagaacaaatcaaagtgaaaatgcatagaagagtgtgattntttttaactatgaaatatgtactttacggcatggtttttgcacaaccatatcataatcatcccttgaaaccattgagaaatcaagatccatttgcaatttcataagatcaaagctaanattctggtgaaaccacatatcgagttgtgtgtggaatctgaatgcctcaag

SEQ ID NO: 231950 - DNA, 412 bp, Glycine max
tatttctggcatgaaaggcttggatattccctttcgcggcctcataaattcctctgtgaacaagtacgtctgtgccctataagagaataatggatcaccaagggtttggtggttttattacacaatcaacatttgagaattgcaactgcacaatgaatgcaatgaatgtctccatgaaataataattggtcttacctccaatttactgggctcaaagaataggattgcttgccaagatgccagagagtctgagccctgcaacatataacaaaatatataaccttgtggtatacatcacgatagcaaggagtgataaggaattccctgaatacatagcatccagcgtatttgccggatcatcacaacaacccttctcaggtgagaatgaatgactggggtcacttgtgttctt

SEQ ID NO: 231951 - DNA, 413 bp, Glycine max
caagcagatggagaagggaagactgagatacaaggcagtccaatttccaaagagactgcagcttctaataagatgttgggagttgtccctgccagtgttgcaggaacaatagttggacatgtagtttcttcaggtatgaccactgcactggagctgagaaatccttccagtgttcattctaaaacaagtgccccacaaccttgtccagtattgcctgcagaagcttgggtacaggtatgatccacatataattcatcttagcagttcagatcatatgtgtaaaacatgttgtagtaataatgcagcatcctcatcttttgctgacactaaagtaattcttgtgggtatgtttggattccttataatgagcgtgagctgatacgggagaggcggatacagtcaaatcgagaatc

SEQ ID NO: 231952 - DNA, 417 bp, Glycine max
  unsure (1)..(417): unsure at all n locations
gcttttatctaccaccaccgccaccaccattctatcttagttttctattattnatattacaagtactatgaattccaaccttgtatttggctatattattatgataattgaacaatttactatttctttatctgcatggtatggttgaacaaatattaattatgttatttgactatgtgaatttttttataattgatctattcacggctcttgcttcatgattttggttatatttttcatgaatgttgtgtggatacttagttgtatttgtgttgttcaaacttgttacgcactctggctttttgttgatgccaaagggggagagaaatatggattaaatcaagaactcacatgagtaatcaacttcattntaagagaagcataaatttcaaaacaaagggggagaatggaaattat

SEQ ID NO: 231953 - DNA, 460 bp, Glycine max
  unsure (1)..(460): unsure at all n locations
caatggtggaggaagaaaagagaaagctatgtgagatatggagagaaaatgctatagaatatgtggggctgagtgaagagagagagagttgctttttgttttataaaaaaaggttttctctttttctattattttatttaagctatgccacatgtctccatttgagtggagcaaaaagggcccactttctctttntattgtgacccatactcagccacaaaaagtgagaaaaatctgacctttgaaacgctaaaatcatgcctcggtttgcgtgctgtttctctggttccagattctcacgtttctctgcgtccgtcggngccagttttcgaaagtaagtaatatgtatatcaaaacgctcagaataaaaccccgagcgtggttcagaggttggtttcgttaaaatttaagtcgcacacaanacgatgatttttaactaattaattaagaattaacccat

SEQ ID NO: 231954 - DNA, 385 bp, Glycine max
  unsure (1)..(385): unsure at all n locations
catgcaagctttgtgtaatcgattacactgatttggtaattgattactatttgatgtttctgaatatatctaaagatgtaactcttcaaatggtttttgactttttcaaaatggttctaaggttttctaaaagtcataacttcttctaaatggttctcttgaccagacatgaagagtctataaaagcaaggctttgttttgcattttatcaatcaatctatacatccatcttttccaattcattctatacacaaccagtttttccacattgatttctgagtctctttgaacttcttcttcttcttccttttgccaaaagcctttcaaagttttctggttttctaaaccttgaaaacttgngctattcattctttcatctcttctc

SEQ ID NO: 231955 - DNA, 465 bp, Glycine max
  unsure (1)..(465): unsure at all n locations
agacttcctacttntattcgttgaccacagagtggtacctggagatatgtcgcgagggtcaggagaccttgnggacgtcaggtggggtgctattgcccanaaccaagcttgaccaatcccgacccaacccgggcatagtcagtcagtgagaacctgtgatgtacctaaacaggcaagctcctggcagtcaaccgataaaagaacaaagaccacaaagcagggaggcttgtgtggtggctggccagcaatgagtcttgagtgagatttgggatatggcttctggtaatcgattaccaagggtaggtaattgattacaaggcttaaaagtgaagacaggaagctaagatgggctctggtaatcgattaccaagggagtgtaatcggttaccaggcttganaatgagatcaggaagctaggagggcttctggtaatcgattaccaaggggtgtaatcgaataccaggc

SEQ ID NO: 231956 - DNA, 443 bp, Glycine max
  unsure (1)..(443): unsure at all n locations
agcttatggtccaaagaactctgtaactgtgcaagatgcatcgattatctntaatgtaagtagcatgttctgacaacttcctttctcagcatgtccacatcatctcatgtgtgtttgatacctttgattaggagggtctatgttaggaggaataggaatgagagatgaaaatcggaacattatggctattaatagtaatagaaaccaccagtattaataacaagtaactgaataactgtaattggagttattgtgaatatatggtagttataagacagttaggtgaaaagtgtacgccacttttgggatttgagaaaagtgagaggagggagagcacctaatattgtcattcaccatagtagatcaaaattctgattaagaaacaatgtgctgactctggactcanatgatataagnctttcttcatatcatctgttctttct

SEQ ID NO: 231957 - DNA, 414 bp, Glycine max
  unsure (1)..(414): unsure at all n locations
aagagacactcangctggttcaattgctgccagtgttcgatatgataaccttatatggatgtttggctcaagatcagtgcctgcagttggtgtaagtctgggaattgaaggagtatttgtcatactggagcaacgacagaaggacatttactacatcacaggagagagcaaggaggtagtggcgacctccccattcttggagagactcaagaagaacgactatgaagttctcttcatggtggatgcaattgatgagtatgcagttcggcaacccaaggaatacgatggcaagaaattggcttcagccacaaagcaagggttgaagctggatgatgagactgggaggagaaaaagaaggtagcggagaagaagaagtcatttgatgagctctgcaaagtcatcaaggacattctg

SEQ ID NO: 231958 - DNA, 336 bp, Glycine max
  unsure (1)..(336): unsure at all n locations
tgttcacccctcctggtaatacgagatcacttgaaattagtggaaaaaaaaaattcgtgaagaaaatcgcaagtccaggcgcttcccgtacgttttcctgggtgagtncgcgaagaatttcaaccggtcttcgacagtctattgtcgttctttgtcggtcttcagtctccaaccgataagttcccaaaattgaacttttcaattcattctatgtacccttaggggccctcatttgttttcacgtgctattattatcatttcgtttactttccgtacccccttttgacgtgctttagtcattaacttaagtcatattttcacctaatcgaaaaataa

SEQ ID NO: 231959 - DNA, 473 bp, Glycine max
  unsure (1)..(473): unsure at all n locations
ctagttcactgcttcaagttgtgcacgatatgcttccagatgaaaacacgttgcctaatagttactatcaggccaagaagatactgtgtctgatgggtatggagtatcaaaagattcatgcttgcccaaatgattgcatactgtacaaacatgaatttcaagaaatggccaaattcccaaggtgtggggtatcacagtacaaagtgaaggatgatgacgactgtattagtgacgaaaactcaaagaaaggccccctagcgaaggtgatatggtatcttcccgtcattccaaggtttaagcgtctgtttgctaatggagacgacgcanaagaccttaatccggctgattcctcacaatggaagaacattgatcgtttgtatctggatttcaacaaagaggcaagaaatcttatgcttggactagctagtgatggaatgaatccatatggcaatttaagaactcaacatagttca

SEQ ID NO: 231960 - DNA, 429 bp, Glycine max
  unsure (1)..(429): unsure at all n locations
agacattatatatggatatatgaataaagaaagnccaaaggtgttaagacaaccatatatataaaaatacaaacaataacaaactatatatatatatatcaggtttgctaaccattgcccttagcaaaaccacatacatagtagaaataagttacagctaattatggtgaattccatatgcaattatgcatatattgcagaaataaattacagcctgctgcaagcagacaaactaacatacatcagctaaaattaaggagaacaaacacaggcaggatttatattctaatcaatcaataattccaatctggcgactaatataacaatgctaataaagtttattatatncactaatgcactataaacttatccgactttctggtgaaataattataaactaagtattatctcaactcttatgcatataac

SEQ ID NO: 231961 - DNA, 325 bp, Glycine max
tgcctcatgctatcattctgatgggggtgtcgatgagttgtataaacttgatgctaacagcccattcttaaatcaataacaacagaaacagtccctttgtacaccaaggttccaaacctatctaatatggaataggaatcatcacaccagactcaaacaggtgactttgatgcaatgaggaaaaaagggctcgtatgttggatgatgatgatgtcatggtacacggagtgtatttattaggggtacttttgaaaataaacattaaaatgggagtgtattatcaaacagaggaactggatatagcaattcccttttatctatcgtg

SEQ ID NO: 231962 - DNA, 151 bp, Glycine max
gcctagctttaaagtttattttggtaagctttgcgcttttgttttaattataatacaggatcttcttatctgtcctggctctacccatctaattattgatgtcacttttttttgaacggcgatccagacgatccccgaagactaatctgga

SEQ ID NO: 231963 - DNA, 451 bp, Glycine max
  unsure (1)..(451): unsure at all n locations
agacgaccttgnntgagctaagatgagctgtattattattttgacacgtttgaatatgatgtagaagaaagtgaatgtgagccttttatccctttgaaaggcttgtatttaaaaatgttctaaaaatacttttaatgaatatttngaattttattcctttattagtatatatgtgaggggtagagggtgtcatactgtatcaacctttgaaagcctctgctaatttgagcatatcgttcttccacttcactcatcatcacctgaggtcgtgtgtttctgtgctcttgataccactgatatagaatntaagtgggaaagataaagagatagaaaaaggggaagaaagaagaataacatagccgagaggacagagggagagagagaaagtataaacagataagagacattgtgcattgngttagatttcaacttaaaatcaattgacactaag

SEQ ID NO: 231964 - DNA, 213 bp, Glycine max
ttcctagcaagaaacttgtagatgaactttttttcgcgaggttccctcttgatgcctatgatgaagtcgagttgcggtgctgaatcgtggatggatctgcgaatcaaaatacagcttaagctccttttgaattgtgttattcacgataatcgatcttaatcaaaccttaagtgcaactattccaagccttaagcaccataaacattactcttg

SEQ ID NO: 231965 - DNA, 378 bp, Glycine max
  unsure (1)..(378): unsure at all n locations
ctgacttagcatcaaaatttcctaagttaacttttccattattcaataccaaacatttacaacccaagatatgaagatgtgagaagtttggttttctgccattgaacaattcatatggaagtttctttaaaaccggtcttattaaagccctatttaaaatgtagcatgcagtgttaacggcttcagcccaaaagtattttggaagaggagtatcatttaataaagttctagcaatctctttcaaagatctatttttcctttcaacacaccattttgttgacggattctcggtgcagaaaaagtatgctcaatcccatgcttatcacanaataattcaaattctttattttcaaactcaccccatgatcactcctaata

SEQ ID NO: 231966 - DNA, 398 bp, Glycine max
  unsure (1)..(398): unsure at all n locations
tgagatgaggacgcgtagaagggtgaaacttcctgcttttattcgttgaccacagagtggtacctggagatatgtcgcggnggtcaggagaccttgtggacgtcaggtggggtgctattgcccaaaaccaagcttgaccaatcccgacccaacctgtgcatagtcggtcagtgagaacctgtgatgtacctaaacaggcgagctcctggcagtcaacagataaaaggaacaaagaccacaaagcaaggaggcttgtgtggtggctggccagctatgaacttgattgatgtgtgagatatggcctctggtaatcgattaccaagggtgggtaatcgattacaaggcttaaaaatgaagacaggaggctaagatggtctctggtaatcgattaccacagg

SEQ ID NO: 231967 - DNA, 303 bp, Glycine max
tacaattttagggacctatttaccattctaattcacctaagtaccaatttaaccgtctattacaattttatggactaataaataggcaaagcaccattcgaccacttactcaaatggtccaaattgccttatgcaatataacgtgttatactaagttggcaagtagccattttttatttattttctttaatgaatattctatctaagttgaaatgtctcttttacccattttggaacattctatcagttgcgaaccagtgaaaaaatagggtgtcatgcttagatcttgtctcgcctgcattt

SEQ ID NO: 231968 - DNA, 355 bp, Glycine max
attctccatgcagctaccagcggcagttattaactccagcgtgtacttaagggacttgccactcttcatgaacagccctcgatttgatttcctcgttggaaacgtcataatcatcgcactcttcgatcagttctccactcagggtaataacgctccatagcctgatctttaccaagagttcgttcaaaacaccacataatatcacagactcacagaaacagttgtggcagaatatagcaaaaagaatcagaggatgataacaggggaagtgaatattggtctgaagaaggattatcgaatatgtgaaacatatgatttaagcgaaaaaccacatcgtgtgtcacgcacgtgtgag

SEQ ID NO: 231969 - DNA, 488 bp, Glycine max
  unsure (1)..(488): unsure at all n locations
ctaagctccctcttttggccatgctggactagcttggcagtgatttccttgtgcaattgatgctcanaaacagcaatatccaccactccttcagttggtctgcccaggtacttgttgattacagtaggagagaatctaatacattttcctctgacaaacactntctgatactcatcactctttctgtttgttatgtcagagggaatgctgacaatgaattctctgactagactttcatagcaatctcccaacttggtgacagttttcagcagtccagcagccttgatgaggtccatgatctccttgcaaaccaaggcatctcttcccagttctctttctaaagcaagtctgcgttgatatacaaatttccacctttcaacattgccaatggagtggaatgaaatgttgtccaatggtgcatcanggacatttccaggcaccttttttcccgatttcttggctctcttgatgtcgggaacatctagttc

SEQ ID NO: 231970 - DNA, 419 bp, Glycine max
  unsure (1)..(419): unsure at all n locations
agcttcatcgttccaaaatgagagtcatgttgctctgaaccttttccgntgacaatgtcaacacattatgagactttcccacaagaccatatatcttctcttcggagaacccagatttcacgaaaattgccaccttatcccgaatcgtttccacgcgagagactcctattaatgtcaccacatatntatacatcttggaatccttagtaagcccagtcttgcttaaatattccagcttctcagcatcaaaggaagtcctcgaaataaccgtgggccgcaaaaggagcatctgaatcaagtcctctttcttaacacccaacttctcatagagctcaactggttgcttcacattatagcgacccgcagatagcagcaacgaagggttcctcacaattgccttctgaagcacttctttcgtc

SEQ ID NO: 231971 - DNA, 450 bp, Glycine max
  unsure (1)..(450): unsure at all n locations
tagaaaacgtctatgttaagtgcatactatntttcttccatgatttagttgtacatagcttgtgtctgcttcattgacaaggcatgcacgatggccctttacactatatccattcaaattctcatatgttggaaagtcattaatggtacaaaatagcattgcacgcaacttgaatgtctcatttcgatacccatcanacacagcaaccccctcgtcccataactttgtcaattcttcaatcaaaggactaggataaacatcaatgtcattntctggttgtcttgggcccgataaacaacaaggccacaaactgtgcggagtgcttaaactaacatacggattcattccattattgtcaagtccaagccttagatatcttggcctctttgcatcatttgcattagcanacatacacttgaaccttggaatngatagaagataccataacac

SEQ ID NO: 231972 - DNA, 314 bp, Glycine max
  unsure (1)..(314): unsure at all n locations
tcatcagacttaacggagctctcaccctcgtcctccataagagaagaaacctgaaggaaccttgacacaagagattgtgcagtgtcatacctgaaggagccacagacacacccacacacactcatatacccaactacaataagtaattcataagcacccttcaaacccaacattntaaattagttacataatcaactgctgacgtgtattttgcgtgaaatgaatcttacttttggatggtcttgatgtgaccagtgtacttgctattaaacaactgttggtcatgtgagcgaaccttaaatcccgttgaactg

SEQ ID NO: 231973 - DNA, 401 bp, Glycine max
cttcttgagcctaccaagcgcagatggaatacaccctgataggctatcttcatataagaacaagtcacaagctcagaacagttacctaactcgggtggaatctcaccagacagcatagtattatagatggacagtgtctgaagccttttaagtctgcccaaagaagcaggcaaagaaccagatattctggtatctgccaaccgcaacacagtcaaattggcgcattcttcaatctcttcaggaatctttccaacaatatctttggtccctcctgctcttagagactcaagttgtgaaaactataccaactcaagtggaatatgcccacttatctgattatcaaataggagaagattttttacgccaatgcagctgcctaacttcacagggatatttccaga

SEQ ID NO: 231974 - DNA, 289 bp, Glycine max
tataccagacatcttgctaaacaaagtcaggttatccataactcgcctgtgctttctcttccatgccaatatgtagcaaagtctgtgatcctgacaagtttaatgagcctggaaatgaggccgcaattatattgtgctagttggagatgtattttgcccctgctatctttgacatcatgattcacttgattgtgcatctggttagagaaatcaaatgttgcggtcctatttatctgcggtggatgtacccggttgagcgatacatgaagatcttaaaagggtatacaaa

SEQ ID NO: 231975 - DNA, 419 bp, Glycine max
  unsure (1)..(419): unsure at all n locations
tgacaanagcccaagagaatgagttcaagattgaatcaagaacacttcaagaatcaataggagacttgatttcaagagtcaagaatcaagtttcaagatttaagtttcaagaatcaagaatcaagaataatcaagttgaagattcatgaatcaagaaaagactcaatcaagataagtactaataagtttttcaaaacaatgagtagcacatgaatttttcacaaaaccttttaccaaagagtttttactctctggtaatcgattaccagtttattgtaattgattaccagtagcaaagattgtttcaaaaatctttaactgaattacaatgtccaattgactcaaatggtgtattgattacaatgaattgtaatcgataccagtggtttgaacgttgaattcaaatcatatgtgaagag

SEQ ID NO: 231976 - DNA, 316 bp, Glycine max
aaaaaacattcttacctcatgacatcagtacgaagcccgagggcaaccaccactaaggaggtgggttaaaaaacgtgtgaccaacaagctccctaagtctctccggcgttcgcggcaccaagatattctcagtctcatccaaatccatgacaggaaaaagcccttgcttcacatccctctctttcatacacaccccggacccacacaccaccaccctctccaccataaccaccccctccttcatcgctggcatgcagtaccaacaaacccgccataacttagccccactatactcacccttcgcacccgcttcgcc

SEQ ID NO: 231977 - DNA, 426 bp, Glycine max
  unsure (1)..(426): unsure at all n locations
gacaagttacaacaaaactctatttctaggagcttattttgcaactacacacaccctattaggtatggtgaagctattttgttacatttgttgagttcaatttggtgttataattttttattactaatgatgctcgacaactttgttcgtgttttctgaataataaaattgttatgaaaatagtttatttaatatttggtgccaagattntgaaaatttgatacagttagtttgaagacttgaatctagaaacaatcatagtgcatgctgatatatcttaacgganatgacctacagatatcgtggtcaatgttngttaaacataaggtgtgtgcatgtaatatgtataaaagacatgggtacatgtgtaatacttataaaaatatccgggtgcatatgtcatattctttgtaacgatgtattgat

SEQ ID NO: 231978 - DNA, 61 bp, Glycine max
tgagataagctgtgcgtatgccaacttaatcgttttgtttgagattgcactatctgatgcg

SEQ ID NO: 231979 - DNA, 324 bp, Glycine max
agataatgatatgtccaaaccagactggagaagtatgatgcagttgcatggtagatgtttaagttggcttatatttcccaatttcatgaactaatgctatttcactccaatagcacggtttgctgatggtccattgcattatggtctttttctgtatgtctgtatgtagttcaaccttaatgctgtataacaaattcatgtctacatctagaagccaccagaagttatgactatttctctgattagttccaaacatggttcaaatgtgtattctctcaaatgagtcacttgattatgtttaatagctaaacttggcaatcaagt

SEQ ID NO: 231980 - DNA, 477 bp, Glycine max
  unsure (1)..(477): unsure at all n locations
tgtccttcaagaagcacctgaaatacccaatggactttttgngattgcacgaatntcttgagcaagtgttttgtgaaggatcctaggcagagatggactgctacaatgcttctcaaccatccttttctttatccaacatgttacatgcgtagttcatctttnttctcatatgatattgntagtcatgtgccctttaaggtataagatataccggttgatcgaatgttttgcttttgtattcagtgtgtttgctttttttaagtaatttttttagtaaagcaatgtagaaaatagctatattgttatatatgcagactgttatgtagtatatggagaattgagtttatttccagtatatcatcctcattcttattggagaacaattactgcgccgagcatgatatgagtaacaattaagattacatggcctatagttntgggataacagggtgttgtgaagtatgttgctataacatg

SEQ ID NO: 231981 - DNA, 421 bp, Glycine max
ttcctctgagcatgggtattgcaatgctttcaacactacgaggcgagagatcccgggctttcttccactccatgcttcttgcggtgtcttctcatgcacgcttcttgttggagaacgatttgttaggtaaactgcacatgccactgcttcagcccaaaactccttcggcatcttcttgcttttgagcatgctacgcaccatgttaagtatggtccggatctttctctctactactccattttgttgtggcgatcttggcactgtcactgggcgacggattccatggtcttcacaatacttgttgaacttatttgaagtgaactctcctcctcgatcagatcttatggccttgatagaataaccactttctttctccacgagagcattgaacttcttatatgtttcaaacacttctgatttc

SEQ ID NO: 231982 - DNA, 485 bp, Glycine max
ctcacctttatactgaactacaacgtgttaattagatttttaatgtgtgttatcgacttcatgattctggtaatcgattaccagtgtgtttgaacgttgaaattcaaattcaattgtgaagagtcacatcctttcacaaaaatgctttgtgtaatcgattacaatgatttggtaatcgattaccagtgataagttttgaataaaaataaaaagatgtaactcttccaatgattatcaagtttttctaaagggtataactcttctaatggttttcttgaccagacatgaagagctatataagcaaaaccttgacttgcattttaagaattcattcataacaatcattacaatcattacaatcttttataacctttgaatctctttgaacatcttcttgaatatcatcttcttctttctttgccacaagctgtctaaagttatctggtcttctataccttgaaaacacaagtgtgttatccattttt

SEQ ID NO: 231983 - DNA, 432 bp, Glycine max
  unsure (1)..(432): unsure at all n locations
agctctatacaagggagattaagatataagtatcattcaangnaagctatttggtcaaaagagcttgtgtctatacaattcatggccttcatcatgttctgagttatacaaatcattctagaattcagagatntatgcgaagatcattattcacaattagtcgttcactcacagagtaaggtcacactctcaacggtttttggttcaagcttttctttcacaatcagtctgtctagtgactaactattctattataagttcgcactcttgttatttctttgttcaacatgcatnattgctcaaattcatgaaagtaaacacacatttcatcataagcatgcattcaatttaaaacaaggcatacgaccattntcacaaaataaataaactacttcactgccataccatcnagaagtaacttatacagttcac

SEQ ID NO: 231984 - DNA, 499 bp, Glycine max
  unsure (1)..(499): unsure at all n locations
gacacatagacactcaaccttgaggcatagctctattctctcggtctccaagtggagatgtattatttgagctcttgagcatttgcatacatgcttctctattaaagttggagacagagcttctttctttttctttgatcgatgactggctaggcatatggtccattgctaatatggtgccttacgtctatatttcagacactcagctttgcgttcgtgatgtttggaggttaaatggtctttgtacagagatccctacactcaggtgaggaatcaaattctaagtgtgaatgttcctactatcagttctggtcaggatacctttagctgggtgggtgactattctgggagatacacagccaactcggcctataaatggctttntcggcttagtaatccctatcctaatcctatttggaaaaggatttggcatgcgaatatccacgagaaacttatattctttcttttgcagcatcctcatgaagctctttccaccaat

SEQ ID NO: 231985 - DNA, 365 bp, Glycine max
cacattttttttcttctacatcatattcaaacttgtccaaataaataataaagtcatctcgactcagagaaagtcatataagtctcatacaattaatatagaacctatatcctaatgtcatatcctatcagagcgtggtgttcccgtgtcctctaacatgaggttcttcatagtcatccacctattcatctgctcccccgaacacaaagttcaagatcatcacaggatccaaacacaaacagcaaaccgagagtgagttatcacattgctaactactagagagaaacaacacaacatatagtagcccaatacaatttacttagcatatctcacattatttcattactttgtcattcatcaatcac

SEQ ID NO: 231986 - DNA, 370 bp, Glycine max
  unsure (1)..(370): unsure at all n locations
cgtaagtatttattggtataatttgtctgttccattangctcttaatgtctttagaggttacttcctgcgtgacatcttttgtattgaatggaattgccatgacatgcttgttgttactgtctttgatattcggtagttgatattgcgttgcgggaggtaattctgattggattaactcaccatcctttacttgccaatttgttataacacttgttgttggatcacctatgatgtcttgtttccaagggtaatctatatcctttccgatggcctaagcatgaaaccattcaaagaataggacattaatgttgactcggtcgacaaattcgtagaacttgtcttggatatgctttatgttcgtaccctttg

SEQ ID NO: 231987 - DNA, 309 bp, Glycine max
  unsure (1)..(309): unsure at all n locations
tcaaccttacctatttggaagtgacatcatggccggtaggatccagctttccattgtgggatcagccacaaacaaacttgaatatgtggactatctaacancgggaattttcgagtctatttccacacagatgtggaagcactttctacgttttgtattaaacctctctcgtaacatatccatgtgagattggactacataaagaatcaatattatccaactatgatctagctaaatcactgtgggaaattacctattttcagtaagtgcttagtggatcttcaacattattctcgaatctgatgattt

SEQ ID NO: 231988 - DNA, 456 bp, Glycine max
  unsure (1)..(456): unsure at all n locations
gcaagatcatcttccttgacaactccgtgttataagatgccgncaatatgaagagataacaatttatagagtgatcgaagactttcaaatggatttccactgaatttattgatagagagatcgagatatcttaatgatgaaagttttccaaatgatctaggaagagcaccaccaattgagttgttgtaaaaccgtagctgctcaatatttttaaatgccccaatatgatctgtcagattgcctgaaagtcgtgaactctgaactgcaagtcttgtgagtccatgggaaatacaaggagcaagaatttctaaaagttcattaaccttgtggttgagtttgagatatgataaatctatcacccttaagttgcagagattaccctaagaacgtggaatgattcctttcagttgattagctgataaatcaagtgcaacaagagaagtccaatttcctatg

SEQ ID NO: 231989 - DNA, 395 bp, Glycine max
gaattctcgagagccttctattttcaattctgaacgtctcgatatattatgcgcccgaatcggacatcccgtgtgaaaaaattatgaccaatagaatttctcgagagcttccgctgttcatttcgagagcctcttattggatgggcctgaatcggacatctgagttaaaagttatgactatttgaatttctctagagcttccgttgcccaatattgagcgtctcgatatgtgattcacatgaatcggacatccgcgtgaaaaggtatgactatatgaatttctcaagagcttccgtcggtcaattttgagcgtctcgatatgtgattctcccgagcgaacattcgtgtgaaaagtattgacatttgaattcttgagagccttcgatgtctacttc

SEQ ID NO: 231990 - DNA, 429 bp, Glycine max
  unsure (1)..(429): unsure at all n locations
cgagtgcctgtatatngatgcgcctgaatcagacatacgagtgaaaagttatgaccatttgaatttctcgagagcttcctatgtttaattttgagcgtctcgatatattatacgcctgaatcgaacctcagtgtgaaaagttatgaccatttgaatttctttagagcatccgttgttcattttcgagcgtctctatatgtgatgcaccttaatcggacctccgtgtgaaaagttatgaccatttgaatttctcgagagcttccgttgttcaatttcgagcgtctcgacatattatgcgcccgaatcggacatccatgggaaaagctatgactatttgaatttctcgagagcttccgttgttcaatctcgagcgtctggacatattatgcgcccgaatcggacatccatgtgaaaagctatgaccatttg

SEQ ID NO: 231991 - DNA, 415 bp, Glycine max
  unsure (1)..(415): unsure at all n locations
agctccaactctggggcggaggatgtttgaacagctcttggcaatgacattcatggtgctcccgaataaagtggagaatggaaaattggcgtatagagctaggccatcacattcgcggggctccagactcgaaggtggaagacacatgaacagcgctaggcaatgacattcatggtgctcccgaaaaagtggagaatggaggattgccctanagggtccacacttatgcaatcaagaagcttagctccaaactctttgggtggaggataaatgaacagcgcttggcaatgacattcatggtgctccgaataaaagtggagaatggagaattggcgtatagagctatgcaatcacattcgcggggcttcagactcgaaggtgaggacacatgaacagcgctaggcaatgacattca

SEQ ID NO: 231992 - DNA, 347 bp, Glycine max
aacatatgtgctacagttggggagaccacatgcagcccttatgtaccatggacacccactctgtcatcacgcgctgactcatgaatgtctacacgattagccttctgtgagcatgctgaacatgcttcacagtgcttttctacgaggctcctaccagcgatagatgctgctggatgatatagactcgtcgtcaccctcctaagacttcatgtatcgatcaaccgggtacatgcaccatggacaaagcaggaccacttcatccgacttctctgaccaaatgcacgatcgagtgaagcatgatgtcatagaaagcatggggacaatacgtctgcaacgggtacactata

SEQ ID NO: 231993 - DNA, 300 bp, Glycine max
  unsure (1)..(300): unsure at all n locations
caattagactactaagaaatcacgaagaaaactcaatacttgatatcctccatatcaatccttttgagcagcagggacttgcttccaggtggcatatgtcacgtcgaccttatcacgagcaacaatccccaaatatattcttaatttcttcttggggggaccgtccgccttgccggtagcaggattgacgttgaccacaggtctttctgccccaagtggtctaatggcccatgatcgtaaccgtgtcaccttgcgtgtncgcttcaacgtaaatggagacgctaatgcgtctgcgggagg

SEQ ID NO: 231994 - DNA, 439 bp, Glycine max
  unsure (1)..(439): unsure at all n locations
catgggactaatcgtagaagcttcaaaagacaatttagatttgagaattcttggcttcttgagctatacatggtcaatattgttgatcttgcatgggaaccacaacaaacgagtgactttattcaaataagatttcaataccaggaccaaattgatatatgtaagcatgaattggagtagagaaagaattcaaatgatgatgttaatggtgcggcctatttggaaacaaacaacaagttatgtactcttattgcgctagaagaagcttattgtagatagaggtccaaggtgttcttgtgacaccctctacctcgacatacatataaataagatagacatatcaaaatgtgaaatntaattaaatcaattatattcagatcatgtaaacaatatcacgtgggtaaaaatgtcacattcgcttcactttatcaaataaact

SEQ ID NO: 231995 - DNA, 375 bp, Glycine max
ctcgacacaggtcgacgtgtaattagtcataactcttgcagagtcaaaatggactgtgtttctttctctcatctatcttctgagatacctgtgaatatacgatgaattagcattttggcagtgtgaatatcaattcatgagcaacatattgcagtatacagtaacccacttgttattgttatgccaccttttatctaaggcatgagtggatcttttatcaacttctggcctttaactcttcgggaaaaataaccccatgagccttatctagcatatttagtcccaatattcatctacacataatcctatatattagggaacgtgatataatacatctataagaaaagactaatatctatgtaaagtgaattcatt

SEQ ID NO: 231996 - DNA, 210 bp, Glycine max
aacctccgccccaaaggcgaaaaacgggttgggaagggtttcctaaaaattcccaagagcacaatccgcccttgacatattgattttctttaaacgggaaaagccatttaaccctgggggtacaaatcggacaggaatgtcatttttcccccccccaatttgcccccatataaaaataactctaaaaagggtagagacaactcccctttt

SEQ ID NO: 231997 - DNA, 429 bp, Glycine max
  unsure (1)..(429): unsure at all n locations
acaattaattaaaacttcaaagcaatctgctacaaggtagggcagggaatgggaactaatcaatgagtacgatattaatttgttgccttagacaagaagacacactaggtggttgtgatctatggtgtgtaaaaatagcaactatgtctatgatcactgatggctatcaacatgcatgataatagggagaacaatagacaataggaaatgaatctttattgtgttaataaaatgtaatttgctcttgtattatgatatgctagagccatttctacatcatnttcactttgtaagatgttttctatttgcttcttaattaaagatgagttgagatccttgtgggtgcatgaattgcagccaatatattctcaacttgattagacactaatatagaaatccaaccccctcatttatgtttggctgtgattc

SEQ ID NO: 231998 - DNA, 172 bp, Glycine max
attagcttcgatatcattggttggtaaaaatggtgggagttgtgtctctttcaatgtctgaagaatattctttggttggtgtcgcaacctacccttcggcgggagggtgacgtgagactcacgggtacgttttccaagggaggaaaatgcacggagtcgtcaccagatgtta

SEQ ID NO: 231999 - DNA, 300 bp, Glycine max
gagaactgcagacgagctgatcgtgaatagcagagcagcacgtaggacaaagacaacaacttactcattatgttacatacattgccgaggaatcctaccgaaaggttgaagaagaacggatattataaatggaaagaaaataactcgaggaagtgcgccattttatttatcaaaatccaaccatgaggacaacgctgatctttaagaagggtgcatcgttatgatataacgagaatggaaagttagttagcatagctagactaataataagttagttaaccacaggcggttatcatatat

SEQ ID NO: 232000 - DNA, 329 bp, Glycine max
ggatttgcgccctctagattcaaaaaactcaacacttgttcttgcgctggaaggcattctcctctatatgagaataggtagtttgagatgcttggcgagcagcaggtgtacccattcacttgtgagcaatgtacaatctatgcatatctttggtgcatttggttcacatcaaattattattggatagcattgtgtataactgtatatggcctctcaaatgtgttcagcatctgataactttttaagagtgtgcttcgctttttcctatgcttaagtgatcccttatcctattgtcttttggacttacctgctctccttctaatagatat

SEQ ID NO: 232001 - DNA, 405 bp, Glycine max
  unsure (1)..(405): unsure at all n locations
cttccgaaagttcgtctctgaaactaaggctaatacttcatctaccgatctctatattctgggtatgtctnctcccaaatccaaagtgtactcactctctcttctttttttcattcaaacaatctgtggagggtttcttctaatctgggtcttttcttttattctactcggtctctgtcgaaaatgctgggggcgaaactcatgggttttcacgtnttccacagtcttggaacgaaaatggcgggtgtacaaaaattgagattatttgcttccagtttctgtgggagccaaatcttaaatgagatatggggattctgaaattcgacaacttgtcttctaactctctgtattgtctactcatatgaacgtttgcttttgaccggcttggagtccgatcactcgatt

SEQ ID NO: 232002 - DNA, 394 bp, Glycine max
  unsure (1)..(394): unsure at all n locations
ttattggtgaccacagagtggtacttggagatatgttcgcggtggtcatgatactctttgggacgttaggtggggtgctattgnctaaaaccaagcttgaccaatcccgaccctacccgggcatattcggtcagtgagaacctgtgatgtatctaagcatgcgagctcctggcagtcagcatataataggaaaacaataccacaaagccaggaggcttgtggtggctggccagctgtgaattttgtgaatatgtggattgtggcctctggtaatcgattaccaagggtgggtaatcattacaacgtttatattgaaacacgaggtatgatgtctctggtattcattaccagggatgaatctataccatgcttgaaacgaattcagaagctaagg

SEQ ID NO: 232003 - DNA, 446 bp, Glycine max
  unsure (1)..(446): unsure at all n locations
actcacccttgaggctggnaaactatataacaatacgaaggttccagtttatctctctctcctctctctcccctattgtcgttatttagttctaggctttttctttgagacattattttttcgttttgcaattctagtagcaataaaattttgttcttcaatttataagttcgttatctattgattaatggaaggctaagtccccagcattgctttctcttgaagatctagcgcacgtttgtttgaggttctataattactgttaaatattgttcagtctctccccttcactacttactctaaatttgttgctactaattcatgaatgcttagcgcttgattaattagctctgcgcttaatttacgttcatgcttattgatcgtttatgagtcattggtcgatgtgttgctcaatcacacattgaatgccttatgttaaattacac

SEQ ID NO: 232004 - DNA, 437 bp, Glycine max
  unsure (1)..(437): unsure at all n locations
gcttcttacttgatcctggccatctcatggactccatctctcgtctcaaggtccaccttcatgttttcctctttctaatgagcctggaaaaataaccttgtcatcgagggctccatgacttctacatggatcatgtcattagtgccataagtaagatgaaaagaagtctccttactgtttgtttgaggccaacagtggtaggcccatagtatgccggggagtttcaccttccataggtccttggattggtcaagtctcatgcacaaggctntaaggataatcctattcgatgcttttgcctagtcgttnttctaacgatgctcgacagaggttatgaaatgcttaacgcctaaccttgantaggaatcttcgtangtttgggccttgaattgagtgtcattgtccgtgacaatggcatangaagttatacctacata

SEQ ID NO: 232005 - DNA, 480 bp, Glycine max
atgcctccctcgttcaaccaccaagtgatgatgacttttatcgaatcgaaagcctaaaaatgcgaggaaaactagagagaaggaggagactaatcacctcacgcatctcacattctagtaattcactttgggttcgtgttgctgatgtgattttgggaattaaggatttgagggtaacaagaagatatgcgtttacaggttccagggagagggagaagcttacgaggtcttgggaaattgttgaggtaagtttttaggtcatcaataatagttacaaggataattactaatgagggttaaattccatacacatattaaacaaccaattacataatgacacgtgatagtcaacactttttctaaacagtcaacgtccaatatttgctctaggggattcagatagtcaatttggagaacatgggaactctaatagtgaatttaaaaatagggggaccgatttatgagtttggaaaatacgac

SEQ ID NO: 232006 - DNA, 467 bp, Glycine max
gacaagactatacgatgtatcttccttgggtatagtcttatctctaagggctactgtgtctacaacttgcaaactaagatactcgtcatcagtcgagatgttgaagttgatgagtacgcttcttggaattgggatgaagaaaaagtggagaagaacgttcttatacccgctcaactaccacaagaagaagctgaggaagaagacccaggtgaaccaccttcacctccaccacaacaacaagatcaagaaccatcatcaccagagtctactccaagacgagtaagatctttggtggacatatatgaaacctgtaacttggccatacttgaacctggaagctttgaagaagcgtcaaagcaggaagtatgagtcaaggcaatggaagaagagatacagatgatcaagagaaacaacacatgggagttagtaaattgtccccaaggaaaagatatcattggggtaagtgg

SEQ ID NO: 232007 - DNA, 397 bp, Glycine max
gcggcatgcaagcttggtgatgcgtgtatccattcccggataccgtgcatccatggcaatcattcgactggcgaatgagtcaaagcactcactaacgaaggtgtggagtccatccaacctgtcaagaatgttgtgcataaaagatgaagaatcatctccctgggaggcggtgatggagaacggtcttctgcggcctatgctggtgcgtccttcttcacccaagaaccattcctctctttgtagtatccaaaagaggagaccacatttgcaccaatagagaaagatctcttgactttaacaaagggctcagagtcaagaaaatgttgtaagaacaaggtgatcaaatgatgatatgaaagtcgatctttgatcaccatgccttatgcatgcgatatct

SEQ ID NO: 232008 - DNA, 469 bp, Glycine max
  unsure (1)..(469): unsure at all n locations
ggagtagaaacatgggaccaactcatnnttattcattaaggaagtcgtatctagtcaaggtcttagagaccatacaagtttcctaacgatttctaattatgtgggccattaagtctatcatatgctgacaatagccgagaagcccatgaatctcttcgggggcggagtaagtgtctgccatcgccttggccttggctaacaatcggggaagttcttgactcccgttcaaggtaagagcaaaccgatccatccacatggttgcctcttggtgtaaagagtcgatcacccttcctctaacctctctttccgcgtatacttgggcatattcgtacgcaatcctatgctcgtgggccgcggctagacctaactcttcttggtacttggcgatgatagctagcatgttggtctccgtctcgcataaacgctgagacacgcttcttttggaccttgacacgcaactaactcctct

SEQ ID NO: 232009 - DNA, 389 bp, Glycine max
  unsure (1)..(389): unsure at all n locations
atacaagaatgaagctttgatccacttgttatacaagtggcctcaaatatcttaagaagggggggggttgaattaagatattccaaactacttccccaattaaaatctatttcactttcttttcaagttataaattcccttaacaatgaacttcttaaatattaattcanataaaacaatttgaatatgaatataaagcaataataaacaaagaagattaagggaagagaaactgcaaactcagatttatactggttcggccacacccttgtgcctacgtccagtccccaagtaacccgcttgagagttccactatcttgtaaattccttttacaagttctaaacacacaangacaatccttcctttgtgttagaatcctttacacaag

SEQ ID NO: 232010 - DNA, 440 bp, Glycine max
  unsure (1)..(440): unsure at all n locations
ctaagctgaagcgtgtagtgtggacgagncagtcttcctacttttattcgttgaccacagagtggtacctggagatatgttgcgggggtcaggagacctttgggacgtcaggtggggtgctattgcccaaaaccaagcttgaccaatcccgacccaacccgggcatagtcagtcagtgagaacttgtgacgtacctaaacaggcgagctcctggcagtcaaccgataaaagaacaaagaccacaaagcaaggaggcttgtgtggtggctggccaactatgaatcttgagtgatatttggaatatggcctctggtaatcgattacgaagggtgtgtaatcgattacaaggcttaaaaatgaagacaggaagttaagatggcctctggtaatcgattaccaagggtgtgtaatcgattacaaggcttataaatgaagacagg

SEQ ID NO: 232011 - DNA, 436 bp, Glycine max
agcttgatgaggaagttgcccagactaatgtggtgataaagtttattcttaagtcggcatcatctaacggccaaatgtgatattctcaagaaagcatcagtaccggggggattctttatgattcagacatttaactttttcccgtaaacctttttattctgtacctcaaacacatcctgatgtgaaaatctttatatgaataaaatgagatatttccttttatctattcaaactttatcttcaagtcttataatgcattctgattcgccatgcgtgtgtgtgtgcgtgtattctctccatttgataagactgactaatgctttcatgtaatatcttattagtatgccttcaactttaccattgtgttgtttgacacatcaaaaagggagatgttagtcatagactatgtgcctaagacaatatgaccctattaatt

SEQ ID NO: 232012 - DNA, 433 bp, Glycine max
  unsure (1)..(433): unsure at all n locations
gaatgcatgtatacatgattttgatgatgtcaaaagaaaaatcacacaacgcttattttgcttcaagattaatacaagatgtttcacatacaaagccttgattcaagatttcttcaagatcaagccttgcctcacaatgaaaggtttcaagtcattcaaggcacatgtaatcgattaccaatacatgtaatcgattaccaatggtttgaaagtgtgtaatcgattacacatcatatgtaatcgattaccagagactctaaacgttgggaattcagattttaaatgaagggtcacaactgttcaagacatacaactgtgtaatcgattacactaactctgtaatcgattaccagagaggagtttcaaggaatatcgccaacagtcacatcttatcatttggattctgaatggccatcanaggcctatatatatg

SEQ ID NO: 232013 - DNA, 415 bp, Glycine max
  unsure (1)..(415): unsure at all n locations
ctcacgaggtggaggttgagccatgttctcagtatgaaaattagtagtggaatgctcaaaatcaaaatattcagaatcaccctcaacagaatgctcaagatgcacagaatgaccaggatgcacactatgcctaactaatctatgaaaggttctatctatttcaggatcaaagggttgtaaatcacctggattgcccctaatcatgcactatatgcagcaaataatgtgtttctcaacaagcacctaacaagggggtaaaactacaactatactcaaacgatatcaaaatgagctgaaattntgtgagaaaaaccctaaaatcatgaanagatagcacanaatgttggatcacgtggcctcgaaatattaagaagggggggttaattaattattaacgacctttactattaaaaat

SEQ ID NO: 232014 - DNA, 364 bp, Glycine max
  unsure (1)..(364): unsure at all n locations
cagccccttatgcacttctctctctctcgaaataactgaggaaaattagttccgtgaagaagatccaagccgaggcgcttccgtaacgtttccgtgattaattacgcgaagattctcgaccgttcttcaagattcatcgctcgttcttcgttttcttcagtcttcaacgggtaagtacctcaaaccaagcttttcaattcattctatgtacccgtggtggtccacatttggtttcatgtatttttattctcgctttcatttactttttatagcccctnttgacgtgcttaagccatttatttaagtcatttctcgcttaatataaaaataaaataaatttccaccgatcgtttgaattgtatca

SEQ ID NO: 232015 - DNA, 485 bp, Glycine max
  unsure (1)..(485): unsure at all n locations
cttaagtcacctgcggcatgcaagcttcttatataatacttagaattgcgggttagaatgatcattctccttttcttttcaggaatataatcaattgaacattctgaaaatccacgccttacaaaccctgtcaaaaagttggatatccttttatttagacatgcagccatgaaaataacagagcactaaaatgtagggccataattgtatacatcacacttcacaactaattctttcaggaattccatgcatattaaagtaccagcttagcaattccactacacttgaatggtaaattttgtcaagagttttntagaaatggaagaagaaacatgcaaagacatactaaacattaaatggctaaaaccataatttgtgtccaagaatgagtgagtatgcagtaactaatagttaanaatcacattgattggagacaaggctttcatgacatgcattagggaaagtacttaccaatctgcagtacg

SEQ ID NO: 232016 - DNA, 468 bp, Glycine max
  unsure (1)..(468): unsure at all n locations
ctgggctctcttctctggagctactcagacttgtcaccttagaagaaggatntgacaagtgtgttcccatgttactcgattcctcaacttggtgatgaaacatgttatctaaagcagttgacaaggactcagttctactacactcaattctttgtggattctgatcaagctgttgggaggatggatactgaaccatcttccattctgattggcttctgcatcttttctgcatcagaacggnttcttgagtagtacaaggttnttggttaactgtagcctcgcttctagttccatcatccatctctcttttccgcttagcttgttcactactaagaaggttattgctctccataattctttccacgtcatatcttggtatatcacagtttgaacagcattaactcctctgaattaatagcncaatgtataagctcagctgcttctcttgtgacctaaagtttatttaat

SEQ ID NO: 232017 - DNA, 424 bp, Glycine max
  unsure (1)..(424): unsure at all n locations
agctacctaggctatagagagaagcagtgtgtatcacttgttgtaacnncgangaacaagagacttgtgagacacaactcacagttcaacttctttccctctnttactccttcaatttcatgctctcccctctctctttctctctctctctcttttctccattgaagcatcctctccaagctttttatccaaggtacattcttggtggcgaagctccttcttcgatggcttattccctagtggatggcgcctcctctcacctcttctcctttgttgttcgctgcatctacatggtggaaaatcaccattgaaggacctaattgaagctcaaagactcatcctccatagaagcttcacaagcaagcttctgtcaagtggtattaaagcacaagagcctcaagtaggtgcttcttatacctccatt

SEQ ID NO: 232018 - DNA, 476 bp, Glycine max
  unsure (1)..(476): unsure at all n locations
gatcgctactggcagcagcgagacgcaggcggtatctttcattgcatcagtgatacacttgtatcgccattggtagcagcggaacataagctgagtcacgaagcatgtgtcgctattcaaactggcgagacatgctgactaagcatgtcgccattaggactggcgggacatgccaacgtgggcagtcccaccattggtgcctgcggaacacataagggtggtacgtttgcatgtataggtttgcattgtttcagtctgaacagatgggtaggcttgcagtatgggttgcagtgtgcangaatcactctgaaaaaagatgggtaggttgcagtgtgcagataggtaggctttgcagatctgaaaagcttgcatgtgaacgtcaaaaatttgaacgttgggtacgttctcagctataataaaattgcttgagaaccttgattgctacgcttgcattcaattctcctactgagtctctt

SEQ ID NO: 232019 - DNA, 298 bp, Glycine max
  unsure (1)..(298): unsure at all n locations
ctaaccctatttacttcagctctccaagatctaacagtgtttattgcttcaatgccggacgtgaacggccatgaacctggagtttctgagagggaaatatctccttcagaccatagcatttttccacttgaagatgttctaagctgggtaccttctgaaggatatcaaaaggcaagtatctttcttaatgccatcattatcanatgatagatcaagacatagtaatttgaaaaggaggtcttgtggcaaacgtgcatcgctcaacacataatgttttcctcattgagtgtcaagctct

SEQ ID NO: 232020 - DNA, 461 bp, Glycine max
ctaaccttgatgagagatctcgcgcaacattggaagatgattttgtttattatgaagctttcttgaagggagaaactaaactgttcaatttccattgtctgacctcattaacattatgggaattaccagagctgaagtatttctacaatggaaaacactcactagaatggccaatgctaacacaactagatgtatatcattgtgacaagttgaaattgttacaactgagcatcatagtggtgaagttgcagatatagagtactcactttgtacttcaattgatcagcaagcctgtttctcagtcgaaaaggtaccaaacagatttcctatctagttttcatattatgctcgcacgtctcaatatgcattaattattaaagaaattgctagtcacaaactcttttggcataccatgctgatcatatataatacacatttactttcaataatgtgacgagcat

SEQ ID NO: 232021 - DNA, 309 bp, Glycine max
  unsure (1)..(309): unsure at all n locations
accggacncaatcagacatccgagataaaacgttttgccgattgaattggctcacaagctcaaaatataatctcgagcgtctcgatttatttcgcgactcattcagacatccgagtaataagttattgtcgttcgaattggctcagaggctcaacattcaatatctagccgcccgatatatatcgtcactgaatcggacatccgagtgaaaagctattgacgtatgaatttgctctgagcttcaacattcagtttccagcgtctcgatatattacgggactcaatcacacatccgagtaaaagttattg

SEQ ID NO: 232022 - DNA, 437 bp, Glycine max
  unsure (1)..(437): unsure at all n locations
acactaccttgagccatctaacgaaaaactggtacttatgttgangagctcgtataatcgacacgctcaaattgatgttgaacttaagcctattaaacaacaataacgtttactcggatgtccgattcagtgacgtaatatatcgggacgctcgaaattgaaagttgaacctctgagccaactcacacgacaataactttttacttggatgtctgattgagtaccgaaatatatcaagacgctcgaaattgaatgttgaagctctgagccaattcaaacgacaataacttcttactcggatgtctgattgagtcccgtaatatatcgagacgctagatattgaatgttgaacctatgagcctattcaaacgacaataatcttttactcggatgtatgattgagtcccataatataacgagacgctcgatattgaatg

SEQ ID NO: 232023 - DNA, 373 bp, Glycine max
  unsure (1)..(373): unsure at all n locations
acagctcgaaccacacctgccgccaagctaacaagtaataacttatctcttgcggcgtcaaccttagtattcatcagtatctaatatctttcaggttcctttacctttgtaaaatttcaaatagttcttttttccggttaaatatgctcggaattgatattggtttattacccttgtttttttcttcatcttattcccccaatactagagctgtaggtttccacttgtaattttgtatcacgcaaagaaaaagaanaagaaaagcaatgagccaatatcttccaaatttaagtcttgctattatcatatttatcaacagctttgtaatcttatagcagaagtttctcagcatggctgaagttatatattatac

SEQ ID NO: 232024 - DNA, 396 bp, Glycine max
cgccatttctgttttaagagtagtgttccactggtaaaactaactttccaaactgttgccttcgcaggaaatggcccccaggaagcttgcctcaaagaggtccaggaaggataaggcagccgaaagaactacttccgctccggagtatgacagtcaccgctttacgagcgctgtacaccatcagcgcttcgaggccatcaagggatggtcgcttctccgggagcgacgtgtccagctcatggacgacgagtatactgatttccaggaggacataaggcgccggcggtgggcatcacttggtactcccatggccaagtttgatccagaaatagtccttgagttatatgccaatgcttgtgcaacagaggagggcgtgcgtgacatgagatcctgcgt

SEQ ID NO: 232025 - DNA, 227 bp, Glycine max
gtccactacctccataaaagcttactacatcggttatttgtagtatacaaatatgttgttgatattgtttaccactcatcacataaagtgtggactgccatgaagacggtcatattggaccatctaataatgtattacattgtaagactggttcctacccacgaccggcttataatataccacattctaagacggtcttaacgacaaacttcttaaaatgagataca

SEQ ID NO: 232026 - DNA, 434 bp, Glycine max
  unsure (1)..(434): unsure at all n locations
gatgaggaagtgatgtatggtgatatttcctcgctttattgttgaccacagagtggtacctggagatatgtcgcggtggtcaggagaccttgtggatgttaggtggggtgctattgcccaaaaccaagcttgaccaatcctgacccaacccgagcatagtcagtcagtgagaacctgtgatgtacctaagcaggcgagctncttggctgtcaacagatataaggaacacagaccacaaagcaaggaggcttgtggtggctggtcagctgtgaaactagattgatatgcgagatatggtctctggtaatcgattaccaagggtggggaatcgattacaaggcttaacaatgaagacatgaggctaagatggtctctggtaatctactaccaccgcgtgtaatccattaccacgcttgaataccaggtcacgaaac

SEQ ID NO: 232027 - DNA, 329 bp, Glycine max
catgttccttacagacctgaaaaaaatatttcagtaaactaccagtatcttgcggttaccgcttaaaatatgataaataccattttatttttactcttcttgtttagaatagatggttccttttgaatgatgaaacaattctataaaaatattttgatcaatgatcaagattgagattttcaaaacaatttttctaaaccaatatttaagcgtgtagcaataatactaaacgtagtttcggagtgctgttttattatttattttgaaaactgatcttagaatgcaaatcaaaacaactttcaacactacttcagaaccataaggttggg

SEQ ID NO: 232028 - DNA, 309 bp, Glycine max
acaacaaaaagtctatgatcaaagattaacatagtgtgcgaggtgtggagttggactttattaaaataataagattctgattatatgcatctctgatatatcttaaatctcttagattcactttagatttatctcttatttgaaaagatattttgtcttgggaaacatccttttttatatttatctcaaagataagattttcatcctaaataaatcaagctcatattttcttagaaaccaatagagtttaccactaaaacttctcaatgtcaaagtcatattgatccatctaattatggataaattgcc

SEQ ID NO: 232029 - DNA, 409 bp, Glycine max
  unsure (1)..(409): unsure at all n locations
gctccgtcgactgggggtttattcttacaanaacagtttctatagccaanatgattgatagtaagttggagtgcacaaccttttcatgatctctgcagcatataatcaattatgtacagggttttcgcttctattattagttacttagatatttattcacattttgtaacaattggatgtaattattaatgttattttatcaataaaacggcacgaaacaggagtagcttttatagattattttactcccttcataattctatgcatctttgtacgctttattttctatgttgtccattactcccgtgccagctgaaatgctctggtattctgtcatgctcgtggacctgtgaaaactttacataaaaaataatcaagaatcaattntatgaaattcattcaaattact

SEQ ID NO: 232030 - DNA, 446 bp, Glycine max
  unsure (1)..(446): unsure at all n locations
gcttaagttaacgccgtgctccataatttcaaatttgctctctcacaacatttcttcttttcatttccaaatatggtttagcagtggaattccagtgactcagctgcacaatatnaaaattggaataatctcaaacacatttcatgcacatacacaaagatgatataccgatgaaatcgattatgaggcggccatcggagcatcgttcggtgacccggtgaagaactttgaccgtatggagggaaaaagcagtgatgggaatgtgggtgggagctaaaatacaagttgccagtgtctgcatatgaatcaccgaagctgaagattgatttgtaaggacatgctgccaatatggttgctgaagaataaactaccacaaaaccaacaattgctatcatcgctctcacaaatgacctcattgtcgtactacacatttgaaatataattaa

SEQ ID NO: 232031 - DNA, 321 bp, Glycine max
  unsure (1)..(321): unsure at all n locations
attccttcggtttcttcttatcgattatggggtcccacattcaatgtatttcttcttccccctagtagtatatgccaaagtggcatatatacaaaataaaatctgatcaataatgtgatcaacgtacgccaatcaaataggttctaaacacatcttatgactgcacaataccatccatttctttcccctctccctcataaatgtgttatacatataaacacaaataacatgctaaatttcatcttanatgaatngacattaattaagtgaagtttatacaaacaactagcactctataatcgagatagacaatataagaat

SEQ ID NO: 232032 - DNA, 409 bp, Glycine max
  unsure (1)..(409): unsure at all n locations
tcgtatagcttctctaaaagcttggtttcctaagatttctcatgtcctcttcaagntgcttttcattttgttcattttaatatctgcgcgcaagtatgtggtggcatttctgtcatattaattgctctgttttttattacttggtttacatgcctatcgaatggcttaaattatgaaacagtggataatgtggtaatagaagacttataattgcagatcgtgataccccagggactaaaatccatttagacaaataataaattaacagaacaaagccactgtcttagacctttgtttcattctttatttgtttgtaaattgaatttccttggaggaatcataattatgagttagagttggtgctttgtaactgagagttcatttcttgcctattagttgacttatgatg

SEQ ID NO: 232033 - DNA, 472 bp, Glycine max
  unsure (1)..(472): unsure at all n locations
cacagaagcagctgcaacctgcgctagcaccatctacatggcaggcttcaactcttgcactcctttccatgtgtatntcatctttattgcctagctgctgtaatatactggtttgaatttgaataaggaaaaagagaaatataaggatatatagaacatgcatatcattgccaaaagccaacacagcaatgcatatatataggaaattaataatactcgatcagattatttctaggttaaaaaagcttgcatttcgttttagtttactataaataaactaaggacaaaacttatagtgacgcatctcaagagaattaatttgtcttatttttcaataaaaagtagagttntatggngatttaaatattttctcgttgagttatatggngatttaaatatattctcgttgagtaatgtaataagttatattattattattattattacactactacaaaaacaagaattaaca

SEQ ID NO: 232034 - DNA, 401 bp, Glycine max
  unsure (1)..(401): unsure at all n locations
ttgacatataccattagttccatagctgaagtactaatggtcaaataccatttcacgcaacctgaacgtcttatgcagattctcatcccacacatcaatcccgtcttccaaaaatctcctcaagtcttcaattaatggacttagataaacattaatatcattccttggctgccttggacccgctaccatcatacaaagcattatgtactttntcatgatgcataaccaaggagagaggttgcaaatcagcaacaaaacaagccaggaactatggttagtgcttaagtttctaaaagagttcattccgtccaaatatagaccaagccttagattntttggctcgtccccaaaatcaagatacagacggtcaattgccttccattgcgaactatcatctggat

SEQ ID NO: 232035 - DNA, 445 bp, Glycine max
  unsure (1)..(445): unsure at all n locations
tttattagaantaacttatacataagttgagccaataaaacaaaacttatgcacaagttaaaattaacttatgcacaagctaaaatcaatttttagataagttaaattagaaaatttctataaaaattcaagtgcataaattgatttgaagttatgagagaaacttaatttattttaagatgagaggacctgcttggttaaaattntatcaaaatagggagcagaaaacaatatattgggaaactcaatcagttactgtgacctanaactttgtacatgggttcccacttcccacttagcctacctccaaaactttgaggggcatcaactcaacctcaagaggtgagttaagggttggtgaagttgaacaagtacctttgggctcacaaatcanagaatgaacaattcccatcaatataatctgggaaatagtttgtctaataat

SEQ ID NO: 232036 - DNA, 190 bp, Glycine max
aaggtttacatgaacttcttaaattatatgaaatgttattaatatgagagacttaaaatcatgattcttaccaaaatttaaagctaaataaacactcattaatatcgacaaatattattgcaacacaaaaccttattatcacattacgtaataacagtagaaactggacaggctaatataagggggatat

SEQ ID NO: 232037 - DNA, 453 bp, Glycine max
  unsure (1)..(453): unsure at all n locations
tttacctattaatcnttacatcctttcaatgcttgaaacaccaaactttgtcaaaatacagctctgttgaaactttctagatcaatctaagcagaatctcctataaattcatatgaggctataacttcagatgggttcaacacaatcatgataagtgcatgcctctagttcatgcatcacaagtcacaaatcacaacctaaggcaatgcattccaaaagatttacatgggattgtattagaaattgctnttatctttaatcatttatttttaaccaaacaaatgaacaactcaatcgtataaaagaaaactgtacaaatttctggtctatatagtcagccaattaaaatcatagtcctttaatattaaaaaaacatgcaacaaaggttgcacacgtacttgntatatttgtagccaaatgagtgaatgaaccacattgttataagtttaaaca

SEQ ID NO: 232038 - DNA, 435 bp, Glycine max
  unsure (1)..(435): unsure at all n locations
gcttacaattttctcttatgtcaaacatgttgcttagagaaagcgccaactcgatgaagataggaaaaaaactatgaaagcaaaaactaagaaactattataaggccatttcatttgtgaagtagactataccgcttggttagctaatatggtgatgggcgaaaaagcaaccggttaatagaagatatatgtggactacaccaacctcaagaaagcctaccncacagatgcttatcctttgcttagcatcgacaagttgatcgatggagcatgtgggttagaattactcaatttttagacacctacttatgctacaatcagatccaaatggtcttgcttgatcagaaaaccaacattcattattgaaggagccaactcctgtacaaggtaatggtcgttgactctaaaatgcatgtgcacttaccaaggctcata

SEQ ID NO: 232039 - DNA, 416 bp, Glycine max
  unsure (1)..(416): unsure at all n locations
gggattgcatttaggcaaaatcacttcttgacgtataatgtctctgatactatacctgatgtacgatatacctgcctttntattactttattaatctgcccttaataaaacatggacatcagtgtttcatcgagtctctgggtgggacactagcttccgcgacctgtgagctactaatgatagccctgccgttggaaaaagctcttaatacacgtggttcttgcgtatacttgttaattgggtagtctcatctaataacctataataagtgttgagactagactttgccagttaataaaataattattctctatattgctagccgtaccagatactcttcttacataagagatcggaagtaccataagggggaaagtgtttctgtcctctgtttgaccaacttggttttgtcccat

SEQ ID NO: 232040 - DNA, 383 bp, Glycine max
ttatataaatatgaatctattaaatattaattgagtggtattattaatattcatagaagaggtttataataccaaagtaacaacttacaggttaatattaatcaatataattcctaggaacaagacttataattggatataaatgagatgattataatttaatgtactatttaagaattgaaataaacctgatccaactctgaacatataaggtatgttaattgcgccaagagcgtgtccagcattgaactcttctggagtcctgcacacaaaacaggggggagaagagataaggttttggctgattctacaacatgattcccaaaaagcttatgtatacgttactggtggtaagaactaatatttaaatttttacctttaca

SEQ ID NO: 232041 - DNA, 475 bp, Glycine max
  unsure (1)..(475): unsure at all n locations
gctgctatgacgtgacacatagatactaagcctttgacttagctctcggtaagtgttatagtcaattcactatttaagacgccacaattcaactttgactttcatctcaagttaatcaacacatcaaatgcaagcaaagatcactaatgattgtcttggcttgtaatggggtctagctaacaaggaaaattggtattggttctcctagatattcaatggtaactcaaaggaaggacatcatttaatctattcattggattttcattcacttgcttccattccttgctacccctaattgttcaattagattcatactttacttgccctcaactttggactttatttctttactatgcttctctctattatttatctagtattttcacattattcattttcaaattctcaagagagaatgaggactcttctttgtcacatgtagctcatangtaccctaactttgttcccttgagta

SEQ ID NO: 232042 - DNA, 251 bp, Glycine max
  unsure (1)..(251): unsure at all n locations
ctgcagctgcaataaacatcgactttcttccaggggattatttattggttcttaacaatttaagtcaatcacatatggcgaaaaattgcccagcacttaatgatattaatacaacctactacttaaaatatctaaattatgggtatatttctagactaaaatttaacttaaggcaaatatttcatctgcgccttatagattcatgatccttaccttnttagcccctatagttaaaagacgtggtttttaat

SEQ ID NO: 232043 - DNA, 296 bp, Glycine max
tgtcatgctctctaacatagttccaggtatacctacgcaggaaccgcgagggagaaatggatcctataggtgatatatgggctgccccatatcgaaggggctgcatgtgaatatcatacaagacatatatattctcaaagcatattttggctccgtcagaggtacgttgcttttaataaacactgtaaaactctttagtgtgttatgagattatttcaactgaaattgcatgactgtcaaatctgtcgcgtctcatcttgctggaggattcaatgtatgatcctcccgacattatt

SEQ ID NO: 232044 - DNA, 413 bp, Glycine max
  unsure (1)..(413): unsure at all n locations
tggttacttttttttaataaatgttgaaaatactttttcttaatttatttctacaaaaattaaaaggcaaaatgtatcaacacaaataaaccatagaatgaattatatagtctcattaataaacctattaatataaacattcttgtaggaataacaaaaaaggataatccatcaaatttaatcgtntttaagttacttaagactgtaacgttttatttaaattatnttttttttcaaaaaacgtcttgatctaacttctttaatanatagaccaagcctatcaagccatatgccaatcatttctcaataggtaatctgatttaactttaccccctatttctagttaagagtttaagataatatcatattttcttcgaatttggcattaccttgttattcacattatatacaca

SEQ ID NO: 232045 - DNA, 449 bp, Glycine max
ctattacgtgacacatagtaatactcaaccttctggtcaagcaccgacaagcatgtacctgcatgataatgtcttgtgacagtgttgactctgatggccaatagcgcgttgtgaggtctgcaaaagataagcgttttgaggagatggctttcactgtcgaccagatgatgaatgccatgaagatcaatgattgcgtgagcttgcaagagagttttgacaagattaactaacagcttgagaaggtcatgcgtgtcactgagtctgatagggtccccaatctttacatcaaggctctcgtgatgttggaagatttcttggctcatgccttggctaattcggatgcccagaagaagatgatcagtatcaacgctaaagccttgatctcaatgaagcagaatctgaagaacaataatacgccgtctgatgacttgataatttattgcagggag

SEQ ID NO: 232046 - DNA, 330 bp, Glycine max
  unsure (1)..(330): unsure at all n locations
tcatttactaatttatatacagncaatgcatgttttcttactgccattattctttggagcagttgaacttggagtggaagcagttatntagcattatactgcgcccacatgctaatatgagagtctatgtgaatcttactgttaaggagagaaactacactgtagacaagaaaataaaagacaagaaaatagaatggaaaacattgtgcccaaatgatgggtttgttattttcgtaatagcgagttgatctctggacaagatggaaagggtactntaggttagttactctaaaattaccttggttagttcatttcatatttctatgctca

SEQ ID NO: 232047 - DNA, 462 bp, Glycine max
  unsure (1)..(462): unsure at all n locations
gcttcttcttatctctgcaccatcaaccttatcttttcccatttttctgcttaaaaccttattgagtttgaaattctgcgactacgcgttgagcgcgtaaacgttcttagcacgagtaagtggtcgggcgctaagcgaaccatgcgtgctaagcgcccttttgcctaactgcaggctctctaagttgcttcttcatgttgagcggccattttcccactaagcgacacaactcgctaagcgagcttgaggcgctgagcacgaaccatcaggcttcaacttctttctctatcccttacctgtatatctgcaaaatacaatcatcaaaacaatatgaattagcagtntaagacacatactgccataaaattcggaggacgccgaaattctaatgattcacacnaaaagaagtaataaaatggagagatatgctaattcttattggtttaatacataattacttat

SEQ ID NO: 232048 - DNA, 256 bp, Glycine max
  unsure (1)..(256): unsure at all n locations
gaactcttgatactattaattcctgattccctttgagagattccaaatctttctgatgtatccttgatgttgtaaaatcacccacagaacaccataaatcccctgattgagtgggttttcagctggcttgacctgctcccacaatacccttttattntgaatatcacaaggggagtatatagcaactataattactgactgtgcttccttgagatanctccctgttagaagaatataaccgctaccaacaactctc

SEQ ID NO: 232049 - DNA, 409 bp, Glycine max
  unsure (1)..(409): unsure at all n locations
tccatagtggactgagctacgtatgtctgtttccttgacttccaagaaacaactccaccagctatgctaaatatatagtcgttggttgctttggaatcatctaanagagtgttccaatctgcatcgntgtatccttcaagtacaactggaaaccttttataatgtaatccaaggtttatggttctcttaaggtatctcattaccctttcaatagcgtgccaatgctccatactaggtctactggtaaacctgcataataatcccacaacatatgttatgtcgggtctagtacaatcagtggcatacctaaggctgccaatgatacttgcgtactcaatttgtcgtatacctataccagtgctcttaaacaattctacacttggatcatacggtgtactagcaagttaca

SEQ ID NO: 232050 - DNA, 441 bp, Glycine max
ttgccgacaaggttatctttcaataggacacaaaaggcccatgaaagtatggtccacagcttcctcagctcggacaagaattgattaaaagcaagcccattcaattgatgtgctaccaagtttcattcctatataggagtattaacataagtaaaacgacaataataattaaaattcaaaagagatcataattacggaccttctgttgtcaaaattctattcaattcatagcaccctttggagttgacaggcaatgattcaacacctcttacaaccaacatcaataaatatatttgaaactaagatccactcctagtataataaatactttctattaaaaaatggagagcataaattattctgctataaggtaaactaattattattaataaacttatgactcacatatgcttaaagtttttgaaaatacactaatcttat

SEQ ID NO: 232051 - DNA, 411 bp, Glycine max
  unsure (1)..(411): unsure at all n locations
agcttctaatatccgaaacatgatattattgtgggtcttangcataaggngtctagttatgcatatttgtcaagtgtgtggtaaattatcttttttaaccattatattggtataaaaatgtttctactaaaaaatggtgacaatttttcattggaaaccttaaatgcatataagatgagtatttttcttttaatatgatttattctatacataagtgcgatcatcatttaaatgcctaaaaatatgtatttctttgattgcacttaacaaattcagatactagtgggtgttatttacgatgatcactttgatttttgctaaacacataagttgttgatgagtgttccataatagtagggatcgaaaacaaattttcaactctttgaggaatgaaagtcaaattttttttta

SEQ ID NO: 232052 - DNA, 402 bp, Glycine max
  unsure (1)..(402): unsure at all n locations
tgtgactgttggcatagtttctgaaaactcttcattggtaatcgattacaatgtttgtgtaatcgattacacagttataatntgaagggtcatgacttttgaatttgaatttcaagagtttcgttgctagtaatcgattacatgttgaaaattcaaattgaaaactcttttcaacaactatttctcaaccctgtcttctggtaatcgattacacttcctgataatcgattaccagagcctcgcatgtcttgaaagcactntattttaaggcaaggcttggtctttagtgaatctctgaacaagactttgtttgttgaggcaatcttgaattattcttgaagcaatgcttatcatttgagtaaccttgtagattcttcttgacatctcaaatcatgtcacata

SEQ ID NO: 232053 - DNA, 303 bp, Glycine max
  unsure (1)..(303): unsure at all n locations
ttatcaccgncggagaaacactctttatagtagtgtcataaacaataaataacataattcttaggtgagtactccaaccaatatgaatgtgcatcaaaccaagaagcttgaaattgttgacgattattcctttctcatgaaaagggatattctatattacttggttgatatggaccaaccttgagataaacacgtcgtatttcatctctttgatcaaaaggaaactcccacatcattgaacgcaatccaggatcttgctctatattaataacatccatatcttctacttcaattcttctacat

SEQ ID NO: 232054 - DNA, 299 bp, Glycine max
ttaggggttctattctattgcgtcgtttccatccatgactgaattattgacaaaacatcggatgtgaaccaaaaatacgtagccgtatatattgatctatattttactgccaacaacagtccaattctaccaaatcaatccatttaaaaaataataaagttattcataccacaattatgtaataattcttacaccttcattaaaactttgattgcgcgcacatatctatttttttcattacaataaagcacaatctgcttttcaaaacttaattatgtataggtacagtttaattttaa

SEQ ID NO: 232055 - DNA, 308 bp, Glycine max
  unsure (1)..(308): unsure at all n locations
agctctgattctgatcttgatgaagtttntcgtatttattatcncgagctttcaggttaaccatctgcattgttattaaatacctacctgaatacataataaacttggtgaaaatcaaagcgtagcaacattaacacattaatgcaattcttatgcagcctaacgtagaagttaccagtttatatataatcaaataattcaccaaaaattgtgcctcacttaatctcatttgtatgtgtgaatagagagggccggcaaccattagagctaatcattgagttggaactcggagctttgacttattgatc

SEQ ID NO: 232056 - DNA, 361 bp, Glycine max
accttctctacctgggccagggtttttataatacatgttgcggctcctcccatctatatatttggatatttcttttttcttcgtaaaggaaattatgctgtccactcgcgggatttaggaccttattcaacggaaggctctgctctatatcatgaacgttcacaagaaaatgttgctttattgtttacacttcaatttatttgatgaaacaagggatatacattcacttttaaggtggaagccattcaatcataactcatcatatattataaatttggtcaatcttaaaacaattatctccaggatattcggaaagtcattctatgattaaatgatgagataaaaacggtgtagatatctc

SEQ ID NO: 232057 - DNA, 443 bp, Glycine max
  unsure (1)..(443): unsure at all n locations
agctntatggatatgtgtattgaaatgtgaatttctttatccattttcgncncctctttaaaggtatgtataatattgactagcttacagtttatatagtttatccttatagtgcggcttgtgtttatatgcacattctaagaagatcttgattactatgatgttgtacatatatcatgtgatgttttattttagagttgtgcgttttagccattggcctttgaaatagaaaagggtggcaagttatttgataatcaaattaatagaagagtcttaaatgaattaaaataaagccttttgcttagatggttctagttccatgtgcggcggcggatcgtacatttatggtatcacggcagtcctgtcttttggaacaaacctatgggaataggtttgtatgtctctgttgcgtgcttggtggttattctggatcggatcttcca

SEQ ID NO: 232058 - DNA, 457 bp, Glycine max
ctacgctcttgatgattgtatatcccttatggatggtgtacgatgtgtatcgtgcgctttatgtttttcctatgtgacatgcagatgggatacgctgcatggaaacttggcaagaactctcaagcactcataaataccgggcgcgatgcgtgaactactattgcaacacaacgataacaagtgtcttgcgattggtggacaaaccattatcacatgtccagtcttatttgttcatatagcttgctacaccaacaacactatgaatctagccctatctatctaggactcggtcgtatagcttgctatataacggtgatgcattacacctcatgtagaccaataagatctattttattcattaaatagaattcattctttagaaatatgcgggggatgggtgtgaacttaactccaaagacatttcttaaaattcttaactacatggacaattatgaca

SEQ ID NO: 232059 - DNA, 445 bp, Glycine max
  unsure (1)..(445): unsure at all n locations
atgcaagctttgtgtaatcgattacactaattttgttatctattaccattgactgcttctgactcaatcacaagatgttacctcttcaaaaagggttctgactttatcacaattggctgttaagtttttctaaaagttataactcttctaaatggtcttcttggccagacatgaagagtctataaaagcaaagctttgatttgcttttcaagatactttgtacattcattcaatcaatcctttacaagccttgaatctctttgaacctcttcttcttctttgaccaaaagctttctaaatgtttttggttttccaaacactaaaaactcgngctattcatcctctcattctcttctccctttgccaaaaagaactcacccaggattaaccgcctgaattcttttgtgtcctcttttccctttccaaaaacaaagactacccctga

SEQ ID NO: 232060 - DNA, 407 bp, Glycine max
  unsure (1)..(407): unsure at all n locations
tcaatctacacatgagaaanacgatgatatagttgcacatattataaagtntcctaacaaaaattttcatgcaggtggaccttcttctagtaattctgacttaccgcagcctcttatcccttttccattcccacctagagcaattccaaacaaaaaaatggaagaagcagaaaaggagatcttggagtccttcaggacagtagaggtgaacatacctctgctagatgccatcaagcagattccaagatatgccaagtttctaaaggagttgtgcacccacaaaaggaagctcaaaggcagtgaaaggattatcatgagcagaaatgtgtcagcattaataggtaaatctgttcatcacacttctgagaaatgtaaggacccaggtactttctatataccttgcatta

SEQ ID NO: 232061 - DNA, 464 bp, Glycine max
  unsure (1)..(464): unsure at all n locations
gcttgatcaaaacaattatctaatcattcttatctactcaaatcatacaattgctcattcaaatcattctcaaacactcatttcatgccaaacaatccactgcatatcattttcaatcaattcactattcaaacaagcttttggtacaagcaaacaactcanagtgctaaaatttaaaacaactgaaatataaaaattgaaattaaaatgactgaacataaatcataaaataactgaaaataaacttaaatgttcaagatgcataaatttaaatgtcctgctcctatggttgctcctgtgcatgctcattaaggcccaacacctgagcaactggtgaatcctgagagataagttgttctaactcagatgctagtgcagatggtatggcatcattangtatgggtgttggggatggctcttgggatctgattgtagaagtctccctctcctgagccatatgcata

SEQ ID NO: 232062 - DNA, 428 bp, Glycine max
  unsure (1)..(428): unsure at all n locations
gtaggattatggggtacccatcacatgtggtactaggtggtgatcgggcgatggtgcacaacaagttntccacatccacaaatcgcgcataaacccaccatcccctgttgcccacctccaactgagctcacgtactcccacgtagcccatatcctcgtttctctcaacaccgggtccccataaatcctcccaagcttccccaacatccaggtaaatcaacattcaaacagcacaaactatcacagccaagaaaacaggacaaaggcagaaaactctgcccaaaacaccaacaaaaatcatagctttttctcacttaaagaccctagtaacatttccttcggtccaattcgttaaccgttggatncgactcgaaactttactggaagtctctagtacataaatatacattttgaccggtgggatctact

SEQ ID NO: 232063 - DNA, 241 bp, Glycine max
  unsure (1)..(241): unsure at all n locations
agcttataagacaaacatgacagaacatntttctctatctaattctcatgctaatctggttggcctattctttatgtagctttatgattatccaattgattcaagagaaaagtgcaccactgcacatccgcgtggtatcatggagtattatataaaacttctttccatcaccattcataagccaaataccgagggtggcaatatgtcattggaccattatttatttaaattaaattgattt

SEQ ID NO: 232064 - DNA, 347 bp, Glycine max
tcagcttaacttaacacaattcacatcaatttatcatttatttcacaacatcaattgtcctaagggattaatcaccaaaatacattccacaccctcacattaatcatgtgttaaaaaccacacaatctatgtacaacacaacatctcacgctcacacaattcattacacatcatcacataacaagtcacaaatatcattacacatgtgttatgcaatagatacactaagactcaatcttatatgcaatgtggtatcatgttaatgaaaaacctcatcgggcgcctaggagtacatgaccagacaactacacacttgttagtcaggtcactcttactatggtaaatca

SEQ ID NO: 232065 - DNA, 371 bp, Glycine max
  unsure (1)..(371): unsure at all n locations
agctttagaaggttgtcttcttggtgtttctacaccaatgaagntggcctaccacgccgccaccacgccaatggcctgtgatttcgtcagaggagggctttcgttgagggagaggacaagggctacagaggaatactcttttagtgtttgtttcgccttcaggagcttgcggctcggggcaacaacttgtttattagggttttgttgttgttggtgtctggtggcaatcattgggaggcagccaaagcgactaaggacgagaggggaagtggatgccaccgtctcgcgatgccggagcatggagaatgatgatgcgaacgacatggaaaaattggaaatggagaaaatgaatcactgtatggaattgaaac

SEQ ID NO: 232066 - DNA, 373 bp, Glycine max
  unsure (1)..(373): unsure at all n locations
tatatatgaaatttgctcgatcaaaatgaacaaccaattgttttagttattaattaaatagatattntaaattaactttggtcctattacagtctataatagattgttcattgttgtacaaccttgaaattaatataatgtataaacagaatctaggtccattgagtcattgntattgttgattttatcacccccaagtgttaattaattgagtaactgcggagagaagaaataagagacctaaaaacagagaaaattgacattattttatggttgaagagcacggcaaatgttgacaaaggagtctttgacaggaaaagaaaagtgattcatatgttcacaagatgaaagacaaggatggagctaacattgt

SEQ ID NO: 232067 - DNA, 440 bp, Glycine max
  unsure (1)..(440): unsure at all n locations
cgggatcttaagcaccgcggctgcagcttggacctttttaagggatnttatttattttcactattgaacaacaacttgttggtaaaaatatttcttttattgattttatgtcaaagttgttttttatatttttagtttttttaccatatagcattgttcaaagcatattttagtaattacattatgtctcagggagaataactctcattaagcatgactgacattaagctagcataaacaaaaatgggccaactaataagaccttcgtagttagggtgttgctaggtgcacccagcactattgctggtgcacccaacatatttcaaaaatggcaaaaatgcccctcgatgtttttcttttaaatgtcaccagtattgctggtggttntttgcatttaatgcttgcttttatcattatggnctggtttctcctgttgctga

SEQ ID NO: 232068 - DNA, 390 bp, Glycine max
tgagataaaggaagtgtgaagggtgaaacttcctgctcttattgtttaccacagagtggtacctggagatatgtcgcaagggtcaagagaccttggggatgtcaggtggggtgctattgcccaaaaccaagcttgaccaatcccgacccaacccgggcatagtcggtcagtgagaacctgtgatgtacctaaacaggcgagctcctagcagtcaacagataaaaggaaaacaagaccacaaagcaaggaggcttgtggtggctggccagctgtgaattttgtgtaatatgtggattgtggcctctggtaatcgattaccaagggtgggtaatcgattacaaggcttaaaattgaagacaggaggctaagatggtctctggtaatcgatta

SEQ ID NO: 232069 - DNA, 342 bp, Glycine max
tgcggcatgcagcttgatgtgcaaaaggtgtttttctttatgctgaagaacgagggcccataaaaggggttccaacatgattctggttaatagtggagccacccacaatataatttccaggaaataagtggtagctttgggcttgcgggtagaggagactcacccaatgagaattaaaataggcagtgggtacaaagccgcaactcaaggaacttgcccaggaattgagcttaacttgggagaaaccaccattgcaatagatacattattgattgattcagagtggatcaacattgtattacggatatcgtggctaacgccctctggtcgcatgtgggttga

SEQ ID NO: 232070 - DNA, 382 bp, Glycine max
  unsure (1)..(382): unsure at all n locations
tacatgccanaacaatttacagagaatcttacaattctatctttataaattcctaaacataaagggaatanaaagttgacctggcgaatggaggtccatttgatgtgagcagcatggaaagactaagtttgaatataagaatgcgtaagctttgcaccttgaccaatcattgcctcaaatgtagcatttctctagtaagagtcattntgattctcttgagaagcaagaaaatcctcaattatattgaagtgttctcctttctcgacaatgatgagaaccctatgattgaagagttgcatggcgtctgaaccctcggtggtgggagtgggaggatgcatgttgtccaactggatgaagatgtgacgtggaacccttaggacat

SEQ ID NO: 232071 - DNA, 236 bp, Glycine max
  unsure (1)..(236): unsure at all n locations
agcttctaagaagcagtggatgaaatatagtttataaaattntntgtgggccacaccctaagcgcatccctagtgctaaacgccatntccttcacacgcctaacaagctgttgttccngcctaagttcttgacccctgcctattggttggatggctccactaatcgagtgcttagcgctaagcccaaaaacctctctggattttaattcttctcaattgggcttaatgcaaatgct

SEQ ID NO: 232072 - DNA, 301 bp, Glycine max
accggcttctggagaaacttgctagaaggcccaagtgggcctggttgctatttgcaccccttgtttactaaatacaccccctgccttttttgctgattctttttccataaccgtacggaactttatgaattctataacgatacttggtttccttccgtaatgttacggaaccttacagattatgtaatcatcccttttttggctttcagaaatgttacggaacctcacagattgtgaacaatgctttcttttgattccggcatgttgcggacttcacggatcgtgcaacaatgctctcttt

SEQ ID NO: 232073 - DNA, 462 bp, Glycine max
  unsure (1)..(462): unsure at all n locations
caagngcctgaagctgcagctngttacaaattatgatgctgagtttatttgttgactctccattcncngaancaaattcagattaattcaccactctagtcttttttttcaagtccatgtcctctatatataaattagaacatcaatcctcaacacgggtgatgctacgagtcattctccaagaagaccttgtttgggagtttttcttcaacaatagcatttttaggaatttttcttaacctcttatctctgtcaagctatcttttcatctttattttaaaatagaatttcaataattttttaagaaaatattaacaatagttgaaaataaccatgtatcataatataaattattagcacaaatctaaatatagtttatatgttaaaaacaacaaagtatttatctagaactgttgagatcatgcctttgaatgttgccatactccgaataagtcaaattgt

SEQ ID NO: 232074 - DNA, 472 bp, Glycine max
  unsure (1)..(472): unsure at all n locations
actcaagtcttacaaatttaacaaaattaacatattatcataaccaaaactttataatgcattactgaaactctccaatcacaaacaaaaaaagatggcaatccactcagtctcccttcttcctaaaggagcatccctcagttagccttgcccggccaccggttggttgacacaagacaggcttggcagtttccgcattacaacaacaggtctgagaagtggctaaagacagtggtntctgcaggtcatattcataccactcaagtattaaaacaaatccacaatcaaattcataacactcgagctattttatgtacacaactcaaaatcaataataggaagggaaaaaaagacgatccaacttacatgttgaagcaaccctggcacttaacatccttcanaagaggaataaaacatgcaaacaaaaccaattatgcaaaaattaaaaatccaaatgggagacaaataccct

SEQ ID NO: 232075 - DNA, 250 bp, Glycine max
  unsure (1)..(250): unsure at all n locations
atgtaaacctcttcttctagatcaccattcacgaacgccgttttcacatccattagatgagctgacgatcaaaatgagctattaatgccaaaattactcgaagagagtctgtcttacatacaggggaaatgggctctgtgtaatcgattccttttctttgagtgaatcctntaacaacaagtcttgccttatgtctctcaatgctgccttctgaggttttctttggtttgaagacccatctacattccat

SEQ ID NO: 232076 - DNA, 421 bp, Glycine max
  unsure (1)..(421): unsure at all n locations
tcgcaaaatgttgttatttccggtgtctttaggtgcgngtctacgagtgggacttccaaacttcaggtttgggtggacttctttctcctttgatttcntgggtatggggttttgggagatatgatgggtagtcttgctagttttctgcttcatgatagttattcgtgaagaaacttgttgaaagcttgttgaacttgccatgtttggatgagttagacatacccattctgttttatggttnttgtgatgatgtttgtgatgtttatatgctcgaaatgcttatggaaaactgtcagagatgaatggtagaattaacctacggttagaaagtgaaaatgtggtgttatgagtggaacaagagtgatattttgacggctggaacgccacatctgcaattggattatttacaggttagagtgag

SEQ ID NO: 232077 - DNA, 418 bp, Glycine max
  unsure (1)..(418): unsure at all n locations
agcttcatggtgaatcaaaggtgattcaaagtgtttttgatgataacaatgatgataacaaaagatgatgacaaaggagatgacaaaaagctcaaagatcaatcaaagaacaactcaagttaatcaaagatcaatcaaaggacaactcaagtgaatcaagaacaattcaagagttcaagataggaatcaagaagaattcaagactcaagaagaaagtttagagtcaagaatcaagattcaaggttcaagatcaagatttaagactcaagattcaagaatcaagagaaggcttaatcaagataagtatgaaaaggttttctcanaaattgagtagcacatgaattttctcaaaacatgtttaccaaagagtttttactctctggtaatcgattaccagattgctgaatcgattaccagt

SEQ ID NO: 232078 - DNA, 334 bp, Glycine max
  unsure (1)..(334): unsure at all n locations
ctttggatgcctgtactaagtcagttgtttgcttttatgcangcattangttgatactaggcttgggctttgatgtaaatgcccgcgctggttttcggctttggatgtaagtgccaatgttggttcccaccttacgatgccaggtgccaatgctggtttcgggattaatacaagtgttagtgtttcttatacgcttggaatggagtgtcaagtcgattgtaggaacaaagaagtaaaattgtgtaggtatgtactatgcttatgcaaggagtaaagtgccatgtactattatgcttaaagtaaatgtggtggagggactaggttgatgaattat

SEQ ID NO: 232079 - DNA, 451 bp, Glycine max
  unsure (1)..(451): unsure at all n locations
ttaagtcacctgaggcatgcaagctngcaggctataccttcgaccaaacactgttgtttttctgtctcggcccggatttaaggcgggttgcagcaccggctccgcttccctaactgtactggaggcggttgccgnggctttatcctctatagttttctggagttttaacatgacctctgagatggaagccatttgatcttttagggctgatagatcggccttcatctgttcctgcacgccctcttcattatccatttttctggatcgagtgttataggggtgccttggtgttttcttagttatgatgaaattcctaaagaaataaacaaaggtgagtatgccaccaaaacatgaatatgcaaatgaatgatcggagcacttggatccacccaaaggttttttagataacgtgatgagttcagaacttctcattntataaaaagaacaaaag

SEQ ID NO: 232080 - DNA, 363 bp, Glycine max
tgaatgctctattcaatggagttgacaagaatatcttcagactgatcaacactttttcagtggccaaagatgcatgggagatcctgaaaaccactcatgaaggaacctccaaagtgaagatgtccagattgcaactattggccacaaaattcgaaaatctgaagatgaaggaggaagagtgtattcatgacttccacatgaacattcttgaaattgccaatgcttgcactgccttgggagaaaggatgacagatgaaaagctggtgagaaagatcctcagatccttgcctaagagatttgacatgaaagtcactgcaatagaggaggcccaagacatttgcaacatgagagtagatgaactca

SEQ ID NO: 232081 - DNA, 436 bp, Glycine max
  unsure (1)..(436): unsure at all n locations
agcttccacaatatccaagcaattcaattccttattctcttgaaactaccctaaaccaagaaaacagggcagaggcagataactctacccaaaacacattcacatatcacagctttccttactcatatatcccaataacattctctttgttccgatttgttaaccattggatcgacttgaaaattttactggaggttcctagtatataaatctacattttgaccgttgggatctgctagaaaatgtctagaaccaaatatgtactacctttcccataaccaacaatgcacaagcatttttctgcacacatcaaaaatctgctgcacacttcaacatcatttntctgcataatagggaagattttgaaatccatcttgcccacatnncaatttgcttaaattggatcctacaagtnctaaatcatgtataaatcata

SEQ ID NO: 232082 - DNA, 441 bp, Glycine max
  unsure (1)..(441): unsure at all n locations
gctttaaataggctcgtaggtcanaccagacttttatgtaagctgagccgagcctttaaaaaaatgctatggcaggtaatgaaccaagctcacgccttgtgtattcaactcaagccgagctcaagcctagtaaagcctggcttgactaggctcatttccacccctatgactgcacacttcaaatataaactcattcataaatataaagtgtgttaggaatacattctataatatattcatattaatacatatttttttattggtttaaatttattcaaaattatgagaaaaagttattaaatatttttgtgcaatttccaagaattttgtgtaattttcaagaattttaaccaatcaaataacacatgtttaaaaaagtgcattataaaatatgttactaacatttctcttacaatattctaagtggaaaataaagataaa

SEQ ID NO: 232083 - DNA, 388 bp, Glycine max
tgcaagcttattaaatataacaaactaattttatttttattataaatacttcaagataaatctttattccaacctaacaaaataacttacaaaaaaaatcgatatcacagaaattttcaaacccacgaaagcaaaaacgaaatcaactgctgcaagcgaaaacaactgaaaaaaatggtgaaggaggaggcgtatttaaacaccctaaaacgccaaccccatttgcgccatattctaccctcaaatgccaaccccatttgcgcttccagaccctcactgctcttgcttgccaaagctgctcctggtctaccaaagctgctgtccttgctgcaaaggtaaaacgccagtttgactggcaccttcactctcccatgcagaacgcgtcagt

SEQ ID NO: 232084 - DNA, 458 bp, Glycine max
  unsure (1)..(458): unsure at all n locations
ggccttgaactcgcttattactcctggcctatgatggcgctgcttttatctcaatgctgcatgtagagttccatcctctgcatgtgagcaaagatggactctatagatggtggctattgtagaggtggcagtggtgcatcatatgatgtgaacctgagtaggagcggatcatttgatacaggctacagtggtttggatgacgccacttcaggtgaaggaagataagttagggtagacgccacaaggattaccttgataagtctgagattggttcaacaaggaactcanagagaaactctcaccaaattttatcaaatgccaaaagttttgtttattgaanaaaaaaacaaaaacttatagtgtatctgaacaaaaagataaaaatagacatgggccttctaaacacgtttggccaaaattacaataaaaataaattataactaaaaacttatctaact

SEQ ID NO: 232085 - DNA, 230 bp, Glycine max
cacaggaatcatttattgcgttgccaccgtttgcaacccaaacaacattctgtgacggattattcttgaaccaaatccccaggtagctgttgtttggaagtccaagattgaacaaaccaagctcaaagattccccttggggaaaccatggactctccacaactgacggattgggactgtgaaatggatgatgtgttgtctgctgctatggaaaatacaaccggagataca

SEQ ID NO: 232086 - DNA, 385 bp, Glycine max
  unsure (1)..(385): unsure at all n locations
actcagcttgcccttaagtggtactgggaacatttttagacaagattttatagtttttctggcctgggggagaagaaatgtttgataaatggttccggcaaggctaaaacatgcaatgttggtaggcattatatatatgttatttaattcaatagtgagaactgaaattaatttatataattcttctaaaagataaaaacttttataaattacttttttatgaaaaagntctcttatatctttttttcatcggtgaagttctctcgtatgccagtgctatagtntttttttttttcttcttatcattgagtagaatgtaaattttatgccaccaacatattataaaagtataatataaaagtatgtgaagaaaacaatgcgcata

SEQ ID NO: 232087 - DNA, 410 bp, Glycine max
agcttgcacacaagattctccttgcctgttttcttataaccttctggtggggtcatatagatgtcttcctctaaatccccatgcaagaatgcagttataacatttaactgctcaaagtgaagattctctacagctgctatactcaaaataactctgatggtagtcatctttacaactggagagaagatctttgcgaaatcaattccttgtttctgctgaaaccctttcaccacaagtctctccttgtatcttcttctaccgtcagattcttcctttagcctatagacccacctattctgtaacgctttctttccttctggaaatttagttaaagaccacgtcttattcttctgaagggatgtcatctcatctctcatcgctagctcccacttaatagtgtcactccctgt

SEQ ID NO: 232088 - DNA, 436 bp, Glycine max
tcacttcatgatgatttatgaaggtgtaaggcatttatcttatattggcacatattgatggggcacaacgcaacaatttgcaaccaaaattacacgaatagaaatccgagaaaaacttaagaggaagataagaatggaatccaaataaattaagttaaaaaaaacacacttataaagtgaacaaaaatgatgaccatgtttagagccaatccactgtcggtggtggcgaaaaagacgctgattgggcggagggtgacgacaacggcgccgatgaataggtggttccacatcttgctgctgcgatggtgatgactaagaaactgagaaagagagagtaaatgaagggaaattgtaagaaaataatttagcaccctttgatcttgcgtgcgtgaaatgaatgaagatgatatatgactactatatttatccttaaaat

SEQ ID NO: 232089 - DNA, 460 bp, Glycine max
gacacataaaactaagctttcttatagttagagcttgacctgtctattgcaaaaatatttttattatatcttgagtttgaccttgataagaacgagccgagccaggccttacatacgccaagccaaaggccctcgaccaactggtcgactcatttccacccctagactagtgcttgcaagagagccaaccagccacatatataatctacgcatttcattataactatacatatgaaaatgttgttcagcaagaatatttatagataacattctcaacagctttaaacaatacatttatttgactttgtgaagagaatatattctacattatgtgataattataaaatcattcaaaagagtgcaagcgaatttgtttaaaatgataatctatcactataaataatgggaattggttcattgggaacacactttattagaacatttgatcctaaatcacttc

SEQ ID NO: 232090 - DNA, 136 bp, Glycine max
  unsure (1)..(136): unsure at all n locations
ccccctccccccctcctcccccctcccccccaagggttgtgcctgcacacnaaacacgagacgcaacagaggacatttaaaaccccacgaaagcccagcaaaagcaaggagaaccgagcaccacagagaaagcaga

SEQ ID NO: 232091 - DNA, 314 bp, Glycine max
agatgcagtaaaattatgcaaagcatgttttctggtgttttatataaacagtaccttaaaaacaaacaggtacagacttccactactttgacttgttggagtgacaccaacggcgatgacattctctgctgggtatgtatatctggaagctgaccgcgataataataatgtatggggcttggaacaatttcgaagcctatttttaagacacgatcgcctccctcttgttattgtcactgacagagacctaacactgatgaatgcaagaaaacatggtgtaccgagactactaattcgtggcaagtttctaacaa

SEQ ID NO: 232092 - DNA, 430 bp, Glycine max
  unsure (1)..(430): unsure at all n locations
gatccttaagcaccgcggctgcagcttgaggattatggggacccattacatgtggtactaggtggcggtcgggtgatggtgcacaacaaagttttccacatccacaaagcgcgcataaacccaccatcccctgttgcccacctccaactgagctcacgtactcccacgtagcccatatcttcgtttctctcaacaccgggtccccatcaatcctcccaagctttcctcaacatccaggtaaaacaacattcaaaccgcacaaactatcacagccaagaaaacagggtaaaggcagaaaactctgcccaaaacaccaaccaatatcacagcttttctcacttaaagaccccagtaacaattccttcgttcccgttcgtaactgtnggattgactcgaaattttactggagtctctatacataagctacatt

SEQ ID NO: 232093 - DNA, 381 bp, Glycine max
  unsure (1)..(381): unsure at all n locations
tccgcttattagtgcacagctccttcaagaatttgtcatatcttgtgaattggctcattgcatccaacagaggtatgtttacctctacttttctaaacgtttccaagatctccttctctgcctcttcccattttttgttggaaactgctcttggagggaatggaagagggggaatgtgctgcttctgcaaatcagaattacctgtggaagaagattcacctgcacagaaattgttaggtagatttttgtcatcacctctttctggaatagagtgaagtttggaaggttcatttgcagatgaggaaggtgctacnggttgaggtccttgacactgctttcccgacctcaatgaaatggcactgacattcttggggtttggac

SEQ ID NO: 232094 - DNA, 395 bp, Glycine max
  unsure (1)..(395): unsure at all n locations
agctngagagtaatctctgatactcttcttattttttagactcttctatggctttatgcaatcaaattactactttagttgtattcttaatctttatcaattgaagagaattatattttatcatttgaagaggccactctgaacttcattattgttggtgaacaaagactctccatgttgntggtctntaaataacaattataccattgcaatgttcttcaataagtgaatttcttgaagagcttatattgtaatcttgntttacaagaagaaaatctttttgcttgtactcttctctagtttattcttcttttgcatctaaaacttgtgttcanaatgttaatccacccaaccacatggtacgaaatcaaatcaataatcgtgatacccattca

SEQ ID NO: 232095 - DNA, 225 bp, Glycine max
ggtatcaatctcctctccatcattgggggaactacttgagctggcacaattctccacctttatgcatattctttgaaagattcatattctttcttgcacatgttctgtagctgcattctatccggagccatatcagaaatgtactgatattgcctaatgaaggcaaccattaagtccctctatgaatggactcgggaagttccagattaatataccaagtgacgg

SEQ ID NO: 232096 - DNA, 361 bp, Glycine max
  unsure (1)..(361): unsure at all n locations
agctttccaaagttntctggttttctaaaccttgataacttgtgctattcattcttttcatctcttctccctttgccaaaaagaatttgccaaggactaaccgcctgaattctttntgtgtctctcttctcccttttccaaaagaacaaaggactaaccacttgaattcttttgtgtctcccttctcccttgtcaaaaaattcaaaacgacacagtctgagaattcttttgattcttccctttcccttatacaaaagatttcaaaggactaaccgcctgagaattcttttgtatctccattcacaaagtttcaaaggtttaaccgcctgagatctttgtcttaatacattggagggtacat

SEQ ID NO: 232097 - DNA, 454 bp, Glycine max
  unsure (1)..(454): unsure at all n locations
acgttcaataactgctggtaatcgattaccatatatgtgtaatcgattacacattgcaaattttgaattcaaattttaatagctgttgtaaatcattnttggccactggtaatcgattacatcctctggtaatcgattaccagagagtaaatctcttgaaaaagactttttaacttaaatttcttggccaaaccttttgctacttcaattaggaattcccttcctatttaatatacccttcctaagactctagagactgtcttgatcatccatcttgaatatctttaatttcttatgtgatcctttggcatcatcaaaacattcagcttgatcctttgtctacaattttctatttaccacaaaaataatttaactggtaatactaatcataccttaatttatagagatgacttagatgttacctcttttgagatttactgatattgttgtcgcc

SEQ ID NO: 232098 - DNA, 444 bp, Glycine max
agcttgccacccaactcgcccaggcgagcaatgtttcttcctccagaagcaacagccttctggaggaatcttctggagggcccaagtgggcctggttgctatttgcacccccatttttctaaatacaccccctgcctttttttggtgattcttttttcgtaaagttacggaaacttatgaatttcgtaacgatacttgttttcttcctgtaatgtcacggaaccttgcggattacataatcatcccttttttgacttacggaatgttacgaaacctcactaattgtgcaacgatgcttcctcttgatttccggtgtgtcacggaaccttacgaattgtgcatcaatattttcttttgatttccggcacgtcacgaaatttcacaaattgcctaatgatgggtgtcaagcacctcaaaatgacgaaacacaagtttgataccacc

SEQ ID NO: 232099 - DNA, 463 bp, Glycine max
atccctcttggtggactaggctcaatttacatgacccttttatgtttagactaacttagactgagcttcatccgtagatccttcttgtaagactagacttagcttaagtagcttacgaaagtttagcctaatttaacctaagtttcgtccgcagatccctcttgtaagactaggcttagatcaaacaacattattgtaacagcataattaaaaccaaaacttaatccgcagatccctcttgtaagactaagtttcaatcaagttctaagacaacagtacatttcccattgctaaagtcacctaactatgcacacaaatgaatgatcaaagcaagagcatacagaaattaagcattgaacacagaaaacataatcaattagatattaagtatttacatcagctgttcattagaaatccccaactagggtggttagctagccattacagagaaaacctaacaata

SEQ ID NO: 232100 - DNA, 372 bp, Glycine max
  unsure (1)..(372): unsure at all n locations
gattcctaaatattagaactgttctaaaaggttaattttctaaaccacgtttagggagtcataacgatagaactttgcctcgattaataaattataaactcttttaatggctgattntggaattatatttcagaatcaactgaaccttatctaaatatatgaattccaaccattttatactataaatgtcaaacataacagttctatagcagctcatggatacttgtttaccatattcaataactcaattcaatggcattaaccaattttaccaggtcaaaggcctatatattgtcataaaaaaatttacccactcattacaaatgttcccaggtattaaatagaaaaaatatatcgggattaaaatgagag

SEQ ID NO: 232101 - DNA, 245 bp, Glycine max
agctctacctgatatcctcagaattagaaggtatgtctcttttcattgtggcactctgaaagatttttaattacacttacatgatatctccatctcccttcttacctctttttgtgggcaatgcctagtgatcgcgaaattcaaatacatgctctacggatcttcattttcgcagtacaccaaaccattagttatagctatcggacgtattaaatttttaaaaaaaaaactatttccatatattt

SEQ ID NO: 232102 - DNA, 379 bp, Glycine max
atagggggagaagtgaagttatattggttcagctttctttgcacttctctctttctcgaaatagctgaagaaaattggtttcgtgaagaaaatccaagccgaggcgcttccgtaacgtttccgtgagtgatttcgcgaaagtttttgaccgttctttcgacgtcttcattcgttcttcatcgctcttcagtcttcaacgggtaagtacctcaaaccaagctttttaattcattctatgtaccagtggcgggtcacatttgggttcatgtatgtttattctcgttttcatatactttgtatacccccttttgacgtgcttaagccatttttttaagtcatttctcgcttaacctcaaaataaaataaaatttcccccgat

SEQ ID NO: 232103 - DNA, 369 bp, Glycine max
  unsure (1)..(369): unsure at all n locations
agcnnctctctttttgattgtgctataatgtttatatttgtttttcgaagaccaaactgaccaaacctttgatgatgatcgattgtatcccaatacttgcagcatatattctctctccaatctcgccccctctctttcattatcggtttcattggctttatcataattacataactagctagctgtgctacacgttctcggaagatcttaatttttctgaatattgcggggatgcctacaataattaaagatatgtataaaagccaaagttcactttatatatataaaacatatataactntgttaattatgaccctcaaaccntatagtatatgtaaatgtccgtgtctacgagaactttttcctttt

SEQ ID NO: 232104 - DNA, 418 bp, Glycine max
ctcaagcttaaaagctccgctccagcaagtcatacaatcgatggagaattctttctggtactttcaataacatgacaaatcaagcttttagtcttgaattcaaatcacatcagaatgataattgtgcatgaattatcaataacaacatgataataacccaattttgttagtaacagatttacacattgctttccagcagtaagtctggtctttttggataggttgccgtcaactaattagctttggcagctttcaggtctgatgccttcttcatttcataattttggaagctcgacggataaggttgtgcagtgagggaagggggtgctgaccattacagaaagaaaggtagatttgtccttcacctattattttggaagtgcaggaagtaattcccttagtagtgacttggatattt

SEQ ID NO: 232105 - DNA, 414 bp, Glycine max
  unsure (1)..(414): unsure at all n locations
agcttggttagcattgagaaaagggtttcttatttnttgtgaagagatggacagaanaaagaaattnttttcagttgtccatttgctaagcgcagcccttgccctaagcgccatgtcttcacgcgctaagcctgagcttgctcacgctaagcgctttgacccttcaccggttggctagatgattcagctaagtgcacatcactgcgctaagcctaagttcttctttggatttgaacttcatgacttgggcttaacagagctgatgcgctaagtgcaaatccttctctgttgaaaaattattgtagcagcgctaagcgtgctgtcttgcgctaagctcaatttcctctctggaatngaactttcatgaattgcgcttagcggcaggatgcgctaagcaccaatccttcactgttt

SEQ ID NO: 232106 - DNA, 434 bp, Glycine max
  unsure (1)..(434): unsure at all n locations
tactcaagcttagccctagaggggatgaaccttttcattgtttggagatgttcattaacaatgcctataggttggacctcccagaagagtatggagtcaggaccacttttaacatttctgatttaactccttttgcaggtggagctgatattgaggaagaggaactaacagatttgaggtcaaatcctcttcaaggggaaggggatgatggaatcctccctatgaagggaccaatcactagaacaatgagcaagaggctccaagaagattgggctagagctgttgaagaaggccctatggttctcatgaaccttatgatagaattctgagcccatgggccaaggttgggtccaattatctttgtacatattagactangatgtcattatatttggtccttgtatatagggctccatattganggtagggaccct

SEQ ID NO: 232107 - DNA, 457 bp, Glycine max
  unsure (1)..(457): unsure at all n locations
agctnatagaacagtcatcaatgcatttaaataatggtataactctttatatatatatctggngcaccattaatatcaagtctttggacaatggtattaattgctagtgatatccttggtgcaatgttcaaacattgataataaaatcatatcagataacaaacccatcttttgatgtgatttatcattcacatgcaaaacctcataattatcaatgtgtaacatcacatgtgtgtatgtaaattagttaaatggtaaatttcctctggaccaatcaccattcatataaataatcacacacgtcaatatttctcatgaataatatacacaacagagaggtccctttggtgatatctttgatcaattagctcatttaaatgctcaacaattagaatgatatatcatagctaacattcaagcattgatgcaccaaatccaaaattaagcatttctagag

SEQ ID NO: 232108 - DNA, 305 bp, Glycine max
gcctgcatgggtccagagggttgtgaacaagctcactctctgcactaagcccatagtaaattgcataacatttgaggaaaagtctcaaatcactatctctatatacatttataagcacaaaatttgctgcctttttggggtaactaaaattatgctcactgtcagtagaacaaatcaatccttaatacatgatttgtggctaagcagctaggtttaaactttaaatacagatgggagaaaaagagaaaaaaaaataataagtcctcatgacaccaatcgttgacacaatgaagtatatggctttc

SEQ ID NO: 232109 - DNA, 300 bp, Glycine max
attatattaattcttcaaaaatgcttggaagtattcattacccctcccatatgaattaaacatatgacaacactaatttattgtctagggctaacccctctacccatgggcaatgtcacactaataagagctttcactcctccttatctcaagataaagttttcacgatataagggatgtgagtgaagttagcatattcatgatatctctaactcttagctcagaattcaaacacatatctcattttctccgcatctcatacacatgagaaagttgttggtttatcttataacaacaaat

SEQ ID NO: 232110 - DNA, 424 bp, Glycine max
  unsure (1)..(424): unsure at all n locations
agctttgacttgagtcatcaagagattatattattgtgcccatggcctgaatntaaaaaaggatctatcatctatctttcaatctatctgtcaatcttctctcaacatcattcaatatcttttaattctttctatagaatctttctgatttatttctcttcatctttctaaaagattttgttcaaacactttctcttccaagaaaagttctttgttcaaaaacttgtgcaattcaactttttcattctcttctccttttgccaaaagaacgaaggactaaccgcctgaattcttttgtatctctctttccccttacaaaagaatcaaaggactaaccgcctgagaattcttctgattcttcccttccccttaagcaaaagattcaaaggactaaccgcctgagatatattttgtttccccttac

SEQ ID NO: 232111 - DNA, 421 bp, Glycine max
actcagctgggaggagcttcatgggggaattattttagagagtattagagaggggggaacaccaaattgaggaagaaaagaggaagagaagttgaactttgaagtttgtctcacaagactcttattcatcaaagttacaacaagtgttacacatgcttctatttatagactaggtagcttccttgagaaggttctttgagaaaacttccttgagaagctagagcttagctacacacatccctctaataactaagctcacctttttgagaagctttcttgagaagattcctaaagaagctatagcttagctacacacacctctctaatagctaagctcacctccttgagatgagaagctagtgaggttgctgtatgaaaaactctcatagacttgggagctagtatcaacttaatgcatctc

SEQ ID NO: 232112 - DNA, 377 bp, Glycine max
  unsure (1)..(377): unsure at all n locations
agcttgagccaattcaaacgacaatttctttttactcgaatgtctgattgagtcctgtaatataacgagttgctcgaaattgaatgttgaacctctgagccaattcaaacgacaataatcttttacacggatgtctgattgagtcccgtcatatattgagacgctcgaaattgaaagttgaatctctgagccaatccaaacgacaataactttntactcggatgtctgattgagtcccgtaatataacgagacgctcaaaattgaatgttgaagctctgagccatttcaaacgacaataactttttacacggatgtctgattgagtcccgtcatatatcgagacgctcgaaattgaatgttgaatctctgaaccaat

SEQ ID NO: 232113 - DNA, 317 bp, Glycine max
  unsure (1)..(317): unsure at all n locations
cgcctanacattcaacttcgagcgtctcgatatatttctagtcttaattagacatccgagaaaaaagttattgtcgtttgaattgtctcagagcttcaacattcaatgtcgagcgtctcgatatattacgggcctcaatcagacatccgagtaaaaagttgttgtcgtttgaattggctaaaagcttaaacattcaacttcgagcgtctcgatatattacgggactcaatcagacatccatgtaaaaagttattgtcngttgaattggctcagagcttcaacattcaattttgagcgtctcgatatatcacgactct

SEQ ID NO: 232114 - DNA, 336 bp, Glycine max
gaacgatgctgggtatatttataaaatgggccttcactgctaatatgcaccatacctttactcttatctaatgagcatcatcctatcatgcatgtacaatttaaaattggctaaacaccaaaattgactggatgagaaattatcaatttctgaaaattatatgaaaaaacatgggctaatgattggtagttaagtattatcacaatctggcattagcttactcattcctaagagtgtcaactaattatcttttattcttgcagatacaatatgtaataataaacttctacaaatcctgcatagtctaaaatcattaagcccaaccaaagtcacaaa

SEQ ID NO: 232115 - DNA, 167 bp, Glycine max
ttggagggggaacgaaacaacatggctattcttctttctgagagacacaagttactcgaaatttacatcaagtaaagtcttctcaaacagataaaatgcgctgattccaaagtactaactaccttttttctctatcaatcttcaactgtcaccttaatgaaaaacta

SEQ ID NO: 232116 - DNA, 435 bp, Glycine max
  unsure (1)..(435): unsure at all n locations
tcattcttatggaagttcatcattggattngacttctttgtgtgatcttcattgtttcctttaccatttcctttagaatgctgtccatgaatatgcatttgttctaaagattctgcaatatcatctagcatattctttcttgacaagatagcattagattcatcaaaagtaaaatgaatggattcctcaatattcatagttcttatattatgtatcctataatgccttgctttgtaatgaatatccaagaaagatgccttcatcagaatttgcatcaaacttttctagaatatccttaccattattaagcacaaaacatttgctaccaacaaatgtagatgtgaaacgttgggtggtctaccatcatataactcatatggggttgtctttaaaatgggcttattaaaccctattcatgaataacatgcagtttga

SEQ ID NO: 232117 - DNA, 373 bp, Glycine max
agctgtatatgcattcagtttccccctttttgaaaggactattagaatcttttcaacaagcacaggagggaatgatgctctttctatgcttgcttcatataagcagttttttctaccatatttatttgaaaaaggaaacaaaaggaacctcataatagttgttattttttaacttctgttggagaaacttcatttcattcatatgaccatatcatgtcttgcctatagctaggttctcttgctcatggtgctaatcagaaatttcagtctcaaatcagtttgataaccttcaataaattttcatgtttataaattgaaaaattatatagggaaatgtatcctaaaattgatttgtaatctcttccaagatttg

SEQ ID NO: 232118 - DNA, 463 bp, Glycine max
  unsure (1)..(463): unsure at all n locations
cgtataatgcagaccatttggtgcagtaatntggccattttatattttcaatatgtcagttaaagggctggaaaaatgcataaaaaactgcaccattgtggccttttaaatgaagctgaaataatgcagtatgttgttcaaaggactcgaatttcctcttgcacaaaggtggtctcatccaatgacctaaacaaacattcccaccaattaagtgagattgatatgtgtcatatttgatagactacatatgaatgaggttcatctcttatatttgatgagttaagtatttttttatttcctattcgaacatgtgaaaataataatgtatgtgttgcaggtcttgtggactctctatgacacaccagaaataaggccattaattaatgatgttgaggtatcaatgattggtcgggtaaaagttcctctcacatgttctgcaattgtggaatgacatccaacagat

SEQ ID NO: 232119 - DNA, 392 bp, Glycine max
agcttgactgaccaaaagtttcttatttgttaatctcgcattaattggcacttacgaggtgatagaaacccgactctcttccacttagttaacaagatgcaaagatcatctaatcatatttctttgctgaaaaaggatgatcaaatctataataaccaagcagatgccaaacaattgattctacagtacttttccttcctatttgcttttccaaatagatcgattgataatgatctaactgagaaagtgattccctctctggtcacagatgaatagaatgcaatgcttacaaatcttccctccaaagatgaatttaaaaaggttgttttcttcatgaatgacaagggagcagctggtcctgacgggtatgaggcccacttctgccagcgata

SEQ ID NO: 232120 - DNA, 420 bp, Glycine max
  unsure (1)..(420): unsure at all n locations
tctactattcaaagaccttcttcttcaagtgttggtggctctattctaatagaaatcttcacttgagctttgtcgcaagctaccctcttgcgggcgagcgaggcaaggctcacaagtgcgtcttccatatgaagaaaatgcgcggagtctccaccaacgtttattgaaaggaaaacgttagaaaaatcaaaggaaaccggtcatgaagaatattccagattcgggagttatctntacgtttgaggaaggtattagcacctctcacgtttgtccccaaaggacaacagccttagattagaattgtgtgaaattatgtatctaaacttttatttcttttttattttttgaggtcgacaaaagcggggctcttgctcctacgtaccctccatcgaagaggaaatcagacctacgtagntcttt

SEQ ID NO: 232121 - DNA, 341 bp, Glycine max
tcgacaagcaaactatggcaattatgagcaacataatcacaattgatcacttacccattactctggttctcctttactggatcatgatccatttgtcagcgtggagaactaagtattctgatcaaacatattctgtctcctcttccatacagaaaacctagtcccgtactagttgacaatccttctattggttacataagttcatcctaaaacaaatcttatgttgcggcataacttctattagatatatattctctgcattctctgtgcactggcaaattagtttagagcatccatctgattgaaaaccataaaatgaaacacttgggtctgaatttgct

SEQ ID NO: 232122 - DNA, 441 bp, Glycine max
agctctgagccacaatcatgactcattatttatcttgtcccacggtgagaatgccaatccttaccctcggaagccaaaaacgaagagaaggaatattttcaatcaaaggaaaaaggagaagggaaatttccaatcaaagaggaagcaaataaagggagagaaggaaaatttccaatcaaaggaaaaaagagaggaaaggaaattcccaatcaaagagtgggagaaagtaaaaaaggaagagagaaaaggaaagaaagctcctgatcaaggatcgaaagaaaacagaagaaatatgcagaaaggtctttggaccagacaatatctgaacatatacagaattgtcaccaaatgaacaaacaaagaaggaaaggaaaccatgacctagagtagtcttcttcctccgattaccaaccaaaaatctgtgcgttggtgacttgttcg

SEQ ID NO: 232123 - DNA, 423 bp, Glycine max
  unsure (1)..(423): unsure at all n locations
ttgtggatttggtcttcgccgacgaaaggatcaaagtggtgtatgtgtttatgcaaatatgactatcctgctttgatgaatgcgaaaactggggcaaatgaagagggtgagaatcagggagaaacccatgctatgactgccagtcctatacggccaagtttcccaccaacccaacaatgttattactcagccaataacaacccttctccttacccaccacccagttatccacaaaggccacccctaaatcaactacaaaacccaccttccacacaaccaatgctaaacaccacctttagcacgagccataacaccaaccaagaaatgaattgtgcagtgaaaaagcctgtaggattcaccccaaattccggggtnctatgctagcttgctcccatatctactngataattcaatggtagccat

SEQ ID NO: 232124 - DNA, 443 bp, Glycine max
  unsure (1)..(443): unsure at all n locations
agctggcctaacaacctcattgactcagaacttanatgctgtcccagcacacttgtttgagcaccgtgagaagtaaattctcatgctgagaacagtcaaaacatttaagctggaacatctagaaaattataagcatttaagcatggccaggctatagattcccaatttagggatgtcacctaacatgagtgaactgaaattacagtagtgtgctgcttatagaattttgaagctgttaaaggaggaagcatagcttggccagaatttttcctctaccttaattataggattgtatttatgtgggttctcagatccccatttcagattcttcttaggttcaaggacaacttttattttaaccggtgttatgaatataaagtatctcctaattttaccaatgattaatttctatcaaataattgatccatcacttttaatagaat

SEQ ID NO: 232125 - DNA, 387 bp, Glycine max
agaggttacttcctcaaaacctcacgttttcataaacaaagaaaccgaagcggcggcagagccgcacaggatctgtgaatggagaagagagaaagatgaaaaatacaaatttattgaatttagataggagcgcttacaaaaatcttgtttcagagcacctctcttcagaaacctgaaaaatggctaaatgaaagggtgcctcacaacatgcttgaggactccttatatagccaaaaatctaaaaccggtagttgccggtagttttgaccgggactatttgactgtttgttacaagacaaatagttttgaccgggacttttatggcttcaggacaggtagtattgtccagcactaattacctattaattacaaacagacggtgttgtg

SEQ ID NO: 232126 - DNA, 422 bp, Glycine max
  unsure (1)..(422): unsure at all n locations
acctcagagtcacctgaggcatcaagcttgggtactcctggacaaaaattnatgctnttgtacaccaacgnctgaagagagatgctgaggtggactacatgtcaaaggttctttatgccagagcaactggttgcttgatgtatgctatatatgcactagaccaaacgtggtcctattcgttgaaagttcataattcagtctcttttggcaatgtcaataactaaaatagagtatatggcagtagtataggctagcaaagaacttgtgtggttagtggggctagcgaaggagttggacattgaacaaggtggagttcaattgtattgtgatagccatagcgctatcgatttggcatataaataaagatatcatgctagaacacaacatattaatgtgacgttacgaaggattagggaattgat

SEQ ID NO: 232127 - DNA, 436 bp, Glycine max
  unsure (1)..(436): unsure at all n locations
tgatgggttcttctatattttcttttaaggcattgtcattttatgtcgagngaccgcaattgcggcgatatcaacaatgttttgagtaccccggtttcgatggagtgttagctcttctcaacatggtcaaaatgtctacgaccaacgtttgatccatgatatgagatttattggcgcgaaagggagtgtagtgagcataatgcagttctcgggatgctcgatacctctttttgtcgtcgcgagctttgttgaagttgggcttatcattattttatttggccgatgcggcatccatccacacctgattcctatacttggccaactcttgcatctgcatgtacttagccatcctcattcgaagttcgttgaggtcaaatgctggctttctgcatatgatgttcgcaaaagctcctgaccttaacacttgtatcaaatg

SEQ ID NO: 232128 - DNA, 464 bp, Glycine max
agcttcattgcttcatgatgatgaatctatattgattcaaggggctttggtgataacaaagatgatgacaaaaagcccatgagaatgatttcaagattgagtcaagaacaattcacgaatcaagagaaagattcaagagaagtttcaagttttcaagaatcaagaatcaagaacaatcaagatcaagattcaagaatcaagaaaaggctcaatcaagataagtacaaaaaagtttttcaaaacattgagtagcacatgaatttttcacaaaactttttaccaaagagtttttactctcttgtaatcgattaccagtggcaagttttgttttcaaaaagctttcaactgaatttacaacgttccaatcaatttcaaaatggtgtaatgaattacaatatattggtaatcgattaccagtgtgtttgaacattgaaattcaaattcaaatgtgaagagtcacatcc

SEQ ID NO: 232129 - DNA, 334 bp, Glycine max
  unsure (1)..(334): unsure at all n locations
ntacccaagcttgacacaacacattattctttatcttatcttgacattgcgtgactctatacaagtcaaatagatttggtggttgtttgcacaatgactaactctataagcgtcttaaagacaaatatacaatctttgcacttagtctattctctcaaagagttcaagttgttttgagggcttctctaaactttacaagaatttacagatagcttttattagaaagaatttgaaaatgaacacttatgtttggaacccatttcttcatagactttggtatatataggctnttatctntaagtgcctgttgtctcacaacagatggattcactta

SEQ ID NO: 232130 - DNA, 479 bp, Glycine max
  unsure (1)..(479): unsure at all n locations
aagtcacctgcggcatgcaagcttcttcttcttcattgctctcgagaccgtgacttcttccaccttacctaggtacgtttcatgagtctttcttctaaatacctaggtacgaactcgtgctcactgtaaggactctttgtttgtttctgctgcaaggaccttatctaggtacgtttcactttgcagtccgtttggggtgctcagtcgtgctcacagggtctgattttgattgaggtaagttgtgcttactttgccaagtgttaatgcatttgaggctttgatgccgcaagctgctttatataaaaatgtgaaaatagttttgcttaatgtatattgcctaaagcttttcctttgcagcatattcatatgactaaatagttttatgatcatgttagccacttgatttaatgcatgtatatgtttgcattgatttgacatcatgtgttcgatgaaaagttcaagcanaattacctcatatc

SEQ ID NO: 232131 - DNA, 409 bp, Glycine max
  unsure (1)..(409): unsure at all n locations
cttcactttttaattnggagtagaatttgcttgaatgaagaaaatgtgttctgttcattagatgctggattaatattcacttgctgtacttgtgctcagtttgatattggttctcaagttgttggccagaaagacacgtcaaagaatgttctagacgtctggaaagaggtaacagacaccactcttttaaattgtctatttcctatccagtaattgcctaaaagtactactttaaaattaccatcgttagcattgggtgatattcttcgtgtagatattccacaagagaagaacaaaaaagacggtaagaaaatctcatagaggcaagtccttctgagttgactccttgtactcccttgtttcaaccggtaggccatattatactggtttactcatttctccatcttat

SEQ ID NO: 232132 - DNA, 370 bp, Glycine max
  unsure (1)..(370): unsure at all n locations
tattaatatataaaaactaataaaggcacttgattacaaatacaatcggatctataacttttcaaatcatattaacctatgataaaaagaaaaaaattattagaatgaaaaataaataattctcaaatattttatctaaaaagaacaaaaaatcatctcaacaataacaagacaataaaaaatagagtattttgaaagaaaaaaaaaatcttacaacaatttatgggcaaaccctacaacaagtagcgttgtccctgcttganagttgaaattaagctcaccactctccatatcgcaagttgaacactctgagccgactttggagaccacctatatcagaatgcaactaacacatatttatagataatca

SEQ ID NO: 232133 - DNA, 447 bp, Glycine max
  unsure (1)..(447): unsure at all n locations
caatgcaacacaattgttccaataaatccatattcttttatgatctatctaagagcatngggtaaggacctcatccaatgaaagtattcaactcttggattgatgaaacgagctttcttgactttgtaaggaaggcatacaaatcctacaatgttcaaggatgaggtgcttatgtggtcaaagagaaactcaagctcctaaaaaaaatcatcaataagtggagtgtggacaaggttgggagtcatcaaacacaagtcgacaagttggtggccaatataacttctttggatgttggaagaaattcatacgagaaggtgtgtgaaagggaagacatgctcaaggagtnttggaagaatgcaagaatccaagaattaattaatctgctaaagtttaggcttaagtggccaatataacttccttggatgtaggaagaatttcttctacaat

SEQ ID NO: 232134 - DNA, 386 bp, Glycine max
  unsure (1)..(386): unsure at all n locations
tgaggcatgcaagctngaatgaatataagagacatcttcttttattttggtgattctcgactctatctcatcgaagcgcatctacacttgtaattccaaagggtcaaacccttcaccaacaaaggtttgaagaccatcaaacctatccaaaatctttgaaagaagagatgaatcttctccatcatgtccttcttcaccaacatgtcgagcaatgactgacgcgcctattaggaaggatctcttgattggaacatagggttcacaatcaagagggatgttaaagtgttgaaggaagagggtgactatatgtggatatggaaatggagcattcaatcgcaacgccttatgcatgtgatatctaacaagatgtgcccaatctatttgta

SEQ ID NO: 232135 - DNA, 231 bp, Glycine max
ctaggtggttgtgcaaatgttgccttgccctaacaaagtaatgtttgaatgtatgcgtttaggaacccattaagataatgttttcatgtttatgctccctagcttggtttggttataatcttgaccatgtctcgaacctgaaaccatttacatggtaaaatggaacattaagaactctacaaattttttactgctctatactcttttatatgaggggacaatggctcaatg

SEQ ID NO: 232136 - DNA, 269 bp, Glycine max
  unsure (1)..(269): unsure at all n locations
ccatctcaggcatttaggctcctagtcctgaatatcaaaatattgacctccaaggtaaacagcggctaaaacctttggactcttctccttagggataccctttgacatctaaactgatatttaaaccccggattggttctataccacccgagaacccatatncttgatagccaaaaaaacagcaatttccatcttccaggtaaaagataaatcccacacaaaatatactccaaagccccaaacagcatctatgttcaacatctaacaag

SEQ ID NO: 232137 - DNA, 420 bp, Glycine max
tctcatagctgctctgggaatagtgtttggcaggtggtctttcttttatgcattactagaccagtgtcaccctttgctgcacttgcatgttctcaactttgttggctatcttaatgataacgatataagcacgatttcatatgaaatttatctatgttttatttagccatcatggagagtatttcagtatgattttttccttataccaaagtatttgggaaaagttaaattgagattgaaaggtttattctttatcacctaatttgtaattgcagacagtctttattttattctagaaaggagagttcttaaacttatcacaatttgacttgagattctgaagattgtctaacatgggatatcgtgttcattgtgtgaatcaatttgtgtttgcaacttgcaggtgtctcatgttgcgtc

SEQ ID NO: 232138 - DNA, 319 bp, Glycine max
aatctatgatatatacaaagcacactctctataggcgtaacaaacagacttttatttaatgggtagacaatttgctctccatccttcggtgatatattagctatccacccgggcggcacaggattttaactctctctgattttttacatgacccaaaagattgggcccactaataaaacctttgttttgaaggtgttcgtatgagcacacatcactaatactgacagtctaaaatgacagcccaatttgtcatcgaaccctgtgaaaatcgactgtcaaggacacaaaaaattcacgaactatgaataaaaagattcta

SEQ ID NO: 232139 - DNA, 240 bp, Glycine max
gagaccactgcttccatgacctgataccattacaccatgtaggtatagccctgtgatttctgtgacgatcttcatacacactcctatttttggctcctcaagacttagagtatgctctaaaattaacgaacttgataagccaagagtagccatctttgttaaaacaccaacctcgatggttatttgccccaaacagcctgcatttgacaaatataagtgcctcgaatttctagcaagcca

SEQ ID NO: 232140 - DNA, 413 bp, Glycine max
acccctcaatatagcggatcttcaaggtttgagaagtgaaaatgagaatggggtaatattggagcaaactctcacctcacacaagtctatatcatcaatctaaacttgctcaaactggtttttacgatgaaaattctaccgaatcaaaatttgactcctcaacacccaattttaccctagaaatggctcttgccttcactttggtcatttgtttttctctcttgcacagcccaagctttcccataagtcctaaatgacatttcaaactaggattaaccctctttaacctccaaataccactaaatccagatttggccttccaactctcaaagcctcactctttttccactcataacactacattctcactctctacctcacatacacaaaaacaagcactacattgcaatatg

SEQ ID NO: 232141 - DNA, 398 bp, Glycine max
  unsure (1)..(398): unsure at all n locations
tcatctagtgtgtatcagagcacatgatctttaagggtgttctccttataccctcattaattttttgctttaccttctcttacattgaggnttcttcatttaatttctctatgaaactccccacatgtcctgtgctcaaatgttataacatgattctttagaggttacaccaattaaacccgctataagagctagacttgattttctatggttcaaaatttctgttcttgttcttgaaccatgaattgcgttgagttacgctctttaaattttgctctgtatcttttgtggtgaaacctaaccataaattcttccacaatataaagtagaagaaacctccaaatctataagacttgtccnctattgagtnttgtctagaagtatgtctatcatgaaac

SEQ ID NO: 232142 - DNA, 375 bp, Glycine max
  unsure (1)..(375): unsure at all n locations
ctacacanatcttatcacataactatttatgtttatataggggcgagaagatcactaaaccttggatgccaacgcatcaacattttgtggaagaatcaacaatagttttgattgctcggaaaatttcaactcctgctcagatacatctggcctgcaaatagtttgaaaacaccagaatgttactacatctcatgaaatagaacttcttttactagcgaaagataagaaatctccatcacatgaattcccaaacccgaatcggacatattttatatatttatatatagaatgaatgaataaaattcaattgctgaatccaaagtgtgagcaagaattatatgtgctggctacttaaggaaacacattagtcttaac

SEQ ID NO: 232143 - DNA, 113 bp, Glycine max
  unsure (1)..(113): unsure at all n locations
agctcaaacttgcacaaaggagttgtgctttgtttaaagattcgtcttcaaactcttagaggtgactttgagccgttgtttatggaggagtcccagtcaatntctgattattt

SEQ ID NO: 232144 - DNA, 120 bp, Glycine max
tcaatccttgccctcggaagaaaacacataaagaagggaacttcccaatcaaaagagtggaggaaaacaaatagagaaaattcccaatcgaagagtgggagaaagcaataaaaaggaaag

SEQ ID NO: 232145 - DNA, 387 bp, Glycine max
  unsure (1)..(387): unsure at all n locations
gtcacctgcggcatgcaagctngaatcgatacaatgaccaaatcttttctttattaccatggatttgaaaaaatggtcttcataaaagtctgaactatggatgttagctaactaatggatttggtttcccttaacaatgttgtgtataattctagaaatgctgcttaaattagtgaacaatggccaagtgtttgataataagtaaaagtttcatatggattgtaattttagacataatatgcttctaagctaggcttttgggaaaacataaaaggtggagataatcgttgtagctttcaaatgagacaataaccaacttgactaagttagtatatctctatttatcacgtgtgtgtgggaaattatattgatgatgataactatggt

SEQ ID NO: 232146 - DNA, 403 bp, Glycine max
  unsure (1)..(403): unsure at all n locations
ctcaagcttctttatatataaactaagttttntattttattttaggcttttattattttttgctactagaatcttttattctttatttctataaatttatttctttaattttaatccttataaattgatatttttctaattttgattcctgtaagttctttttattcattctttaattcttataaattttattttttaattttaattcctataaaattttaactttttgtttataattttctaaattcgcacagaactaaaattgaaaaaacataaatttatcaacactaaaaataaacacaaaatcttacggtgacttacaagaataaaacaaaattataagtactataaataaacaaatttttgtatggataaacctatataaaaatatatttaagtcata

SEQ ID NO: 232147 - DNA, 454 bp, Glycine max
  unsure (1)..(454): unsure at all n locations
agcttattcaatgtcaaagtagggatcttttttttttgttttcgttacttagccatatttaactcaagtttagaatgttgccctcttaacgtcgtatcatgttgctataatgttgctttaggctacaaacacaaaatagctggttaataaagtccgaggttctgcgaatgtcctggttgttgattttgatctgtcttgctcaaccagtccttggcctctatgttcttatgctcaggatacggntntttcatgcaatgtttcttattaaaagttagcttcccagtccttggaatatttcatcataaactaacagatatatttaaattcctaggcagcaatgcttntctgtaactgaaaatttgtagcattcacggtacagagaagcgttcaccttccttctttagcaaactactaagtaatttcttactatctttacttacttacagctggttat

SEQ ID NO: 232148 - DNA, 348 bp, Glycine max
  unsure (1)..(348): unsure at all n locations
atatatggagggactcatggacactatctatgtcacattcctagggataaacggaatgctgccatgtaatctaagcccgcacttaatacatacnactccttatcataagttgagaactacccgagtagaccgacttacatctcactcataaaagccactcgcaggccttcatggatcaacacctgcccagtcgcaacatttgaagcctcacactctattgcgatacattgatgaaagattggcaacgcctgtatgggggcattagctagcttatgcttaagaacattgaaagctgcctcttgttcctccccccatatgagatcaacactttgcttgagcacttcattg

SEQ ID NO: 232149 - DNA, 399 bp, Glycine max
  unsure (1)..(399): unsure at all n locations
ctgaaatcaccattcattncaagttctcaaaatggaaataattcgaacaataatatgaaaaagtaaaatataatataggctctatgttatgttacctgtagtttgagtgagctccagctccattccaatctccctaatagcaacaatgtaaccaataaaatcaaaaatagtggaataaaagaattatatgatcaataataagacaataatcaacaaaattaacggttgataagtacaaatctaaccggaataggcttgggatcaaatgaaacaattactccggccatctcttgtatcctctgtaacatataaacatcccatcaatatgtctcttttcactgaatttcacctaatatgttgaccatattaaacatccaaattaaatttaaacaatgaatg

SEQ ID NO: 232150 - DNA, 423 bp, Glycine max
  unsure (1)..(423): unsure at all n locations
taataatatatataaaacttgtcatttgncaatacaaaattggattattactatgnataagaactgaaactattaaattaacactttttaatacaaaagacaattatatattgataaaggaacatgtgagtatgtaataatatcgacacattctaaaggaagaaatgccaactattccctctatcctccanatagagacacatgcacataagatatgagaataaacaaataggtactgaggagctattagctaatgtgtcaaagtaaaacaataatcaagtaaactgaagaagcaggtgagaagacaagacaaataagtatgagagatagtgagataagaagacaaaattacaattgaatagacagagaataaagagaatagaaattaaagaaaagtctttgggtttctttagctattaacta

SEQ ID NO: 232151 - DNA, 403 bp, Glycine max
  unsure (1)..(403): unsure at all n locations
agcttgctctaaatttacattgatgtttgtattgatgggaggaggttacatgccatttttgctttaagagtaacgtcccactggtaaaactaactttccaaatgtttgccttcgcaggaatggccccgaggaagcttgcctcaaagaggtccaggaaggacaaggcggccgaaggaactagttccgccccggagtacgacagtcaccgctttaggagcgttgtacaccagcagcgcttcgaagccatcgagggatggtcgtttctccgggagcgacgcgtccagctcagggacgacgagtatactgattttcaggaggaaatagggcgccggcggtgggcaccactggttactcctatnggccaagttgatccagaaatagtccttgaatnttatgccaatgc

SEQ ID NO: 232152 - DNA, 440 bp, Glycine max
  unsure (1)..(440): unsure at all n locations
ntataagcgtaggtttgggagacgaaggtcaagtggtcgttatatacgaagatgatgtcccgagtacattggatttggtacgaccatgcccttctgatttccagctgggaaattggcgaatggaggaacgccccggcgtttacgcaacgagcataatgtaaacctttacggttttaaaagctctatagttgggcctaggctctagagtttttcttttgttaaggctttgtgtcttttgtttttggatttataatacaaggatctttcttcatctgttcctacgtctctacccattctcattcatttgcatgtttacttctttatttctgaaacggcagatccgatgacgagttccacgaaggtactaatacctgggacccgcttatcaacttcgagcaagaaacgaatcaaacggaagatgaatggaacgaggatgtggg

SEQ ID NO: 232153 - DNA, 456 bp, Glycine max
agcttctacttatgtggagggcgggctttcttctctttcttgtctccaacgcgagctttgaccaccgctcttccttctcgcaatgcttctcttcatatccgcctgagtgggcttatagcctaaaccatacttcccacgatttcctttggcatttatcaggctagttatgccgccgctgtctttgcctaaacccattccgggttcgtaaccgttccccaacataactcgggccatcattactgctgcatcggacaggcaagcctgcccagagaaggagtccacggaggaaatgcttaccacctcaaaagactggaaagcggtttctaatgactcctctgcggcctacacatagggcatagaggatgggcagctcaccaagatgtcttcttcgcctgatacgatgaccagaagcccttccactacgaatttcaacttttggtggagtgtatagggaac

SEQ ID NO: 232154 - DNA, 380 bp, Glycine max
  unsure (1)..(380): unsure at all n locations
cggaagctctcgagaaactaanatggtcataacttatcacacgaacgttttattcaggcgcataatgtatcgagaagctcgaaattgaaatacgtatggtctcgagaaattcaaatgttcataacttgtcacacgaaagtccgattcaggcgcataatatatcgagacgctcgaaattgaacaacgaatgcattgagaaattcaaatggtccttacttgtcacaccgaagtccgattcatgtacataatatattcagacgctctaaattgaacatctgaaggtcttgagaaattccaatggtgataacactttacacggaagtccgattacgatcataaaatatcgagaagttagtaattgtacaacggaagctcttgag

SEQ ID NO: 232155 - DNA, 252 bp, Glycine max
acaacgctgaaatgttctgtaacatacctgaataatatatggcccctaaacatgcgtttttggaatttaagccatcattaaagaacttgctggctacttaaactaaatgagaatttaaacacatatagctggcctaaaacctgtcttggattaattggaaaggatattacatatgtccatcatattcctattgtggattatgtaatggttagtttgtaccttcttttgcaggggaaagaataagagtctggc

SEQ ID NO: 232156 - DNA, 483 bp, Glycine max
  unsure (1)..(483): unsure at all n locations
agtcacctgacgcatgcaagcttgcattgcactgtgttgctattactgatatttttttaaatcagntatccattacaactattcgggaatcatgttggagtaatgcatgtaactatttttttttctcaacagcttttggagagcaagatacaggaggcaaagtcaaagaaagataccctcaaagcatgagcttagtctgcaaagtttgtctttagctcatctttcattctttgaaagtcatgtatcggtctctcacctttgttcttttacataactaattctttttcttctctttaggacttcaaccatagttagtgagatggtgggcattatcaacacaagcagtgcccttgcagcttttgataagatggaggacagggctagatttttctttttttaatatttatatttccaccctttagaatgctccatatggaaaaatggcttccattcatgtatcaatagtcgatgacttggcatgca

SEQ ID NO: 232157 - DNA, 383 bp, Glycine max
  unsure (1)..(383): unsure at all n locations
cacttttgaacttttggaggtggtgatgaatcctcctagaaggaccttttccaaagccatgagcaagatgctccaagaggattgggctatagctgctgaagaaggacctaaggttctcatgaacctcaggatagatttttgagcccatgggccaaggttgggtccccttatctttgtacatattaaattaaaatttcatttattttggtccttgtatttaaggctccataatgtaggtagggtaccctataaatgtaagaatttcagcccttgtattttaaggcacctaaactagttttgtattaagggtagntttgtaatttcacatgcattaagcgaatatttggtgtgtgtgttgggaaataaatttatatgaattggga

SEQ ID NO: 232158 - DNA, 262 bp, Glycine max
atagatttcttctcgtgagcttgcttccgatgatggaggccgctggaaaatgtcattgttgcattaaatgcaagtctcactcatgctggtagaccactctctttaatttttggacggatctttaattagaaaccacttctttttcttagagcgagtctattatatcatgacacgtgttttgatactatatgagcacttccaaagtgcttggacttcatgggatcttcgtttgattctaaccattctgtagcaatatcttata

SEQ ID NO: 232159 - DNA, 390 bp, Glycine max
cacacccgttgagcgcctttcttgctgatatctttacgaagctatatataggggtgatagtgcatatcttctttatcttacacctaatttatgaattagataacactcttgacggttgtcaggccgaagaaacactgtaatgacagatcgtgatcattgccctccccttgcggtacgtctatgctaattgctgataggcttactaagtttggcttgatcattgaacaactacccatcctagactggtagctatgatgtaattgtgcaattgttccccttcttctgtcttgataaaatccctagtgtttagggtagtccatttcttgacattttattgctaatggagactgaaaacactatgctaatcaatgacttgggagcattatgatg

SEQ ID NO: 232160 - DNA, 374 bp, Glycine max
  unsure (1)..(374): unsure at all n locations
gcatgcaagcttaagcttcttcaatgccaatgttcnataatntttagagnatccttgnggaaccttcacccgacgaagacactgacaaaaacttatctttctccttcttggacaaagtatggcacgctgggggcaagtaaattttcttcccatcacaccttggatgcaactgtgatcgtatacccatatcaactagatcttgacgggtattcaagccatccttcgtcttgccttgaatgttaaggagcgtcccaatcacactatcacaaacatttttctccacatgcataacatcaatacaatgtctaacgtcaagatcacaccagtacggaagatcaaagaaaatggacttcttcttccatatgcaactctga

SEQ ID NO: 232161 - DNA, 381 bp, Glycine max
  unsure (1)..(381): unsure at all n locations
ccactatcaagnagaatntgaactaccatgccattaattggaccactaagcttcatagtttctttaccataggaagctctaagggcatnanaagaaacatgatggtntaaattcaaattttccatctcttcctcaattctaggaggtgggtctagttgcacttcagcattttcatcctcatccatttgcaaaagtaggtattgccggataggacacctatgataagaagtgaacttctcatcacatgtatagcatagccctttctcccttcgaatctgcatttcaagtgtggacattcttctaacattttctggttttggaaaattggaaatgtaattcatgttgaggcttggaagtaaaggtggtaggcttgtggattta

SEQ ID NO: 232162 - DNA, 455 bp, Glycine max
  unsure (1)..(455): unsure at all n locations
agcnttgcatttagaatgttaggaagattcatagtaactcgagaatggaatattggaaaactgcaaagaaggttctaagagatatttacaggaaacaaaagatcacatgcttacatagaggatgtctgatcaccttgagatgattgagtattcaaactcagactttgctagatgtgtggatacaagaaaatttactcttgggtatgtatttcttttagccgaaagagtagtatcgtgaaagagtgcaaaacaattagttgttgcatctgccatgaaagttgaatttgtagcatgttttgagactataattcaggctaattgactgcagaactttatgttagggctgaaattgtcgacaatattattacgccactgaaaatatattgtgataactctgcaactttttctcttctaagaaggataagtaccttaaacgtggtaaacatattgaattg

SEQ ID NO: 232163 - DNA, 454 bp, Glycine max
  unsure (1)..(454): unsure at all n locations
gctttanagaaagtcacatgaagatgtcttgtttttacgctgcccagccttcgttaaccggtggatcttctctaaattaggccttcaacttcacaagacatttttccataatctgaccgttgggatctctgcagaaagatgtcatggaagttgtgctcataagctttccgttcccgagagcatatcttatttaagcatttcagtctttcctttcgggtagcttaggaaaaacgccatttcttcttctttctttcttccaaagccatctctaaagtcccaagatctttctctatcgcccacagccaccattagccaccacaaaccatcgttgttctcacaccgagaggaaccttaaccgagccggatcttccacttggcttgcatttcggtagagaccaaaccctaactgacctttcttctctttgaggtaccatggtttccctggtttctgtat

SEQ ID NO: 232164 - DNA, 395 bp, Glycine max
  unsure (1)..(395): unsure at all n locations
tcgctcgtgttatctatagcatacacctctgcttgcatttttttgttttttccaaganaacaagaaacgaatttgttattcagattaaagctcatgaaagcaaaaaagagagtgagaaggcgaggtatttatccactcagagaataagagactttatgctataacacaggaataaagcttgaaaaaaaagaaagaacatatataaggcttctagtcccacatcgctcaggataaacacttgaataatgtttcactccctatatatagaaagctcatttcttcatttttccttgttccagttaagaagcatttcctcaacttttctttctctctcccatatttcagccgatgcatttccggcaaacttctctctttttctttctggcgctctaaca

SEQ ID NO: 232165 - DNA, 429 bp, Glycine max
  unsure (1)..(429): unsure at all n locations
agcttatatatgcatgaaagagaacttatttttatgtctttctcaagnatgctactttgcttatcctttcttgggcgtggattttccaacaataattggtccctgtgctcttatctattttgaactttctttaccttgtagatgcgtgatatggccaagggaaaacgtgagattagggatgataacaattcgggttggacatggatattatccgtccattttccattggtatttgtttgaaaagttctcatgaatttgtgaatacaaatttttttcgtcatttttacacaaatccaaagcatcttctaaaacaaccacacatcttcctaaaagaaattacacttatgttgaatgttctttcaaagagtacaataaaaaattttttgagttcctgacttaattaaattgattgttttctaaaatttaaaa

SEQ ID NO: 232166 - DNA, 415 bp, Glycine max
  unsure (1)..(415): unsure at all n locations
accttaaaactcagctgcagccctattgaaaaacggtttggggctgttcttctctcgctcgcggatatgaagtaataatgggcttgcttctcttcacaccagatgctttcttggcatggttcccattcgtttcaaagattcaaaccagaatgcttttcaaccaagctttcaacaaaaggttgcaaatttctcgtattcttggtggacaaagaagtgaacgctccttcaaccacaaagagcgacactgaagnttcattttcatctgctatctttattatcaaacgtttcaaccacgtgtggttgcattattataagaagttcatatattctttaaatgatgtgcccacacaaattggatgatatgaaagataataaatgttaagttattcatcatattatattatatatatatata

SEQ ID NO: 232167 - DNA, 430 bp, Glycine max
  unsure (1)..(430): unsure at all n locations
agctntcaccccataattccnccaaatttgtttatatttgctntgaaccaaaatttccttttatgaatgatgctctcctacaacctaagataaggtagaaggagataaactatacaggctcaaggttcaatcaaacaattatactttcagctcaaaatggtgcaagggataaatcaatcatgcacgaggtaagctttttagctaagtggctatcttcaatccaaacatggccttcatcatctttaatttcacgcattcattccatactcaaagattcatgcaaaaatcattactcaatgttagtcgttctctcacaattaaagatcacactctcaccgggttacggctaatgcgttccttcacaatcaacctgacaaaccaactaacattttcattcatgatcctcattccatgttctttctctctaatg

SEQ ID NO: 232168 - DNA, 404 bp, Glycine max
  unsure (1)..(404): unsure at all n locations
acctatgaaactcagcttcaacgagaaatcgaaggcatctcaagaagcttggctttacatatatggngatcatgagnggatcatggcaggagagcaaccaacaacaaaaaacattgatccgatggatgaagaagaagnctagcaagagctagctcatcaatggaactgtttngagncccttatgaatggatcatggcaggagagcaaccagcaacaacaaacattgatccgatggatgaagaagaagctcagcaagagctagctcatcaatggaactgttttgagtcccttatgattcaaaagatggatgctatccttcatctncatcaagagcatctagccgaagntcatggtcttggttgtgttgtttaatggctttctatcatgtcatggtctgtctatct

SEQ ID NO: 232169 - DNA, 372 bp, Glycine max
gcgaatacctgtgattagcaaaataataaacataatgactatgagtaaacaatatctatttagaatatataaaatcacctcgttttctatgatcgaatatgatatcatctgccatccattagttgatgcgctcaaattaaaatatgaaattcctattttacatcttttatatggcattatataaccctgcccagcacatcacaactttttctctgatttctctccgccatagaatagacttcgcccatatagctccactctggtggagttaaaatcaagattaaagttgcgcacgccatcaatgaaattaaaaattgcaactgaaaatccaacacatgactttagcaaagcaatgatacgtacaaaaatgga

SEQ ID NO: 232170 - DNA, 392 bp, Glycine max
tttccctcaaaagagaaccccaatggttggtccatataaacactcttttctaaatctctattaagaaagacaattttcgcatccatctgatgtaactccaaggcataatgggctactaatgccatgataatcttgaaagaatccttttgtgagaatggcgaaaatgtttcttataatcaatgtcatctttctgagtaaatctcctaacaacaagtctagcctcgtaatgttcaagggtgccatgagagtcacatttagtcttgaggacccacttacaaccaactcttctacaaccctttgacaatttacaaggtctcaaacaccattatggtccatgaaatttatctcttttttatgtcatttaaacacttctcagaattatcacagcttac

SEQ ID NO: 232171 - DNA, 208 bp, Glycine max
  unsure (1)..(208): unsure at all n locations
agctntggaaaatgttgttcttcaccttcttgataattttatctgctggcttagcgagcgtccactgatcaaggccgtacccgaatcaaataaacatgaaaatgcagtaactaggaagtgatcctaggtcgtttcccaacgagcagtgacaaaccaaatgttcataatatacttgcagtaacagtaacgatttggggggggggggttt

SEQ ID NO: 232172 - DNA, 362 bp, Glycine max
  unsure (1)..(362): unsure at all n locations
caacccaagtgcaacagacggtttattttggaattctctggtttgaattggttgggcttggattttgagaacctaaatataaatagacattttttctaattaggaaaaaggttttgaaaccttttcatttgttatatatttattataccttataagtgtagcttttcatttgaatttctacacatgcattacatgttaacatantttacttaatatcaaaagaagaatcaacctactatatgatactctttttagaactactttgatatacttanaaatgaactaatactanaaaaatagagactcgggagagtgtgcaggccaattagctagttaaatgataaaatatttatagttacaac

SEQ ID NO: 232173 - DNA, 420 bp, Glycine max
accagtattggtgttttttaagcccaaaggactgattcaagattgattcaagacttcaagatccagcatcaagaatccaatccaagattccagattcgagagaagaaatcatgaagccccaagtcaagacttcatataggataagtattaaaagaatttttcaaaaaccaaatagcacagctctgtcttacaaaagaattctttcaaatgttctaagttaccagagtgattactctctggtaatcgattgcctgttatcagtaatcgattaccagtgaccaatttagttttcaaatggtttgcaacgttccaaaatgattttcaatagtgtaatcgatacactatattagtaatcgattacaagtgaatcggaacgtggaattcaaatccattgtgaagagcacagctttcataaataca

SEQ ID NO: 232174 - DNA, 395 bp, Glycine max
  unsure (1)..(395): unsure at all n locations
agcttgcgattgtctcccgggaaaggtcgaacggtctgaaagatgcttatttatcatcgngcttggacgaatgaagaaaatggggcaaatgaagagggtgaggatgaatgagaaacccatgttgtgactgccattcctatatggccaagtgttccaccaacccaacaatgtcattacttaaccaataacaacccatgtncttacccaccacctagttattcacaaaggccattcctaaatcaaaccacaaaacccacctaccacatgaccaatgctaaacaccacttttagcacgaaccgaagcaccaaccacaaaggaagtttgtcagcaaaagcctgtagaattcacccccaatttccgtgtcatatgctaaacttgctctcatatatactcg

SEQ ID NO: 232175 - DNA, 395 bp, Glycine max
  unsure (1)..(395): unsure at all n locations
tgaggcatgcaagctttacatcatcgatcacacaagagaggtttattatataaagagcancgcncncgaaaaggacagcaccatctccagtgaaaacacaactcacagcacacgcaatgaaaattgaccactgaatatataaccaaaatgtctgaaacctaagcctacccatacatatacataaaacagaaatacctaatctcagagcagtcaccactaacccaaacctatgacaaggaactacataaaaattataggcataaagtcacccatagggaagtcccatcagtaggatccctatgaggaattatcagatccctctaccaactccatgtccccctgcatgtcctcctgcgactcagaatcctcctctaaccccgctagtgataatgcct

SEQ ID NO: 232176 - DNA, 357 bp, Glycine max
  unsure (1)..(357): unsure at all n locations
agcttggactgtgctatagagataaacanattattttaattgaaccaagagccatttctagggcaaaattgggtgctgaacagtcaaattttgatttcgtgagatcttatgcgcaaatccactttgtacaacgctaaattacgttatggactgttgcgaggtgagagtcttgcttcaaatttacctcattctaaatctccttttcaaacctacaaaacacattgaattgaggggtgttggacacctacattctgngttgctgcgctgcagagcatgattttgggttagacatggttgatacatgattcgggacttgtacgaattgatttgcgcaagattggatgagaggaagtgtga

SEQ ID NO: 232177 - DNA, 454 bp, Glycine max
  unsure (1)..(454): unsure at all n locations
agcttgctctgaagcaacattattgggactttaaggattatgccctccctacttttcttgacggnggacgcaccgtccagtataggctccactaatctggggtgaataggatattgctagcaaactttgctagaaagaatgccatttactgggtctttatggggttacaaagcttgtactagagatcgaactctgacagttctacagaccatgctgccatcctttctgccaactgaagcttttgccacactggcttgataaggtagttcatcatgactaccacttggtgactttcgaaatacggcctgaggcgctgggccgaggttatgaatgacaacactaccttctctaccatctagtatcgcttctcaacatcgtgaaggatacacctcgtgaaatagatgggaagttggtgtgtcttctcctgtacgagggctgagctgacagcctcgtc

SEQ ID NO: 232178 - DNA, 440 bp, Glycine max
  unsure (1)..(440): unsure at all n locations
ctgcagctatagagtgcgtcgggctaccatttttggcttgggncngcgaacctgtgagactcaccaagttcggaccttgggtttgatgagcctttggggaaacgaccagagaattgtacgtcttgggtttttgaagggactcaccaaaggtgaactcttggttaacgagcttggtactcatggagtggcatgtactggagtcgtancggcatgctcttgcacacatgtcactcatggagtggcacgtactggagtcgtagcggcatgctcttgcatacgtgtcacccgtggagtgttacatactggaggcatggtggcgtgctcttgcatacgtgtcactcatggaatggtacgtattatagacgtgcatgtcacctcgtggagtggtatgcactggagaaatgcggtatgctttgcatcatgtacttgtgaaggatgct

SEQ ID NO: 232179 - DNA, 404 bp, Glycine max
  unsure (1)..(404): unsure at all n locations
taacatggtgacatggcaggtaattcatctttgcaatgatctattctaaatgatctttattaatatttatattgttaccccacatgcacacgagcacagatatatgtagagactatgggaggggggagaactccttttaagtgctctgtgataacgaattaatattcactgcacttttnggaaaaattttgaatacatccatgaacactcctgttgctgaccaattcttaaaagaatcatggccttgcatgaaaagncagcagctacccatgtntatcttatgcacaggcacattcaaagagttcaatcaatgctttcattgtcgatagtgttccaaaagtagttgtctccagcaatgttgttaaatggcagcaccatggcggaatggtgtggtgggattttcc

SEQ ID NO: 232180 - DNA, 316 bp, Glycine max
ctcacaaataggtttagattgcgggaattttttttgcatatattcatcctcccagaaaatccccatcatcacacttatatttgtgacaattcttttcaaccaatgcttattgatttgcaattgactggtgtctcattctattggaacacaaccatgttttgagagttaaaatataacattaaacatgccattgagttccaacacaagtaagtataagtggatattaatttggtacaaatgcctaccttttcatgagtgtaagtttcacattgttctagtgtcaatatcttactctttatgccaggtgaacaacttt

SEQ ID NO: 232181 - DNA, 419 bp, Glycine max
  unsure (1)..(419): unsure at all n locations
agctttaaaatcaataactgatctgctatctttctacccaaaaaaaaaacaaactattgttgttattatgatacataaagaaaccgtttaactcaaataagattattttattctcatgaagtttaaagatctcttgttttaaatacaactcttagtacctaaacttgaaanttctaattaaaataaaaaaatntcatgtctattaatccaaagattaatttaataatgtatcttaaaattttgaatgaaccttgttattcttcttatcatataacttctttacaaaccaacccttatatttacctcatgcaatttaatctccttccggcttgttaattcaaaccacaagatattagaattcctgaccaacctttagcagtgatctttcatcataatcagggcaaatatattattctata

SEQ ID NO: 232182 - DNA, 347 bp, Glycine max
  unsure (1)..(347): unsure at all n locations
ctcagcttggccaggacgctcanataaacgcaatagaactcttcattatcaacgacccaacaggtaatctcgctggacctaatccagaccctcttcccaatctccaaagcgggtccacttgaaacctcaaattaaaaaagccatggcaccaccatgagaactcttgctgccatttgcaagttcagatttccggttatcttttgctctcctttattgctatcctcatcaaacgcaggaaaaatgtcgctgtcaatgaaagttcaaataaaaaagagggaacttctctggacaatggctcactatctgtaccaacgggcctctgccgccacttctcaatcaaagaaatg

SEQ ID NO: 232183 - DNA, 458 bp, Glycine max
agcttcaaggatcttgacatcgtcagccatgttattcgcctccgtaaaatgatttcagtaccacttgggatattttctggttattaattaattccagtccttataattattcaatagtagttagtaggatagaatggtacgatctatgttttgtaccgagctttgcccacataataatattgtggggtttgttaaatgtaaatatagaaaatattgaaagttggtagttgaccaatgaatgatgctttgatgattgcagtgtgtttgtaaaaaatcatcctaataaccgaatgctgggaaagcataaattctttaatggaaaggtatctaatggagacaattttgagtaacgccaaattcacgttttgacaaatgtcaagtagttaaacttattttaggaataatctgagtgataatttctgttattgcatgagtatgtatatgtgcttttgctggag

SEQ ID NO: 232184 - DNA, 364 bp, Glycine max
  unsure (1)..(364): unsure at all n locations
ggtgatcattggagcatntagtacttgcattaagggcatattattttgcatgctgaaaaatctctttggttggttttcgtatcgagcactacagtaagaaatcacttcctttgagtcaaagtagatttgtaatagcaatgcatgtcttttgatgttgtttgacaactccacaaaacttacatttgttcttcataggattcaaaaagatcctaggaaaatgtcttatgatacaattcttgcaaaatgattctcagacataaagtattaaattaaatcttaaatattgtgtatagcccatgttgctaaaggtttttatcaaatggtgatgaaatttatagtttatcaaattttctattattcatta

SEQ ID NO: 232185 - DNA, 394 bp, Glycine max
  unsure (1)..(394): unsure at all n locations
agctnttacaatttgaatccacataatttttttgttgaaatgcacttcctgtcgattttttatgcaaaatccgcaggaaaattctcatttaatcgacattnttctagtagtgaaactgcatgcatctacttctgcattttctaatgataatagtagatatatatgtccataaaattggttaaaagaagtttaaaccccattttgaatccatgttgacacgagtgcactttcaacatcaatttgagattgattgaggaagaaaccgatgcatcaataggaagaaaccataattaattatttttccaataaataagtcttccaaacatgaacatctgttttccttaaattaaatttaaaatttaattaattcattacttttaanaatttctagttt

SEQ ID NO: 232186 - DNA, 450 bp, Glycine max
tgaaggactacgttacactgatgaaggagggtcttattgttatttactacatcacaggagagagcaagaaggcagtggagaactctcccttcttggagagactcaagaagaagggctatgaagttcttttcatggtggatgcaattgatgagtatgctgttggacaactcaaggagtacgatggcaagaaattggtttcagctacaaaggaagggttgaagctagatgatgagactgaggaagagaaaaagaagaaagaggagaagaagaagtcatttgatgaactctgcaaggtcatcaaggacattctgggagacaaagtggagaaggttgttgtctctgacagaattgttgattccccttgctgcttggtgactggtgaatatggatggagtgcaaacatggagaggatcatgaaggcacaggctctgagagacagcagcatgagtg

SEQ ID NO: 232187 - DNA, 428 bp, Glycine max
agcttgtctcagagtttatgcgagacatagtatttcatgttagctatcatcgccaagtaccaagaagagttaggtctagccacggcccacgagcatagaatcgcggatgagtatgcccaagtgtatgcggaaaaagaggctagaggaagggtgatcgactctttacaccaagaggcaaccatgtggatggatcggtttgctcttaccttgaacgggagtcaagaacttccccgattgttagccaaggccaaggcgatggcagacacctactccgcccccgaagagattcatgggcttctcggctatcgtcagcatatgatagacttaatggcccacataattagaaatcgctaggaaacttgtatgggctctcagaccttgactagatacgacttcctttttgaataaaatgagttggcccatgttta

SEQ ID NO: 232188 - DNA, 277 bp, Glycine max
atttagtcatcctgcttggaccaatgagaaaactggggcaaatgaagaaggtgagaaagatggagaaacccatgctgtgactgatattcctatacggccaagtttcccaccaacccaaaaatgtcattacttcaccaataacaaacctccttaaccaccacccagttatccacaaaggccattcctaaatcaaccacaaagcctgtgtaccgcacttccaatgacgaagaccacctttatcacataccataaaaaacaccaaccatgaaatgaattt

SEQ ID NO: 232189 - DNA, 352 bp, Glycine max
  unsure (1)..(352): unsure at all n locations
agctntacttctacatagcgtctattatcttctgtgccacatggacactcacctgcgtcaagatggcatagaccaactggcacttcggcaaggggaggtcggaattatgattgttggggaggatgttgctgaccaacaatgtcatccaaatcaatgtcagggtggtcatgctagtgcacatgatccacccccgtattcccgccacgcttcgggcaaagtcctgccctggaacacaaagtcactgactgatggcctcctcgtagaaccctgaggcctagctccttctttgactgaattcgtagcgttggccctcttccaagaccaatggatgctccaggaacttattaatggc

SEQ ID NO: 232190 - DNA, 375 bp, Glycine max
  unsure (1)..(375): unsure at all n locations
aaacaaatcaataaatttgnttaaggtttgggtgcgtaccaaaaacagtatcgtcttactgaagacnaatatacaaattaagctctatgtgtgtcttttctctaaggaattacaaggtattttgatagcttctaaaaacttatgaaatctaaaacataaagatcttgaaggttggacataatacacaaatcaaagttcgtcacttcaactcttcattatttatacgctctagtagaaagtaattgtagtctctaaatgaccttcaaactgcatctggagcaaatgatcgttggagcattaaatgtgagtcaaccttcagtttataaagcactttgcttggtttccttgggcaatacttcttctgctatctacact

SEQ ID NO: 232191 - DNA, 359 bp, Glycine max
agcttaaacattcactttcgagcctcccgatatattactggactcaatcaaacatccgagaaaaaagttattgtccgttgaatttgctcagaggctcaacattcaatttcgagcgtctcgatatgttatgggactcaatcagatatcccgagaaaaagttattgtcgcttgaattggctcagaccttcaacattcaatttcgagcgtctcgatatgttatgggactcaatcagatatccgacgaaaaagttattgtcgtttgaattggctcatagctttaacattcaatttccagcgtctcgatatatgacgggactcaatcagacattcgagtaaaaagttattgtcgttcacatggc

SEQ ID NO: 232192 - DNA, 371 bp, Glycine max
  unsure (1)..(371): unsure at all n locations
actccgatgtttgattgagtcccttcttatattgagacgcgcgaanatgaatgttgaagctcttgaccaattctaaccaccataactttttactcggatggctgattgaggccccgaatatatcgagaccgtcgaaattgaatgttgaagctctgagcccattcaaacgacaattactgtttactcggatgtctgattgaggtcccgtatatacccagacgctcgaaattgaatgttgaagctctgagccaattcaaacgacaataactttttactctgatgtttgattgagtcccggcatatatcgagaccctctgaactgaatggtgaatctctgagcctaattcaaacacaataacttttttctcgga

SEQ ID NO: 232193 - DNA, 433 bp, Glycine max
  unsure (1)..(433): unsure at all n locations
cttatagtgacctgacgcatgcaagcttctagccanatggacttaccttgaattattttctttgttagccccttggagcctattttcccctttctttgttttgaagctcattacaagccttaagtgaaaaaccatgatatcaccttacccttaaggaattttggagctttggaattgttttgggaataagctaggaataagtgtgggggggtatgtttcattggaagatatgatttttggccatgcttaatgctttattctggccatgcttgatgtatatatatattgcctagttcttcttttaacttcacattccgactgttcaatcaaaataaaaaaattcagtgccttcttctatataataattagaatgagaaacaaacacaaagaaattcagttgctgaaattctgcaattccgactattcacaaaaa

SEQ ID NO: 232194 - DNA, 446 bp, Glycine max
  unsure (1)..(446): unsure at all n locations
gtgctagactattaatagaaacatgtgnaacacctgttataactctgattaatgagaaactcgggagacacactgtaaaggtcaaacttttcttcctcttttccttcaatttccatgccctcctctctcttattctcttcctccattgaagctttctctctaagcttcttattcaaagcactctcttggtggtgaagcttctccttccatggcttattctctagtggatgacgcctcctctcaccttttcttctttatcttctgctgcaactccatggttgaaaaatcccattggaggaccttattgaagctcaaagatccagcccctatagaaacttctcaagcaagcttccatcaaatggtaatcaaagcacttaagcttcaatacgggctccttaaacactccattaatttcaaccttacttttcctccattggtggtcttca

SEQ ID NO: 232195 - DNA, 128 bp, Glycine max
tacacacatttgttcctagtcgatcactcacttggattatccattctccccctttgtgtttgagtttatggcttcacttcggaataacgtaattacctatgtgaggtcttggattaatccctatttct

SEQ ID NO: 232196 - DNA, 250 bp, Glycine max
ctttcttgtttgaagtactacagccttaatgaaaaccatgatttaccatatctcaggaatttggactttggaatgttttggaataaggggggggttttgtttattggacaacttgtttgttgctatgcttcatgatgattttggccatactgatatacattgatattggtaaatgtggacatgctgatgaaatgttgttttaaagcaaaaaaaaaaaaatcgaaaaaaaaaaaaaaaagaaagcataatt

SEQ ID NO: 232197 - DNA, 495 bp, Glycine max
tcgacccggatccttgagtcacctgcggcatgcaagcttaagtaaagttaagcattccagaccatatcatgagatagtgctaaattggtttggacatatacattatctttaacattactattagcttgcacaagatatatgaatccactttagttcttttatagacttaaagtttaatgtcttagctattgaacctaattagccttgttccattactttcttctacaatttataagaataattaaattaagacatattaaacacgaaattgcacaatgacatgttgcaggggcaaacctagactgagaagatagagaaggccaatcacaaaaaataaaatacatcccagaacctttttatgctgaataaatacatccaacaactatataccattaattttgtacagaatatttataatttgatgcttcaatatgctaaattacattattagtctatgacaacaaataacattgtctcactataaatagcacacat

SEQ ID NO: 232198 - DNA, 423 bp, Glycine max
  unsure (1)..(423): unsure at all n locations
ctggttcttgcaattccaagacacaagagagcttcctaatatgtggcatgtaatttgcaacctgcacaatcagaatctctatatcttgactcatccactgatttacctttctcatctaagtcaaggtaggttgaagttgtcgttggagtatatggttctttgcattntttatgccaaatttcttaattagttctatagagtatttggtttgacataggaaggttccatgtttcatctactggacttggagtccaaggaagaaatttaactcacccatcatagacatctcanattccttctacatacaactagaanattccttacacaaaatttcattactagcaccaaatataatatcatcaacatatatttgaagcaataacaactcactatttactttcttaataaaccatgttttgcaac

SEQ ID NO: 232199 - DNA, 438 bp, Glycine max
  unsure (1)..(438): unsure at all n locations
agcttgttaattntgaaaacagaatacacttttttatgtattaaaaaaaagcctacgggcgtatatatatattttttattttagaatgtaaaagaatctagcaaaacacatnttatgggcacggtgataatgataggtaacggacatggcgtacatccatcgaatataaagaacctttcaacatttaaaataccacttcaaattacattatgctcagttcaaagttgcatgccaattagatcgaattccttgtatttgaaaaaataatgaacactggcatgacattcgtaatacctttttcgattattaaaatataaataggtcattcctttaatgaaaaaaataacaaatgttccaaacattatattcaaaagtcatggaaaagcatcagagcatcatcgagtttcagcaatgatgatcccatgagtaaccggacat

SEQ ID NO: 232200 - DNA, 350 bp, Glycine max
tcttacacaaatctaacttttaaactaagtgatatcaataaacttatttattaacgtggtgacaagtcaactgttgatcaatattaaatcccttgaaagattgtactgttgggtcatgaaatatacccgtactagtgatatgattgaccaataaggcagaagtactcggataaaatacccatctgggacagagggagtagtggtctaatgctacaagaaattcgcattaccccacattgaataattcaatttcttgtgtatacacaaagataaatttgtatattcgaaccaacatatcactatgcacacgtaattaatgaacatgaacacatctcagcaaagacaaccaa

SEQ ID NO: 232201 - DNA, 442 bp, Glycine max
  unsure (1)..(442): unsure at all n locations
agcttattaccatgaggaaagaatcatgcttctttaaagttgngatttttacactcatctatagctttgtaggtcccaccagaggttttatctacagaaagaatgtaaggttaaaacaactaaaaaaaattggcaaaagtagaaatccatcaagataaaaggggaagatctgaagctgaaggataacaaatcctcctaaacaaaaaaaaaaaaacgattattctaaagaaacaatttttaggtattgccccgtgatgttcattgatgtaacacagagtaagaactagttaaattcattgattattacagaagacagctaaaaaaccaattaaagttcgttcataaaaatacaaaattacaattcaataacttatgtatcaatgagactaagggatttaatataaggacccaacaaaagttaaatttatttataaccatcatt

SEQ ID NO: 232202 - DNA, 424 bp, Glycine max
  unsure (1)..(424): unsure at all n locations
ntagataggatcacacctattgatatggttgctctctggtatcaaatttcacatcaattcacatagaaactctcacaaatatacctaaatcactttcagctaaaacctaatctacgataaagagcacaatgcaacaagagtataaccaacaaacaaaaagcttaaaccaaatgtaaatacacacaatggggacctggaaaaagacaaagaatgagagagagagagagaattacttggaattggtgttactgtcaatgataattttggcaacaaatagaagaaggggagagaaagtgagaaatgcgacgaaggaaattttttaagcacatatgactcaaacttagtgacggtttgacaaaccttataaggtgacacaaaattaatttgtattaatcatatagttggagtagacgagaaaaaaaaa

SEQ ID NO: 232203 - DNA, 260 bp, Glycine max
tgataaatcccaaaatatttttcttatttagattattgccatatatatatattcatcagccgaatccatatccctatatgtcggctactgttaattgctggctttgtgaattgattatattgatcattgatgcttgaaaacgatattaagtatccttcctaccatcttaattatgaaaacaaaattatgtatatattaaccgcataaaatagtattatatattactttgtaacgatcacatatactttgcggatgcttga

SEQ ID NO: 232204 - DNA, 403 bp, Glycine max
tatatgcagaatttgctgggataagagcagtttgtaactgggggtactcctagatttcggctgcttgagaatcaacaacaagactctgagttacagaatgatgactaccaaagtcattgtcgacatcttctaaggcaaaatgacgattgcttccatcaattaaatggccatcatcattaacattagctaccacagaaagataaatagccttctgttgttgagccacatgcctgaatagagcatatttctattgatttcctctattcgattgtgtgcaacatgacattgatcacaaaacattggcagtctttcgtactctactccaacatagaacgcgtaatctgtatctttcaacaagaatctcaatattaagtttttctgcccgatccacatctacaagaat

SEQ ID NO: 232205 - DNA, 442 bp, Glycine max
  unsure (1)..(442): unsure at all n locations
agcttgtaccaaacgacatggcaatntttatctttaaattgattcgaattcagaataaagataggtctgcgtaaaagcttcgctgatatatctggaatatcattaatcagattattttgagacatattcagcatttccatattgaacaagttgttccaaaaccattctagcacagaatcattaagctcactatcagagatatctagtctaagtagaaaactttgagtctgatgctaactatgagaagtcgagcccaacttgcaagatcttggtctcaagaagtctaattggaaaataggaacccagctaggggcaaattntacagacaataatcttgtgatagttgtaagggttccaatttggaacaattagaaagatgtgatttaaggacatcaccctccaaaacaattccctccaggacaatatgttcaactcagatagc

SEQ ID NO: 232206 - DNA, 329 bp, Glycine max
  unsure (1)..(329): unsure at all n locations
tcatatgtgttggcaacaaattcatgtatgctggcaaaagaacttactatataattatcacatttaaaataaaatgtttgtcttaatttttgctttaggtcttactttatgttggatcggccctgaattcatcattaaactgtagttcacagaaagaaatgataacatgcatccatattggtttaatctgtgttcaagaaaatctagccaacagaccaatcatggctaacgttgcactcatgctaaatagttgttctctctcacactagtgcctacaaaacctgcattntttatggacaatgcaactaaaagcctttcaaaaatatcat

SEQ ID NO: 232207 - DNA, 301 bp, Glycine max
  unsure (1)..(301): unsure at all n locations
gctcaaatatgtggaggcaattttggtttgttctcttgcttggctgggttgaattaggggcttgtatgacatggccctacgcctataatgtatcttgaagtaatggggcatgccacattgtccccgttctcttgctattgatgcctacacgcgcgcccaccaagtggtcggtgacatgcctcaatggcattagcgcgtgattttngtatggaaacaacctatgcgaccaattggcttgcacatgttttctatttttgggacatgcattcattttcgtagggctagagttattgcccacata

SEQ ID NO: 232208 - DNA, 362 bp, Glycine max
  unsure (1)..(362): unsure at all n locations
aactcagctnactttcttggccatgctgactagtgggagtgattttttgttttntgttgctcagaaacagcaatatccaccactccttcagatggtctgtccaggtactagttgattacagtatgagagaatctaatacattntcctctgacaaacactttctgacactcatcactctctctgtctgttatgtcatagggaatgctgaccatgaattctatgactagactttcatagcaatctccaacttggtgcagttttagcagtccacagccttgatgaggacatgatcccttgcaaccaagcatctttccagttctcttctaagccagctggttgaatacaattccaccttcaacatg

SEQ ID NO: 232209 - DNA, 500 bp, Glycine max
  unsure (1)..(500): unsure at all n locations
tnctagacgcctactctagatacaactagatcagaatgcattctccagtttatgagaaaatggcattcatcattgaagatgccaactntngctatagggtcatgccattcagcctaaaaaatgcaggcacaacataacaacaactaatggaccgagtcttcaaacaacagattggacaaaatgccgaggtatatatggacgacatgattgtcaagtctcaaactataccccaacatgtggtggacctggaagaagttttcggtgaactacgaaaatacgacatgcgcctcaaccttgaaaaatgtacttttggggtaggcaacgacaagttcctcaacaaatgcactggtgattgaagccaaccccgacaaatgcactgccatactagaaatgcacaacccaatcaacatacaagaaagttagaagctcaatggtatgctagcatccctgtccaggttcctcccaaagctcgccgaanaggcaaagctnatttacaaact

SEQ ID NO: 232210 - DNA, 460 bp, Glycine max
  unsure (1)..(460): unsure at all n locations
gggcagaagtactagcctacaaatggaatacgaaatccacttatgtcgtttaattgctngccaaagagttcgtacattcgactgaatagatatcctccatgccctatatcgtcaaaggtgcatggcctgttgcctcacagtgatacaagttntcttaccatcgtacatcaggaccaggttgggggattgcaattgatgaaagatggaaaatgggttggtgtcaaacctaacccacaagctctagttgttaatattggtgacttctttcacgtgaaatctcttcatttattttagagtaattgatgctatatttgcatacaatattatcttcttattngtcttcctaatacttaataaagaaataattcaataaagaaaggaaatgtatttaataatatatctctaacatggtataggagaatttaacactcagactatgctagaattgtaagtataccta

SEQ ID NO: 232211 - DNA, 293 bp, Glycine max
  unsure (1)..(293): unsure at all n locations
cacaagagctcgattatgtagaaaatatanttctatgcatcagcttggttgttagaaagacccaacatttctacctactgctgtcattctatttaccttgcatattatagatgttatcataaaaagttactttaaactctgtatgaaattatcactcatacacgtcctctcaataatgctttgactctgaacttaattcaggctaacattagttccctgcgttcgtactcggattcatccgctttaaaatttaatacttgagattcggcgtcctttctggtaaacccccattg

SEQ ID NO: 232212 - DNA, 213 bp, Glycine max
  unsure (1)..(213): unsure at all n locations
ctaagcttctgataattggagagttctagagagagagaggtctaagttccatatagttngagagaattntntgtgtgaaaatccgcagagactaaagctggaagaggaagccgtcctgagagcttgagatgagtttgtgagtgattgtgaggtcctataggtggaggagacatccccactacttgtatttctgcaaactttcattctcttctc

SEQ ID NO: 232213 - DNA, 215 bp, Glycine max
aaaaaatggatcaatgctggttaagacaaacatgacaataaagaaccatgagaaggaacgttattacttattcttgttagctagctaacatcgtctccatcccgatgtaataacactaagtaatatagaagatagatcatgaacattaataacactaataattatcatagatactgagagagaataattggaactgtgtagaacttagtaaatca

SEQ ID NO: 232214 - DNA, 387 bp, Glycine max
tcgtgcttagccaaggataatctattgcttatcgatcaagctgttgctcagccaaattcagatctaattgaagttggcttagctcacccttggccagctaagcggaccaaatcaaccttagatgcaagggttgggcgctaaacgcttgacactcttggcttaacgcatgaccaaagatacgcttagtgcaaagcttgcgctcaacgaaaggactatctttaaaaaaacgttatctaagttattttgtagtccttcttccatgacatagacacccttatatctacattcatagatacgctgatatgcttcaatgtacagattatctaccaattcccactgtctaatgcatgaacaacaaaattctgaaattaaattggttgctcatag

SEQ ID NO: 232215 - DNA, 450 bp, Glycine max
  unsure (1)..(450): unsure at all n locations
gggaccgtgcacttagcgagactcaaccgctaagcgagacatcagccacttagcgagtgagatagatattgaagagaatccaccatgtcatcatgcgctcaacgcgtcatcagctcgttcagtgagaagattgtctcttttgcgcttagcgcgagaatggcgctaagccatatttcacttactcgcgctaagggcgaaaatggtgctaagcgcgcctttacngacaaaaagcactttntaaacctaaattgcagagaatgaaggggaggtctgaatagactacgtgagcctagtgcagaatgaagaacagagggaaagttgagcaaggaagaaaaaggttctaacttttaggtagattttaggtttacaagtgattcctaggttcctagagatggaggagacatccncactactttgtaatctggtattttctctgaaacccttctccta

SEQ ID NO: 232216 - DNA, 485 bp, Glycine max
  unsure (1)..(485): unsure at all n locations
cttccttgagaagcttgtttgagagaacttttcttgagaagctagagcttagctacacacacccctctcataactaagctcgtctccttgagaagcttccttaagaagattcctaaagaagctagagcttagctacacatacctctctaatagctaagctcacctccttgagatgagaagctagaacttagctacacacccnctataatagctaagctcacccccatgacananaacataaaaatacaaaaaaaattccttactacaaagactactcagaatgccccgaaatacaaggctaaaaccctatactactagaatggccaanatacaaggcccatacgaaggataaacctattctaatatttacaaagataagcgggctcatacttagcccatgggctcgaaatctaccctaaggctcatgagaaccctanggccttctcttggatctctagcctaatctacttggagtcttctaccca

SEQ ID NO: 232217 - DNA, 482 bp, Glycine max
  unsure (1)..(482): unsure at all n locations
actaagcttctagcatgtcttcatgcaccanagataatgtagagggatctcttctgtttcccattatgggctactttntgctttttagcaaggacaaagtagtgaggaaaattgacatgacaacattgaccaaaacacatgactgttaatcacgataaactattttttttaataatattcatcttgggttaaaaaaaatcccaataaaaaaattaatgttactctattgtcaagctcagatttatcttgaaacggcggtttgagagaacttgccattaatttaaagggtgaagtggagttaggaagagaggtttatatcaacatttatatgggaatgagagtgacatcttatttgaccaaatttaccaagaaatctcaattttttcaaagggataagtaaaaggggatggcagtgtccatgtgcctctgtgctattttgataagcacaacccaccaagacatanatgtagcacctttatgct

SEQ ID NO: 232218 - DNA, 509 bp, Glycine max
  unsure (1)..(509): unsure at all n locations
actcaagcttcttgagcaagtaagtgcactgtacagatattatgacaccgttgttaccttatatgctttaattagatgaaaataatggtgatgatagctacgcaatagcagtatgcaaatataaaactttcaaaatctggcagtaaaggttatcacagactaactaaaataattcagactcagataaaagctttaattgtcaataaagtatatctgtccacattgtgccttacaagtccttagaaaataatcaaccgtaagacataagatcactgattgagtttcggaagcatacacgtagaacagtaaagatcaatcatcacaactcatcagatgtttacaactcccgaagaaaactcaaattaaaagatgatagacagaggcttaagtctgtcctacaacctcatcatgaccttggagagcctcacctacgatagtggcgttcagctcacacacaaataggacaagcaattgggaagtgcagacatctcacantacatataaatctc

SEQ ID NO: 232219 - DNA, 317 bp, Glycine max
  unsure (1)..(317): unsure at all n locations
tccttgagaagctagagcttagctacacacgcttataatagttaagctcacccccatgacannaaaacatgaaaatacanaaaanatcctactacaaagactactcaaaatgcccaaaaatacaaggctaaaaccctatactactagaatggccaaaatacaaggcccaaaagaagaaaacaacctattctactatttacaaagaagagtggacccaaccttggcccatgggctcaaaaatctaccctaaggttcatgagaaccctaaggccttctttatcaactctagcccaatcctcttggagcctcttgctcat

SEQ ID NO: 232220 - DNA, 323 bp, Glycine max
gaatgatatttcagaagagatgttctataaaacaatattgggcttatagaaatcccactccaaaagaagtacctgcactccagaataggctctcctcaaaggatttctggtttccagaaatgtgtttcgaaaggcttatttggaagaaaaatattccagattctggacaaggtgttactttccgagtaggtgttctagaaaccttttttcggaaaggtcattctatacaacataaaagaagggaggtgcagtgtgctgaaatgtacttggcatggacgggtggagtatgagagtgctgaacctttctcgttatggaagaacac

SEQ ID NO: 232221 - DNA, 428 bp, Glycine max
aacctttgcccaggagattatcaaatagatatgctcatcatccttcttttgaagaaaatattggccttcatccccaccctgataagatgtatatcaatcctagattccactccgatcggaaggtcaacacaatgtaaaggcccaacaatgaaaaatttaagtccatgatgctgtaacaccaagttccccccagaattgatatatgatattcctacgaaatatgagactacagcaatagagtcatttaacacctagaataaatataatcatcatctgttgacttaaagaattctttaaagctatctctatttgagggcatgagtattgtaaaaacacctcattgctcatgtcaaatgacaccaaacattctttcccatgttgtatctcactaatactcaaccaaagacatgttccatccatatacactt

SEQ ID NO: 232222 - DNA, 466 bp, Glycine max
  unsure (1)..(466): unsure at all n locations
atcttaagtgaagacgcccgtttagagattatcgataatccacnaggcaagtttccaatccagcattgaatactaaaggcagggaaaggacttctcagaagggtcacaatggtcgaggcagatcaaattctatagggaaaggtcatagaaaatttccagtgacgttacttgctggaattgtgacaagagaggtcactctagcaatcagtgcaaggtcccaaagataaacaagtctcacaataacaagaagcgcgatgatgatgaatccgcaaatgcaacaactgatgaacttgatgatgcattaatttgcagcttggatagtacttgtgattcatggatcatggactcaggtgcgtcgttccacactactccttctaattattattgtcaactattttctagagatttggaaatgttccttacgatggaaatctcttgcattgtggaaaggtgattcaacataaca

SEQ ID NO: 232223 - DNA, 409 bp, Glycine max
  unsure (1)..(409): unsure at all n locations
actaccatggaagttaaattatacatttgtttntaagctatggtagtgcatcatgttgtatatagctatggccttctgggtcatgtatatggtagtagcttcatgtacaaactttagaaaataggctttggttgcatatgtttgtttctggtttgcatggatctgtgtgtatgtgcttgttaatgagaacttgtgctggcgtgagaattctgtcatagccttaggcccccaaaataggaatatcatattggtatcatattggtatgtcaagtgtatcatgcatattaatgtcatatttatattataaatggangttagaaaccatggatgaacatcacacaaactagagggaatgactacataatgatgaaattaacaatgatcagatgaatgtgcacactgtcatgta

SEQ ID NO: 232224 - DNA, 431 bp, Glycine max
  unsure (1)..(431): unsure at all n locations
aactcagctgtttatggnatagaccagctctagcaacagttattttgacccatcccaacataaagcaatagtagggaatatatagttgggtaaactataagattcgcttcttggtatcttgcaacactgccaagtaaaagggctaattaggaatctaatcagttgtcatggatttattatataccgagaagaaatggatagtaagctagataatntgtatccaccctggataaacaatgcactataaagcagtcctaaaatctacttcaagacatttaataattcatgttgctgctagtaaagtaactaaacactgtatgcatcaccaatatcttgataaggatttgtgaaagtgttggtcctaaaatatgtaagtggtgattccactgcatccattggatggaagactatgccaacttgagaattgctat

SEQ ID NO: 232225 - DNA, 408 bp, Glycine max
accatggagatgcagcgtgaagacaaaggagacaacgtgagaggaggcgccatccactaaggaataagccatggaagaaggagcttcaccaccaagatgagccttggataacaagcttggagaggatgcttcaatggaggaaaagacagaaggagagaaagagagaagggggagcacgaaaatgaaggaagaaaaagggagagaagttgaactttgagttgtgtctcacaagactctgattcatcaaagttacaacaagtgttacacatgtttctatttatagactacgtagctgccttgagaagcattcctgagaaaacttccttgagaagcttctttgagaaaaccttcttgagaagctagagcttagctacacacacccctctaataactacgctcacctccttg

SEQ ID NO: 232226 - DNA, 400 bp, Glycine max
  unsure (1)..(400): unsure at all n locations
tcaatagttcagaaaaatatcaagagacattctttgatattcatgccataatagagaacagaatcatgtcatcaagcaaaccattgcgcacattgaaaagaattataggctcaagactcctatttatgtagctaggctcaatagaaagactaattattaaacttgttcatgctaatgttgtaccctaaggaaaactctgaaagccaagttgcaagatggaaatttatttttatggggttgtctaaaaacataatacatgcacaaatttaaaataacactaaaatcaaatcagaagaatgcaaaattctaatcttaatatggctcanagctaggggaagcacaatgatactcattctcacaattaatcaatgcatccaattagaattgcanaatgcatgaa

SEQ ID NO: 232227 - DNA, 424 bp, Glycine max
aagggatgccccacattatttccatgacacattatgcaaaatgatgatttggaaactttatgcaaaactggtcatgcatgcacctatgtggacactcaagtgtcaaatttttatgctcatgtgatgctagggctcacgattcattccctctattatagtcaacccaatgtgtccaaaatatgttcttttatccatttgtgcattcatccgagtccattttgggcgttcggggaaatttcactgcgttcacccttcgggtgtacacacatttttttcataaaccagctatgatcggcgaatttcccacagaagagtttggagtcatctcttttcaaagcatgtcggtttttcagctaaacaacatatatttggtttctttttcctctttttttcttactggctctctttttcccttacttgctct

SEQ ID NO: 232228 - DNA, 361 bp, Glycine max
  unsure (1)..(361): unsure at all n locations
gcgcatgaccaaagatgcgcgtagcacgaagttggcgcttcgcataaggactggttttcaataaaatgttatataaagttattattcagtcccttcctcatacaaatgaaacccatatatctaacattcaaagataggttgatatactcctatgtatagattatgtagcaagttcccaatgatctaatgcatgaaaacaaaaattacagaaattaaaactgggttaccttccacgatgcacttctttaatgtcattagcttgacgcttttacctcactgggcaatcttatgttntggttcttactttcataacctcttgacctccttccattacctgtaagcagacattgtgttctggagc

SEQ ID NO: 232229 - DNA, 233 bp, Glycine max
acatacttaccactcgcatttgtgcaatcatctatcttgaacttctttctgtgctaacaaagcttgctgctatggaaagctaaatcctctgttggatcttccctgtacgtacctgatgtaatatatttatattctatttaatgacgtcttgggtgttctctgtgctatctacttttcattctagaatcttttacctcgatcacgtagatgcatgctttggtacggtcattcca

SEQ ID NO: 232230 - DNA, 376 bp, Glycine max
  unsure (1)..(376): unsure at all n locations
agagcttatctcttttattctactgagagagattctcctaaattcctgagtgattcaagaacacctcggctgtatcaaaggactntcacaacctctgtgtgttgccctcgctggatagagtgattctttccttcctttcatcatcacctcttgtctttcataccacatttccagaaaaatcaccactgcccagaattatctcgtggccctaactcctattttcgcactccaataagtgatcttgatcctaatgaattaaaacagaactttcaccttccctggaatcactatatgggccctgacttcagtattgcattcttattctttcaccccactaactactttccatccttcatccttttgccataccccttat

SEQ ID NO: 232231 - DNA, 494 bp, Glycine max
  unsure (1)..(494): unsure at all n locations
gacttaaaccaatattttttntctaccaagccactactggctataaagaatctacaagaatttttgaaattntgcacaccgactaaaccatgtgaacatcttatagatggatatatcactcaatagttntggtcttttctctcaaggtatacaaggtgtcttgagagctttgtatctttacaagaatttacagaaagatttacaagaaagaatgaaaaaatgattcatgtcttggttcttcaatgcttcttctatatatagatttcatctccaagtattcattatctcttaatggttgaattctttactttgttcttcgtctgaggccttgagtttgttgaggcatttagtgcttgcattaaatgcatgtacattcttcatgcaaagntcatgttgataggatagtgtgtcttgtacttcagcaaggaaatcactaatntcatcatagcanatctgcaacaatatagcatgcccttngatgangatcaacatct

SEQ ID NO: 232232 - DNA, 435 bp, Glycine max
  unsure (1)..(435): unsure at all n locations
tcggctcttgatacaggntctatcatatcctattctttgtctttgttatttgnccaggcttgcngtttgacctcttttgttatttgcgttcttgtttgcgtcttgttgtgttctgggttttgttcttgttctgttatttgggttcttgttcttgattcatgtgtctttcagactctgtgtcaaaaaaaatctgttggaactttgtttaagattctgttacaaattctgtttgggggccaattggcttactggaagaattaggggttgagtgaaatcttgaatctatgtgcctcatttcctattgaataaattgcctaaattatcctaaataaatttgaaaagaaagcattataaataaaataacaggctgcagaaatttttttattaaaaagaagaagacagaaagtgggtgtttgatcttttaacacgacattg

SEQ ID NO: 232233 - DNA, 454 bp, Glycine max
  unsure (1)..(454): unsure at all n locations
tntcggctcacaccgggaacgcctctagntcagcacctgtgtattctattgcaccctctcagagggaagctccccaagttccaactccaaacacaactcgcccggccagcaattccaacgcaataaggaacttccctccgaggccatttcaagaattcaccccactcccaatgacgtatgaagacctcttgccgtccctcatcgccaaccaattggccgtggtaactcccggaaaggtcttccaaccccctttcccaaagtggtatgaccctaacgcgacttgcaagtaccatgggggtgccccggtgcattccattgaaaaatgcttgccctttaaacacaaggtccaacatttgatatatgcgggatggctgactttncaagaggatcggcccaatgtgaaaaccaacccgctcgccaatcatggagggggagcggttaatgccgttgagtc

SEQ ID NO: 232234 - DNA, 418 bp, Glycine max
  unsure (1)..(418): unsure at all n locations
atacttcatggaaattaagntctgaagaagagtacttggttccgccttatcgcttttggcaaaacgtttttcaatgtcagcaaggaattctttggcactagttatatcatttganatagtgtccctaaagacctaaggaatgtcacgcttaatgatcataagactcatgcgctttaagtgatcccacttctcatgaagtttcctctattcagaactacaagaatcccataggagaagggggtttctcaatccttaatgtaaggtctagatccatacaaccaagaacaatttgcatgttctatttccagtccttaaaatttgtactattaagaactggacaccgaattagatagcagatatagaagcaacaactgaatagattatacaaataatacattatgctcacaccacagtcatc

SEQ ID NO: 232235 - DNA, 279 bp, Glycine max
  unsure (1)..(279): unsure at all n locations
acctgcagatatgtcgcggcggtcaggagaccttggggacgtcaggtgcggtgctattgcccaaaaccaagcttgaccaatctcgacccaacccgggcatattcggtcagtgagaacctgcgatgtacctaancaggcgagctcatggcgttctaccaatataaggaaaacaagaccacaaagcaaggacgcttgtggtggctggccacctgtgaattntgtgtaatatgtggattgtgggctctggtaatcgattaccacaagtgagtaatcgattac

SEQ ID NO: 232236 - DNA, 323 bp, Glycine max
atttaatcatcctgcttggacgaatgagaaaactggggcaaatgaagagggtgagaatgaaggagaaacccatgctgcaactgccgttcctacatggaaaatcccccaccagctcaataacaccattactcagtcaatatcatctcttctcattacccaccacgcgatcatacacaaaggccatccctaaatcaaccacaaagcctatctacctgcacttcaatgacgaacaccacctttagcacaaaccaaaacaccaaccaagaaaggaattttgcagcaaaaagactgtaggattcacccccaaatccagcgtcatatgc

SEQ ID NO: 232237 - DNA, 431 bp, Glycine max
  unsure (1)..(431): unsure at all n locations
ggaaaacagctatggaggaggatctactatccatatagactttcatgaaccananctcagctgagaagtaaggaaaattaagaaaaaattgtaattcttaggcaactttttactgagcttaggccctatgaaagtacttttgggcttttattgtgtatactgaacattaggtagaaaaatttatttgggctagtgatgactttatgacttatgaccttcttataaatctttgtttttctgtttttaacttatctatgaaaattttaccaaaaatttattaaatatatttttatattattgtaataaatttcataatcaattttatgaataattactctgttcagaataccttataaaataaatacttaataagttgtttatcaacgcgcattaaacttcatttataagatataacaaaagatgacacatat

SEQ ID NO: 232238 - DNA, 325 bp, Glycine max
tctctaagaatcttatgggttctgtcataccctaatttcgaccggggacctttgcttgatgacatgcgacctttctttggtccttgtgaggtgcttggcacctatcattatgaaatttgtgaaatttcaggacatgccagaaaaccaaaaaaatattgatgcacaatccgtaagttttcgtgacacaccggaaatcaaatggaaacatcgttgcttaattaagtgagggttcttaacattccgtatgtcaaagaggggatgattatgttatctgcaatgtttcgtaacattacagaaagactacaagtatctgtacgaaattcgt

SEQ ID NO: 232239 - DNA, 459 bp, Glycine max
  unsure (1)..(459): unsure at all n locations
ctgaagagntgaagacacaaaccaacatgctaatatttaatatttggtgggccctcttctctaagctctttctttgtaaattcgtaagttgtaaagatcttgaaacaccttgtaaatcctgagagaaaaagattgagtgatgaacttgtatatccgtctctaagatgattaagctagtctatgtgcaaacaaacctcaacaaatgtgctggtatattaagagttgaaagtggcttgttgaagaaagaatacttatgttgtaaagctttggtataagttgtgttgtagaataagaagtggcgagaaaaaatactttgtatttttgtgaaagttagttataccttgatgggttgttaagaattggacataatctcagtggtaaaaatgaaccagtataaaactctttgtgcttaatatctttatcgccttttgtcttaacggataaaagttgaatttgatc

SEQ ID NO: 232240 - DNA, 460 bp, Glycine max
  unsure (1)..(460): unsure at all n locations
ctcagctntattattactcatcattaattggtgagctatctacatattacagatgtacagaatgtcagccacttcanaatattgcacataccaagcatatataaatatcatgttagctggccacgacaggctngatcacattatntaatagagaaaacataaaatattagatgaatttgtttatttctttttaaaaatatttattttaataaaacaattagttttctgttttcttaatgtgtttgtgtaaattacttttacttaaaaacatattttctacctattttgagaaataaatctgtctgtgtattaatttcttttttaaaaagtacttattttatattttttagtttaaataataaacccataaataattgaagatttttgttaaccaatatccttgacacattggttaaagaactaaaataataaaatatttattataaagatcataaaaaaa

SEQ ID NO: 232241 - DNA, 481 bp, Glycine max
  unsure (1)..(481): unsure at all n locations
ctaagcttagtttgcccaagctcatgagactcgagcaagattttaagttattctcggatcccaatctgatacaatactagaaggaattccatgcaaccttattacttccttgatgtacaactccactagctactccattctgtacttcatattcaccggaataaaatgagcagatttggtaagtcgatctactatgacccatacagcgtcttgtccatgactagtcttgggtaaactagatgcagaaaccatagatatgctcatccatttccattccggaatttccaatggcttcaattctcctgatggtcgctggtgctcaaccttagccttttgacatgtcagacatcttgctacatattcagctacatctgtctttatgccatgccaccaanaacttctcttcaaatcttgtacatcttatcattcctggtggaactaaaacacattatagcttctccagacttactctaatcatcta

SEQ ID NO: 232242 - DNA, 494 bp, Glycine max
  unsure (1)..(494): unsure at all n locations
aaactaagcttctcaggagggacgcttanttatgagaggggagagcgagtctagctctatcttctcaaggaagatctcccaaagaagcttctcaaggaagttttctcaagagagcttctcaaggaagctacctaatctataaatagaagcatgtgaacacttgttgtaactttaatgaatgagagtcttgtgagacacaactcaaagtctaaattctctcccaaaataattcaacgtcatcacgtcgactcagtggctccataaaagaatctcacttctcgcactctatatgtgtcattctactcccacgaacaaaggttcacaacattacaggtaccaaccacatggtacaaaaattgtgaggcgtgagtttattatanaagagattaatacaaaaatcacataaccacaattagtaagagaacattaacaaatatcataagcttacacaagcattcattagttcaacacacactcaacacatagttatcatc

SEQ ID NO: 232243 - DNA, 351 bp, Glycine max
  unsure (1)..(351): unsure at all n locations
acttagcacaaaagcacatgatcacatcactaacatatccagctttaatctaatcacttagaaactaattgagagcgtgcaaatcatagataatcaatagggagagattcagccagaggcaagtggaatcaataacaatgatntatggccatagaatctaaaccctcgattgggcagaatgcgcaccaaatcaaaatgaaagtacaaactggaggggtttgcactcgagattgggagggagggcgtgctattcttactacaagaacanaatttgtgattgaggaaagaaaaggccaagagaggaatcatggagagagaaaacatgccaaaggggcggtgtgggatcgcgat

SEQ ID NO: 232244 - DNA, 454 bp, Glycine max
  unsure (1)..(454): unsure at all n locations
actaagcttcacccttttctctgtntcacgagattcccaatctttctctccaccctgtccaataactnccattccctccttcacccatctcccaacaaggtaaccgcacttcgaaaacgcgatcaaaattngatttttcggtatttttagtagtggggggttcttctagggttttagggtttattgaaaactccacagttttgggatttttatgccatctgtgagttcggtttatcctgtcatgaattttttctaagaattatactgccaattttagaatttctccactttccccttacgattctgtgttgagcaaatttagttttagatagaaattctcgttaagtctatgtgtgtttagttatgttctagctgattctgcttcaaaccaatcttatgaatncatcatngacttcgagattccnggtttcttcaacggcctcgcatgagcatg

SEQ ID NO: 232245 - DNA, 191 bp, Glycine max
cacgaacaatagcggaccggccaaaccaacacagacgcagatgccgaatcgcgagtcaacgaggacgaaccaggcgtcctctacaagctgaccatgccacgactagcgctcatagaagaatgacgtaaagaacacgcacgtgcacccggcctcaaagaaatataagaacagattcaagcgaaccctaccaa

SEQ ID NO: 232246 - DNA, 335 bp, Glycine max
gggaaaatatcatattctggtctgacaattggctagggaaacaatacaccctacagcagaagtacaaccagcttttcctcataagtagacaacaaaaggctctcatgtcacaaatgggccattttaacaataataagtggtgctgggacttgaggtggaggagaaacctatttgatcatgaaagacagatggctgttcagttcttggaggagatcatcaatgtgcctattcaaagccaggtcaaggataatatgatatggttgcctgaacctaatggacagtacaccaccacgtcagcttataagttatgtatgaataccacctccagaaattct

SEQ ID NO: 232247 - DNA, 297 bp, Glycine max
  unsure (1)..(297): unsure at all n locations
agactatttcatactacaatcatatgaaattgagaagataatactaacaatagaatattactcgcttgaccgaaaataaaatagccgctgtgtcaaataacataacaatcgtctcaaatacagggaagaaaatactccaacgccatcattagcccgttttgacttattgctgtctttaaaaaaaaagttgcccatttctttgaattgtggtgatgatgccgatgtccaacggtgtgtcattagcaaaccactgcaagtattcataattgtangttagtactgcaaatataaaaaatc

SEQ ID NO: 232248 - DNA, 431 bp, Glycine max
  unsure (1)..(431): unsure at all n locations
tgggtgatgttgcgcgtactgatgggtaccatgagggtgttgctggtgttngacccacgcgggtgttgaagagacggcatgggcatctccttccttcctttntgcccctgttgtcccgattcntttggcgttcacgtttgtggaggaaacgtaatcaaactttcctctcttcaatccaacctcgattctttccccggcaaacaccagatccgcaaagctggacggcatgtaacctactagcttctcatagtagaacactggcagagtgtccaccatcatggtgatcatctctctctcaaccatgggaggagctacttgtgccgccaaatccctccatcgctgcgcatattctttataggtttcaccctctttcttgaacatattctgcagttgagtacggtcaggagccatatcanaattgtactgatact

SEQ ID NO: 232249 - DNA, 330 bp, Glycine max
gtccttgcctaagctcactgaggatgttcactgagtcatgcacaaactaaggataatgaaaggtcgaggcaatcgggctggtatgtgtactcataaatttatactcgctttacatgctaggtgaaaagcgcaaaatatgaatagatactttttttttacattaaatggaaattactaacaatatgttatcaatttcttgcgctccaagggatggaaaatgatgagccatctatacagaacattctgtccgcctggtcatcacccaactattataagaagtctagaggaaattcacttatcaagaaaataatattagaaaaaaagagatat

SEQ ID NO: 232250 - DNA, 461 bp, Glycine max
  unsure (1)..(461): unsure at all n locations
actcagcttaacctattgctctcacagncttagattgggagcctattcattcttgngttcggactctcagccacttatgatagccgccgatgatcccattactgcttcctctaagctctctgtcctttcttcacgccgcatcccatgccttgcgaactccttggagtaccctcgcgttgtggtcactgatacctcgtgcgatgaaaggcgtgatgctttcgtctgatgggactcctctcatgggacatcctttgcatgaagatagaatcctgattcttccttccttctagcgagggaaccaattaacagacgcccctccatgctagccaagagttggtcccaattcgcctttctttttcgacgcacgagcggtgaccttgtagcggatagacgggcctaccttcttggagaacaaggtgtgaaaccagccacacatagagagccagtgcacaacaaacaat

SEQ ID NO: 232251 - DNA, 426 bp, Glycine max
  unsure (1)..(426): unsure at all n locations
ctcagcttaaacaacatttggaagacatgacttaagtgaccttcatttttgggtgttaaacactacttatgaatcttgctacaggggtgccattctcttccagaaattaattaagtagatgcatgatggtaattattaatggnttaaggtatataaaatgtatgttattacgctacagttcttgatataagacccatcgagggatatgaatttgttcttagaaaatttggttggtggacaactatanaaatcgggatatgacatagcangtgttgaacctggaataacaaaccataataagcttgaaccagcagtaaagaatgaatctcaacccaaattttgctcaattgcctgctgacaacaatctcaattgctaagtcaaaagaggataagaggataagtcataagcgattaattgtggtttta

SEQ ID NO: 232252 - DNA, 490 bp, Glycine max
  unsure (1)..(490): unsure at all n locations
ttaacgataaccaatgaaagttaacggatgaatgattttatttgtttcttnnttccactntcaaaaactaaaatttaaattttcatctttggaaaatgaatttattagcactctatacatttatgaaagaaataactatttatccatttcttaatttattaattattggtggtcatgtcattaggcacatcgtcgcttatgtgtcacattntatctaatgtgacacaacacatacaaagctaacaagcatatcaatcgataatagactttgataacagtagagatataaacaaaaataaaaatatcaagaagcanaaatgaataatttttttattaggaatgaanaaaaaattcaagtatatattagagatcattaacatattntagctnttcatanaattcactnttagttcttcattantttttattggccttagacccttatctttntcacaaaattcatgaacatnttgttccatgagtaacactt

SEQ ID NO: 232253 - DNA, 378 bp, Glycine max
  unsure (1)..(378): unsure at all n locations
aataangcctatagggtggacctcccaagagagtatggagtcagcaccacttttaatatttctgatttaattccttttgcaggtggagctgatatagaggaggaggaaccaacagatttgaagtcaaatcctcttcaagggggaggggatgatgcaatcctccctaggaaaggaccagttaccagagccatgatcaagaggcttcaagaggattgggctagagttgataaagaaggccttagggttctcatgaaccttatggtagatnttngagcccatgggccaaggttgggtccactcttctctgtaaatagtataataggttgtttcttattctgggccttgtatcttggccattctagtactataaggttttag

SEQ ID NO: 232254 - DNA, 449 bp, Glycine max
  unsure (1)..(449): unsure at all n locations
tctaagaaaggcccangagcaactncaacctcatataggattgtggtttatgataangaaaaaacggaatctgataattctaaagaatcccaagaagaattatctaactctgaaaatttggaagaggaagaaggttatgcctcaactcanaagatggaaaaaaaaaaaaaaccaatcatgttagggttgaagaggattacagcgctctactttgcgttcgtatgggtttctatcactgttattattttgaagtcctgaacttgatggattttnttatcattttcttgtcatttgaaatgtaaaacttgatggccacaacttaggaggaatactagtagtttatgatctatgattgacttcatgaagtcggcgacgacagtgaagtggtcctgccacaggtcggaggtcgcaccaggtactgtacacccacgaagaacagcatgccccaa

SEQ ID NO: 232255 - DNA, 320 bp, Glycine max
gaagtatttcggactatttgcatccatgtctggacaacacatgcctgtatgtatgaatcctaataaactaaaactcctctctgcaccctttttagacttgctagtttgcttacccttaatgcaatctacacaagtctcaaaaatatccgaaatccacagtactaaggactccttcatttactaatcgcttgattctctcaatagagatatgtcctaatctccggtgccacaacatagaggattcttcattcacaatacatcgttttaacccaatagaaacgtgcatagaagtagcatcattttgccattcaatcgaataa

SEQ ID NO: 232256 - DNA, 504 bp, Glycine max
  unsure (1)..(504): unsure at all n locations
gacctctgaaactcagcttaacagctgcctgacctagtatagatggaatggtttgatttaagttttacanttttggcagtttggattgatgttgaaaagggagaaagatgtatgaacactatgctatttgatactttgagatagaaatgtaacttgaggtgcaccaaagtaagtcgtgttaagtaattctgacccatttattttgtggacaagtccagctttgcctgtttatttggtgggttatgcagatcgaaataacttgaatactcaattatagatgtgttaagaaaagagataataataataataataataataataataataataataataataataataataataataataataataaatggatttctttcacattaaaatgagtgtttatggtatatgggtctgcacatatcattatcataccaaaatcgaaagaaattcttaaaagacatatactatgttagaccgagtctctcttaataaagtaaattagtacac

SEQ ID NO: 232257 - DNA, 299 bp, Glycine max
  unsure (1)..(299): unsure at all n locations
ttacactaaaaattcaattaagtttatccaattgatttaattcttctaatgatgaaagaatgttaaggacttatttntagttgatgcatgtatatatatgacggcaactatgttctaacaaactacgcatgcactcacgcttttgtttaaaaaaatgattgaaaacatacttcttcaattttcttaaaaaattacaattacataaagactgccgataaaaaaaactaaaatgtaggaaaattactttcagaagattatattaataggtaattttttatgactggactcaatattgaaga

SEQ ID NO: 232258 - DNA, 360 bp, Glycine max
gcattcctttggcatgacctttgtctctagctatggaaaccttgagactaaggtttagccctttgaattgcactatatcagaggtgacggagcctattggaaattacacgtttgttcttagtcatcattctttgtgatggtgttgatgaacgctcatccgctgtagctttacgacttgtacttgctatttatttcatccacagaaggagcattgcaggtgaaatctcgctcttattggataacatttcactatacatatgcgtgtattgcatgggttcgtctatacttcgagagtgaattattgaaacaaactctggatttgaaatcccttaaaaaagaggttgggatctcactattggt

SEQ ID NO: 232259 - DNA, 503 bp, Glycine max
  unsure (1)..(503): unsure at all n locations
tacggacctataaaactaagcttgggactataccttcgaccaaacacggccgtgtttctgtctcggnccggatttaaagcgggttgcagtaccggctccgcttccctaaccgtactggaggcggntgccgtggctttatcctctatggttttctggagttttaacatgacctccgagatggaagccatttgatctttcaaggccgatagatcggccttcatctgttcctgcacgccctcttcattatccatttttctggatcgagtgttataggggtgccttggtggtttcttagttatgatgaaattcctaaagaaataaacaacggtgagtatgccaccaaaacatgagtatgcaaatggatgatcggagcacttggatccaccccacggttnttagatagcgtgatgagtccatcacttctcattttattaaaagaacanagctttcatctagccaagattatacaagggcgtacaagagaacctaacgatcctaattat

SEQ ID NO: 232260 - DNA, 466 bp, Glycine max
  unsure (1)..(466): unsure at all n locations
aaactaagctntggccctacccgccttgaccttcaaatacccatcttgtatctnngaagaaaccccatttgctaccaagatgttttcctcttggtaggccaccactttccaagtctgattgttttctagagctctcgtctcctccaagacagcttccttccacttaggaacccttagagcttcctgtatatctcttggtatttctattttcttcagttcacaagtaaaagctctaaaggtaggagacaacttttcataagatataaaattagaaataggatgttttgtacaggaccttacaccttntctaacagcaataggaaggtcagaattgtcaaaataggttcaacaaggtcaggaacagtaagaacagattcagattccacaatattttgaatgggttgaacagaactagaacgattcttacctgatggatccttggatgaccgtcagtttccagaatcat

SEQ ID NO: 232261 - DNA, 465 bp, Glycine max
  unsure (1)..(465): unsure at all n locations
aaaactaagcttgagggggggaacccaccatgttccatagcatatcactgtttttatgtctactaccaccgggagaatccctttctctgttattgagggcgctacttgagctgccagatccctccatctttgggcatattccttgaaggattcatgctnntttttgcacatgttctatagttgcatcctatccgaagccatatcaaaattgcactgacactgcctaacgaaggcaacaattaggtccttccaagaatgtactcgggaaggttccaagttaatgtaccaggtaacagctacccagtaagactttcttggaagaaatgtattagcagttcctcatcttgtgtgtatgcgcccatcttccgacaatacatctttagatggttctcgtggcaagtagtcccctcgtacttgtcaaagtccggaaccttgaactttggaggggtgacgatatcggatact

SEQ ID NO: 232262 - DNA, 369 bp, Glycine max
aagtgacctaagcgcttatgccataatgctcctgagtaagtattatcaattctacgcttagaaccacacaattttgcattaaaggattcaccataagaagctagagtatcaagctaatatagattatcattaaccaagagtgaaccagttccaacaatatctaatataaaagacaacctgaacacgttgtttccaaataaagacaaataatccaatatcgccaaattataaactgaaacccaatctcgtctaaacgacggtacaacataagtgcctttcaaatccaaatataaaccagtacataataataatctaaaatgccctatagcttgcaacttcatcgattaccatcgcaacatagaccatatt

SEQ ID NO: 232263 - DNA, 393 bp, Glycine max
  unsure (1)..(393): unsure at all n locations
ttggcacccttaatcatgttcaatttgttggtaagtttacgtcttttaatccaaaaaaggaaacttggttaccatgtgagagtaatttggataaatgaaaatagttatggttgttatatgcatgagtatttcgttgcttgtttgcaacaatgtattatacaaaagtacctaccacatagggagtggctatgtaatttggaatgcatcaagaaatttccttgtgttattgcattctctggcaccaaagctattgcattgaaaaattactgcatacccaaaattactttataaaattgcagacaatattacttggcaaaaaagcagtctaaagctactctgtcatcatggacctcatgtaccacaagcanatacatatggtaatgatgcttgatg

SEQ ID NO: 232264 - DNA, 277 bp, Glycine max
  unsure (1)..(277): unsure at all n locations
ttcctcttcagtctcattcctcctaagcacagatgtgtgtacacatatacactctatcaattttctctgtattcatcctgtcatttaccagcgagtcttgagcttcagcaagatcttatcgagctttggccagctggagtttcgtatgagcaaattgttttgacaaaggacctaaanaatttcttaaacttttcaatttcttccacattgctaccataggactaccatctacagggctattccaactctatgcgacaacgtcatcaaaacctggcag

SEQ ID NO: 232265 - DNA, 445 bp, Glycine max
tatgacaatatgaatctctcgatagcttccgtctttcaatatcgagcgtctcgatatattatgcgcccgaatcggattaccttgtgaaaagttatgaatatttaaatttctcgagagcttccgttgttcaatttttggtgtcttgatatattatgcgcctatatctgacatccgagttaaaagttatctccatttgaatttcccgagagcttccgttgttcaattcgagcgtctctatatattatgcgccttgattagacatgcgagctaaaagttatgaccatttgaatttctcgagagcttccgttgttgaatttcgagcgtctctatatattatacgccagaatctgaactccgtgtgagaacatatgaccaattagatttctcgagagcgttccgttgtgaatttcgagcgtctcgatatattatgcgcctgaatcggaca

SEQ ID NO: 232266 - DNA, 350 bp, Glycine max
  unsure (1)..(350): unsure at all n locations
aactagctatggtaactataganctcttatgaagataattttatttttcaatatggcgaccacaattcgccggacgtacatgccctccaaccattgtaaatttgatggattaataatattagccacccctaccatatgcccccagaaaacacttgggactatatgaggtacccacaacggatctatgaacttataaaatgtagcttttcaagaaaattcatttagcagaccattattatgtcaaaaaatggagttaggactttgaattaaacaataaaatcgaagtagctaaagaattcaagagtcttgtaatataacgagataagtttcaactctttgaataagcctac

SEQ ID NO: 232267 - DNA, 469 bp, Glycine max
  unsure (1)..(469): unsure at all n locations
tttgatttagaaggattcagagactntgatcacggtgactttttcctcttttggactattaaannaatctaataatccatattttcctactaattntaatagatatttntaatttaattattaatttagattttaatttttgtatactttaaaatcataacaaacacaattgacggngtagattatcgggtacaaaattatttcactttaacccatggtcttcacagaaaattttcactttaacggttcaagtaaaaatgtcttggataaaagataccaatagtttgtaaaaataaatgattaaattagtttttgtcctttaattcattatctangcttaatttggntctccatttctttattcaatttgtntctctaatttttaaaattgaattaatttgttcttatgtgtttgttcaatatagtcatgtaatttacaaagtcaattcattttttttatagaaaatat

SEQ ID NO: 232268 - DNA, 428 bp, Glycine max
  unsure (1)..(428): unsure at all n locations
tagacatgatacatgtcagggcttggtttgtttcaatgtgtaaagggatgccccacattatttccatgacacaaatgcaaaaatgatgatntggaaactttatgcaaaactggtcatgcatgcatctatgcggacactcaaatgtcaaatttttatggtcatgtgatgctagggttcaggattcatttcctctattttaatcaacccaatggttccaaaatatgttcttttatcaatttgtgcattcatccgagtccatttcgggcgtctgggaaaatcttcacagcattcacccttcaggtgtatacacattttttcaaaaactagttatgatcnagtgaattttcaaagaaaagttggaagtcatctcttttcanaagcatgttggtgtttcagcttgacaacataattntcttttccttttttat

SEQ ID NO: 232269 - DNA, 457 bp, Glycine max
  unsure (1)..(457): unsure at all n locations
ntattcagtntgcagaccatagaagtattagattgttggtttctanggggttgagacatgtagacagtctcattaagtaagccattaagaaaggcattattgacatctagctgagcaagattccactgatttgtgatggctagagttaaaataagccgattagtgacaggtttcactactggagaaaagatttctgaaaatcaaagccttgaacttcattaannacctttgcaaccagtctagccttaaacttattgattgaaccatctgcattttctttgacccttaaaacccatntacanaccaatgcttttctgtntggtggaagagacactaaatcccgagtgtgattcttcatcaatgcttcatattcttgttgcatggctgaaagtcaatttgatcagtcaaggcctgttcacattacatctactccatctatcattttacatgttagcta

SEQ ID NO: 232270 - DNA, 471 bp, Glycine max
  unsure (1)..(471): unsure at all n locations
ggacctatgaaactaagctntgtgtgnaggatgtgactcttcaaatatgaatttgaatttcaacgttcaaaggcactggtaatcgattaccaaaacattgtaatcgattacagctttttgaaaataattggaacgttgtaaattcaatntgaagactctttcaaaaaaattttgctactggtaatcgattaccagagattaaaaactctttggtaaaaggttttgtcaaaaactcatgtgctattcaaagttttgaaaaactttntaatacttatcttgattgagtcttctcttcattcttgaatcttgagtcttgaatcttgatcttgattcttgagatcttgaaccttgaatcttgattcttgtctctagactttcttcttgagtcttgaattcttctggattcttatcttgaactcttgaattgttcttgatttacttgagctgttctttgatagatctttgattcac

SEQ ID NO: 232271 - DNA, 448 bp, Glycine max
actaagcttggagaaccataaaccaaggaggactttcaatttttttgaggaagcctcgacaagtatccccattgaataacctttattcatacctttcaagttagtgagaaggctaaacgaacaattagggaactttgaaaaactaaatccttaattgaaggcgtaggtgacaaccatagtgaattactaaacaagattggtagtttacttaaggtcattccagataccccccaagcctcggaaaatacttccaaaatggtaacaagaagtacctccaaattaattaatgttattaatgaagatagtgaccaaaactcatataacacaactgagatacaatcagtgtcagacaagaatataaatccaattaattccatacactggaaaacaccctccaaattatattatcaacgtccgacttgccctgaccttctattagaagaaagag

SEQ ID NO: 232272 - DNA, 85 bp, Glycine max
ctacgcgcacccagcattattgctggggcacccagcacacagtgaagtggcgatactgtccttcaacaattcttcttccggaaga

SEQ ID NO: 232273 - DNA, 473 bp, Glycine max
  unsure (1)..(473): unsure at all n locations
taacagactcagccttatgtggttgacaatttctgcggcacacgatattaagatatctctccctaatatcgaaagtgccaaaaggtttatgagattagtgggagagtgttctcaaacagttgataagtctattgctgggacattaatgagtacattgaccaccatgaagttcgatggttcacatattatgtgtgaacatgtcattgagatgacaaacattgcagcaagacttaagaccttgagaatataatgactgtgaataagaactntcttgttcagtttattctaaactcattaccatctgagtttggcccgttctaaatgaactataataccatgaaagataaatggaatgtgcatgaattgcacagtatgttagttcaagaagacacgacgcttaagaatcaaggaagtcactcagttcattatgtatgtcaccaagggaatcaaggagctctgaaagaaattatgaa

SEQ ID NO: 232274 - DNA, 265 bp, Glycine max
tatactactccaccttcacaatgaatggtggagattacttgtatcctagggtgaagattaattctctagaatgtagaagcaaacttcattgattcatgatgatgaatcaagattgattcaaggtgttctgatgataacaaagctgatgacaaaaagcccatgagaatgatttcaagattgagtcaagaacaattcaagactcaagagaaagatcaagagaagtttcaagttcaagtttcaagaacaagactcagatcaagaatat

SEQ ID NO: 232275 - DNA, 387 bp, Glycine max
tctaagctaatcgacggctgaaacaattgtgtggatcagatttttttgattcagccagagaagtgccgtacacatacatcaaggtctgtctatttccactcactgacgtcataatcacacttatttttatgtcagtatgtgctcatccatacatacatattagggaatactctatgatttcgagctgaagaagggggctgaattatattataaataaaaggggtatttcttattaatcaacataaaccttgctcttttatatataccaaaaagaatgaaatgagtctctatttgagacaatagaatgtttgagagacatgaaatcaaattatttaatgttagacgtcaaaaaccggtattaatttgaattgcacatatattatatgg

SEQ ID NO: 232276 - DNA, 375 bp, Glycine max
agcttgcttctagaatctccccctttttgatgattacaacttctgaaatcaagaaacacacacacacacacacactgtttcctagtcgatcactcacataaattgtcattctccccctttgtttttgaatgtatgcttctcttaaaattaagttgattactcatgtgaattcttgattaaatggctatggctctacctctttggcatcaacaaaaagccaaagtgcgtaacaggtttgaagcatataaatacaagtgagcatccatacatcttttatggaaaaagataaaccacttcatgaagcagaaaccacgaatagatcagatgtataaaaaccacagtgatatagcataatatataattgttcaggcatac

SEQ ID NO: 232277 - DNA, 398 bp, Glycine max
tacccgtcatatgtggtactatgtggttatcgggcgatggtgcaagtcgactctccacatccacaaatcacacatgaatccaccatcccaagttgcccaccttcaactgagctcacgtaatcccacgtagcccttatactgattcctctcaacaccgggtccccatcaatacctccaagcttgcataacatccaagcaattcaacatccaaacatcatgaattatcagaaccaagaaaacagggcagaggcagaatactctgcccataacacaaaccaataccacagctttccttactcaaataccccaataacattctgtttgctccaattcgttcaccgttggatcgactcaaaatttactggaggccctagacataagctacatttgacgtggga

SEQ ID NO: 232278 - DNA, 445 bp, Glycine max
agcttggaaggatgcttcaatggaggtattgattgagggatagaaagagagaggggggaacacgaaattgaaggaataaaagagggagagaagtggaactttgaagtatgtctcacaagactctcattcatcaaagttacaacaagtgttacacatgcttctatttatagactaggtagcttccttgaaaagctttcttgagaaaacttccttgagaagcttctttgagaaaacttccttgagaagctagagcttagctacacacacccctctcataactaagctcacttccttgagaagcttccttaagaagattcctaaagaagctagagcttagctacacatacctctctaatagctaagctcacctccttgagatgagatgctagagcttagctacacaccccctaaaatagctaagctcaccctcatggcaaaatacatg

SEQ ID NO: 232279 - DNA, 429 bp, Glycine max
tctcccgcaattttctataaatagggggagaagtgatgtattatatggttcagccccttatgcacttctctctctttcgaatttgcttatgaaaattgcttccgtgaagaaaatccaagccgaggcgcttccgtaacgtttccgtatcgtttccgtgagtgatttcacgaaggttttcgaccgttcttcgacgttcttcattcgttcttcaccgttcttcattcttcaacgggtaagtacctcaaaccaagcttttcgattcattctatgtaccacgttggaaaccaaaaaaaagaggtgaataataatataataataaaaaaatatataaatacccctttagtaaaataaagtgaaaaatcaattggacgttgtctctttgggatttctcattcttaatcgaattgactaataactaaagtgaaacta

SEQ ID NO: 232280 - DNA, 454 bp, Glycine max
  unsure (1)..(454): unsure at all n locations
tcgagataagttacgagacanactaatttcgtcactcaatgtgtgacgcaatttaatgctagtcactaagattatgattacatatcatagtatgtcattgttaatgaaatgagttgagatgtttctttcgaaaaagaaaaaaaactatcttaaaacagacttagatttagattgtgtacttgtgtgtttggataccttagagaatcgattttaacaacaaaaatcacggtgaatgataaaaaaaatcataaacaacaaagaatagcttcactacaaccatgaatacaaaatcgattatgcaccaccacatcgtgtattaactttgcttatatcgttgaggcggtactataattgcactacattaaactattattaatctttgtttatttgtgctccaccagatctacattatgtggcattggagacaccaccatataattaaataaaatgaaat

SEQ ID NO: 232281 - DNA, 331 bp, Glycine max
  unsure (1)..(331): unsure at all n locations
agcttcanaaatcaactactatcgactttgtgttttacatgtcccaaacgcacatctgaggaaaaaagttatcgtcgttatacttacctcacagcttcagaattcagtttcgagcgtctctatgtattacgggactctctcggacattcaagtgaaacgctcttgacagttgaatttgttgaaagcttcaacattcaacttcgagcgtggcgatgttttacggaacctaattcaacatgcgtgttaaaacttattgttgttgaatttgcagagagcattgcattctattacgagcgtcttacaggattacatggctcaatcatacatccga

SEQ ID NO: 232282 - DNA, 271 bp, Glycine max
ccggcattagatggccaaaaaacataccgcctcgagaaaaacagaccacaagagggaaagaaaaagacgctggcctgaaccggcaagaaagagaccgagcaagtcaaaaaacaaacggaccggaaacgccgtcgaaaatccggaaaagaccgccaacatgaccaggagcgaaggaaaaacagaccgacacggtggcaaaaccggaccgaagatcagacaagcggcgaatggtaaacgagccgataactatcacgaaagagaaggcgggagg

SEQ ID NO: 232283 - DNA, 420 bp, Glycine max
  unsure (1)..(420): unsure at all n locations
agcttgactaggcgagttgtttttattcttattttcactttagntatttagtcaattcaattaacaatgagaaatcccaaagagaaaacgtccgattgattttttgctttattctactaaaaggtacttttccgattattatattattattttacctctttttttatttccaacgtggttacggcacgaccgaacggtcggaattcattttaaccaaaattaacggatgatgcgattcaaacgatcggtggaaatttattttatttttagattaagcgagaaaagacttaaataaatggcttaagcacgtcaaaagggggtataaaaagtaaatgaaaacgagaataaaaatacatgacacaaaatgtggaccaccactggtacatataatgaatagaaaagcttggtttgaggtactta

SEQ ID NO: 232284 - DNA, 435 bp, Glycine max
agcttctagtatatatagccttttatcttcaagtttatgttttctctcaatagtttgattcttcacttgatcttcatatgaagaaaatggtcgttaggagcatgtttaatgcttgcattaaatgcacgtcctttcttcatgagatagtccactcttatgggttgtcatgttgagtacttcaacagaaagtcacttcacattcatcggagcaggtctacatagcagaatgcatgtcttttgatgatgatcaacattttcaaatcttggacattatttattcttcataggactttgtcaaatcctacgagaatgcatccgcggttatcaaactctcgagttaacttgctaattcttacaagtttacaagtccacttaccctctgtgagttgactcctgtgtaaaatctctttttagtagacactgggtagactcaac

SEQ ID NO: 232285 - DNA, 380 bp, Glycine max
  unsure (1)..(380): unsure at all n locations
cacattgtgtttcgtgcatttttattctcattntggttactttttataccccctgttgacgtgcttaagccattttacttaagtcatttctcgcttaacttaaaaataaaataaatttccaccgaacgtttgaattgtattatccattaacttcggttaaaataaattccgaccgttcggtcgtgccgtaaccacgttggaagtcaaaaagaggtaaaaaataatataataatcaaaaagacatcttttagtaaaataaagcggaaaatcaatcgaacgttttctctttgggatttctcattcttaatcgaattgattaataactaaagtgaaactaaagggctaaatcaattcgcctagtcaagctcgtgcacaaaaat

SEQ ID NO: 232286 - DNA, 431 bp, Glycine max
acctctaagcgactgcagcatgcaactagatgtatagcttttttctttattgcccaccaaaaggggagatcgggaatcatgactgccacgatattttgattctgcctaagaatcaagagttaagcaagttccacacaattaggagtcaataagcttcaagaacactccagtttcaagatttaatcaagtctcatgaatcatgattcaagaataatctcgatcaagattcccgactcaagattcaagaatcaagaaaagacttcatcaacataagtactaaaatagtttttcaaaacattgagtagcacaagaatttttcataaaatcttttaccaaagagttttactctctggtaatcgattaccacaaggtagtaatcgattaccagtagccagcattgctttcaaaactgatttacacagatgtaatcg

SEQ ID NO: 232287 - DNA, 439 bp, Glycine max
tgaaggcaaactagatgcatgggttaacttggtatcttctctggccttgaataaaaaatctgtacctgtcgcaagagtctgtggtttgtgctcctctgctgaccaccatacagacctttgcccttccatgcaacaacctggagcaattgagcagcctgaagcttatgctgcaaacatttacaatagacctcctcaacctcagcagctaaatcaaccacaacagatcaattatgacctctccagcaacagatacaaccctggatggaggaatcaccctaatctcagatggtctagccctcaacaacaacaacaacagcctgctccttctttccaaaatgctgctggcccaagtataccatacattcctccatcaatccaacaacaacaacagccccagaaacagtcaacagttgatgcccctccgcaacctttcctcgaa

SEQ ID NO: 232288 - DNA, 435 bp, Glycine max
  unsure (1)..(435): unsure at all n locations
agcttgaccaggaattagttgtatgggttggatgtcgaactctggttgttcctggcgcggagatgatggtacagagggtgaaccacgagctgaagtttcttttggtgcggtagccatggaaaagcagagcgtttggaatgatttcgtaaatttctgagagctgttagggaatgctgataacgaaattaacacgaaaatataagtttgaatgaggaatgtagagggacgtgtgaagcaacggtcgaatctgctttggttcagtagtgaacgtgctattaatgttaagtgattcgtttgggcacgttcacatatcagtagttgctacaattcctctagcagacaaatgcccagctttgccctcagtttttcaaactgtnttgcatccaatgcctttgtgaaaatatctgctatttgttcctcagtgtcaacatgctc

SEQ ID NO: 232289 - DNA, 428 bp, Glycine max
caccgacgacccatcatcttataatgatattattactactttgattttcagccctgtattttggctatattattatggtatttgaacaatttactatttccttatttgcatggtatgtttggaccaatattaagtatgttatttgactatgtggagtttataattaatctattcatggttgttgcttcatcatggttttcatggtttttgcttcttgcttcatgatatggttgatattttctcatgaacattgcttgaatgttcaagttatatttgtataccttaagattgatacgcactttggctttatgttgatgccaaagggggagagaaatgagattaatcaataattcacatgagttatcaacttatgtttaagatatacataaattcaaaaacaaaaggggagaattatgtgagtgatcgac

SEQ ID NO: 232290 - DNA, 438 bp, Glycine max
  unsure (1)..(438): unsure at all n locations
agcttgacaaatccaaagtcttggtctttaaatatactccatgtggcgtttatgggggcaaattcagcaagggatgctcctcctcctccaaccactacatgtattgtaccatccaaggagcccttgtaattgtgctcctctttgttggtgcagatattctgaagagagaaactggaagttaatttgtatgtaaattaacagataacaaggaaaacagtatctagataatttaatcactttgattcttgatgatcaaactgacagctagaaagcacagatacgatactgcatgaatactgtgatacaataaatttaaaaatcataggacatgaaaacactataatactctgtataatattaatcttgaattaataaaacatcttaaatcatgatagcattcatgtcttanaaatgtgaacagttatgatacacataaaa

SEQ ID NO: 232291 - DNA, 439 bp, Glycine max
  unsure (1)..(439): unsure at all n locations
tatcaattanaggaactatgtaactgtatgttttctctctcccaatctccgcagcaataataacatccttccctaacagcacaaacggttcagaagaagcctgaacacacataaataatgctcacaacataagacccagcaccccaaaaaatgaaaaggactgaacttagaattgtacttttcatgatattctccattcagaatcacagttttaccttgccaacctaactgacctttaatataaacctgattggatgatagtatcaaaagcacttaaagacctacatctatgacctatctggaaaaacttttccataaacacctataggagaagaaaataagaaggtaaaatgaattgagttttcccataagctgtatcaacttatgcacttcagcttttggagaaggttagaatagaacatttctacaaaagttaagt

SEQ ID NO: 232292 - DNA, 207 bp, Glycine max
  unsure (1)..(207): unsure at all n locations
cccccctcttgtttctcccttcctccccaccccccccccccgcttgaccgaatgaagctgcacgcccgggaacacanagngaccgcggcaccacaaaaacaacatttagtcttttccccaaacacgccaaccagcaacgaaccggaacacaagaaaaaaggcgtaagaacaccccgtctcatcaaaacacccaaaggcaaaacccac

SEQ ID NO: 232293 - DNA, 372 bp, Glycine max
agcttctcaaatttattattactcctctatgccccacaaaaatcaccatttgaagttatacttttttccgctagccacagcaattctgtctttcttgaggtgacatctcaccatatatgagagaaaaatggccacagtaacagcaacagcaacagaagtcactttcctttgctggataattattcatcggtagcacacatatatattattgctccacaaataggataagcagataaaagttgtggctaaattggaggatgcagcacctttggaattaaagtatagtggaccaaggaacaaaacttggattagtaaggatcccacgcgtctggctgcgaaggaagaattcccagcttcccggaacaacattaa

SEQ ID NO: 232294 - DNA, 421 bp, Glycine max
tcttgcttctacaatctaccacttttttatgatgactacttctgaaatcatgaaacacacacatacactttttcctaatcgatcactctcataaattctccccatttgtttttgaatttacgcttatcttaaaaataagttgattactcatgtgaattcttgatttaatcccatttctctccccctttggcatcaacaaaaagccaaagtgcgtatcaaataaatttaatttaaacatccatacaatgttaaaaaaaaaaatcaaccaaatcatgaagcatgaagcaagaaccatgaaaccatgaagcaaacaaccatgcatagattaattataaactccacatagtcaaataacataattaatattggtccaaacatactatgcaaataatgaaatagtatattgttcaaataccatact

SEQ ID NO: 232295 - DNA, 355 bp, Glycine max
  unsure (1)..(355): unsure at all n locations
tacatatataatacagtcgcaccatcccattttcgcttatacatatcattatttcattggtgcattacaccgatcacatcggtggcgcacgtccgtacacatatggcatgagaatggggacaatgtggaatgccacattgctgctattacctcatgcgcctagagcattttttctcccactccttactgaacaaaacaagcatggattcagatgcgaatcacttcacgaagattgcaaataatgagcaatctatgcaccaaanctcatcaatggtgagccttatatacattggataaagcacttacttgtggggagtgaattatatcgtgtaaagggaatctacaactcatcaat

SEQ ID NO: 232296 - DNA, 424 bp, Glycine max
agcttgcttgtggggcttctatggatgttggatttttgagcttcaatgaggtcctttaatggtgattttccaccatggagatgcagcggaagaaaaaggagaagaggtgagaggaggcgccatccactagggaataagccatggaagaaggagcttcaccaccaagatgagccttggataagaagcttggagaggatgcttcactggaggaaaagaaagaggtagagaaagacagagggggagcacgaaattgaaggaagaaaaagggagagaagttgaactttgagttgtgtctcacaagactctcattcatcaaagttacaacaagtgttacacatgcttctatttatagactaggtagcttccttgagaaatttcttgagaaacatttcttgagaagcttctttgagaaaacttccttgag

SEQ ID NO: 232297 - DNA, 396 bp, Glycine max
  unsure (1)..(396): unsure at all n locations
tttaccaccctctgtttcttggatcatagaaccaaatggattttcttaatcagagtctatcggttgagagaaacaccgttgaataccttaatccaattacatagatgcatagtcaattgaacaaagattaattaagaaaaacacacaaatcataaaaaagattagggatataaagatacatgactcaaacaatttatattgtgtagtcattntttacctacatcttgttaaattcgacaaccgcagccaaatctttccacttaattcatttttagttcaaatcacatcaacacatacatcaatactcagccattgctgagtcctacaataataagaagtaaaacaaaacctctctgttgaacgctacacatagattctaaaaagtattaagtcaaa

SEQ ID NO: 232298 - DNA, 440 bp, Glycine max
agcttctatataagctgaaccatgttattttatatacacaagttgagttttattcagaaaattagagtttatctctgttatcttagtgagagtgattctcctaaattcttgagtgattcaagaacaccctggctgtatcaaaggactttcacaacctttgtgtgttgccctcgctggaaagagagattctttccttcctttcatcttcacccttgttctttcaaaccacaattccagaaaatccacctctgcccagaattatctcgtggccataactcccgttttacgcactcacattaagtgattcttgagcctaaattgaatttcaaaacgagaactttcacctcgttttggaatcacctcatttggagccctgtagcttcagttattgccatttctatatttctgtctagccaccacttaacctacattttaccatc

SEQ ID NO: 232299 - DNA, 436 bp, Glycine max
  unsure (1)..(436): unsure at all n locations
ttctaccaacactcattccataggtagtttttgtgtaaaggtagaggcagaggaaggggtctaggccgaggcataagcaactatagaggaaatcagcagctacaacaataaaaagaaagaggaagttggagccatcagacaactaactacaagttagcaaacaagtctaacattgaatgttttaaatgtcatcggttgggccattacaaatcagagtgcatgaccaatttgtccaaggagcaaggggaaaaatctaactttgttgaaatagaagaagaagaagaagtgtgcctcttaacctcttgtcaagaagaaaaggaatcaagtaaaagtttgtgatacttagacacaacttgtagcaatcaaagatggaaaatggatatgagttatccttcanagatggagcatgcaaaattcaagattcaaagtcgattat

SEQ ID NO: 232300 - DNA, 456 bp, Glycine max
tctaagcttgtgactacctttgaatgttgtcaacttaaccagtctctttgtcagtgttatcaatggaggacagcagaaggcccatattccgccatagcaagcctcccttcacgaactgtctatggcagttggcaaaagaatcttccttgccattctgcggtggtgccgccatctaacaacattgctctaagttaattgtctgatctgaggcggatattcttggattcttaattctagctatgtgtatgtgcaatgattgttagtagcctgttactgctaaaatggtgagtcggacaatagctaagcctatgcagttgtctgagtttgggaggaaaactgatcatctttcgtaagatgatgtacagtagctaacagtcctcatggtgctacattataagcacccgatgtatataattataaccatacatatcatatgacagcgatggaatcccctat

SEQ ID NO: 232301 - DNA, 262 bp, Glycine max
  unsure (1)..(262): unsure at all n locations
agcggccacccacgcgccaggcgttttgtgttgcttctccanaagcaacagccttctggaggaatcttccggagggcccaagcgggcctgcgtgctatttgcacccccaattttactaagtacacccccttgcctttttttaggagattcttttttcgaacaatcacggaatgatacggaacctccctactggagcaaccatgcttccatgcgatggccggtggggcacggaaccttaccgacagggcaccaatattatctt

SEQ ID NO: 232302 - DNA, 430 bp, Glycine max
agctagacattataggagtttggtgtttttccttgccccccttggttcacttgacaagattgattccttgagcttgacctcggccgcctcggaggctcttgctgtcttgtttgtcattgttacttttactgttgctttcattaagctcgtggaaggacggattgatgctcccaggatggctcctgattttagctccaaaactgccatcttggatttgcttgtcgcgattcccatcatgaccaatgcatatgtttgtcattctaatttgcagccgatatataacgagcttgaacagcggtctcctcacaagatgaaccgagttggaaggtacaccacgattttgtgcatcctagtttattcttccactgccatatcgggttacctgctctttgggaaagatactgagtctgatgtgctgactaattttgat

SEQ ID NO: 232303 - DNA, 407 bp, Glycine max
  unsure (1)..(407): unsure at all n locations
gtaccaatgccttgtgttcttgatttactacaccaaaagatactccctttatacaatggtaggtataaataatataaaaatataggtacgtgattatcaatgcattttttatgtaaatntaaaaataaaacatattacaactaatatacatttctatttatgtcaaacagagcataagggagagggagaaaggatacaacttttatgtggttccaattgataaaacgcttggaagtcatatcaaagacgtcaataataacttttgtgtgtattataatattacaaatgcaaccaattaaaatttaaattaatattaaaataattattttaaaacatcttatagttttgatcaattatacatataaacattantgtcgtacgacatactttcttaaanaataatatgc

SEQ ID NO: 232304 - DNA, 417 bp, Glycine max
agctgagctccagatgaaattaacatttcatttaaactctgggaagacgaaacacgtgctcacaaatgtgctcacaaatttgcagagccagattcttcaaacttctctatatttatagaaaatggaaatatatgttagcaaaaaaaaatgcaccattaaattagtacgatcaagctcacagaaaccaaatggacaagatagagaaaccaaatgcgcagttgagaataacctatgttacacataatgtgcatgtttggatttagctccaaagtcacattacaataccagctagcatgagtttaaataaaagagtttcacatgtttgaaccactgcgagcaaaataaatctgaatgaaatttcttttaaaaaattatttctagctaaaactgggtttacagtaatgatatataatttta

SEQ ID NO: 232305 - DNA, 294 bp, Glycine max
gattgatgcgcatgacaatacacactctttaaagattcgcttaatcccatcctattacatagagcggagcgcatacacatctagtaactaccactaataacgcgagtgaataaaacagttcttctaatgcgactgcaattgcacgacggacctacacccagatgggaataatgatgggcttattatcacataaaaaggttcgttgctactattattttcaatcagaccacactatgatggcgtactggatgtgaagggatgggaaaacgaatacgagtgaagacacatgccctc

SEQ ID NO: 232306 - DNA, 332 bp, Glycine max
cataacttatattcccacacactaatgggggcgggaaagctaaattccatgggaacacgacaaattattctctaatcccgctataactgccaagcccacgtttatttttcattcataattcgaactctaaaaatatccctaaaaccgtcaaaaattaaacaaacgcattcttatattcaataaaaaatagcactctcaacaataatattcttatacatgtgctccatgggaatgcaaaacaattacctgaaacaaacatccttttagaatactcaataatgcatatatagaaattaacaaagagtgaaaatattctagtcaaactactacta

SEQ ID NO: 232307 - DNA, 445 bp, Glycine max
gtatatcatatcatgttgggcttcacttatattattgtgctggggaacatctctttattatggtatgacaaatggctccacaagatgacttcttatgcaaactggtgccttatgttaatatccaagatactcagtatcttcaacttcgtgacatttaagaccaaggcaagtggcattttgagacactatcttcagcatcatcaaagaaactggatctcaggattttcaggtcattgtggcatttctactagtctcaaagtggagctgttggcctatgcttggcgtggaacgacgaccatagatttactgtttatgagaccgattcgaagatggccttggagctagtcaacaacaatttggaagctttgttatcgttatctcccattcatcaggaagaatcaagacatgctagccttggactggaacgtcagtttgcaacatactc

SEQ ID NO: 232308 - DNA, 437 bp, Glycine max
  unsure (1)..(437): unsure at all n locations
tcangctgctcgattgctccaggttgctgcatggattggcaaaggtctgtatggtggtcagcagaggagcacaaaccacaaacccttgcaacaggtacaaatttctgattcaaggccagctgggttaccaagttaaccaatgcatccaatttgccttcaagcttcttagtctcagatgatgcagctgagtttgtagctacctcatgcactcctctaatgactatggcatcatttctggcgctaaactgctgagagttggaagccattttctcaattaaatttctggcttcagcaggagtcatgtctccaagggctccaccactggcagcatatatcatacttctctccatattactgagtccttcataaaaatattggagaagaactgctccaaatctgatggtgagggcaactagcacatagttttttaaatcgct

SEQ ID NO: 232309 - DNA, 165 bp, Glycine max
aatccccaagacacgaatatgccatgcagacggaagggcagggaccgggggaacaaagaaaaagaacaataggcttggcttcagatgtgacacctcaaatcccacataagggcaagggggggcaaagaaacggaggaggaactgcggcacccaagaattaatcta

SEQ ID NO: 232310 - DNA, 298 bp, Glycine max
  unsure (1)..(298): unsure at all n locations
ccccacccgcaactcgctctncgcgtttcctctcccccccccccgcatgacctgtgacctgccgccggacncaangccgagagcaccgaaaagttcatttattagaccggggagcagtacgcctaccccctagggccaccacagatgacccgcacggggaaaaacatcagaaaccgcaaagtaaacaactcgccacttacccccaccacctaataacaaggaatacagataggcgcccaaacacaagcaaataccaggggactatcaaggccatcaaatgcccttctggaaacacaac

SEQ ID NO: 232311 - DNA, 403 bp, Glycine max
  unsure (1)..(403): unsure at all n locations
tggttggtgaggctaagacatatacttctcatctttcctatgaaaccnaggctcattcccactcaattcttggtggatgcgtcaaagtttattttaatgggacccttcattggagctttccacaccatgctatcctttcatctgttgtgccagaacttatagtctcttgtctggttagactttggaacaccttggctaagatttgagggcatttgagctttctatcttggaacaccaactatttccgcttgaaccaaattggtcatgccattgtatacaaaaaggttttgctctcatcctctatctacttattaacttcatccatccagttacaaaaagttgcatggtgccctaagaaaactctcaagccctaaggagaagngaactatcgtctctgggcctc

SEQ ID NO: 232312 - DNA, 224 bp, Glycine max
cttctggatgaaacttctggatggcccaacagagccctggtcgctataatgccccccccaattttactatacttcacacctagccttattgtttttggtgatccttttttcgcctaatgactgatactgacaaagattgaaccgattcttgtctttttttagccatgcatttaagcctacgcgaatacattagcgaccccttcttaacttaccgacatttactt

SEQ ID NO: 232313 - DNA, 193 bp, Glycine max
cacacaagcccctgcaacaggtacatacctctgagaccaaggcaactggatgaccaagaaaaccaatgcatgcgatatgccctgaagctgcatacacacgaaagatgcaactgatgaaggaactaccccacgcactccgctgatgaccatcggagcattcctggcgctaaaccgcacagagatggaaacccaa

SEQ ID NO: 232314 - DNA, 427 bp, Glycine max
agcttcatgatgaatcaagattgatttcttgagttttgatgataacaaagatgatgacaaaaagctcaaaagtccacaacacttcatgttaacaaagatgatgacttaaagaatcaaagaatgagttcaagattgaatcaagaacacttcaaggttcaaaaggaaatttgatttcaagaatcaagaatcaagtttcaagattcaagttccaagaatcaagatcaagattcaagactcaggattcaagaatcaagagaagactcaatcaagataagtattaaaatgttttttcaaaaactgagtagcacatgaatgtttctcaaaaccttgtaccaaagaagttttactctctggtaatcgattactagagtattggaatcgattaccagtagcaaaatggttttcaaaaagttttcacataaattta

SEQ ID NO: 232315 - DNA, 347 bp, Glycine max
cttagtgtatccgttggcatatgtacatacattgtgtgccgaaccaccttaaaactatgtgtcttctctctcttctccttattcctttctcttcttcttattgctctatactaacaactggtatcaaagccgatgatttggcttggtgaccggctcataagagtaagatggcgacaatggatcttagccttgggaatcctttgtatcgaaagtcttcctggtggtgggtccaagcagtgtgtcccgcagatggtgcagcggtacaagtaccacaagttgctagagcatgtgggctctaatggatatactcgtggatgacttccgctcgatggggaagataccatttg

SEQ ID NO: 232316 - DNA, 440 bp, Glycine max
  unsure (1)..(440): unsure at all n locations
agctngtagaattatggggtacccagttcatgtgtttctaggcggcggncgggcgatggtgcacaacaagctttccacatccacaatgcgcgcataaacccaccatcccctgttgcccacctccaactgagctcacgtactcccacgtagcccatatcctcgtttctctcaacaccgggtccccatcaatcctctcaagcttccacaacatccaagcaaaacaacattcaaacagcacaagctatcacagccaagcaaaacagagccaaggcagaaaactctgctcaacacatcaaccaaaatcacagcttttctcacgtaaagaccacagtaacaattccttcgatccaattcgtaaccgttggatcgactccaaaatcttactggaagtctatagtgtataagcctgcattttgaccgttgggatatactagcaaaca

SEQ ID NO: 232317 - DNA, 363 bp, Glycine max
  unsure (1)..(363): unsure at all n locations
ggaccccaagcgaccgcagcatgcaagcntcaacatccagaggcgagcagctttatatattacatgacgcaagcccacatcccagtaaacagggggtgccatccgaacctgctcagagctcccacatccaatttcgagcatttcgatatattacgggactcaatcagacacccgaataaaaaacggcaagccggtggaatttgctcatagcctcaacatacaattgtgagcgtttcgaaatattacgatactcaatcggacatccgagtaaaaagtcatcggcgtcggaacttgctcaaagcttcggcaatcaagttcgagccttctcatatacgacgggactcaatcagacctccgagaaaa

SEQ ID NO: 232318 - DNA, 384 bp, Glycine max
ttgagcaaattcaaacgaatataactttgtactcggatgtctgattgagtcccgtaatatatcgagacgctcgaactggaataccgaagctctgagataattcatacgacaataactttttactctgatgtctgattcagtcccgtaatatattgaaacgctcgatattgaaagttgaagctctgagcaacttcaaacaacaataactttttagtcggatgtctgatcgagacccgtaatatatccaaacgctcgatattgaataccgaagctctgatcaaattcaaacgacaataactttttactcggaagtctgattgagtcccggaatatatcgtgtcgctgataatggaatacacgaagttctgtgcagattcaaaccac

SEQ ID NO: 232319 - DNA, 357 bp, Glycine max
tgtgatttgattaataatacaatccttgcatatgagaatgacttagataatattacgaaagctagccgacggcccttatagaaatgtcattacttggcaaggatactacttaaaccggcgttcattctacacaaaagctctagatgtcgtaatgtcattgcataacaacatggtcaccctgttggctgaatctcaacactttgcaagtgtcattgatgccaatacctgtgtatcttacatcctttactttgtgttcattgatgaaacttgtgagctcaattttgagacatttataagttgcgtcttcatatggaaatgagttgacaggacatcgtgtgccaccgatgattagtattt

SEQ ID NO: 232320 - DNA, 167 bp, Glycine max
ccccaaacgttacaaaaaggccatcaaaaaacgaagggaggctactccaaacatccaggagacaggaaaatatcgaactcgaaaacttctagagaggaccatcttaaccccaaaagcacaccctccagctgaaaaaggcctatttcatttggtaatcaaattaaaaa

SEQ ID NO: 232321 - DNA, 266 bp, Glycine max
gctgaatgttggatattaccgtcttgcacaatttgggcataagatgaatctagggccatgatcgcttacgggtacttccaaaacatgatttagtgtgtatcgcatataccttgtttcttgcaaagtgaccttgacaatatgtcctgagaccatgttgagaatctaaactgattcaaccccatatactgcgtaaatagtaccattacttgaactgttcatcagtcgcatgcataaatgctattcattggttgcattggtaattgcaa

SEQ ID NO: 232322 - DNA, 435 bp, Glycine max
  unsure (1)..(435): unsure at all n locations
agcttgtagccattagaagtatttgtttatgtgattagaagtatgactgacaatgttagtcagtttgtcatattgattgtgaaggaatgcattaaccttatccaggtgagagtgtgatccttaaattttgagagaaacgactatcatttagtactgatttttgcgtgaatctttgaagtatggactaaatgcatgaaattgaggatgaagaaggccatgtttgattgtgatagccacttagccaaaaatctgaccatgtgcttgaatgaattgtcccttgtccccaatttgagctgaatgaattattgattgattgaaccctgagcctatatagtgttatctccagctaccttgacttatgttgaggagagcatcatccacaggaaacacggttcanagtaaatttgtcctaaatttgggggagtaaatataacg

SEQ ID NO: 232323 - DNA, 428 bp, Glycine max
  unsure (1)..(428): unsure at all n locations
tgtgactcttggcaatttctttaacataaccattctcttaataagttatgactnttgaaagaatcttcataaacaagtcacttgaagaattgtgacttttggaaatgtgtttttcgaaatcagtcactggtaatcgattaccattaaggtgtaattgattacacatcaacagatgtgactcttcattttgaattttgaaaatcttaacgttttaaaacactggtaatcgattactacattctggtaatcgattaccagagaatataactccttggtaatgattttgtgaaaacttcttgtgctactcaatgttttgaaaaactttttaatacttattttgatcgaatcttctgttgattcttgaatcctgagtcttgaatactgatcttgattattcttgaatcttgaatcctggaactcgattcttg

SEQ ID NO: 232324 - DNA, 373 bp, Glycine max
  unsure (1)..(373): unsure at all n locations
agcttttagagatcaaggtttattattttgttacatccccncaagggagggagggaaaagtttatcctgatttaaaaacaaaagtacttttttatccaaaattgtatcatgacataattattgtataccggagtatttaaaatggtgaaacgtcacgtatatgaaacaaggtccgttcttagttcttacgttgttttcccggcaacaagaccaactcaaaaaccctaatttcccatctccaccgttcactgaattcaaggccttctctcgcctccatctcactccaacatttctcatccgcaaccaacattggtcaaatcgattcatcctcgttgaaattccaatcctttttcctcaatttctctcttccgtt

SEQ ID NO: 232325 - DNA, 450 bp, Glycine max
gcataggacacttaaaactaactataattgtatgatattgatgcttctgcttatttggctcaaatgccatctttccactcattgagacatattaatctagtgtctttggtcatgtgcttatcctacaatgcctgtgctactgcagcttcaatatatattggtattttctttccctcattaataatccagttaactgattaacacctatgctcgcaattgagtgcatcttttcttcttctgaatattcccaatgtctactcaatcaagataatcatcacatgggccagaaaaggattactctttaatatgtgacacaacatatcgcttatttggaatctataatgccattcccataattgcaacacatatggtatcggaatagttcccaaattcatgttattaaaaacaatcataatttgttccctctatatatagacttattaatacacg

SEQ ID NO: 232326 - DNA, 396 bp, Glycine max
tagctacacacacccctcgaaagcgagctcttttttgccaaatcatgaaaatcaaaaaagtctctactacaaagaccactcaaaatgtcccgaaatataaggatacaaccctatactactagaacgaccaaaatacaaggccaaaaagaaggaaaacctatctaatattacaaagaagagtggactcaaccttggcccatgggacttgaaatcttacctgaggttcattataatcttagggccttctttaaccactctagtccaatcctcttggaatcttctatccaataccctcggggggttggattgcatcatctgtgggcaagaataatatcgctccccaacagagtcctatgaatgcaaagtcattctttcactattgtcagaccctaattt

SEQ ID NO: 232327 - DNA, 393 bp, Glycine max
cgcgctcattctcaagtgttaacacgggctatacgagacatcttgccaaacatagtcatgatatcgataactcgcctgtgctttttcttgcatgctatatgtaacaaagtcattgatccagtcatgtttgatgagttggaaaatgaggctgtaattatactgagctagttggagatgtattttccccctgctttgtttgacatcataattcacttgattgtgcatctggtcagagaaatcaaatggtgtggtcctgtttatctacgatggatgtacccggttgtgcgatacatgaagatcttaagagggtatgcaaagaatctatatcatccagaagcatctattgatgagaggtacattgtataaaacccaattgaatttgttataatactt

SEQ ID NO: 232328 - DNA, 199 bp, Glycine max
ccaaacaactcactgacacatggacagccgatgggaagacagtcccctcaaagggaattccttcttccgcaagcgcgaagcaaataatggaggaaatatgatgaacgaagacttcaagaccctctactgaaatatcatgtgccacatgggcatcgacaaggaccttcctcaacagcacacgatgaagctcataggaatg

SEQ ID NO: 232329 - DNA, 381 bp, Glycine max
  unsure (1)..(381): unsure at all n locations
nttatatttggtcaaatgccacatgccatattgtatttcttattttgtaagccttttccacacaaatgtatgatgtgtagtgttcaatgttataattttaaactagaaagtagaaattgacaaaacaaattaacagattctgatgaaacaaaatcataaattattaccaattatgtgaagcctttgtttcagaagaatgaaaacagagcaggggagttaaataatggtgctcctttacttttctttttcatttaagaagtagaacttatctgacttttcagtttctttgatgaaaattggtggaagcaaagaaaaaaaaatacacatcggtgaattgtatgattaagtttggtggtatggaattgcacttgatcatccatg

SEQ ID NO: 232330 - DNA, 452 bp, Glycine max
  unsure (1)..(452): unsure at all n locations
ggaccctaagccaccgcagctgcaactaacaccaatttatttctattcttngctatcacaaaccacttacatacatttgaaatacaccatacaaatttctactgtttcactcctatttatttatatgcatattggaaagctaatcacatcatgtacatatttgcattcaaaaggcattccgcactatcatacattcatttaagaagacaatcattcacacattgctaggaatctcatgctccttatatttacctatgtatacacattattgcaaggagttttccacgctacgtctatgtaaagcatcaaacatggggcaacctaaattcgagcaaaaactctcacaagcaaatcctaattatcatgtttctctaattctaaaaccaaatgtggattcctagccataagcatgtttccttgcattgaagctacaagttcgggttcctaagctc

SEQ ID NO: 232331 - DNA, 410 bp, Glycine max
  unsure (1)..(410): unsure at all n locations
tctgaagatagtgatgaggtactatccctaaaggcttatcttgaaagagcccgagtagtcgaagagaagttcatgtccatagccatcaaagtctgaaaagagtatgatgaactaagggacgtcaatatggccaccgctgatgccttggaacgagaaaccaagaaggcccaaaaggaataacacgtgccaacatagttttgaggggctttatagggcatcaatagtaagctcaaactccgaagaggtgaaaggaatcatcacgggtcaaaggcatgatcttgaatgacgagctaaaggcttaccttatgtcgaanagaaatttgtcccaacaagtaagcgagactgaagggaatatgtgtgccatcatcgattagtgcaaagagaagcttaatctaacggcgactcacgat

SEQ ID NO: 232332 - DNA, 443 bp, Glycine max
  unsure (1)..(443): unsure at all n locations
agctttgagccaaaattccaactcattataaactttgacccagagagagaatgtccatcctcgccctcggaagaaaacaaaaaaaaaaagaacgaataatgaagtttccgatcaaagatcggaagaaagcaaaataagaaaatttcccaatcaaagattggaagagagcaaaaaagcaagaaaaattcccgatcaaagatcagaagaaaacaaaaagaaatatacaaaaagatctttggaccagacaatatccaaacaatacataatagccacaaccaaataaggaaagaaaggaaaccacaacttgaagttgtcctctccctttggttgccgaccaaaatcctgtgcactggcgactttcttaccccgcactaaacaaaaacagaaaagggagagggccaaacactcatagccaaatttccaccaanaacactattcccaaa

SEQ ID NO: 232333 - DNA, 419 bp, Glycine max
tcttatctaaggctcacttggtggtgaagctcattcttccatggcttattccctagtggatggcgcctcctctcacctcttctcctttgtcttccgctgcatctccatggtggaaaatcaccattaaaggacctcattgaagctcaaagatccagcctccatataagccccacaagcaagcttccatcacaaccgatgttaacgtataagttaacatcgattttttgtatagaaaaccgatgttaatctataagttaacatcgattttgtataaaaaccgatgtgaactgtcaacattcatacatttattttggtgtaattcttattatataacatcggttatttaaataaccaatgttgtcaatgttacgataacatttgttttgaaaaaccgatgttaacgatagtactttcaacat

SEQ ID NO: 232334 - DNA, 435 bp, Glycine max
  unsure (1)..(435): unsure at all n locations
agcttgtagaatggctagacatgatatatgtcttggtttggnttggttcaaggataaaagggatgccccacattatttccatgacacaaatgcaaaaatgatgatttggaaactttatgcaaaactggtcatgcatgcacctatgcggacactcaagtgtcaaatttttatggtcatgtgatgctagggctcangattcgtttcctctattttaatcaacccaatgtttccaaaatatgttcttttatcaatttgtgcattcatccgagtccatttcgggcgtccggggaaatttcacagcattcacccttcaggtgtagacacattttccaaaaattggttatgatcaatgaactctttcaaagaaaagttggaaatcgtctcttttcaaaagcatgctagtttttagctagacaacctaatttttcctttttt

SEQ ID NO: 232335 - DNA, 408 bp, Glycine max
tgtaggattatggggtacccatcacatgtggtattatgtggcggtcgggcgatggtgcacaacaaattgtccacatccacaaagcgcgcataaacccaccatcccctgttgcccacctccatctgagctcacgtacttccacgtagcccatatcctcgtttctctcaacaccgggtccccatccatcctcccaagcttccacaacatccaagcaaaacgacattcaaaccgcacaagctatcacagccaagcaaaacatagcatatgcagaaaactctgccaaaacaccaaccaaatcacaacttttctcacttaaagaccccagtaacaattccttcgttctggttcattaacacgtggatcgactcgaaaattttaccggaagtctctaatacttaatcctacatt

SEQ ID NO: 232336 - DNA, 384 bp, Glycine max
  unsure (1)..(384): unsure at all n locations
agctttgagccaaatctaatgacaatgtcattttactcgtatgnccgaatgcgccccgtatatatcgagtagctcgtaattgaaaaccgatgctcgtataaaattcaaacaacaataactttttactcggatgtccgattgtgtcccgtagtatatcaagacgcttgaaattcagaaaagaaactctgagaaaaatcaaacgataataacttttaactcggatgtccgatttagtcccgtaatatatcgagatgctcaaaagtgaaaacagaagctctcatcaaattcaaacgacaagaaccttttactcggatgtccgattgtgtcccgtaatatatcgagacgctcgaaattcagaatacatgctctgagcaaaatgaaacg

SEQ ID NO: 232337 - DNA, 421 bp, Glycine max
tattgatttgtcttaactgaaccctgaacttaaatttatatctcctgataccttgcttagattctaggatagcatatggttcaaggcaaatttactcttaatttgggggaggaaagtcaattacaatgaaaagaataaggttaaacatcagcacacacaacaaataagttgtattgtttaaaaaagaaaaagaaaataagttgcgctgttacaaaaaggtcgaaagcaacttatgaaaagggaacagtgagaaggctattcgtacaaaacaagaaaagatcattgggattattctatgatttgtgctctcttataatctaagcccttgaaatctacaaataccatgaatttttggagcgaaacctcactacaagcctgagaaaatcctctgattctggtatacatttcaaacttgtggatg

SEQ ID NO: 232338 - DNA, 446 bp, Glycine max
  unsure (1)..(446): unsure at all n locations
tagatcctttanaaaatgtatattaataggaactatttttgttcaaganatcttatgagattcaaaattaaaaaaatacaaacttaggactaaaacaaactaaaaaacttacaataattaaaattgaaaaatacaaactttcaaagaacaaaaacatatttaaaccaaataattatgaaaaaaaatattttatcaatctaatgtatttatttttctctttctctctctttctatattctttctttctctctctctatatatatattatttatattttatgtatgtgaaattttcaaatatttattattattattattattgtaccttcttcaaatcgattttttggctgtgtccctgaatttaaggtactggttatattatttctataaattattaacaaaaaaaaattcgggataaaaagctatcgaaaggagcacacattcact

SEQ ID NO: 232339 - DNA, 266 bp, Glycine max
gaaaaatcgacacgctcaaattgaatggtgaagctctgagccaattcaaacaacaataactttttacctcgacgtcctactcagcgacgcaatatatcgggacgcccaaaattgaatggtgaacctctgagccaattcatacgacaataaacttttactcggaagtctgaaagaggccgcgaatataacgagacgctcgaaattgaatggggaacctccgagccaaccaaacgggaataactctttactcggatggccgatagagg

SEQ ID NO: 232340 - DNA, 349 bp, Glycine max
aaaagggatgccccacattatttccatgacacaaatgccaaaatgatgattttgaaactttatgcaaaactggtcatgcatgcacctatgcggacactcaagtgtcaaatttttatggtcatgtgatgctagggctcaagaatcgcttcctctattttaatccacccaatgtttccaaaatatgttcttctatcaatatgtgcacttatccgagtccatttccggccgcccgggaaatatcacagcattcacccttcaggtgagacacacttctcacaaattggttatgatccaagaactttttcacagaaaaggtggaaatcgtctcttttcacaacatgctgttttt

SEQ ID NO: 232341 - DNA, 354 bp, Glycine max
taatcatcctgcttggacgaatgagaaaactggggcaaatgaatgaggtgagaatgaaggagaaacctatgctgcgactgtcattcctacatggccaaactttccaccatcctaacaatgtcattactcaacatatatcagcttttctcattacccaccactcagtcattcacaaatgtcatccctaaattaaccacaatgcctatctaccgcacttccaatgatgaacaccacctgtatcacataccatatcaccaaccaagaaatgtattttgcaacgaataagcctatagaattcaccccactttcggtgtcctatgctgacttgctcccatatctacttgataattaatg

SEQ ID NO: 232342 - DNA, 443 bp, Glycine max
  unsure (1)..(443): unsure at all n locations
tctagccaaatggacttaccttgaatgaatttttttgttaacccttatgagccttgtttccctttccttgttttgaagctcactacaagccttaagtgaaaaaccatgatatcaccgtatccttaatgaattctggagctttggaattgttttgggaataagtgtgggggggttttgtttcattggataacatgttttgttggctatgcttcatgatgtattttgggccacacttgatgtacattgtatattggttaatgttggacatgtagaatgagatgttgtttctcaaaggctacagagcaaaaaaataatcaataatcaaaatgaatagcagtgaaggtgagtgaataagatcttaaatggcaaaaaaatgatgagactcttggntctactctctatgtctaaattctatctttagctcttttaatgttatcattttt

SEQ ID NO: 232343 - DNA, 262 bp, Glycine max
acggaccgtctagacatatttccacccacccttagtcataagaacattcgtaatcctatctataagctaggggactaaacatacccaaatatatgatggaacaaattacaatatttgatgcatatcttaaagtgaaaaaacgaactaaccgaatcaaactatactaattcgatccaaatgctcaaataaatcctcttcaattaaagcaactaaaaagagatccgcgcggctaccttctaccaaacataccaattctggaaat

SEQ ID NO: 232344 - DNA, 434 bp, Glycine max
  unsure (1)..(434): unsure at all n locations
agcttgtaaaaaagggaagcttatctttaacttttttcaaagcaaaaacgttatttctacttcaaaatcccttgaactacttcacattgatttatttggtacctctagaactatgagtttcggtggtaattactatggctgagttatagtggatgattacttaaggttcacatggactttgtttttgaaaaccaaaaatgaaaaaggtcttaacattgtttcacttanaagtgatcatggaggtgaatttcaaaatgagtcttttgaaatcttttgtgaagaaaatggaattcaccacaattttttcgtctcaagaacacctcaacataatggtgttatggagaggaaaaatatcttccttgaagaaggtgtaagaaccctcctaaatgaaacaaagttacttaagtacttttgggttgacgttgtacacacta

SEQ ID NO: 232345 - DNA, 450 bp, Glycine max
  unsure (1)..(450): unsure at all n locations
tacccattcagntntaaggtttttatgatgatgcttgtgatgtttatgcgctgaaattgcttatggaaaacggctagagatgaagggtagagttaacctatggttagaaagtgagaatatggtgttatgagtggaaaaagagtgagttttgagagttggaaggccaaatctgcatttagtggcatttggaggttaaagtgagttaatcctagcttgaaatgtcatttatgacttacgaaaaagtttgggctgtgctagagagaaaaacaaatgaccaaagtgaacaaagagtcatttctagggtaaaattgggtgttgaggagtcaaattctgattcggtggaattttatgtgtaaatccagttcgagcaagtttaaattgatgttatagacctgtgtgaggtgagagtttgctccaaatttacctgattcttaatttcacttctcaaac

SEQ ID NO: 232346 - DNA, 295 bp, Glycine max
acaaagttctctaaacccagccaaacaaagtgggtgcaaagaccactcagaatctataaagagcaagataatctttctaactacaacctgagaatgcaaaaaataaagaagaaagacctacaggcacatccggtcatcaaataaaaactcaccataactgactatagaactacaaaacaacttgaaaagaggcgctctctccccaccacgatgaaattctcgtgactcaataaaactaatcctaaaagcatgacggacccggtgaaaaaacacctaaaacaaaaaagaaagacac

SEQ ID NO: 232347 - DNA, 389 bp, Glycine max
actctccaagtgacatgtagacttcttacctatgctttgtctcgaaagaaattgaagcacacatctcatgtgtaacatcaaacttcatatttcaactgaaaatggtataaccttttaaagcacaccaattgactgttcattcttacctctcttttgcctctgtaaaacggtcaaaactacaaattgttacaatatacacatgtaaaatataaatggacaaagaaacactaagctaacctctcacacaacaaaacactctaaagccaagaaagaaaaaaaatgaagctaagttgtctgacatgtactgcggagagaaattacagaaaaaatttataaaacgtctatttatcttcggtttaagccaacaaatataatactaattactattt

SEQ ID NO: 232348 - DNA, 228 bp, Glycine max
agcaaagaaagaagatgtcctctatttaatccactattcacgagaggaagctaactaaatcatggaccagcatgcgcgagggatactcttcgcagcccagctagaacacgtgatactaaattgagacgcttctctggtttgcgaccccctaataaggggggataccatttccaaaacaacacacaaaagcccttctatggccgaccacgtttatgaacatccatggag

SEQ ID NO: 232349 - DNA, 415 bp, Glycine max
ctcccaatcattgacggttccatatgtttttgtggatgcaaatatcatatataatgacttactcggcatgcctattttgaacaaattacgagccatctgttctacatctcatttaacaatgaaattttcttcatcaacagggcaaattgtctttatcaaggctaatcaggtcgacgctcatgaatgctatgtaaaatgttgcatagttgagtcgtacaacatggtgaaaatgaagataaaggaaagacatagatttccaacatcaatgttgttatcaccacttatgagaaactcgatcccttattagattctgaagatcaacaaccaacacctattgaggaaattgatcccttccaaattggcaaggaatcacatcaatgcacaaaaattatcaatgcagcgtacgatgtatatg

SEQ ID NO: 232350 - DNA, 441 bp, Glycine max
  unsure (1)..(441): unsure at all n locations
agcttgaaatggggtaacaaaagctcttgataatttcaaattgncataacttttcactccgatgtccgaatctggtgaataatataccgagacgctcgaaagtgaacaactaaagctctcgagaaattcaaatggtcatgacttttcactcaggtatccgattcaggcgcataatatatcaagacactcgaaattgaacaacagaagctctcgagaaattcatattgtcctgacttttcactcggatgtccgatttaggcgcataatatatcgggacgctcgacattgaacaatggaagctctcaagaaattgaaatggtcataacgtttcacacggatgtcagattccgggaaataatatatcgagatgctcgaaattgaacaacggaagctctcgagaaattcagatggtcataacttttaactcagatgtccgattca

SEQ ID NO: 232351 - DNA, 460 bp, Glycine max
tactaagcttctcccctattttgctataaatagggggagaagtgattaggttaagggttcagccctttaagcacttctctctctctcgaatttgctgaggaaaattatttccgtgaagaaaatccaagccgaggcgcttccgtaacgtttccgtgagtaattacgcgaagattctcgaccgttcttcaagattcatcgttcgttcttcgttttcttcagtcttcaacgggtaagtacctcataccaagcttttcaattcattctatgtacccgtggtggtccacattttgtttcatgtatttttattctcgttgtcatttactgtttataccaccttttgacatgcttaaaccatttatttaagtcatttctcgcttaatctaaaaataaaataaatttccaccgaatcgttgaattgatcattcgttaatttggtaaaatgattccgaccgtcggtcgg

SEQ ID NO: 232352 - DNA, 237 bp, Glycine max
ccatagggacgcacaggtggaggagacctccttacttcaccctacttctttctcaccatgactcaaggagagctctttcttcagtcgccctctttacttatattgcacttggccaaatctaaatgaacgctctgattggccttgatcctatgatcgcgctacatcgaagacaatgtgttgtttaagtgtgagggggtgggggggacaagaatgcaccctaatcttggtgggtattct

SEQ ID NO: 232353 - DNA, 338 bp, Glycine max
  unsure (1)..(338): unsure at all n locations
actaaaccccaaccaacgaggaggctcttgtttttccatngagaaaaaagtataagntagtctatgaagaatacatgttccgtaatgcctctaaagacaaaagaaatggatgaaatgaaaaaataaggaatacatccatatcgactgtgaattaaagtgtaatattgtatataaatgaattaaatgtaaacacaccctcatctgtcactcaaacatttgcattttaaagcaacaaaggatctaaaaatgatatatatccacaatcaaactacatgttaaaattcaaaacactataatattcataaggtaacaacattgaaatacgatacaaaaataac

SEQ ID NO: 232354 - DNA, 440 bp, Glycine max
tgcactaactggtgcattgctttgttgtttcaaaaaaacccagacaagacgctccaacatattgacaagtcctctcaaacattcaaaaaaatgggtgaacgacattaccagaattgctaccgtgatcaataataccccacacctcattgataatgttggaaaagataatgttaccaggattcatgagatttgagaaaataaactgattcttattcctccataatcatgacaccttaacacctagaaggagacaccacttaacattatttattgttaacttagtaccagcattgatgagaatccaatcacccaaaccaagttggaaaattctttcatggaattgataatcttgcaataaagtccacacttgtgttgctatagaatagtctcttacacgatgcataatggattttggtgtatagacgaacatacgacatata

SEQ ID NO: 232355 - DNA, 344 bp, Glycine max
tggaagccacttaattttcttgccaaacctcaaggtgagggcactcacattatttggatttagcaccgtttgcgaaggaaatttttctgaattttgggactgagcttggttcaactgagtagccatctgccctatctgatttgtcagactctgaaaggaggctcttgtctcttgcggaaattgcatattctggatggacatttgcctcactaactcctctaaagaaggtagagaaagggccttacctgctagcaaacattggtgctgctgctgctgctgcataggaggaggaacatatggcccgcgtggaccaacaagcatttggaagggacggacaagctggc

SEQ ID NO: 232356 - DNA, 165 bp, Glycine max
gggagcggaaagaaaccacccatgtcagagctaataccatccggaaaaaataatatactacccaaaccagtgcccacggtgcgtgggaaataaaagcgacacacgccacgaagacaaacaccgttacaagaatatcaccagaataacatcattcaaacaggaagc

SEQ ID NO: 232357 - DNA, 266 bp, Glycine max
gacactataaaactaagcgttcagggaatacccaagaattataggatttggttgttgggtttttatcattgatccactatttagttgattaatcgaatatatcttcgacggaagaatacgtctagaggtaatattgtaagaagcgcattttgaaatgacaacacattgggaataatttatttttttttaatgccttactcagatattcattcttttcttcccttccatgaatatgtttccgctatgatactaacatttgtgcttga

SEQ ID NO: 232358 - DNA, 371 bp, Glycine max
agctcattaacaggttaatggttattgttatcggagagcatacccatgtaagctctggcgtgacattgcgtgcaacagaagagctcgagagcggacccaccgccaaggtaggagtatccgaaacaaaggccagaaaaattcccagagaaactgatcagagtgtcaatggtgaacataaagcacaagataatggactgacctctaaagggctgatccaggcacaagctcgttaagaaaccagctatgtactataaagtgcacagagtgacagccatgagtacaaaatacccgctggtacgagtatatgaatatagagagtatgtcgtcgaattacaataagaacgatcgcagaaaagttgatttgagagagc

SEQ ID NO: 232359 - DNA, 441 bp, Glycine max
tcatgatacatgtagttttttttattaggccaaatgttattcaataagagtaccaatgatattcagaataaaaatgttacagagaataaaggaacccatggcgcaaagaaactaacagaaaagccacacagtgataatatttgtagtgcatgtctattgagatatctttacactttggggagtcttgtttgatgtaattttttgcttgttactgaatctataatcaataatatttgactatcattacgatgaatttttttttacaagggtgaagtgtttactattcattgtataatacatttgtacaccattttgttaatattcttttcttatacacatttttcttctaacatacttgaaaggaaatatagctattttataattaacttaaataattatgcatttaatataaagctaacttggtgtgattaatatattaat

SEQ ID NO: 232360 - DNA, 423 bp, Glycine max
agctagagattcatttatggttatccttttatcatgcatactcggatgtttcctcttgaaacaccttaatgcgattcgcaagagcgaaagtctctcgctcttcgtaatgaacgtaacaacatgacaaattatcaagcaatctaacaagacatgattggaagataattaacccataacaagattaacattcgattgactaggagacaataattttaaatcaagaatgatcacttattcagaatcaacaacaaatattctaaatgaattcaagaatgaaaccatgaccacaatatatacacatagggagacatcaacaatcgcatgatcgtgatagaaacatcagtaatcaaactgtttgacgtaggctgacaacacacagagtgaattatacttgcgctcgcaagtataatcgagctacttgac

SEQ ID NO: 232361 - DNA, 413 bp, Glycine max
ttgcaacccaatccttcctctatgttctacgttcttttccagtatcctctggatctccatagttgaaacatcagcttgtccatttgtttaaggctgatagggtgatgctactttgtgtcaaacatcatagtgttgaaagacctttgagagttgagcaatacaaaatgtgtaccttcatcactaatcaagagtctaagcactccaaacctaccaaaatgctgcttttaagaacttaatcatcatctttgcatcattggttggactagaaattgcttccacccactttgagacatagtccaccactaccaagatatatctggcgtcatgtgaagatggaagggaccgacaaatcatttcctacaatcaataactctacctcaacatgtctatatggcatttatgatggcaaaatg

SEQ ID NO: 232362 - DNA, 435 bp, Glycine max
agcttggaagtctgaacctcaacacttgtttatttgttctgcgagcttgggttttgttttatgtaattagcttaattaggtggattagatgggcctaatcaagacccatcccttccttatgagtattcactctatatattagtggaagttagttagttagttagttcattttgtaaaaacagatttagttacttattatgcaagctttgggctcaaactcttttctctcaactattcttcattcttcttcctcttttcacttttgttattccattttcttgcacaaaattatgtaccttttccattggtgatgatcatggaaggataaacacttcatcaatccaaagatccactccaagaaaggttgaatttgagttctagtttagtattgttaatctctttgaatgttcatatttctcttcaatcctatttttg

SEQ ID NO: 232363 - DNA, 136 bp, Glycine max
tttcgccaccaccacatgcgtaacagcaccaacacactctctctctctctctctctctatatgtgagagaatagaatgtagatattcgttcataacagtaacaaattggttgatgacgtatgggatacgcaatgat

SEQ ID NO: 232364 - DNA, 371 bp, Glycine max
  unsure (1)..(371): unsure at all n locations
tcgccgatcaccatggaagttatcgactgcatggtttttttttgtttatcaanattcgacgcacgtggagcaaaagctacaaatagctgtttctgcgatgtacttttacgctattggcatgaatatgccactagactcacaaatttgatgtgcaaacaaacaccagctaattaaaagagcttattggagccactctcttaatgcttaaagtgtataccttcaaattttaacttaagtgcttgtatgataagtccaaacaagctctgtagaagctattacaaatggccactgaattgcattcatatgtaattgatgctcgtgctgattcaagcttatgtgcctgtctagattatttctttatttactgaaat

SEQ ID NO: 232365 - DNA, 219 bp, Glycine max
aaagacgagagagaccaagcccaaaagactcccaaagagcacacgtcaaacaactacatcaacgccagagaaaaacaaaagactaacaaccgagaaacgaccccagaccacgaaagagaatcccacccggaaagaaacagaacacacccgggaagcctgaaaaatgtcaaaaacaacaacacagaggcggtacaaagagggccccaaaccacaaagcac

SEQ ID NO: 232366 - DNA, 352 bp, Glycine max
ctataagtgcgggtctgggagacgaaggtcaagagttctctatatgtgaagatgatgttccaagtactttggatttggtccgaccatgccctcctgatttccagctgggaaattggcgagtggatgaacgccccggcatttacgcaacaagcataatgtaaacctttacggtgttaaaagctctatagatgggcctatgctttatagttttctctttgttaagctttgtgtctttcgttgtgaatttataatacaaagatctttcttcatctgtgcctagtctctacccattctcattcatttgcatgtttacttgtttttctataacggcagattcgatgacgagtccccc

SEQ ID NO: 232367 - DNA, 394 bp, Glycine max
  unsure (1)..(394): unsure at all n locations
caagcacctgagctgcgctgctagcgagacgcaattttatttttttcttcagcgngaaaaacatgattttcactctcttcttctcttcaaatgccatctaaaccctaacacctaattgtccaccaccaatggccgccacaagccaccagtgcttgccgttgaacacccacaccaataggaactttttattctaagcggaatcctcagaatcatcctcaaggattcggtggagaaaactccgctaatcctccatttcatagctctctgaggtaatcctgacttataagccttctgcctaattagctagagatcctcttacagcttcttgcgggctgagcactataacaaaatgtctttatacttcctttgaaaaattcttgaatatgacactatt

SEQ ID NO: 232368 - DNA, 429 bp, Glycine max
  unsure (1)..(429): unsure at all n locations
agcttataacaacaaaattgtcttaattatttccaaanatgcacgngaagtacgacgcatcaacaagaatcaagccgaggctattgtgcaagcaatcaacggggcactacactccaaatgattattatgatggatggctcaaattctcacaaaggtaaaatcattactttcaaactgagctttcaaaactatcatgacatgttgagaataatcctggatttccagtcacaaaatgtagaacttttattttcaaaacaattacccatttcttgaacatatcctataattcaaacaaaaacatgcggagacgtacgtgcacatgaaattgacccataatatcaaactgacaatccgacgaaactaacgacattaacatattaacacaactaacatattacaaaagcactaaactagcaaacccaagacact

SEQ ID NO: 232369 - DNA, 353 bp, Glycine max
  unsure (1)..(353): unsure at all n locations
tgacccgagatgtaatattgatagtggtgatttagtttatatgttntccgactatacttggcttttagacttttgtactcctttaatgactgctccttctttgttgttgacatacggtttgcacattgattgtattgcatgagtccttttggagagtttacctcgatttatgaatccatttccgggggtgcctacatattgtgaagacttttatttctgaagcatttaccttgggttatgaacgcatttcccagggtacctacagatttcataaagcttttattttgaattattttccctggtttgggaactcatttcctgatgtgcctacaaatttcatatgccattcttta

SEQ ID NO: 232370 - DNA, 433 bp, Glycine max
  unsure (1)..(433): unsure at all n locations
agcnttatcaacaaaagcattataatctattacttntgcgnnnaaaaaagaatctattacttataccacataaaattagcccaagtgaatacaatatgagatttttactttcaaaaaatgcttttccgacgttaatgtaccatacaaactttctaagatcaaccgactcaagccattatttatcggcagattataactaaaccactcacaagccataaagccatatcactcaagtcgaacatttcctgtttttaaagatttatatataaaatattaaaaacaacttttttttttcactttgataatttcttatgcaaatctctataaaaaccaaaatcaaagtgaaaacaaaatcattcttacaagtcttttgtataaaataaaattaaataaaagcatagtagctttctcatatcaagcagaaacttataag

SEQ ID NO: 232371 - DNA, 363 bp, Glycine max
tcgtcgtcctgaagatgctttgttccaaagattctattgcacatgtaatggtggcattcttccacattattggggatttggagtaaaatcacgaggaacaacctcaaaaattcctgatccttttgctatataacaaggtaacccaacaaaaattaaaaatggatatgaagagaaatggttgctcaacatcatggtcattgatacacgtggtgcacaagataagaaagcttgcactcaatgtagatgtgaccagatgaatctcccgaaggacttttataatgtcacaagggatatacataaccaaaaattgactacaaattatataggaggtctattgtgttgcaggacaacttacaatgcaag

SEQ ID NO: 232372 - DNA, 360 bp, Glycine max
  unsure (1)..(360): unsure at all n locations
gaaggcgcacaacaaagatttccacatccacaaagcgcgcataaacacaccatcccctggggcccacctccaactgagctcacgaacacccacgaagcctaaaaccatcggttctctcaacacaggggccccatcaatcctcccaagcgaccacaacatccaagcaaaacaacatgcaaacagcgcaagctatcacagccaaacaaaacagacgaaaggcagaaaactctgccaaaacaccaaccanatcacagctgctctcacttaaagaccccaggaacaagaccctcattccgcggcattaaccgccggagcgacacgaaaatgttacaggaagtcttcagaacataagccgacata

SEQ ID NO: 232373 - DNA, 444 bp, Glycine max
tcttatccaaggctcatcttggtggtgaatcttcttcttccatggcttattccctagtggatggcgcctcctctcacctcttctcctttgtcttacgctgcatctccatggtggaaaatcaccattaaaggacctcattgaaggtcaaagatccaacctccatagaagccccacaagcaagcttccatcaatcatgtccttatttatacatttcattccaaaatttatagattcatgcataaattattactcatagctagttgttcactcacaatgtaagatcacactctcaccggttttggttcaagcttttttctctcaatcaatctgtctattgactaacaattctaattgcaagttcacattcttgttctttcttttgccaacaggcatatttgttcaaacttatgaaaagaaacacaattccatccttatcatgcattc

SEQ ID NO: 232374 - DNA, 423 bp, Glycine max
agcttggctcaagagacttttaattttttgcggttgaaggaaccacttccgctcccgaatatgacagccatcgttttagggacgacgagtatactgacttccaggaagagatagttcgccggcggtgggcatcgctggctacccacatggccaagttcgacccaaacatagtcctcgagttttatgccaatgcttggcctacaaaggagggtgtgtgagatatgcgatcttgggtgaggggtcagaggatccctttcgatgcagatgccctcagccaggagtgcgagtatggccagaggaggaaccaagccgatgggtctgaagaggaggccatcgcccacttactgcgtatatcggggcaagattttgccccgactgctgctgagagacgggtgcggatcatgcgcaccaacatgaccaccc

SEQ ID NO: 232375 - DNA, 408 bp, Glycine max
  unsure (1)..(408): unsure at all n locations
tacctatcctcatggcctgccttacgacgtgatctctccgtccanccctgaagatttaaccaagcccctactttcgaggggcaacctccaccctatgaagactatcccgtgcaagaagatgggggaaggagatacccatcttgggcccctggtccaccttatagatccggccccacatgaactacccctaccgaacatatttcggcatatcccggtgtcgcaaccttcccttcggcgggagggcgacgcgagactcgcgggatgcgtgttccacgaaaggaatacgcgcggatcgccaccaacgttttttatgaatactgcggaaaaccggataaacgtgatctacgaacttttatgaataggtcggaatcgatttacgcacgggaagtttttcccccccacttcctt

SEQ ID NO: 232376 - DNA, 440 bp, Glycine max
  unsure (1)..(440): unsure at all n locations
tggagaggatgcttcaatggatgattttatagacggttatanaaagagaggggggagcatgatattcaaataggataaaagggagagaagttgaactttgagttgtgtctcacaagactctcattcatcaaagttacaacaagtgttacacatgcttctatttataaactaggtagcttccttgaaaatctttgttgagaaaacatccttgaaaagcttctttgagaatactttcttgggaagctagagcttagctgcacacacccctctcataactaagctcacctctttgaggagctctcttgagaagattcctaaagaagctagagcttatgtacacacaccttcctaatagctaagctcacctcctcgagatgagaagcttgagctgatcttcaaacccctataatatcgatgctacccgcatgaaaaatacatga

SEQ ID NO: 232377 - DNA, 365 bp, Glycine max
agcttttgactccatttcaatatggcttgaaaacgagagcatgttgtgtgaggactcccctttacgcctagatggtgtgaagatgttattcaccatgtacatgtatatatagaatacgtagcaagggatggaagcttgcttgcggggcttctatggaggatggatctttgagcttcaatgaggacctctaatggtgattttccaccatgaagatgcactggaagacaaaggagaagaagggagaggaggcgccttccactaaggaataagccatggaagaaggagcttcaccaccaagatgagccttggataagaagcttataaagatgctccctacaggaaaagaaagagggagagaaagagaa

SEQ ID NO: 232378 - DNA, 348 bp, Glycine max
tgcttctacaaaaagttcatgtgttaaattgatcttatgtttattgaaagattgattttaattgcgaacaaaagtcgtttaagacattggaccttgaaacgatgttttaaatttcaaaagcggtaagaattgtcaaggcgttggaccttgaaacgatcccaagtgatgtttaatgaaaagcggagagaatcgttaaggtgttggaccttgaaacgatctctagagatatttgatgatatgaagaagttatgaagtagttctattttggttttgcttattaaccttcaatacttttcttagattacttacagcataatgatcggttaaattactttccagaataaaatg

SEQ ID NO: 232379 - DNA, 406 bp, Glycine max
  unsure (1)..(406): unsure at all n locations
agctntgcactacaggtcacgggccgttaagggtatgcattgccnctagncacacacagacacacatctgctccattaggagcaatcgcatgtcgatccatgggcctgttggaaccatagctgccactcaaagaactgccactgactagcagtatgaagcgccctcctcccactcgccgtaaatagttgacaacaatctgcgtacgacccgaccaaggctctctatcccccctcccagaggcttgttaaaaccatgtttcgccaacatctataaagctaatggcctcctcacacactcactctgtttggacaacagacaccttgcgccggatatggacacaagggctggcttacgaaactacttgatacccctaatacccttattataattgggattctgataccc

SEQ ID NO: 232380 - DNA, 195 bp, Glycine max
gatgtatataatagcatacgaggcgggcttcacccactgccctccgcaagtgatgcacacacagtgaacccatctgacccatgtgcgtatgacgatcaacaacgaagtctccaacgacgggtagttgatgattacactcattctaccagattcgtgccctatgccagacaggctgttgacactatcaagggactt

SEQ ID NO: 232381 - DNA, 177 bp, Glycine max
acgcacaacaagaccaaaccacgccaccgcgcaagcaatcaaaggggcaaaacacacccaaagaccaaaacgagggaacgctcaaacccccacaaaggaaaaaccaacacaccccaaacggagcctgcaaaaacatcacgacacggggagaagaaacaaggaccacaaggcacaaaa

SEQ ID NO: 232382 - DNA, 386 bp, Glycine max
  unsure (1)..(386): unsure at all n locations
tataagaacataattgcctcaatcatttccaaatatgcatgtttattangacgcatcatctataatcatgcctaggctattgtgcaagcaatcaatggggaaaaacataccatatgattatgatgatggatggctcaaattctcacaaaggtaaaatcatcactttcaaattgagctttcaaaactatcatgacatgtagagaagaatcaaggatttcaagtcacaaaatgtcaagaacttttattttcaaaacaattacccatttcttgaacatatcctataattcatagataaacatgcaaagtcgtacgtgtacacaaaattgacccaaaatattaaactaaaaattcgacgaaactaacaacattaacaaattaacacatct

SEQ ID NO: 232383 - DNA, 412 bp, Glycine max
  unsure (1)..(412): unsure at all n locations
tgatgtaccctccaccacattcaatctctggctatatttntatataatactgaatgaccaaagttccgttcttgtatgtgaactctggtatttgtgcagagatggcaaagtgtttggcatcactggatgcttgaatacctacaatatccacaaaatagcaacatgttacaaaaccaaccatatatgatatgagtatgataatgcgaaacgcaatggttggcatcactgaaagtttatgtacttttaagatacggaacaaaatcatgttattcactaattaaaattttgtgggagtaaaatactctcctctgatctgatttctgcatttctgcacaaacctcctctcttcatgaaaatacacaaaaattctttatgtacattgtaataaatacaagcttactcataaggtttc

SEQ ID NO: 232384 - DNA, 402 bp, Glycine max
agctttatacatacattactcattgtgttattttttactctaattaaatctaatgtgtgataccctcttttgcatttttagtgatatatactacattttctcattcaaaaaaatggcactacatttttagaagaactcattaccattttatcgaatagaactgatttttgttttactccattccaagaatacaattaaaaagatgctagtgcatgtgactctgagatttgatatcgaaattaaccccttaaattgaaaagagctcgcttgtaagttgtactgggggcaaactattcttaatggggtcttcttagaaactatttcccagaatgggttgtttctaaagaatttccatcatgggtctctgttttgcccgtgaaactagccattcatgcatgcata

SEQ ID NO: 232385 - DNA, 359 bp, Glycine max
cattaacgactgaaacacaaatcaactacaattactaagcacctgcatgttcatgaattgccctatttgaaacaaacctgaacttaaacatacttctcatcctgtggctgatcttgatgtatctccaccactggagctgctggtacaccccgaacaatgggctgctctaactatatggcttgtgccaatggcaagatgctctcaaatataggtgccggcaatggctctggcatgggatctggataaaccccctccctctgatccatagatatatctgcagcccaggacaagggctcatgaggaacgaactcatcctctgtctaaactggctcctctgctacctactgcgatgcgtgctc

SEQ ID NO: 232386 - DNA, 377 bp, Glycine max
  unsure (1)..(377): unsure at all n locations
ggccacccagctcgcccaggcgagcaagggttttttctttccataagcaacagnccttctggagggcccatgtgggcctggttgctatttgcacccccatttttactaaacacaccctcctgcctttgtttggtgattctcttttcacgaagatacggaaacttacaaatttcgcatccaaacttgttttctttacgtaatgttaccgaaccttgcggatacataatgataccctttttttcttacggaatgttacgcacctcactatttgtgctagatgctttctttgaatttcggtgtgcacggaattttacggaatgtgctcattattttctttgatttccgcacgtcacggaattcccaaatcgcctaatgat

SEQ ID NO: 232387 - DNA, 425 bp, Glycine max
ctcagcttataaaggatgtaaaaggctttctattggtttaattcaagaagaaatatatgttgaacaactgtgaaatgtcaaataaactcaatcatgtttattaattgaaaaaggctttatatgggttggaacaagcccctaaggcttggtatgagcgtctgagttatgtccctttaaaaaaggacttttctataggaaaagtagatactactcttgttataaagaaaaaatcacatgatattctattggttcaaatttatgttggtgatattattgttggatctactaatgaattattgtgcaggaattctccatgacatgcaaagaagtttgaatgtcacgatggataactaatttctttttggatacattacacaacaaggatggatctttgcaatcatccattactgcaagagttatcacaa

SEQ ID NO: 232388 - DNA, 405 bp, Glycine max
  unsure (1)..(405): unsure at all n locations
tatgagggtanggatcaaagagatgacattctcatgtttatattgaaacccattcggaacgcccaaagccaaattaacggattaacctctctgcaagaaaaatatttaaagggactcctactttcaatgcaatgaaaactttccattagatccaggttaatatgacaaccattattctaaatcaacaaattattatcatattcacccattgaatcgatattagcaagaagtatttgcttatagtgaagacaccgaaattctgatactggggacagatgtcgtacaagatgtcacgacatcacgctccagaacatgcaaattgtctttgactgtatgaacagactatacaagtaataacacaagagaattgttaacccagttcggtgcaacctcacctacatctcg

SEQ ID NO: 232389 - DNA, 384 bp, Glycine max
  unsure (1)..(384): unsure at all n locations
agcttgccacccagttctcccattcgtgctaagnngctncctctaaaaggcaccgtcttttggaggaacttcctgaaaggcccaagtgggcttggttgctatttgcaccccctatttactaaatacaccctctgactttttttgctgatacttttaccgtaacattacggaactttacgaataccgtaacgatacttgttttccttccgtagggttacggaaccttacggattacgtaatcatcccttttttggctttcggaatgttacaaaacctcacggattatgtaacaatgcttccttttgatttccggcatgttatggaacttcacggattgtgcaacaatgagccttagggtaaaatttggcccatgggctaagtatg

SEQ ID NO: 232390 - DNA, 400 bp, Glycine max
ttgcggatttagttctcgccggcgaatggatcgatgtgggtctgataagaggcaaatttgatcatcctgctttgacaaataaaaagcctgcggaaaatagagaggacaagaaggaggaatgaacccatgctatgattgtcgttcctacatggccaaatttcccaccaactcaacaatgtcattactcagccaatatcagcccttctcattaaccaccacccaatcatccccaaaggctatcccctaaattatccacaaaggcagcctaccgcacattcaatgccaaacaccgctcttatcacaaaccaattcaccaaccatggagggaattgtctagcataatagcctgtaagattcaccccaattccggtgttctatgctaacttgctcccatatctac

SEQ ID NO: 232391 - DNA, 217 bp, Glycine max
aacccacccatccctggtggccaccccccaacgaacgcacatactcccacggaacccataacctcggttctctcaacaccgggtccccattaatccttccaagcctgcacaaaaatcaagcaaaacaacattcacacagcacaagctatcacagccaagcaaaacaaaacaaaggccgaaaactctggcgaaacaccaaccaaaaatcacagctttt

SEQ ID NO: 232392 - DNA, 383 bp, Glycine max
aacactgttccttttttatctataatagaccccatctttatggagtgggttaccactactggaaaaccaccatgcaaatctttatataggcaatatatttaaatatttgggaagccatataacaaggaccttatgttccctctataataaccgatagtgcaacgatagaaaaacctagagccgattggactgaggaagaaagaagattagtacaatataatttaaaggccataaatattattacatctgccttacgaatagatgaatactttacggtttcaaattgtaaaagtgctaaggatatgtgggatacactacatgttacacatgaaggctcaacagatgttaataaatctatgataaacacgctaactcgtgaatat

SEQ ID NO: 232393 - DNA, 434 bp, Glycine max
agctttaagaagaaggttccaaattgtttatacttttagtttgaccaaagaattctatcatttcaaattgagattttctctatggtaatcgattaccggcagttgaaaatgtttatcacagtcactagaaatttgaattcaaaatttataatgtgtaattgattaccagaggggattttcaaaaaataattgccaagagtcacacctattcaaattttttatgaatgaccatcaaaggtgacttggaaacacgaacttaaagggagttttcattgcccaaaaagttttatcctcttaaaagattaagagtttttctgaactaaatattttatcctctcaaaaagattccttggtcaaccacttgcatattcaataagggaatttgagtgatcttctttggacaatctatctcttttaagagagatctcttcttc

SEQ ID NO: 232394 - DNA, 396 bp, Glycine max
tgagatgaggaagtgtatataggtgaaacttcctgcttttattctttgaccacaaagtggtacctggagatatgtcgcgggggtcaggagaccttggggatgtcaggtggggtgctattgcccaaaaccaagcttgaccaatcccgacccaacccgggcatagtcagtctgtgagaacctgtcatgtacctaatcatgcgagctcctggcagtcaacagataaaaggaacatagaccacatatcatggatgcttgtgtggcggctggccaactgtgaatcttgtgtgatatatgggttatggcctctggtaatcgattaccaatggtgggtaatcgactacaaggcttatatatgaagacaggaggctaagatgggctctggtaatcgattaccac

SEQ ID NO: 232395 - DNA, 415 bp, Glycine max
agcttcaaaccatggccctccacgagtttttgtttggtcttaagccaagtactgggatcattaccaacaattctgctatgcccctcaagaaagttccaaacaaaagggatggatccaatttgatcatcctcaagccattgaaacctgtgaaggaaagcaccattctgtgtgttgacagtgtcaagagagaaaacacggttctttggatgagcacagttatagagaaccattgaagaccaattctttcttgggtacacagtttgcactgccccatccatcttagaggtctcctttggagcatactcatgctgaacacacatgattgcatacttgtcctcaatcaagtttttcaattccctagatgtcagccaagtagaggaaatcacaatccacatacattgcccaaccttggtaa

SEQ ID NO: 232396 - DNA, 357 bp, Glycine max
ataagctctacttaagccatatctctaattgacgtgtgtcttgatgcttcaatcaaggcagcccctaaataggctgcatgttatgcaaggtatgggtgaactgcaattaatgaagttttccaacaattataaaggtacaaatctgacattcatgtttactatgcttattatgtgctaaaaatcttgctactgggattcatatactgtacagcttaattgttgctatgactgatcatctaagacaatttgaaagtgcacatgtatgccttatttccaatatatgtatatatgcgttaaatcctattgaattgcataataatttatcgatgatgtgtattattaatgggcgatgattgt

SEQ ID NO: 232397 - DNA, 360 bp, Glycine max
cttgcatgataagatacacaatatagcagaggatgttctatgttcattacaagaaatcaggaactgatccagttcacaattcaaccagtttaactagttagtctgtttcttacagaatttttaaaaaaataatggtcaagctttttgaagctaaaaaagaatatcacaactaattttgcctaaaatcagagaaaaaactggcagaatgaaagcttgaaatcgacagttctttgtaataaatttctcccaattcccaactataaaaaagaagtctttgtacaaaataattcagcatacactggataacataacatcaaatattacctataagaaaagcaaggatgtaaaacattaaacaaa

SEQ ID NO: 232398 - DNA, 219 bp, Glycine max
gaacgacgaacactacacgcctgggagaaagcatggacttgaaactttcattctatccctacccatgatgctgccgtcaaaccctctcttttatcctattacaaaataccacttttcgagcgtcaaatgcctaaaaccaaaccaacgcatgccgaccctcgctaaacgttatttagaagcgaccatcccccgcgcctcacccctaagaggacacagaga

SEQ ID NO: 232399 - DNA, 341 bp, Glycine max
  unsure (1)..(341): unsure at all n locations
tancggaagagccacgaagaagcccatttacgttctttctcatctcgcgctaagcgcatgagcgtggtcatactcgctaagctcaaatgcctgtacgcttagtacgtgatcactgtcataatcgctaagcccagaagtatgcgcctagcgcgagggcgcgaaaagctataaatggaatatgggtataaggagaaagacacgaatactcaaagttctctattgaatacacccaaagcctcaggatctcacataggagaaactctcttctagagcaattcttccctttactccgttatctaacctttattttcctgtatcccatcgaacctaaacgtaaacat

SEQ ID NO: 232400 - DNA, 408 bp, Glycine max
aagattgagcgtagccacactttcctctttaatagcgaggcgcacctgcgtgagaggagaagctagagcttagctacacaccccctataatagctaagctcaccccgatgacaaacaacatgagaatacaaaaaaagtcccgactacaaagactactcaaaatgccccgaaaggcaaggctaaaaccctatactactagaaagggcaaaatacaaggcccagacgaaggaaatacctattctacaatctacaaagataagggggctcatacttagcccatgggcttgaaatctaccctaaggctcatgagaatcctaaggccttcccttcgatctctagccaatctactgggagtcttctacccaaagcccttgcggtgtaggagtgcatcacatggattgcctaacg

SEQ ID NO: 232401 - DNA, 364 bp, Glycine max
gttgaatgtgcgtagcccaacatattacatagttgaattctggtgatgtgtctaccatcattgtcatcggttatctttttctgtcattgatgtgccactttgatctgacaagttctgcacctttgggcacaaaaacatgtgtgacgtttcctgtggcgtttgaactacattgccagattcatatcacaactcaacattatgtgagaaccgtcgtttaaactcttacgcatgaaccaatccatccactctaactatgactgtcaagaagcgttcggaaggatcaaacagtgcctcatgaacccttccgtgcttatgctgccggtgcctgaaagacctatcatcttgtataagaaaatacatgttg

SEQ ID NO: 232402 - DNA, 429 bp, Glycine max
agcctgtaagctagagtgtgaagctgttttaatgttggttcttccccttcaatgaagtcctttaaaggtgaactttcaccatggagatgcatcgaccgacaaagaagaagaggcgacaacacgctccatccactaaggaacaagccatggaagaaggatcttccccaccaagaagatccctgaataaaaatcttgcagaggatgcttctttggaggaaatgaaagagggagacaaagagagaaggggggaccccgaaattgagggatttatatagggcgagaagtggaactttgaaaagagactcataagacttttattcatcaaaggtacaacaagtgttacacatgctcttatttatagactacgtagcttccttgagaaactttcgtaacaaaacttccttgagaagcttctttgagaaaacttcc

SEQ ID NO: 232403 - DNA, 420 bp, Glycine max
tctccaaatggcatagatatttacaatctcttgaatatatctaagaatctcgccggaggcattccttatctttcttggaaagtacccaacggtatgacacttcctttttcccctatctgaaatcgcatccttacttttcttctcttacattgtcactcttactcttttcttataaatattttcaaccttgcttcttcctcttttcctttatgcaaacccacctctatttcatcttcattgacttatatttcttaccttccaacaatcattgggttttctctccactaaatactctcatctcttaccccattcttctttgtatcagaagtgtcgtcaaaacaacttgctcatcaaagcaacaacattctcattctcaaccgacataaacttcttgcttcttgtcataacagctttgcactc

SEQ ID NO: 232404 - DNA, 438 bp, Glycine max
  unsure (1)..(438): unsure at all n locations
agcttagccgaattcagattgttttgtttttggcttanctcatccttggctagcttagcggaccaaatcagcctcagatgcaagggttgggcgctaagcgcttgagactcacgcttagcgcatgaccaaagatgtgcttagcgcgaggcttgcgcttagcgaaagcactgtttttttctcagaaaaaatgttttctgagttatttttcagtcctttttccaagaaattgaaacccttatgttaaacattcaaagataggctgatatactcctatgtacagattatatatcaagttccaaatgatctaatgcatgaaaaaaagtatagaaattaaaactgggttgcctcctaagaagcacttctttaacgtcattagtttgacacttttacctcactcggtgatcttatgttttggttcttactttcagaacctcttga

SEQ ID NO: 232405 - DNA, 288 bp, Glycine max
tcggatgaaagtgatgaggtacaagccctcattgctttatcttgaaagatcccgagtagtcaaataaaaggtcaagtccatatccatcaaagtctgaagagagtatgatgaacttatggacgtcaatatggccaccgatgaatccttggaatgagaaaccaagaaggcccgataggtaaaacacgaccaaaacaagttttgaggggctttataaggcatcaatagtgagctcaagctccgaagaggtgaaaggaatcatcacgggtcatatgcatgatcttgaatgac

SEQ ID NO: 232406 - DNA, 212 bp, Glycine max
tgaaattatgctgagaccaaggtgctggcgggtccataacagctatgcattctgttttcagcaagctgatgagcgtgcactcttgaaacactttaattggcccgagaggaaagctgatgccatacctgaagctgaagctgagtatcgcgaacttaaagcattacagccagagaattcctccgtgcaggatgacccacaaaatccatgtggag

SEQ ID NO: 232407 - DNA, 113 bp, Glycine max
aacctatttagcaaaaactcaatgggtcaaacacatcgtagttaagccaatcatatgtatgaatctgagtacatcaaactgactctccctatactgaactttttactttcctg

SEQ ID NO: 232408 - DNA, 185 bp, Glycine max
gaaaaaaacgactatcatttagtactggattttgcatgaatctttgaagtatggactgaatgcctgaaattgaggatgatgaaggccatgtttgattgtgatagccacttaaccaaaaagctgaccatgtgcttgaatgatgtatcccttgcacccaatttgagcttgtcataccttaatttcgt

SEQ ID NO: 232409 - DNA, 262 bp, Glycine max
gaaggattcataacattccagttgaagaaacaaggccaaaaggggagtcggaaatattttttttccacctaaaaacgcactctgaaaaatgggctctaaaaaaacagagcttatttaaccttgatttggtgtgggtaacaaaacaccattcatgaggaaatctggaacaaatagtgaggatctcacacttttttcttctagtttaatcaacacacacccatgtaatacacaactcgcatttcacatcttttacatttggcat

SEQ ID NO: 232410 - DNA, 435 bp, Glycine max
taaggattattcttgtcattgtgatgattatacccatattcaaaaacaaaaaaataaatgtgaaccagttcaagacttgatgatacaagaatcgcaagttatagcacaacatgtctctcttacttttgtatggcctgcatctcttggctttttattatacagagaaaatatgaaaagcaatggctaaaatattaaaaggctttaattaaaaaattgatattcaatgccatcagttcataacatatcgtgatttttaataaaacctttgatttaaatatcacgcaataaaatttcttaattaatcatttagtctgtatatataaatgtgtcaacttttcgctttagactttatacttataaatcctacatttctttactctttatccttatacctacatttgatggattttacactgtcaataaataacaacacag

SEQ ID NO: 232411 - DNA, 380 bp, Glycine max
agcttagacaataagtcacgctttctattgagccttaatagggccttgtgaccggaaattcaatccaaactcagatagctccatgaaccatgtgaccatttttccagcgagctctaacttttgaaaaacttgtctaatacggtgagcagtcttgaccctcatttgatgactttgaaaatataaagtcaacctccttgctaaggtcactagcggaaaagctagccttcaatcatctagtatctctgtttagcccctcgtaagactctactaataaagtacatcgacacttgtttcttactgtcttcgaacatcaatattgaactactaactatattcgaaatatataaatagagtccgattttacctattggggaacgcta

SEQ ID NO: 232412 - DNA, 343 bp, Glycine max
tcttgatgcaacttatggagaggttattgtttcaaccttatgatgcgctccatgagaggttggatcaaatggagaataaagatcataatgaagataataggaggagataatggaatgatggttgttctatacaaaaccgaattgatggtattaaactcaacattcctccatttaaaggaaagaatcatccggaggcctacttggagtgggagatgataatagagcatgttttctcatgcaacaactatgatgatgaccagatagtgaagcttgccgccactgagatacacgactatgctcttgtgtggtggaacaagctacaatacgatagagcaagaaatga

SEQ ID NO: 232413 - DNA, 422 bp, Glycine max
agcttgcttaagttaaggacgcatttatattcttcaaccctcatcacgttcctagctctgaggtttaatgggaattttaccacagttcaagataaagaaagcattttccaataacaatctcatccaagaatcaagctatgagtgaccaatccataacaagcatgaagtatagaagtaaaagctaacattgaagaacaagatgaatatataacactatttcaaaagaaatacatgaaagcataaggttcgaatacaatctaaccccaacaatgaagagtttagctattcatctccatgaataacatccaaaagcaagaaagatggaagaacaatggaagtagagaattgtagataataaatttagtaaaggagatcgttttacaaagtaaggaacgtcccccagaaaatgagcgtgaagtcta

SEQ ID NO: 232414 - DNA, 444 bp, Glycine max
  unsure (1)..(444): unsure at all n locations
catgtctaattcttgttcccaccacatcaggagtttgcatgtttaatgggcagcatattggtatactgaaagattcaatgttccaaatgaataataatcaagtggtctagtgcatctgaattttaaataatcaaatcaatgcataagccctttaagcatgttttgatgtcctaaaaacagtacaatgttaacatttgatcaagaaaataaaaccatacagtcatcgctcctattgctgcactgataccagcttcaccaaacatagcagttgctgcttcagtgaccaaagcagttgccccaatattgaccactctgcatacaacataacactagcaggagaaacattctacaccgaanaaaaaggacagttttcaataataagatcaatgcacggagaatacgttgtgccaataagtattgttgaatgaaccgaataacatcact

SEQ ID NO: 232415 - DNA, 229 bp, Glycine max
agctcgaacgtgagtagacgagcatgttttctctttgtaatactcaaaaagcgtctcctatcagtatcattttttctccgccattgaagagccacttgaactgccgggccgctgcaccttttgtcgtattctttgcaataactgggcccctttttgtacatgttctgttgtggcattctatccggaaccatatcaaaattgttcttgttctgcctcctgaaggcacccg

SEQ ID NO: 232416 - DNA, 443 bp, Glycine max
  unsure (1)..(443): unsure at all n locations
tcggagctctcatctccttctatagcattttctctatatattngcatgcctcaccagacctgtcctgtcttataagcccaccaatgtatacaatgtacgaattatcatcacgacattaccccttctgatgcatatcatcccaaatctcatgacccatttcataattttttgtcacaaaataggatttcattatcatgttgtaagtgtgaattgttggtttgatgccactttgaatcatcttcttgtatattctcactgcatcatctggcatatgttggctagtcatcagttntatcaaagcgttgtaggtccttccatcaggtggacaacctctttccctcatttccttcagtagactgtataccatatccattntcttctgcctcccaaacccagtgatcaaacacgtgtaaagtgcagcatcaggttgacacccacgatct

SEQ ID NO: 232417 - DNA, 361 bp, Glycine max
gagaggggggaacacgatattgaaggaataaacgagggagagaagtggaactttgaagtatgtctcacaagactctcattcatcaaagttacaacaagtgttacacatgcttctatttatagactaggtagcttccttgaaaagctttcttgagaaaactcccttgagaagcttctttgagaaaacttccttgagaagctagagcttatctacacacacccctctcataactaagctcacttccttgagaagcttccttaagaagattcctaaagaagctagagcttatctacacatacctctctaatagctaagctcacctccttgagatgagatgctaaagcttaactacacaccccct

SEQ ID NO: 232418 - DNA, 429 bp, Glycine max
tctcccccaattttctataatagggggagaagtgattgttattatggttcagccccttatgcacttctctctctttcgaatttgcttaggaaaattgcttccgtgaagaaaattcaagccgaggcgcttccgtaacgtttccgtaacgtttccgtgagtgatttcacgaaggttatcgaccgttcttcgacgttcttcattcgttcttcaccgttcttcagtcttcaacgggtaagtacctcaaaccaagctttttgattcattctatgtaccacgttggaaaccaaaaaatagaggtgaataataatataataatgaaaaaataaaaaaattcccctttagtaaaataaagtgaacaatcaattggacgttttctctttgggatttctcattcttaatcgaattgactaataactaaagtgaaactaa

SEQ ID NO: 232419 - DNA, 430 bp, Glycine max
tgtatgagaattaatggaggccctgttatcctaagtgtatgtgatgccaatgttgaatgttgatagacatggcttggtacctttgtgggtacttgcgatcaacatgtcaagaaacgagatgtttagagaaggttgaaacttcaaagggaaaaacttgttataagtacaaagacaactaagagctgcttaaagaagcaaagctaatgaaacaagatatagagactcatccctcttttcctctctgtaatctatctattatcaagaaagaaaacttagagtgcaagcactagtaggttacaaacagacacaactttaggcatcttggattcataatacaacaaccagttataaattattgtgcgctcaataataaacaaaaataaacaagagcaccaaaatttattttcttcttcaagatggtcactgaatt

SEQ ID NO: 232420 - DNA, 394 bp, Glycine max
agcttgccgcccagctcgcccaggcgagccatgttgcttcctccagaagcaacaaccttctggaggaatcttctggaaggcccatgtgggcctgattgctatttacaccccctttttactaaatgcacccccttttctatttttttgtaattctttttccgtaacgttacgaaactttacgaatttcgtaacgatacttattttccttccgtaaggttacgaatccttacggattatgtatttactccttttttacctttcgaagaagtcacggaaacttacggattgcacaaaaacacctcttttgacttccgccacattgtagaatttcacggatcgcgcaagcctgcttcctttagatttctgagacgtctcgggacttcatttgtgtaac

SEQ ID NO: 232421 - DNA, 455 bp, Glycine max
  unsure (1)..(455): unsure at all n locations
tgtaggattatggngtacccatcacatgtggtactatgtggtggtcgggcgatggtgcaaatcaattctccacatccacaaatcacacataagcccaccatccccagttgcccaccttcattgagctcacgtactcccacgtagcccttatcctcgttcctctcaacgccgggtccccatcaatcctcccaagcttccacaacatccaattaattcaacatccaagcatcatgaactaacacagccaagaaaacagggcagaggcagaaaactctgcccaaaacacaaaccaatatcacaactttccttacttaaagaccccagtaacatttccttcattccaattcgttcaccggtggatcgaattgaaaattttactggaagtccctagtacataggtctacattntgaccgttgggatctgctagcaaatgtccagaaccccatatgtacta

SEQ ID NO: 232422 - DNA, 404 bp, Glycine max
agcttgaacaccatggagggcttccatctctgtgatccacaaataagcattctccagaggactcaaccacgccggcgagaagaacacaagcacctcttcatgtgcggatgcccactttatagtgtagtattccttcaaatgggatgtgacttttgacaccaaaacctgcagctcttgctcagttttgaccacctcagttctctgtttggacacctcgaggagctggtgtaggatctcctcgagcttccaaacccacttgtcgtaaaagtcggtgaaactctcggccacgggattcttcatgagtgaaaaggggtgaagaggagagagatgaatgaatgtgttatgtgtgtaactttaaagggaggagtgtgaccagatggagggaggaggagaggacaccgtat

SEQ ID NO: 232423 - DNA, 403 bp, Glycine max
  unsure (1)..(403): unsure at all n locations
agctnccatcaagagaagattgtgccttaggtgcaagagaaggccctagggttctcatgagccttatggtagatttcgggcccatgggctaagtatgagcccacttatctttgtacatattagattaatatttctttaattttgggccttgtatttagggctccataatgtaggtagggtaccctagaaatgtaggattttccagcccttgtattttagggcacctagactagtttttgtattaggggtagttttgtaatttcacatgcattaagtgaatatttgatgtgtgtgttgagaaataaatttaattgaattgggagaagcccaatccaattaaattttagagggggaggtgagcatttgcttgtgacaccccattgccacatcatatattcacact

SEQ ID NO: 232424 - DNA, 427 bp, Glycine max
tatgctgctaatatttacaatagacctcctttaccttatcagcttaaacaatcacagcagaacaattatgaactctccagcaacagatacaaccctggatggaggaatcaccctaatctcagatggtctagccctcaacaacaacaacagcagcctgttccttccttccaaaatgttgctggcccattcagaccatacattcctccaccaatccaacaacagcagcagccccagaaacagccaacagttgagacccctccacaaccttccctcgaagaacttgtgaggcaaatgactatgcagaacatgcagtttcaacaagagaccagagcctccattcagagcttaaccaatcagatgggacaattggctacacaattgaatcaacaacagtcccagaattctgacaagctgccttctcaagctg

SEQ ID NO: 232425 - DNA, 414 bp, Glycine max
agcttaactacaacctcttcatttgtttgtttagtagttccttcaacaacatagcaaaattaacacaccgaattcacggaaactaagaaatttcacagtaaatatgcaaaaattgaaaaacaagtggaagaagaacgcaccgagatagatctcctagaaagatccgctactgattttctgaaaaatcagaatgtccttctttacctcctccgcgacgaagtccaattggccaccacaaagacggtgctctcgtcggcggcctcggtggccaccaccgcaatggtggtccactctgtggcgagcaacctccttccttcgaagctccggtcctacatcaccaatggcatccacaacatgttcttgtgcttctcctcggagataaccctaatcattgatgagttcgacggtctcgtc

SEQ ID NO: 232426 - DNA, 450 bp, Glycine max
  unsure (1)..(450): unsure at all n locations
tgaaagggggggccttaacagtgaagaatgtatacttatcaaagagcaaacagtgaagaacagtggcctagtaaccagaagaagtaaatcaatggcagaagaagattctgacaagctgttgaaagaggcattggggtaaataattgaagggaaaaatggaaagaaggggttgggagtgatagataaatcaagagggaccgtaccggcatgggaaagaaagagtgggaagaagaaaagacaacactggcactgccaaagggaaaggaaaggctcttcctacacacagccagactgccactgaacacctcttctcttttcttttcttttttgacagatttttgtaaattgtaatcacccctcacganatagtgagcagattaatttagttgagtttttttatcccanaagaaattaaaaattattcaaataatataactcacgaataatcta

SEQ ID NO: 232427 - DNA, 407 bp, Glycine max
  unsure (1)..(407): unsure at all n locations
agcttgcaatagctatgatgntaatgatctgttaatanaagacgtatggtaagacacttttctgaaggagttactgatccttgttttgtttttaactaacggagcaggttaaagagttccatataagagatggttttgaggtaccaagtgctgacaagaatgctaagtcatgcatggtttattttgaaatgcatctatccctaaggaaaaaagtaattacaaaagcttttaatggtagttatagtatctacaaggaaactttttgtaaccaggtctattgcctttttgtttgagtaactggacatgcaggtacaataattgttgctgaaaatgacaagggacctgaaagaggaatgcccagctttaattcttagttaccccaatccaattcatggtaaattttgctt

SEQ ID NO: 232428 - DNA, 273 bp, Glycine max
aacaaaagatacggtccttgctaaccgcgtccactgccttattatgagaaataccgggcatatgttctccatacactatttttgcattctgctagatgctcaacacattgctacctcttctattggtggcacaggtgtgcggcaaacacgttgatgttgagtttggtagactgtgaatacaccactggagagactatcaccggcttggcctatctaagacaagaactgatcatgtgatagctgactatttatggcacttctgctaccttgcat

SEQ ID NO: 232429 - DNA, 407 bp, Glycine max
  unsure (1)..(407): unsure at all n locations
agcttccttgaggcgatgttctgcgttaacaaacattnagaagttagttttacaagacaatgcttatcttaacgcaaaaaatgtcatgctaatccctctgattttagaacgaactcatataatctatttatgcacacacgtatgtgtggaatatcctactatttatatcaacatagagggacatccaacacattctaattgtcatacacatatatgcatttgaaaagaacatacattctcacgcccaaggcattgcgtcaaagttcacacttaattatatcctaaacatttactattacaaactacctacacacatttcaaatatatatcatacaaaatgtattggttctctcatatttatttatatgcatattggaaagctaattacatcctgcacacacttgcat

SEQ ID NO: 232430 - DNA, 367 bp, Glycine max
  unsure (1)..(367): unsure at all n locations
tgtcactatngaatgggattgtgtgtgtctttccatataagaaagaggtctcgggcttaggtctattgttcttatcaataatgcggcctcccttaaactttgctaaaattttgtccatgcagatgaggaatggacgcattttctgcaggccaatattctcaaaaacacaaaccatctatccttttacaagaaatcctcgctttggccttccctcaataggcactttgaggaggtttgttccaatattggttgggtccttagtgcaggagctttaactaactnttggaacaattattggtgctcgctctctcctttgtttgcagctctttaacctcccccccctcggtcagcaagttgtatcctcctc

SEQ ID NO: 232431 - DNA, 300 bp, Glycine max
gtgacaacaaccctcttctcttgatactttccctagcctaattgttagcaagaataggaaaaactttttgcaatgccttgctttaccgtcaactactttatagaaacttgagttattgatactcgttggacaaaccatatgacatgatgatcaagagctcttcaaagagctcaacaaaactactagttccaaaattagaattggaaatgaagtgcatgttgaaataaaaggcaaaagaatacttgtagttatgagtcatttatggttgaaacttaattatggtcttttatatgttcctgg

SEQ ID NO: 232432 - DNA, 436 bp, Glycine max
  unsure (1)..(436): unsure at all n locations
ngatgtgagaaagcgaggaagattttttttcctatctttatncngcgaccacagagtggtacctggagatatgtcgcggcggtcacgagaccttgtgggcgtcacgtggggtgctattgcccaataccaagcttggccaatcccgacccaactcgggcatagtcagtcagtgagaacctgtgacgtacctaagcaggagagcttctggcagtcaaccaataaaagaacaaaagtccacaaagcaaggaggcttgtgtggtggctggccagctatctagtttgtgtcatatctgaaaaatcccctctggtaatcgattaccatttgtgggtaatcgattacagggtctaaaaatggaaacaggacattcagtagcctctgttaatcgattaccaatggtgtgtaatcgattacagtgttatatgctattggtaatcg

SEQ ID NO: 232433 - DNA, 403 bp, Glycine max
  unsure (1)..(403): unsure at all n locations
agcttgcttctacaatcttccncttttttacgatgacaaccctgaaatcaagaaacacatacacattctttttcctagtcgatcactcacttaattctccatattctctccctttggttttgagtttaagcttcacttgaaattaagttatttaatcatatgagttcttgatttaatcccgattttctctccccatttggcatcaacaaaaggccaaagtgcgtaagaaatataaaacatacataaatgactaatcatacaagagaaaaaaaaaacaatcaaacaagataacttaaccattcatcaatcttagaaagataatacttcatagaatgtcatataatccagaaagtcattcataataaccaaataaaactactaatgcatgaagaaaaatactagt

SEQ ID NO: 232434 - DNA, 438 bp, Glycine max
  unsure (1)..(438): unsure at all n locations
ttcagttttatctaatacactgtttaacccccattctagtgggatattttttgtttcaataaaaactctaatgaaatggaaagttgacaaaaaactagaaaatgagaaagaaatgaaatgagaacaataaagtagtgataaaataaattagaagcctctcaaaaggaagaaaatgaatatatgcatataatatatatagagcgaaaggagaggagaggagaaaaatggagtattgttaagaacatgtaacaaaaaaatactgacatcgaagaaatgagagaatagactctatatataaaatcaaattaagagaaaaaggaaagaaatcaatcacaattatggaaaaataaatattgatactaagtataaggatgattcactactagaaaaatacgctnttacggtgcacatttgacgttggttgttagaaaccgtctt

SEQ ID NO: 232435 - DNA, 413 bp, Glycine max
  unsure (1)..(413): unsure at all n locations
agcttgngctttcaatatcctgatgagggtgttccatatgttctcaagactggactaatacatttgctgcccaagtttcatggtcttgcaggtgaagatcctcataagcatcttaaggagttcgatattgtttgttccaccatgaagccccctgatggccaagaagatcatatctttctaaaggcttttcctcattctctggagggagtgacaaaagattggctatactaccttgctcccaggtctatttttagctgggatgaccttaagagggtgttcttggagaaattcttccctgcatctaggaccactaccatcagaaaagacatttcagacatcatgcaacttattggagaaagcttgtatgagtactgggaaagattcaagaaattatgtgcaagctgccctcacca

SEQ ID NO: 232436 - DNA, 444 bp, Glycine max
  unsure (1)..(444): unsure at all n locations
tgaaattgcattcgggcacatantttgaatctcctatgctgtctctacatatataaaacagtcccaccatcccaatttcgcaaaatcatattcatatatcattggggcatttcaccgagcacttcgggggcgcacgtttggacacaaattgcaagagaatggggacaatgtggcatgccccattgcttcagaatacaacataggcctaatgccttctcacacaaaccctcaactcaacaaaacaagcatggattcagatgcgaatcgcttcacgaattttgcaaaaaatgagcaactaaagcaccaaaacacatcaatggagagccaaataaccaagggaaaatgcacttacttgtggggagtgaattaaagcgtgaaaagggaaacaaaaactcaacaatggaagcttangggctgctgttctcatagttcccgtgaagcttg

SEQ ID NO: 232437 - DNA, 422 bp, Glycine max
agcttgctaattaacctgaaattgagttaaattgattattaaacacacaaaatgaaaatactaagtatttattacctatacttaatagaaaatacttataacactacaaaataaccataaattgggagagtttgattcaatttatacaagttttatacacaaaagttagtcattttcaccgactaacaactcccccatatttatagttttgcttgtcacttgtcctcaagtgacaatgacatgcagtgaactatgtacaaaggtgtatgctacaaagttattgattgcatgatgagaaagatgaagcaatgtgtacctataacttgtcttcacaaaatatgcggatattcaaagagaagaataaaatgtgaactgaacaaatagaaggagttaggcataagacatatattaaggaaagtagc

SEQ ID NO: 232438 - DNA, 409 bp, Glycine max
  unsure (1)..(409): unsure at all n locations
gcataaaaatgtacaatggaatgtcttttatgtttttatgggcgagctcaaccgacggtttgtttcggccgaaactggcattttcccatttatttggccaggaaaacattaacccacctcggcaaaaaaatatttgctaaccgacttcaagcatatttcattcagggactgaatagaatactcaatagctgacaacggtcgtgaaatagtcgcgactgatatttttatactacatttcgcaatttttttaaatacgcttgctggccgacaatgtttttttttacggcagaggaagttttcttgtttaggtggtgcataaaaaaatgtacaatctatgtcggctaggtttttntgggcgagctcaaccgacgttttgnttcggccgaaactgacatgttcccagttattc

SEQ ID NO: 232439 - DNA, 419 bp, Glycine max
  unsure (1)..(419): unsure at all n locations
agcttgnactccattcatccataaacgtattttcatcatttgaaattaatattgttaagcataaaacataacgattattaattatgagttaataaataagacaccttgtaattcaatttacttacatcatccacagtgttaaccgattggcaagtgtaccaattttgtgacaagtagtaaagtactcggaagtccgagagtcgaatccacaagaactttgtttgtacatagattgatgcaaacccaatttaaaagcaagagataaggaaataatagataggagataagataatgttgggacctagcatgcctaactacccttgatgcaattttaatgatgttctctattgaatgctttcctaatttccaccttacatctccaaatatactcaatccggatccctcatgttgaagagctt

SEQ ID NO: 232440 - DNA, 449 bp, Glycine max
  unsure (1)..(449): unsure at all n locations
ntntattntcagtagatgaagataaatttgtggccatctcatggactcctctaagaaaaatagcattatttcttgcactaaattgttgggagttggaagccatcttcttaatcaaattcctagcctcagcagaggtcatatcaccaagagctccaccactggcagcatcaatcatactcctctccatgttgctaagtccctcatagaaatattgaagaaggagttgctcagaaatctggtggtaaggacagcttgcacacaatttcttaaatctttcccaatactcatacaagctttctccactaagttgcctgatgcctgaaatgtcctttttgatgacaatggtcctagatgcagggaagaatttctccaagaacaccttcttaaggtcatcccagctgaaaatggacctgngagcaaggtagtatgaccaatctttttgccactcc

SEQ ID NO: 232441 - DNA, 360 bp, Glycine max
agcttatcataatcgatgacatagtgtatttttgagacaatgactgatttattcaggagtctctgccttaatcaattaccatgtgatataatcgattacttctctttctataagggtttcagaagtaaacaagaacactttaatcgattactttgagtatctaatcaattatattggtcttgagctgtttctagtttcttggaagaacactttaatcgattaaaaagataatctaatcgattaccttgtagatttaatcgattacaagcgggtataaatgttttctctataaataaccacctcgtgttctctctaataacaccacattttgagcttctgaatgagctaggatcacgtgct

SEQ ID NO: 232442 - DNA, 389 bp, Glycine max
  unsure (1)..(389): unsure at all n locations
agctngntacggattaactggatccgttagttcctgatcaagnngatccgnaagttccggatcaacttgatccgtaagtgtattattttttgtatttgctggttttgcatttttgcatctgtttttccattaattttccttttttattttaaattactaatttttttgtatggtcattttttgtttgatttggttagatggatgaagatgagtggatgtatgaaataatgtctgaacgagtggatatgaattatgaaaatgcagaatcatgtggtgcgaatgaaccccaagttgattgttcggaagcgttcaagacttttcaggttataacgttaatgcttgtcacattattaataaaatgaatattggtagaaaacttaaattatgtg

SEQ ID NO: 232443 - DNA, 452 bp, Glycine max
  unsure (1)..(452): unsure at all n locations
tcttaagcaactatatacagtagatcccattgaaaatgtgactttatttacaattngatatgcaatatgtgtatatggctgataactttaacaaaattatctatggagataaaaataaagaaattgaaacaaaatcattaccatatgcatttccaatctcatcaatgctggatatagaacagacaagcaccaaagaaacagccaagagaaaccagtttatgacagggatatagatctggcccatgaatttccgagaggtatgaattattttaagacgagggaaacaaccaagagcagctgactgttttatacaagaaaatgtggctgttgtcatagcccgacttgcaattaatgcagcaatgttagcaatgaggaaagttggccagaatgcaccacctgaagacacaaaatagtatcacatgaagattctgtanagggcaaagacatatcgc

SEQ ID NO: 232444 - DNA, 396 bp, Glycine max
  unsure (1)..(396): unsure at all n locations
catgcgagcttgctggtgatcatggtttgttcttaagtaccggnccccaaactcacccatgccaggtatgacacggaatgcttcattcaaaccaatctcaatctcagatgtcacgatttttattctcggaaatcttttacagaccacatgaacaccttgaggtgcctggcaatatgagagcatgcatatatgcaaaacattaggtactaaaaaagacaagctacagaaaatgacaaaaaaaatggcaagatatatgatatacagaggaacaacagacacaagttacttactgatacgagattgagaaataaaatgttggactctggtacacccttctttaaaagcaaagaaattgcttcaactgccgaattacctaaagacgaagatattctaaag

SEQ ID NO: 232445 - DNA, 359 bp, Glycine max
tcttatttcttcatctaaaactacttaaaaaaaaagaaatccaaatagactctacatctatgcgtcgtgagagtatatatatatatatatatatatactcgtctttataggcatcataagcaattacattattttatgacctaccccattgctcacaagacaagaactcgcataatggccactcttggcgagggtattatagctctgtggaaattgaacataagctatatcgcggccttctgtttcatccaagaagaagcataacacttcttgaattggatttgcattattggagtacatatcacaatccaagctgagaatgaaaggggcgtcgcttatctcggaagacactcgcatct

SEQ ID NO: 232446 - DNA, 415 bp, Glycine max
  unsure (1)..(415): unsure at all n locations
agcttatggcaaacattttaagcanattcgttatcaatactacttgttgggatccacaagtaacacaggagaacccctactactccaagaggtatacagcccataaatttgaatgtaattctaaatccaaaataaacagccaaaaacaatttgatgcatccggatagataaaacaaatactctcattgatctacctacacaatcatcgtgttgtttgagcttgtgcatgttccagaagttgactaaccaacttgtaagtgcgtccgttaagggccttggtatggtctatcagttgttcatacctgcagatatagaataagattaatggtcatgaaaatgatgacacacaacataaacagaagaatgtggtctacatagtgagtcagaatggtacaatacagtaggaagctataaa

SEQ ID NO: 232447 - DNA, 436 bp, Glycine max
  unsure (1)..(436): unsure at all n locations
ntagtcttcatgttgttcatgttgctccctgtaactttctgtaatatttagntatatattgatgtttaatcgtatttatcttgttatttgactatatggttgacttgaatgatttgaggtatgacttgagttagtcgtgtatgaatttcttgatgtcaatgctgagttttgtggagttttgttgaactaagttgaaattatgagatttcagaattttcccaaacctatctcagtaaaattgcaatcccagattcgttaaccgttggattgtcgtaaaactttgcttggagcttcctaagacatattttcacagtcggaccgttgggatttataaataaacaaattttgatgtctctctaagagagaagatcacgctaagcgcaattccaaccagagagggaattgcgctaggcgagcaggggcacgctaagcgagc

SEQ ID NO: 232448 - DNA, 414 bp, Glycine max
  unsure (1)..(414): unsure at all n locations
agctaggttcccaacactctgttcatgctctcccanaacctagaggtaaatctaggatctctatcagatactatgctagatggcacaccatgtaacctgacaacctcacttatatacaaggtggtcaacttttccaaggaaaatctgatattaatgggaatgaagtgagcagacttagtcaatctgtcaacaataacccagatagagtctaaacctctaggggttctaggtagtcctaccacaaaatccatggaaatactgtcccacttccactggggtatctctaagggttgtaacttccttgaaggtctttgatgttctatcttagccttctgacagactaggcatgcatacacaaactcactaacctctctctttatgttgggccaccaaaacatcgtctttaaatcatga

SEQ ID NO: 232449 - DNA, 389 bp, Glycine max
  unsure (1)..(389): unsure at all n locations
atgatagatacatgatttgttacttgtangattcgatttgggcaaaattggatgaaggcgagagtagttctcgaaatctgtactttatgcagaattttgctgatgaaatgtgcagcataattttgtataagtgcagaanaatgcttgtgtatggctggttgtgaacagggtaatacatatggagctctggatatttactagcagatcccagcggtcaaaatgtagacttatgtactagagacttccagtaaaattttctagtcgatccaacggctaacgaattggaacgaatgagatgttactggcgtatttgtatgtgacaagctgtgattttgagttgtgtcttgggcagagntttctgcctttgcccttgtttgcttgggtttggt

SEQ ID NO: 232450 - DNA, 406 bp, Glycine max
agcttaagagtaggtgtgaagattcatgattcaagaacaatcaagtttcaagaatcaagattcaagaacaatcaagatcaagattcaagactcaagattcaagaatcaagagaagactcaatcaagataagtactaaaaaagttttttcaaaacattgagtagcacaagaatttttcacaaaatattttagcaaagagttttactctctcgtaatcgattaccagaaggtagtaatcgattaccagtagccaacattgttttttcaaattgatttacaaagctgtaatcgattacaatgagcatttaattgattaccaatgttttaaaacgttagatttcaaatttcaagagtcacaactagtgactaaacattctcaaattattttaaacttgtgtaattgatta

SEQ ID NO: 232451 - DNA, 232 bp, Glycine max
ccctggctaaactcggggcaaggaatacctatgaaaccacctttttgccccctttttttgggtatttttcacgttacttgagaacacactgaaggagccatgtttgctcacaataaatggggtgctcccttacgaggccatgttatgatgaatgaacttcctagataaacctagggccaccacgctgtttatatagtggctattgcaactaatatttgctgatttattttta

SEQ ID NO: 232452 - DNA, 405 bp, Glycine max
agctcgcccctgagagtgtattgtctatgaatattgcattcggttaatgctgacaagggctctaatactcgactttggctcttgttttttcttttgttggcctttctcatttcttcaagtagttctttgctagaattgatacctgttaaagcattcgtgagttaattaaattcatgtcaacaagtgggaactaatcacctttttaggagagcaaatttaagataaattaatgacttacctgcgaggtatgcaccatgcacatagccactaaatctttcactcgtgtgttctccagtaaagaaaatgcgacctactggagcctgaaccatgcccaaaaaagacaaataaacacaatggaaaaacatttttgaaagaaaatataaacatttcctggagacatgaaca

SEQ ID NO: 232453 - DNA, 422 bp, Glycine max
  unsure (1)..(422): unsure at all n locations
tgganagcaagaaacatttagaaaggcttctttntttatgaaacaaacacctatctaatccaattatggatatgggtttttttctcccttaatttgttactaaattgtcattctaactgtgaatctgcaggtgggtttgttgaatgtagatgggtatttccacagcttgctgtccttatttgacaagggagtggaagagggttttatagacaactctgcaaggcatattgtagtcatagcagacacagcagaagaactcataaagagaatggaggtacgatattacacgagacatgctgattgtcatcatgtttgaagaggacgagaaaactaaattgtatggtagccttgtaggtaggtaacaagtagtgaacttcgttattcatttgttaattttttttaggaatatgccccaaccatca

SEQ ID NO: 232454 - DNA, 388 bp, Glycine max
agctaagagccagaatattgtttattttaaaccgtgacccagggagagaatgtcaatccttaccctcggaagcaaaaaaaaaaagaagaaaaggaacatttccattcaaaggaacaataataggaaaggaaattcccaatccaagagtgggagaaagccaaaagaaaagaaagaaaattccctatccaagaatgggagaaagataaaaagagaaaaggagaagaaggaaagaaagctcctgatcaaggatcgaaagaaaacagaagaaatgtgcagagaggtctttggaccatactatatctgaacaatacggaattgtctccaatggaacaaaagaaagaacacgcaaccctaacctaaaagtgggcttcttaccaaccaaaatcct

SEQ ID NO: 232455 - DNA, 449 bp, Glycine max
  unsure (1)..(449): unsure at all n locations
gacacataaaactcaagctganggacaccccnattccgttgcttatgctatactngancccatatctacttgataattcaatggtagccataaccctagccaaggttcatcaacctccatttctccgagaatacgactcgaacgcaacgtgtgcttgtcacggagaagccccggggcgttccattgagcattgtagggctctgaagtgtagggtgcgaggtctaattgatgctggttgaaatttgaggagaattttgtgtaaatcctgacattgacaagagatgccacacatggggcaattttgaaagctgttgttagatgtctctaatgactcaccaggatattcaactttcaccggaatgtgggtgtaagccattggtctgtttgctcaagcaacctgcgctcctgagtgttgacttcccagaccggtcaatcagagattactcatc

SEQ ID NO: 232456 - DNA, 355 bp, Glycine max
agcttgaagcaaaagcctttctgagatcttgcgatgagcttgtgagtgattgtgagattctagaggtgatagagacatcctcaccacttgtatttttgcaatctttcatcttgatcttctctttgttgtaaagaaggcttcctggttatggaaagttaaatcctctgttggatcttccctgtaggtacctgatgtaaatatatttctatctatttaatgattttttgtgtgttctctgtgctatctgcttttcactccagtatgcctttaccttgatcatgtagatgcatgctttgttagggtcattcaaccagggaaactggtctgattctaaagtccttgatagaacagggct

SEQ ID NO: 232457 - DNA, 440 bp, Glycine max
  unsure (1)..(440): unsure at all n locations
ntactttgattgaatgcttgtttgagtggttgattcttgaaatttngnttttgggtgtggaatgattggtatgtatgatatatgatgtctaatttgaattgagtttgatttaaaagccgtttgaggccttactcaagaaatttgaagttttgcagtcattattatgcttaagccaagcgaaaaattttgtaagaagatgtggttactagattttaggcttaagtgtaggtgaatctatgcttaagcatagatgaatctacatagatgaatctaggcttaagcatgagtaagcttaagtgtgtgtggatttagacttaagcctgaaccaagcttaagtgtaaattcacataagcttaagcgtagttttttgtcatgttgtctttagttcatttcaattgaaattcaatcttaaatgcttcttgagttgtatatgaacctta

SEQ ID NO: 232458 - DNA, 405 bp, Glycine max
agcttgctctaaatgtacattgatgtttgtatttattggaggagggtgtatgccatttttgttttaagagtagcatcccttggtaaaactaactttccaaatgtttgccttcacaggaaatggccccgaggaagcttgcctcaaagaggtccaggaaggataaggcggccgaagggactagttccgctcctgagtatgacagtcaccgctttaggagcgctgtacaccagcagcgcttcgaggccatcaagggatggtcgtttctccgggagcgacgcgtccagctcatggacgacgagtatactgatttccaggaggaaatagggcgtcgacggtggacatcactggttactcccatggccaagttcgatccacaaataatccttgagttttatgccaatgctt

SEQ ID NO: 232459 - DNA, 445 bp, Glycine max
  unsure (1)..(445): unsure at all n locations
tcttatccaaggctcatcttggtggtgaagctcattcttcaatggcttattccctaatggatggcgcctcctctcacctcttctcctttgtcttccgctgcatgtccatggtggaaaatcaccattaaaggacctcattgaagctcaaagatcctgcctccatagaagctccataagcaagcttccatcaatctatctctctaaccatcaaggccgatatatgtagggatatcctactcaaggcgtcagccactacattggctttgccggggtggtaactaagctcaaaatcataatctttaagaaactctaaccatctcttttgacgcatgttcagctctttctgactaaacaagtacttaaggctcttatgatcactaaacacctcanacttggagccaaacaggtaatgcctccacatcttaagggcaaaaactacagcagc

SEQ ID NO: 232460 - DNA, 417 bp, Glycine max
  unsure (1)..(417): unsure at all n locations
agcttagtcgaggcacaaagttgctttctcattttaatcaanagccccatgttaatcagttgttggtaattaattatttttgtgactgatcaatcacaaatttcttcacctgcaaatattaatataaaattatcttaatttcaattgtggataagaatatctcaaattccaagtcaatcatgatttattaagtatatctcaaaaaaaaatttattaagtaaattttctttttaatagtattttattttttccaaatttatttaaaataattaaagttatatttataaatttaaaataaaaatataaaaaataaatgtctacatagaatattgaaaaaagttcaataagaattaaatcaaatcaattaaaaatgttaatggttttctaaaatatatggtaattctgtaacacactttc

SEQ ID NO: 232461 - DNA, 445 bp, Glycine max
  unsure (1)..(445): unsure at all n locations
tgtggttagaaatatgcatacctcacgtaaaagagattgaactcctcctttcagancaagtngattcacgagaaactttggtgtgctaggtaggagctcaacaacttcatcaggaacctcatacaacatgttagctaacatggaaatgagcttacaatgaactaattctgcccaggaatactttctgctgatttctataagtgctttgataacctaaaggcagaatgtgtaaataaattaaacggagtaatcacaattacaacaactataataacaaaaccttattccactaggttaagtcagctatatggatcacacaacaccatttggctcaattaaagaccgaagtttcaatgattttacttaccatgaaatccctcttgaccataaataatggttatatatttataattccattgacatgaaccacactgtccatcaaaac

SEQ ID NO: 232462 - DNA, 377 bp, Glycine max
tcttgagacagaagacgaattagaaagttggttttcttcttcaacccattgaaaaaattgacagttatctgggtctgtttggggtaatgcacaagtatagaataaccttcctgggttcctccttgttcttgtagttcgaatagctgcacgtcttccatggtggcattgccgaatgaaactaccagaaaatgcacaacaactgccacttgcagacatggagaaatcaagtgaacaagcagcagcgactaagcctcaaagtataagaagaagaagcgactcagcgtgggaaaccagcagcttcgtaaaccctaatttatttggggaagaagaaaaagcaaccttgcgtgagagagaatttatacatgcagacctcagtg

SEQ ID NO: 232463 - DNA, 450 bp, Glycine max
  unsure (1)..(450): unsure at all n locations
ttctggggccatttcctgcgaaggcgaagatgtggatagttatgtttaccagagggacgctactcttanaacaaaaatggcatacaacctcctcccataaatacaaacatgaatgttaatctagagcaagcttatgcgcatatttccttacgaacgttcacttgcacaagacattctattaactaaaaaaaaaatgcacccatatacaatcaaggcagcttcgttacctagattatttacatgtacttccaaggtgtatttgttacctacatcacacacatttcctttgctaaattcatatgcatgcatactctaagcacnttggctatcgaaaattgcatacgtgcacatcttggtatttctaatacctatacatacacaaacttcatgatgaatcttgactatcgacacaataaggtgctacanttcatgctctcctttcttttttca

SEQ ID NO: 232464 - DNA, 431 bp, Glycine max
  unsure (1)..(431): unsure at all n locations
agcttatgcgcctatgtccttacaaactttctctngcaccagacatttaaccgaaaaaatgcacccatatacaatcaaggcagcttcgttacctagattatttacacgtacctccaaggtgtatttgttacttacatcacacacatctccttggctaaattcacatacatgcatactcaaagcattttggggcaccaaaaattgcacatgtgcacatcttggcatttctaatacctatacatacgcaaacttcatgatgaatcttgactatctacacaataaggtgctacatttcatgctcctttttcaagtttttgctacctaaagccgcatgcaaattcaagcatattttcctttgctgactaaaattgtattcaaattaaaaggtatattntttggaatatgttttcttcacataacatgcaacatat

SEQ ID NO: 232465 - DNA, 443 bp, Glycine max
  unsure (1)..(443): unsure at all n locations
tctatataagctgaaccattttatcaataaacacaagttgtgttttattcagaaaattagagtttatctcttttatcttagtgagagtgattctcctaaattcttgagtgattcaagaacaccctggctgtatcaaaggactttcacaacctttgtgtgttgccctcgctggaaagagtgattctttccttcctatcatctccacccttgttctttcaaaccacaattccagaaaatccacctctgcccaaaattatctcgtgaccataactcccatttcacacactcaaattaagtgattcttgagcctaaattgaatttcataacgagacctttcacctcgttntggaatcacctcatttggagccctgtagcttccgttattgccatttctatatttctgtccagccaccacttaacctacgttttaccatcccattcat

SEQ ID NO: 232466 - DNA, 418 bp, Glycine max
  unsure (1)..(418): unsure at all n locations
agcttcaatgtgccctatattgnttttttgcgtcgagctacattaagctntgacctagtgccctaatttaaagcttaaaccatattcgatataggtttatgtttaaattttttatttaacctaaaagtttattttatagtaaagtcttttaagtaaattaatgagatcttgtttgataaatattttcattagataagaaagaataaaataagcttctcccaagagctaaaattagcttagggacaaattaaaattgattaacttgtatataaagttaatttttgcttttggagtaaatttatttcattttttttcctatgagtacttatggaaaaattatccaaacactactcctactactaaaacaatctcttagattctttgatccagccttaaaaaagcttttatatatatatat

SEQ ID NO: 232467 - DNA, 423 bp, Glycine max
  unsure (1)..(423): unsure at all n locations
ctgtgacatcgattacacatattacggaatctattacccgngttngnctctgataaatctaaagatgtaactcttcacaaaggttttgactctttcaaatgcggtttaagtttttctaaatgatataactcttctgaatggctttcttgaccagacatgaagagtctataaaagtaaggctttgatttgcattctgaatcaatttattccaagtctttctaacaatctcttacaatcctttacaagccttgaatctctttgaacttcttcttcttctttgtaccaaaagatntctgaagctatctggttttctaaaccttgaaaacttgtgctattcatccttttcattctcttctgcctttgccaaaaagaattcaccaaggactaatcgcctgaattctttntgagtctctcttctccctt

SEQ ID NO: 232468 - DNA, 417 bp, Glycine max
  unsure (1)..(417): unsure at all n locations
agctngaatcttgaaacttgttttttgttttcaattncctcttgaaccttgaagtgttcttgattcaatcttgaactcattctttgattcttgagatcatcatctttgttatcatgaattgttcttgatctttgagctttttgtcatcacctttgtcatcatcaaaacttctttgaatcatcatgaagcttgcttttacaccagtgactgatttcgaaaaataaatttccaaaagtcacaattcttaaagtgacttgttgctgaagattttttcaaaagtcacaactttttaagtgactagttttcaaaagagtcacaatttttaaaaggtgactagttttaaagaaattaccaagagtcacaaactttaacttgagtcatcaagagattataaatatgtgaccatggcattaattt

SEQ ID NO: 232469 - DNA, 430 bp, Glycine max
  unsure (1)..(430): unsure at all n locations
tgcatttattgctgaacaaatctttagtcttgcatgtattanagtgggttgcactcctatgatcagattgtattgatttttcatttctcaagctcaagggagtttttaactattagatgctataagattttttattgatgtgcaatatcgattgtattcttaagaaatgcagatggaaatttgtttagcatgtagtttacgactgacataattatgtctcccatgtgttactttacttcatataactgttatggggaaaactctgctgcttgtttgacatcaatataattattaatattgttgctttactgaggatggaaatgtgaatttcagaatcacataaaatttattacacgtcagaagcgtgctgacgcanagaaagcactcaatagtcttctttacaataatggagcctctaaattntcttttg

SEQ ID NO: 232470 - DNA, 413 bp, Glycine max
  unsure (1)..(413): unsure at all n locations
agcttatgcgcatatttccttttaactttctcttgcacaagacattctattaactaagaaaaatgcacccatatacaatcaaggcagcttcgttacctagattatttacacgtatttccaaggtgtatttgttacttacatcacacacatctccttggctaaatttatatacatgcatactcaaagcattttggggtaccaaaaattgcacatgcgcacatcttggtatttctaatacctatacatacacaaacttcatgatgaatcttgactatcttcacaaaaaggtgctacactttatcccttttttttcaagtttttgctacctaaaagccgcatgcaaattcaagcatattntcctttgctgactaaaattgtattcaaattaaaaggtatattttttgtaatatgtt

SEQ ID NO: 232471 - DNA, 446 bp, Glycine max
  unsure (1)..(446): unsure at all n locations
ntagtagacactgagtgttcctttacttccatatgcttaagtggggnacctcaacataattgctntagaagtaatataataaccaagactagaactatgtaaggagacataataaccaatgatacaaaaatcagaaatttcactatacaattatctacaaattgtgacatttttggcaaaaagatttttataaataagacaaacataatagattcgcaacttgctaaataacaaatgatcctaggacttgattttatcacacatgataatagatcaattactattgcaaaagataatttattaatctctacaaactcacaaatatcaccaataataaatgaactcacattagagttatgaacaaagcgcggtgatacccctaccaaccctacacctaccctcaattcccaatgtccttgtgacatacctggaaggtgtaagataaa

SEQ ID NO: 232472 - DNA, 413 bp, Glycine max
  unsure (1)..(413): unsure at all n locations
agcnngctgcatatgtgtagctatnttttatttcaactcctccttcagtggcacggagaaggcaaaaaaccaacacatatctagatgcaattcattgaatatgcttcttgaggaggaggtagagttatttatcaactcatccaccaaaaaagagaataagaatgtgtccaagattcagaagggaatttctcgaccctacgtgctaaacccacctttgtctcccattgcacgagtataaagggtagtttacacttgcccagcttgctgcagtgatccaagtgagatatttgcgtcagcttttgagtccttaatttaagccattgctattgctggtttgaccttaaagctggtaccaagtgctacattctctacttctggttattggaactgagtctgggctatatattactcat

SEQ ID NO: 232473 - DNA, 428 bp, Glycine max
gggaattcactcaaataaaacatagagaatgccattttatcctgatgaaggaattcaaggagtgatctctcataattgagagaaattctgtcacttcacattctcttaaaatgaggaaaaacttccacatcattggaaactacaaccctcttccttcacggtgttaagagcataattgtaactcaatcgccatgtttacaagtgcaaattgtaataacaaaaaagttatctttcctgttattgtctgcaagcctatgggaagatacaaatatctatcctgctatctctattgtaataaaatcttaaaacaaaaatatttttttcacgtacaaaaatatatatctattatacattttataggtgagaacgtatttgtgtttaatattatgtacataacccttatactacagcaaacatgcgattccatt

SEQ ID NO: 232474 - DNA, 376 bp, Glycine max
tcttagcccaggcgagctagatgctagccttggcgtaattagggtcagaaatcttcacaaaaagaccattttgcccttccttttagctttgtttctggatctaacaaacaaacagccatcaaaacctacaaaatcacggatgaatctttcatatttaaacaacaatattagtaaatgtcaatatatagttacaactagttttaagggtagtttataagaaaactattacaattaaaggataagtgctaactaattaatcccaaaaataactgaaatttgcactcatcaattggctctaagcttttaaaacaattcatatcatacatcaaattgttgaagcccaataattaaactcagtcaattttatcactgatcg

SEQ ID NO: 232475 - DNA, 468 bp, Glycine max
  unsure (1)..(468): unsure at all n locations
acactatgaatactcagcttaatgagggcctttaatggtggttttccaccattgtgatgcagcggaagacaaaggagaagaggtgagaggaggcgccatccactacggaataagccatggaagaaggagcttcaccaccaagataagccttggataagaagcttggaaggatgcttcaatggaggaaaagaaagagggagagaagtggaactttgaagtatgtctcacaagactctcattcatcaaagttacaacaagtgttacacatgtttctatttatagactaggtagcttccttgagaagctttctcgagaaaacttccttgagaagcttctttgagaaaacttccttgagaaactagagcttagctacacacacccctctcataacttagctcaccttcttgagaagcttccttaagaagattctaanaaagctagagcttagctacacatacctttctataa

SEQ ID NO: 232476 - DNA, 400 bp, Glycine max
  unsure (1)..(400): unsure at all n locations
agctgctgccactctaatggtcttatttaatnncatatatggcaatcggagttcacatttcgattaatacaagtgatgatcttctgtcaaccatggatgtagctttgttacaataaggaatgtcgactgaggcccatgagtcccccgtgctaaatggatatatgtccttagtcgagttatcaccattctccatttctcctaagttccttgaaccattcagaccatcccccaacgtacccactatgaatcatctatcctttctcatcattccctcacactttctcttagtgtagagacccattttcctaagatcatcgattacgtggaacatgtagatgggcatatggaggactatgccattacctatcataaaacagtactttcctacaacacttagatc

SEQ ID NO: 232477 - DNA, 383 bp, Glycine max
  unsure (1)..(383): unsure at all n locations
ttatcaagtcattactagccctaanaaaattagaaaatatttgtgtttgaagtttgctcagagactaaatctaggattgtcttacagatggatatacaaattaacacttagtctttnttctctcaaaatgttcaagatgttttaagagtttttttttctaacttttcaagagtatgtagagagcttgttgaagaataagagatataattttttgcgcaagatcaactacttcaatcttcaaagcttcttttatataggcttcatcttcaagtatttgttgtctcaaaatagaaaaatcttcactctaatttcatttgataaaaggtcattgggtgaatttaatgcgtgtcctttccttatgtagagagtcttctcttcaacgc

SEQ ID NO: 232478 - DNA, 346 bp, Glycine max
  unsure (1)..(346): unsure at all n locations
agcgtgagacgtgaagatcaagtcgctatgacacangangaagccccttnagagcattctagctgggtgcagccatgccttcccgattttcaattgggaaattggcaagtcattgaacgaccttgaagttccatggcagacacaatgtaattctttattttttaaccctacagctgggtctaggctttagggttttctccttgttatggcgttatgtcttttttctatctaagaatataaaataagatctttccttcatctgttcttgcgccttcgcctattggcattcatttgcatgtttatttctattgcatttaaacggtacatatcctacgacgagttctat

SEQ ID NO: 232479 - DNA, 435 bp, Glycine max
tccacaacatccaagcaaaacaacattcaaacagctcttgctatcacagccaagcaaaacagagcaaaggcagagaactctgctcaacacatcaaccaaaatcacagcttttctcacttaaagaccacagtaacaattcctttgatccaattcgttaaccgttggatcgactccaaaattttactggaagtctatagtgcataagcctacattttgaccgttgggatctactagcaaacatccagaactcattctgtactactctttccacagccaaccacacacaagcattttctgcaccaagctaaaatcctgctgcacctattttgacagcaaaattctgcataagtgcagatttcgaaaatcacacttcccctcatccaatcttgctcaaatcaaatcctacaagtcccaaatcatgtatcaaacatgtct

SEQ ID NO: 232480 - DNA, 412 bp, Glycine max
  unsure (1)..(412): unsure at all n locations
agctntgagccaaaattccaactcatcataaaccttgacccagagtgagaatgtccatcctcgccctcggaagaaaacaaaaaaaaaaagaaagaaaaaagaagtttccgatcaaagatcggaagaaagcaaaataagaaaatttcccaatcaaagattggaagagagcaaaaaagcaagaaaaattcccgatcaaagatcagaagaaaacaaaaagaaatatacaaaaagatctttggaccagacaatatccaaacaatacataatagccacaaccaaataaggaaagaaaggaaaccacaacttgaagttgtcctctccctttggttgccgaccaaaatcctgtgcactggcgactttctcaccccgcactaaacaaaaacagaaaagggaaaggccaaaacactcatag

SEQ ID NO: 232481 - DNA, 451 bp, Glycine max
tcttatctaaggctcacttggtggtgaagctcattcttccatggcttattccctagtggatggcgcctcctctcacctcttctcctttgtcttccgctgcatctccatggtggaaaatcaccattaaaggacctcattgaagctcaaagatccagcctccatagaagccccacaagcaagcttccatcacaaccgatgttaacgtataagttaacatcgattttttttatagaaaaccgatgttaatctataagttaacatcgattttgtataaaaaccgatgtgaactgtcaacattcatacatttattttggtgtaattcttattatataacatcggttatttaaataaccaatgttgtcaattttacgataacatttgttttgaaaaaccgatgttaacgatagtactttcaacatcggttaaaaaccaatgcagaaagttataaata

SEQ ID NO: 232482 - DNA, 424 bp, Glycine max
agcttcagaccaaagcaacacagaatctatgtatccaaaacccctcaatttaatggattttcaaggtttgagaagtgaaattgagaatgaagtaaatttggagcaaactctcacgtcacacaagtccataacatcaatttaaacgtgctcaaactggatttacacctaaaattctaccgaatcaaaatttgactcctcaacacccaattttaccctagaaatggctctttgttcactttggtcatttgtctttctctctagcacagcccaaactttctcataagtcctaaatgacatttcaagctaggattaactcactttaacctccaaataccactaaatccagatttggccttccaactctcaaaaactcactatttttccactcataacaccatatcctcactttctaaccctaggttaa

SEQ ID NO: 232483 - DNA, 449 bp, Glycine max
  unsure (1)..(449): unsure at all n locations
ntgcataccccaaggatccattaggaaattactagtgaaagagagccacgagggtgggctcatgggccactttgggatagacaagacccttgtcttacttaaagaaaagttttattggccccatataaagaaagatgtccataagcattgcactaggtgagtggcttgtttacaagccaagtctagggtgatgcctcatgggctatacacacccttacccatcccctctgcaccttgggtagacattagtatggactttgtccttgggcttcctagaacccaaagaggtgtagactctatctttgtggtggtggataggtttagcaagatagcacactttataccatgccacaaggtggatgatgcttcccacatctcanaactcttttttagggaagttgtgagactccatggtttgcctangaccattgtgtcagatagagatgcta

SEQ ID NO: 232484 - DNA, 393 bp, Glycine max
tatctgggcttggaccgggtcatgtaaaacagatgtgtgtatggtgcgatcgtgggtccggcgggtcggattgtgggtcaggggggcctatatcggggtcaggtgggtcatctccttccgcgaggaagagaaataccctagaggcacacttgtgacctctatggtatttctcgtcacacgtgaagcatagccccctctcgcgccgggaagcaatttcctctggggttaaccgcttcatggcaggtggattagttcgagggggaatggcgaggagaggcacgggtggggaggtatgagaaggggttggtccgggtacgggtgagggttgacggaatgacgcgcgggaacgtgactattggggacgatgttcgctcatcaattaatttgttcttc

SEQ ID NO: 232485 - DNA, 411 bp, Glycine max
agcttgcaaaccaaatgctcaccattatctaattgagaagccttcaggttgtttcatataaacctcttcctctaaatcaccattaagaaaggttgttttcacatccatttgttgcaactcaaggtcaaaatgagcaactaatgctaagataatacaaagagaatctttcttaaatataggagaaaaagtctctgtgtagtcgattccttttttttttagtaaatcccttagcaacgagtctttccttgtatctctcaatgttgcctaatgaatcccttttagtcttaaatgtaacatcccatttttcgtgaattaaattaaaaaggttttagagttttagaaaaaaaaatgatgaggcttttgtaattaaataaataagaagaaataacattattaaaataatggtttgaa

SEQ ID NO: 232486 - DNA, 452 bp, Glycine max
  unsure (1)..(452): unsure at all n locations
tgaagtgagaaagcgnggaagagtcagtcttcctactttngtttgttgaccacagagtggtacctggagatatgtcgcgggggtcaagagaccttggggacgtcaagtggggtgctattgcccaaaaccaagcttgaccaatctcgacccaacccgggcatagtcagtcagtgagaacctgtgatgtacctaaacaggcgagctcctggcagtcatccaataaaagaacaaagaccacaaagcaaggaggcttgtgtggtggttggccagctatggatcttgagtgatatctggaatttggcctctggtaatcgattatcaagggtgtgtaatcgattacaaggcttaaaaatggagacaggaagttaagatggcctctggtaatcgattaccaagaggtgtaatcgattacaaggcttataaatggagacagaatgttgatgtggcctttg

SEQ ID NO: 232487 - DNA, 405 bp, Glycine max
agcttttcgcaaagcttacggtaaaatctgggacctatccatggtagaaatctccacagaggccattgcctccctcgcccagtattatgatcagccgttgaggtgcttcacttttggggacttccaactatcacccatggtggaagagtttgaagaaattctgggatgcccactgggaggaaggaagccatatctttcctctgggttctatccctccatgacaagagttgccaaggtagtgaaaatctcagcacaagagtttgaccgtgtaaagcaaaacaggaatggggtagtcggagtaccaaggaagtgtttggaggaaagggcaaagaccttgacaaatcaaggcgaatgggcttcttttattgacatcttggcgcttttgatctttggagttgccctctt

SEQ ID NO: 232488 - DNA, 449 bp, Glycine max
ggcctatccgatgcagccgtaatgatggcccgagttatgttggggaacggttacgaacccgggatgggtttaggcaaagacaacggcggcataactagcctgataaacgccaaaggaaatcgtgggatgtatgggttaggctataagcccactcaggcagatataaagagaagcatcgcgggaaggaagagcggtagtcaaaactcgcggttgagacaagaaggtgaaggaagcccaccctgccacataagtaggagctttataagcgcgggtctgggggacgaaggtcaagtggtcgcgatatacgaagatggtgttctgagtacattggatttggtatgaccatgccctcctgatttccagctgggaaattggcgagtggaagaacgcctcggcatttacgcgacgagcataatgtaaacctttacggttttaaaagctctatagtt

SEQ ID NO: 232489 - DNA, 418 bp, Glycine max
agcttgccgctggagctgacctattatctgccctaactctcttagactggtgatccctaggctcttgaccttgacttgatagaacctctttttaagcgaaggtgtttgacttgatcccatgttttactaaagtgaaacaaaatcggtgcgaatcaaaactccgacatctatcatgggtggaatggatgaatgcatgaagaaatgcatatgacacagatgcaatttatgaatacgggagcccgggaaattgtctccttcttagatacaacgtcttggggtagcaaagtgcccaacgtatgtatttaagaaggtgacacggtccctccattggtttgttaaagagaggggatcaagacagaacccgtgcgtgatgcatatgcgaaaggtgcaacacgggaatgtacatagtatgacaata

SEQ ID NO: 232490 - DNA, 431 bp, Glycine max
tgagatgaggaagtgttgaagggtgaaactttctgcttttattgttgaccacagagtggtacctggagatatgtcgcgggggtcaggagaccttggggacgtcaggtggggtgctattgcccaaaaccaagcttgaccaatcccgacccaacccgggcatagtcggtcagtgagaacctgtgatgtacctaagcaggcgagctcctggcagtcaacagataaaaggaaaacaagaccacaaagcaaggaggcttgtggtggctggccagctgtgaattttgtgtaatatgtgagatatggcctctggtaatcgattaccaagggtgggtaatcgattacaaggcttaaaaatgaagacaggaggctaagatggtctctggtaatcgattaccaggggatgtaatcgattaccaggcttgaaaacggagtca

SEQ ID NO: 232491 - DNA, 211 bp, Glycine max
agcttgagaaagagaacaccttatcgtcgtgtagcaaagcttggagctaggtcatgaaatgagggctttcgacgagtgagggctttcaagctccagcacggcagcaatgacgaggaccaccatgatgcgagtagctcaacacccaaaccaaacttgaacaaggaagagtgagacagagtcgcgagaatcattttcggggggaggggggggg

SEQ ID NO: 232492 - DNA, 400 bp, Glycine max
  unsure (1)..(400): unsure at all n locations
tgcctcanagagatctaggaaggataaagtggctgaatgaaccagttccgctcccgaatatgacagtcaccattttaggagcgctgagcaccagcagcgcttcgaggccatcaagggatggtcatttctccgggagcaacgcgtccagctcagggacgacgagtatactgacttccaggaggagatagtccgccgtcggtgggcatcactggttacccccatggccaagttcgacccagacatagtcctcgagttttatgccaatgcttggcctacagtggagggtgtacgagatatgcgatcctgtgtgaggggtcagtggatcccattcgatgcggatgctctcagccagttcctgggatatcctttantgctggaggagggccangagtgcgagtat

SEQ ID NO: 232493 - DNA, 420 bp, Glycine max
agcttataagaacaaaattgccttaattatttccaaatatgcatgtgaattaggatgcatcaacaagaatcaagccaaggctattgtgcaagcaatcaatggggcaaaacacaccaaatgattataatgatggatggctcaaattctcacaaaggtaaaatcatcactttcaaattgagctttcaaaactatcatgacatgtagagaagaatcaaggatttcaagtcacaaaatgtcaagaacttttattttcaaaacaattacccatttcttgaacatatcctataattcaaagaaaaacatgcaaagtcgtacgtgcacacaaaattgacccaaaatattaaactaaaaatccgacgaaactaacaacattaacaaattaacacaactaacaaattaacaaaaccaacaaaactagca

SEQ ID NO: 232494 - DNA, 382 bp, Glycine max
tctcacagtctttatatttggtgtttctatccaatccttggggtcggactctcagccacttatgatagccgtcgatgatcccattactgcttcccctaagctctctgtcctttcttcacgccgcatcccatgccttgcgaactccttggagtaccctcgcgttgtggtcactgaaacctcgtgcgatgaaaggcgtgatgctttcgtctgatggcactcctctcatgggacatccttcgcatgaagatagaatcctgattctttcttccttctagcgagggaaccatttaacagacgcccctccatgctagccaagagttggtgcacaacaaacaattcttgcgccgctcttttcacatccccggtcgaacgtgtcatacat

SEQ ID NO: 232495 - DNA, 397 bp, Glycine max
agcttggtagaggagtatcttctaattgtccatatggccttcaaactcagcaacaacagtagtggattttgcacattgccacacaattcctttaagttccttgcttttccattgctttgtaaaatttctccaaagatgcaaggcacataatctatgaggtgcaccaggcatgacttcctgtaaagctggaataagtccctgaaaaaatgcagcagtgtagtaaattgcaaatcacaccatgcagcactagaataagtccctggcttatgtcattaaatgcaattaaatttctaacttatgataataattgcaaatcacaccatgtcataccttttgcatgtctgacattgaaattcatccattatgtatgtaatccccaagatcttcatgcaataaa

SEQ ID NO: 232496 - DNA, 429 bp, Glycine max
tgctaagatgtttagtatgacaagtgcaaaatatattattaacataatcatttattgttaggggttttttcacgtctttctaaattcaaaatccaagtattatttgatacaagttactttaaccttcactctcctttatagaaagaaagaaaagaagcaactatcacttaaagtaatataagacaatatgagataatttctttaagtctttctactaaaaatatgtaataaatgcatttcaaaagaagagcaaattagactcacatctcttaagctaatttctaattatatgtaacacaactctttttcttattcttgcactaaccccccttaatcttcaaaaacattaaactaacacccccttatatattatactagagaaatgttgtatcatcccacttcatcttcttaccaaatcttcctactacc

SEQ ID NO: 232497 - DNA, 432 bp, Glycine max
ggacccaagcaccgcggctgcagcttgacttggtcataagagagttaaatttgtgaccatggcatgagtttcaataatcatcaatcatctttgaatcatctatctttctatcttttttcaacatcatctctaaaacatctttcaatcaatctttctacacaattttctaattcatttctctttatctttctaaaagttttttatcaacactttctctttcaagaaaagttctttgttcaaaaacttgtgttattcagctttttcattctcttctcccgttgccaaaagaacgaaggactaaccgcctaaattcttttgtgtctctcttctcccttacaaaagattcaaaggactaaccgcctgagaattcttttgattcttcccttccccttaagcaaaagatttcaaaggactaactgcctgagatatctt

SEQ ID NO: 232498 - DNA, 476 bp, Glycine max
  unsure (1)..(476): unsure at all n locations
cgatactatagacaactcaagcttctcaaggaagttntctcanaggagcttctcaaggatgtctcctagtctataaatagaagcatgtgtaacacttgttgtaactntgatgaatgagagtcttgtgagacacaactcaaagttcaacttctctccatttttcttccttcaatttcgtgctcccccctctctctttcactccctctttcttttccttcattgaatcatcttctccaagcttcttatccaaggctcatcttggtggtgaagctccttcttcaatggcttattccctagtggatgacgcctcctctcacctcttctcctttgtcttccgctgcatctccatggtggaaaatcaccattaaaggacctcattgaagctcacagatccaacctccatagaagccccacaagcaagcttccatcattttccctttgtatntatcgaaagccaataccttgaacttcggagg

SEQ ID NO: 232499 - DNA, 410 bp, Glycine max
agcttaagaataaattcttagggaaatgttgtttattataatggtaacacattatgatgtaatcatgagttgatataaaattaaaattaattattatcattataattttttgagatgtcaaaatctttttgcaacatgtattatttgacgtaatgaaaagtgaaatatatttataatagattgaaattcagctaaaaaacaaaatgatataacaaatatgtaaatcttttttttatccatgtaataagaatattaagtcgtaagccaccacaactaacatgagattgtcctaattggtggtccaaagttttcgatatataactgcattaaatatttaaaagaaaaactttatttctgatggtggtccaatccaactcaaataatattgtatatggtgaaaaaaatatttg

SEQ ID NO: 232500 - DNA, 433 bp, Glycine max
tgtagcatgaagggaagctgtggagagtctgggcatttaatgtatcaatcatcattggcatgagattggagagaatcagaggtaaagaattggaaacagaaaaatgttgggagcttcaacttctaaactgtgaatttctgttacaaccttacacagattcagttgtttaccttacagttggacaggtgggattaacgacaatgttaacacgtgcaattatggtgtttcagttcttcatgtaaaaataataacactgcagtggacatcaatgtcgttctcaattaaaatgccctttttcataggaacatgttggtccattttctacctattagaaatcatcttgtatataacttttaaagtcatcattataaaaaatgaataatattctcttcaaaaaataatattatcatacaagataatatataatcgaatg

SEQ ID NO: 232501 - DNA, 321 bp, Glycine max
caccacaaccacagatctctcttctcctctggtaaaacaaaagtcggtccacatggcaaaaaacaatagtggaaaagatcaatgatctcaacataaaaataggattgtgttgcctgcctaccggacaaagagagaaactcacgaaacacatcaaatgttctaatgaacataccaaccttccctttcacctttctgagccacccctatattaccttcctcttgcttgcctatttcacactctaaagtagcaaatcaactcgtcgctagcgttagtttttgactcaaaaacatactcattatattttcttctcacgataaaac

SEQ ID NO: 232502 - DNA, 417 bp, Glycine max
agcttttgtaggtaaaatcaggtgcagtcattttccttagagtcctctcacggggtggaggttgtgccatgttctcaaaatgttcaaaatcagactgttcaaaattataatgctcaaaatcaccaataacagaatgctcaaaaggtacaagatgatgcctaactaatttatgaaatgtcctatctatctcaggatcaaagggttgtaagttagatggattgcctctagtcatacactacattcagcatgcacaactagttgtcttcttatgcaagtaatagtgtaggtttgaactacagctaccatcaaatgatatccaaataacttgaaattttatgaacaacaccctaaaatcatgaaaagatagcacaaaaatttccagacaaaaattcaaagtctaactatggaaactaccta

SEQ ID NO: 232503 - DNA, 464 bp, Glycine max
  unsure (1)..(464): unsure at all n locations
ggacctataaaactcagcttaaggattgttggtttctgagaaggatttcttatgttcttgntgattcaaagcttattgattcaaagtttccaggccatctattcaacccccttcctagatagttttgcctagaccatcaaaacaattcttgaaatatattttttgtgccactgtattcttggaattgattataatatctatgaggaaaaattattaggtgatctagatcatatttccttaattaattataagtaataaataattaaatattattaatttaataaatattaaaatacattttctagcacatttttaaaaatttattttcttttagataggaatttcttaagaatcataaaattttataaatcgtatattatatttaatgattttctcctaatttcatagttcttaataatatcaattataaagaatatattttcaattatagagatagagaatat

SEQ ID NO: 232504 - DNA, 402 bp, Glycine max
agcttatgaagagaaaggatgttatgtttttaacccaatcacactatgttgaaaagctattgaagaagtttaattatttcgatgtgaaacctgtttctactccttatgactcatccatcaagttaaagaaaaatttgagtaaaggaatttcttcacataaatatcctcaaattattggttctttgctgcatttgacaaacttctctaggcctgacattgcatatgcagttggtagattaggaaggtatactaataattctgatcattctcattggattgcattagaaagagtttttagatacttaaaaggaaccattaattatggcattcattatacatgttttcctgcagtaattgaggggtttagtgatgcaaattggatttatgattttgatgcaacaa

SEQ ID NO: 232505 - DNA, 409 bp, Glycine max
  unsure (1)..(409): unsure at all n locations
tttttattctgnnggactagtcccctggtgggtttattcaagaagctactccaaatccttaattgtacttaccttttatctttaatttctttgggctgattgaatgttttggagtttaaaatgtttacattttgttgaattctaaagtaatatgacttacttaaaatttgtggtggtttagactttcaaaagataactttagtcatatatgttgctgcttctttagaaaatggtttctcttcgttgacttcatgttttagatctatgaaaatatatgaggattgtgttgcctttcagcaaagctccatttggtaaatctagttggatctgaattagctaacagaacatgttctgatggtgtttgtttgataaagggttgtgatacatgttaacttgaatatatgatatg

SEQ ID NO: 232506 - DNA, 409 bp, Glycine max
agcttaattaacacaagcaagcttattgaatcaacagattaaaaaaaatgtgtgcatagaaaacagaaaccacaacagtaagtacaataaaactgagtcctgaaaaaacagaagctaaaacagaaaacagatttctcaaattgaaacaacaacaataaaaataataacaataatgcaagaatccaagaatagctacttgaaagcacaatgtttctaccaaatttataatcatctaccgaaacaagagtgattgcgtgacgcctagcagataaaattgcaaaataaataaataaacaaacaaactacatatgcattttccgaggaaacaaacagagaaaattggaagtgtaacagaaataacataagatagaacaatcggcttcagaagtggcagatacaataagttgag

SEQ ID NO: 232507 - DNA, 447 bp, Glycine max
  unsure (1)..(447): unsure at all n locations
ggacctataaaactcagctagctcttataaacagttacagggtatttgtttttcattttgactccatagagttgcaattcctttacaaaccactggttaataagtgagttaaaattcccatgctatttatttgctcacattntctagcaaatgtgcaacttgaaatgaaataagaaaaccatgctccaggttcaattctagcggaacttgtacaaggcatggcaaattcgatttcagcttcaaattctaggttaaaaacagtcctatatgcattatcctaagttcacgaatgaaccacattgatcaaggagtgtaagcactgcttcaaacgagtgcctagtttaacggtcaaaactgaattccgttaagactcgtatttcacaaaatcgatttcacaccgtcaatgcacaaaatcatcagcatcatataaaacaagtaatctcgaaa

SEQ ID NO: 232508 - DNA, 414 bp, Glycine max
  unsure (1)..(414): unsure at all n locations
agcttttgtcggagtagagcatatattgcttccctctgactgagcaaatcatctactgccgccaccgttgaggtgcccgtcaggtattgcggaaagctcgacgatttgcagccaaaggttactttgaatggcatcaaccccatggctgagtgagtggacgtattgtatgaccactcagcccataataagaaacgtccccacgtacttggccggcggtgtacgaatgcccttaagtattgctcaatgatcctattggcaactttggtctgcccatccgtctgaggatgatacgcagaactcattctgagtttagtgtcgcttagggagaataatgcttgccaaaatttgctgatgaanagcgggtctctatcggacgttatgcttcgaggcatgccgnggattttgcctaccatc

SEQ ID NO: 232509 - DNA, 432 bp, Glycine max
  unsure (1)..(432): unsure at all n locations
ggtattttccaattgaagaagacaaattcatatatgctttgatgaagctggccactagaacaccaatggagtaaaagaaaaagctacatgaaaaaatatagtaaaaacaggaaatcatcattgcaattatgctaaagtagtgatgtttctactcttatttcttagcatactagatcattgcattcatgagtttatggaggacatcgtgcatttcaattaatatttttcacattcagaaaataattaattaaacttgcacagacttagtcaccaagttggtatctttatgctaaagagcaaagtaaagttaaatttattactgcacataattttttcattcatcatatgaaatttaaatntttaaattttattcaagcactctctcattattgaggagtatgtaaagacatggattcctgcaacaaatctact

SEQ ID NO: 232510 - DNA, 415 bp, Glycine max
  unsure (1)..(415): unsure at all n locations
catgcangccgagaagcaagggagggaataagtcttattttctccttctgaacaacattcgttggcgttcatccacgctaaaaatttggaatctgaaacgctcggcttggataggacatcaccaatatcatcatggtcctcataaagaacactgtgttggcctggaagatggaaatataatctttcaacatcaggcttcctaacatgtattggaaaactaaaaattctccaagcagcttcacaaggagaaatgtacctggcataaacattaatttagtaaaacaataacgggcacattaatcacatatgttcaattaatgggacctgcagactatatattctctaatctcactattcctgggtgagagcatcctggatttcatcattgtcatcataaagcataacagtagtgact

SEQ ID NO: 232511 - DNA, 429 bp, Glycine max
  unsure (1)..(429): unsure at all n locations
nctatggaggctagagcagagagcagcaattatgttcttcaattggaacactcaaccatggagttgcagcacaagataaaggacaagaggcgagaggattctccatctactagagaataagccatggaaggagaagcttcaccaccaaaagagtgtcttggataagaataatagagaggaatcttctatgacggaagagaatgatagagacagagagagagagatgggggtgggaggcgttgaaatcgaacgagaagagggagataagttgaactttgaagtgcgtcccacaagtttctctttcatcaaacgtatgacaagtgttccacatgtttctatatacagcctagcacatacgaagcttccttgggaagcctaaggaagaaagccttcttgagaagcagaggggggatactccacccctctata

SEQ ID NO: 232512 - DNA, 381 bp, Glycine max
agcttgtccaaaagaatagaattttgaaagtttatcatttctgtttcttactaagtaaaatggatcattttcaaggtccaacgccttagaatgatcacctttcaagtaaaaaagaatcacttgtttcacgcataagaaataactacgtaggtctgatttcctcatcacaaattgtggaatacgtaggaacaaagggaaaacttccttgtctattcctacaagacaatcatcttcaaaaggccttaaatatattagaacgtaaagggaacgtaaaaatcaaagtcttgtttgcacattcgattaaaggctgtccgttattgtgaccgacattgtgggtgctaacaccttccacgagtggaatacaacacccaacctttactt

SEQ ID NO: 232513 - DNA, 439 bp, Glycine max
  unsure (1)..(439): unsure at all n locations
ttttggagtagaaacatgggaccgactcattntattttataaaggaagncatatctagtcaaggtctgagagaccatacaagtttcctaatgatttctaattatgtgggccattaagtctatcatatgctgacaatagccgagaagcccatgaatctcttcgggggcggagtaggtgtctgccatcgccttggccttggctaacaatcggggaagttcttgactcccgttcaaggtaagggcaaaccgatccatccacatggttgcctcttggtgtaaagagtcgatcacccttcctctagcctctttttccgcgtatacttgggcatactcatccgcgattctatgctcgtgggctgtggctagacctaactcttcttggtacttggcgatgatagctagcatgttggtctccgtctcgcataaacgctgagacaagc

SEQ ID NO: 232514 - DNA, 366 bp, Glycine max
  unsure (1)..(366): unsure at all n locations
agctttagttaagtgttgtaataagtgttatggngangttncttaggtagggaaaagatgagaaatggtgggggcctcgatgaagaccacaagaaatgagcgaaaaagtttgcaagtggtaaatatatagagtaggaaaaggcgaccaattaaatatgattattttattaaccattaaataattttttaatatttgaataatttattttactatattcactatgctcgaataaaacattaaataaattatctcattaaacaatttttttacacaatatttaattaaatattactctattcattatgcattgaataggatatttgactatattcattatgcattgaatagtttttactatattaata

SEQ ID NO: 232515 - DNA, 403 bp, Glycine max
  unsure (1)..(403): unsure at all n locations
tggtgtcttgcactcttgttcattgtaatgtattttatttnttaactgaaatcatgtaattggaaatggagtatggtgtatgtgtaaattgttgtggtgtacctggcaaattaataatgtacattaattaatctgatttgtgattgtggtgtacctaaagaattctgagtggtaattaaacattatttactttgcgtcttttgttaggaatgataagattttgatatcctgtatttgctttgttaatttaaaaaaaaaaccctaataaagaaaattgggcattgttatttactaaacaaggatatattttctgcttagagatgcaccaaacaattgtgtgctaatttctacatacattgttgtcattcaccctatctatagtaataaggaggcaacaatattc

SEQ ID NO: 232516 - DNA, 412 bp, Glycine max
agcttgcccaagcgagctggttgctttaggctgaagaaatttcatggcccaggcgagctagatggtagtttgggtgaagttagggttagaaaactctaggaaatcataaagcagaagacattgaagtctttgaaagcgtaaaagacataagacattaaagtctttgaaaagcataaaagcagaggactcaaagtcctattgaagataaaggcagaggacattaagtcctatggaaacataaaggtgaggacgttgagtcctatgaaagataaaggcgaggatgttgagtcctatgaaaccataaagacagaggacgttgagtccaaggaaacataaaggcgaaggacgttgtgacaccctctacccctcatctacatactaacaaaggaataaaaattcaaatattaattaa

SEQ ID NO: 232517 - DNA, 416 bp, Glycine max
  unsure (1)..(416): unsure at all n locations
agctnttctttgtctgtcttaagggttatcgcttcataattatgnnatcttcaaacaaattactacttttacttgtatatatctttagattggagattctgactttggaaaagtgaaacatggaccaaagaaatccagcaaagataaaagtgtatggaattctggatatgcagcacctgagtatgttgagaatggaaaagtatcaaataagacagatgtgtactcctttggagtggttcttttagagctgatatattattatgcaaatgaatgtaggatgagccttagtgcaatgatagggttgctactagttgaccagaaagttatggcttcaaattttggaaacaacaaatattcttgaccataggctactaattgcctatacaaaaaccaaaacctcggactaaatattcttg

SEQ ID NO: 232518 - DNA, 443 bp, Glycine max
  unsure (1)..(443): unsure at all n locations
ctcagcttggggatntcaaaacctcccctgaaggtgttcaatatgtgaagaatgtgcacccaaaaattcttcatagagagttttaatccttgcatatgaaggagtttgagttaatttcatattttggcaatatggtgataatggttgtgaaccgaatgaagcgttatgaggatactatggaaaatgtttgtgtggtagagaagatccttcattctttaactgcaaaatttgattttgtggtttgtgcaattgaaaagtcaaaggacttagaataaatgaccatggaccaatagttggttcactttaagcatataaagaaaggttcaaaagaagacatgataagcgtttggagtaagtcctctaagccaaagtttctttataagataatggaggaggataaaaagccaaaatagacgtggtcgtggaagaggacatggatgtga

SEQ ID NO: 232519 - DNA, 458 bp, Glycine max
  unsure (1)..(458): unsure at all n locations
agctttaaacaccaacgaacgcgaaagtttctatttctcaancatctaagnanaagatgagtcattaccaactttgtgggttgatanccttgcacctattttaatttttatcttttattaaatattggcctctttcctcttgcctctccaacgaacaaaaagaatatcatatttgagattttcttttggccacanacaccgcaagatttgtattttggtctcctcaccacacttcattgtacacaaatattcgggttcacccaaattcaataanaatgacaccaacatatatagtctcccataaaaaccctaacataaaataacctaaaccaccaaatcagtccggtaaccttatgggcaccaatgctccaaccctatctctctcttgaatccatagatagntattcaatttttcttttatttcattccctcaattaaattctttcttattctacact

SEQ ID NO: 232520 - DNA, 444 bp, Glycine max
tgttgaattcaaagattgctaaggaaaaaatttctgttccgcctatgaaatctgcatggaggcaccatcttcaatttttggacaatcatttgcttagactttaagtagtacagttagtgccaccatcattagtttgtcttaggcaccaagtctataatatttcattattataatctacctataaaaggcacctccctgtaccacattagtaatatgaatgatcaattaagtgaattatgagtgaatgaaatttagttctatttttctcttcctccagtaagtgtgtgctaaattctttttatatttctattcttccactgcgtgggtttgagtggttaatttacctcagtgctaacaattgatatcagagtatgaggattctagtagtagtgcgagagaaaaaaaaagtctgtgaggaacaaaaatattctcattgtgaaaaaa

SEQ ID NO: 232521 - DNA, 372 bp, Glycine max
  unsure (1)..(372): unsure at all n locations
agncttggacaaagattcatttcatgtgaaatcaatgcacaagactatcccttcttttcagtttaccagataaataattaataatactaatacacctaccttggtactcaattctcttgaggctttgttgcatggttttactgagaaagaagggtatggagtatgagtagttaaacactaatttcttagaaaaaatatatatgttctgctgcattgagcttacttctgatgatatgttttcttttttgagttagtgatggatcacacataatgagtttttttttttcttatcgcggaatgtgcagttcacggatgtgacctacaaagatagtgatcaagggcatgacaacaactgaggagaaggatatcttg

SEQ ID NO: 232522 - DNA, 388 bp, Glycine max
agctacattgtacgtgctcatgcacatttgttagccgcggctatacgagacatcttgccaaacaaagtcaggttaacaataacttgcctgtgctttttcttccattctatatgtagcaaagtcattgatccaatcatgtttgatgagttggaaaatgaagccgcaattatactatgccagtgggagatgtattttccccctgctttgtttgacatcatgattcacttgattgtgcatctggtcagagaaatcaaatgtcgtggtcctgtttatctacggtggatgtacccggttgagtgatacatgaaaatcttaacacggtatacaaagaatctatattgtccagaatcatctattgttgagaggtacattgcagatgatgccattg

SEQ ID NO: 232523 - DNA, 387 bp, Glycine max
  unsure (1)..(387): unsure at all n locations
agcttatcctcatggcctgcctgcggtcttcttttcccgngccaccccggaagatttaagccaagcccctactttcgaggggcaactcccaccttatgaagactatcccgggcaagacgatgggggaaggagatacccatcttggccccctgctccacctcaaagatccgtccccacatgaactaccccaaccgaacatagtccgccatatcccggtgtcgcaaccttcccttcggcgggagggcgacgcgagactcgcgggatgcgtgttccacgaaaggaatacgcgcggagtcgccaccaacgtttatttgaggaaaacgtcggaaaaaccggaaaagacgtgatctactaactttttagtgaaaggttcgggagtcgtattta

SEQ ID NO: 232524 - DNA, 428 bp, Glycine max
  unsure (1)..(428): unsure at all n locations
ggacctatgaaactcagcttcgggaatgcttttaaaaacataacgcgctctataataatctactattggcagacttaatctattataagtacatagcctatttttttctattctacttacttatttaatatatattgtgataacatataaatttataaaaaaatattcttggatgccttaattgctctaatttatgtcatacaaataaataaatttcttcaattacttaaatataattataaatttggtttttcgatgaaatgtgaatattctcacaaacgnttggcccatatcacttatcgggttaatttatgatctgtgtcatacttaaaagtttttacctcttaatatattatgtacgattaaattgacattctttatggcccaaatatatgagtgtactgatacttaaacctcatagacaaata

SEQ ID NO: 232525 - DNA, 411 bp, Glycine max
agcttctaagttagtgtaccattctactcgggctccggccaagctatcttgaaagaagtgtattaatagcttctcatccttagagtgtgcgcccatcttgcgacagtacattttgagatggtttttgggacaagtcgtccctttatacttgtcgaagtctggcactttgaacttcgggggaataacaacatcgggtactaagcaaagatccgtcatgtctgcgaacggatagtccccaaatccttccacggctctcaatctttcctcgaggagatcaagcttcctcttttctttggttgccgggggcggtccttccgtggacaaaactattggttgtgtcgcgatgttgggttgaggcaacgtgctgggtgccggcccttcggggatcgggggatagaactcgacatccct

SEQ ID NO: 232526 - DNA, 394 bp, Glycine max
tctagccaaatggacttaccttgaattaatttcttttgatagccctttgagccttgtttccctttccttgttttgaagctcactacaagccttaagtgaaaaaccatgatattaccatatccttaaggaattttggagctttggaattgttttgggaataagtgtggggggtttttgtttcattggacaactcgttttgttggctatgcttcatgatgtattttgggccatacttgatgtacattgtatattggttaaatgttggacatgctgaatgaaatgttgtttctcaaaggctaaagagtaaaaaaaaaaaaaaaaattcgaaaaaaaaaaaaaaaaaaaatttcaaaaacatatcgcaaaaaaaaaaagaaaaagaaaagccattaag

SEQ ID NO: 232527 - DNA, 415 bp, Glycine max
agcttgtattgtaagatacattcttttcttgttcagtgatttgtaatgatcttttggatctaaagccaaacgagtgaagaaatttgcaaaacaaagggtgcaacaattaggaaagaaaggtgtggcaagaaattacaggcaattgagaaaaaaatgtgcaatggaaaaaaaaaaatgagtgtgacaattgagaaagcaactgaagaaggaaaacaattgacaaaaaaaaaatagtgttctacattataaaaattttgcaaaattataaaaattaataatatcaattttaagtatatctaatatttactttataattctttttaatatattaaaagctaataatatttttaaaagttaaaaatttcttattaaagtatatctaataaaagaaaaaattctcggtacataattttta

SEQ ID NO: 232528 - DNA, 448 bp, Glycine max
  unsure (1)..(448): unsure at all n locations
ntaaccatnggatctacttctacaagacttatgtttttactgagaatctcaagagttctcatatattcctcattgacctgaaaaaaagtccaaagtgtacaagtctaattataagggaatataatggtaacatgtaaatataatgaaaactatacacattaagaaccaagtgatctaaataaaaataaaaaacatagaccacgatgattaaattgaaataaattaactctaggccaaaacatcaaagaagatccagaaaatgtatctcagtggaagatataaactgtcaatctagacattattctcaaattcaatataatcattatacacttttttaaatgttgccatggctaccaatttctagatatgtcaaaaataataagatgttgagtctataacatcataaacaagatacgaccgatggtgtgaacaatcaaagtcacaaaca

SEQ ID NO: 232529 - DNA, 311 bp, Glycine max
aatggcagctgaacggacaacgaacagagagatgagactccccttcaaggagaagatgagcctagaagaagctcaccaccatacgaggccatggaaaaaagcttggaggaaaaagaagatgactgaagggagaagaagagaagagcacgaaattctgtgctctaaaagagctctgaaatctgaagtttaattgtcaaatgatcaaagttgaaaaaatgcacacacatgacctctatctataacctaagtgtcacacaaaattggaggaaaattcgaactccaattcaaacctcactcgcatccgaaactga

SEQ ID NO: 232530 - DNA, 436 bp, Glycine max
  unsure (1)..(436): unsure at all n locations
tgtccataagggcatggaagtgtgcaagcatggnttttatgccnncnctttcttccatactgaagagttcacacttactgatggaagtctgcatgtggagcctctatggaggctggatctttgaccttcaatgaatcccttcaacggtgatttttcaccatggagatgcactggatagcaatggaataaaggagatgggagacaccatccactatagaattagccatggaagaagcacctctccactaagaatgcgccttggataagaagcttgaagaggacgctttaatggagggaaagaaaaagagaatgggggagctcatcatcgaacgaataaaagatggagagaagcggaactttgaagtgtgtcttataagactttcattcatttaaagttaccactaattgttacacactgctactaattatagactag

SEQ ID NO: 232531 - DNA, 409 bp, Glycine max
  unsure (1)..(409): unsure at all n locations
agcttagatgcgaataaaaaagttttctttttgctngctctttgggttattttaatttaatcaaatttgtcattgctataattgcttatttttcatccaacagggggaaaattttgcatgaattcttacttgttagtagaataaaccatatacaaattgaagtaaataggatttgtggttatagatacttaacaagatatgctatgttgtgcactataaagaaacaaatgagagagttttaactggatgaaatcatgccaggttatcttattgctgtgtgttctctttcattttctctaaaaaaaattgtctaattaaaattggattaacttttttctcatttcagaatgacttaaaaagcatatgtaatttattgttgcctctcacacttggttatttcttgaacctg

SEQ ID NO: 232532 - DNA, 381 bp, Glycine max
ccagagcttaatcttgatgtggctgcccctatctctatcattatactcctataatatacaaataagtgtgtaacaagataaacataatattggaaacatatcttaaattgaaccacaattttaattaccttcaatttttcaaactacctatctcgaagcccaatagatgcctcttttccaacttggacacgcttcatcaaattttgccttaattatctctggcatgacatgggaaacccacctgtctagtgaaagtctacaaaaaaatgttgacaaaatcatattctaacaatggtatataaaaaagtaaacacttaattttaattttacttactctccatttggtgcctgaagcaaaggactttgatcaattggttgccc

SEQ ID NO: 232533 - DNA, 387 bp, Glycine max
tgaagactcattggatctaggagttcaaaggattgcaatttcccatggttcattgatgtttttttcttctactgcctgatgttattttttcatttagcaatagtgcatctaaatgaaatttaatatccagtgtcaaacaaaacattgaacgaagaagaaatatttgaagttcaagacagcttatcactttttccttttggttggatacatgtaagagctccactaatcttggctggtacttattcattcttttaattatattcacaagaaaatgttattctactgggtggcgacagtaataaacctgatatgaagcactggtttttctgcttttgacctccagattcgaaacttatatggcattcacgaatcacaaatcacaaatgt

SEQ ID NO: 232534 - DNA, 429 bp, Glycine max
  unsure (1)..(429): unsure at all n locations
ttctataaagcnccactgctgcgtggacctgcgttttattattnnacccagcgggcaaccacattatgcaattctaagtgtattcttggggaaaaaatgtttcttttttaaatttaatattcttccaaaaataaattcaattaaacacaaattaaatataaattctcatacacgagtgagaaataacactcatgttcttgttcccctttttaattatattgcgtaactatgacttagccgcacatgcaacagataaagaagagcaacgtcctgccttcactttacaataatgcttggatttagaaggaaacaaaaagtgagaaatattcctgttttggaggggtggaggattcacctgtgaaagganattcgactcagaaaaataaataagaaatataatgaatcttggtattattctattaaagagaa

SEQ ID NO: 232535 - DNA, 406 bp, Glycine max
  unsure (1)..(406): unsure at all n locations
agctgagtgaaaaaaacttatttatgtacaanaaaatagtgtcatgatgagacaatttgcataaattaacaaaactatacacttggccacttggccccaatgagacccaatctcacaaaactaatttaaaagggtcaaaagtaattattaaagcatgccataaaaatatgttcaaaatgatatattaatcaatctttaatgttgtatcaacatttcttgcagattctatgtttcaaaaagaaaatatcaaatagctagtagatagtattgagagttgaacatcaagtaccaagtctatatgtgtcaatagttatggaatgaacatataaacaatagataaaagtctagttatgaaataggcatggctacataccaaaatgatgaatggaatcataattaacaagac

SEQ ID NO: 232536 - DNA, 434 bp, Glycine max
ttaataaatatacaaccgagatgatacactcaagattgacttaaaaatcattaatgaataaacttatcatcattattaattgctaaacttgtgacacaaataatatatacttataatttatattatttataatgattaatgcagttcaactagtgatctaagtgatctattagtttgatctgtcattcatcttttttgatattttgactgagtcacaacggtttgatttttaaaacactaacgttgatggatttagcaaatataatttatagcataaaatatgtttttttaggagaaacaaacttatttcatatccttaagaatatatttttttcacaattttcttttcaaatacattcttattttttggtaaattttattaaaaactactaaatgaaatgagagatattaatatgacatgatactcacaaaaa

SEQ ID NO: 232537 - DNA, 327 bp, Glycine max
  unsure (1)..(327): unsure at all n locations
cagcggagagacggagggatctatatatgggaaccancaagcanatgagtcgggtactcgaatgcaatatagctttcacgaataaagagaaaacctataatcagattgatgatggctggcttgtccctatgagcaaaaagtaaagcctttaaatcaacacaatcaatcgcaccacagaccaaagagccgactgtcacacattgcatcctatacattcctgctgctttaaatattgaataacgcgaaccctgcgaagcacatacaataccatccggaaactgttccctcctatatatagcaaatgagaactaattaataaataactat

SEQ ID NO: 232538 - DNA, 440 bp, Glycine max
  unsure (1)..(440): unsure at all n locations
ttatccagagactgcggagcaatatgggattntngtttcaaaaacncnncgcaacatctgaatagagcaataaaaaaggaaaaagaaacagaaattgaattttgtgaaatctaagtatctaacaagtaaatactatataaacttttactgtcctctgccccaagaagatatacgataaaattcaaatcctgtgggctggataccagatcacgatcaaattcatttatttgctgggcccaattacaatgatcaaaattcaatagaaaataaatatatagggctttagtgtaccagatgaatactcgcaagctttctgtccagatacatattcctggttcatttcaatcattagaattaacttattatatcttaacaaagctcgctcacttgagtgatttcattctcttcttctgatttgaagattcaaataaaactgattg

SEQ ID NO: 232539 - DNA, 432 bp, Glycine max
ggatcctaagcaccgcggctgcagctcggtttaaatttcgagcgtctcttatattacgggactcaatcggacttccgagataaatgttattgtcgttagaattagctacgagcttcggttttaaatttcgagcgtctcgatatatttcgggactcaatcggacttccgagagaaaagttattgtcgttagaattagctgcgagcttgggttttaaattttgagtgtctcgatatattacgggactcaatcaggcttcctagtgaaaagttattgttgatcgaatttgctacgagcttcgatttggaatttcgagcgtctcgatatattacgggactcaataggacttccgagtgaaatgttattgtcgttcgaatttgctacgagcttcggttttaaaattcgagcggcaccatatattacgggactcaatc

SEQ ID NO: 232540 - DNA, 439 bp, Glycine max
tcaacctagaggagacagaccattccaagtgttggataagatcaacgacaatgcctacaagattgacttgcctagtgagtataatgtaagtgccactttcaatgtgtctgatctatctctttttgatgcagatggaggagccttggatttgaggacaaatccttttcaagaaggagggagtgatgaggacataaccaagggcaaggaccatgaagcacttgaaggtcccatgaccagaggcagacttaaacaagcccaacacgtcatagagacaaggctggtcatttgtatagctgccattgatgatgattgaaggcccaagtggagaaagatgaaggcccagaggcagaggcactaccaagactactaattgttgttgaaggcccaaactaacttgaaggcccaagttataataagttttagttataatatattttta

SEQ ID NO: 232541 - DNA, 409 bp, Glycine max
  unsure (1)..(409): unsure at all n locations
agcttcntccctatgttgctataaatatggggttaagtgaanaanaaaagggttcagccccttaggcacttctctctctttcgaatttgctgaggaaaattatttccgtgaagaaaatccaagccgaggcgcttccgtaacgtttccgtgagtaattacgcgaagattctcgaccgttcttcaaagattcatcgttcgttcttcgttttcttcagtcttcaacgggtaagtacctcaaaccaagcttttcaattcactctatgtacccgtggtggtccacattttgtttcatgtatttttattctcgttttcatttattttttatacccccntttgacgtgcttaagccatttatttaagtcatttctcgcttaatctaaaaataaaataaatttccaccgattgtttg

SEQ ID NO: 232542 - DNA, 442 bp, Glycine max
  unsure (1)..(442): unsure at all n locations
tatgcacagaaaatgnnaatatgaaattgagatgccctaagattcaccatttcctagttaaccatgcattaggtaccatgttcaattattttgctttgttgttgcgttttttttttttttttttttagaaatgggtttatgatcccaacatggttggctcatggtgcctaacacatgcaactaagaatgtagtgtgaagtttcacgcttccccttttttgtttttgtagaggaaaacacaaggatgagcaaacatgaaaacaaatggtatgcaattttgcagatcaaaaagtttgttgaacgcatatgcatgatgatgccatgactcatgccaaatgtgaggctggaatatgataacggacaaatgcaggaacgatatgttcattatgatgttatgaagatatgcttatgcgatgcatgatatgaatgcattntacggacac

SEQ ID NO: 232543 - DNA, 420 bp, Glycine max
  unsure (1)..(420): unsure at all n locations
gctcatctgctcttcatcataagcatcatccatatctggatccacaagctctttgatgttatttgcagttagcaaaggttttgcctgcaataattgntttgtaaaagggtagattaaaattagactttaattttctatgcactgttagtgtaaatatcttctcactgtcgaccaattagaatttataatagttagtataaaagtaacaaacttatcttatatgtcaatcctattagatgacatggtagaaatcctttatcctatctatttttaatattaaacattttccttgtcaagatgattaatatacatttagtatttgtttgtgcaaaggcacacatacccacatcaccagacttttctgtgagctatccaaagctngtcgaccagtaatgagctccaataatagtacaccataag

SEQ ID NO: 232544 - DNA, 444 bp, Glycine max
  unsure (1)..(444): unsure at all n locations
tggttgaacttcttagtttatcttatcatccatcttattcttatcaatctttntacaaacaccacttataggtttttaacttctaaaagaaaaaagattaaggcaatggttggtccagtttcttttcttgcatttcttctttaaaggagaagatgcttcaaatacattttaagaaaagctcttcaaaatttaagagcttaatttttataaaagaaaagccaggaaaaagtagctttattgaaaaagctaactgaagtagctttgaaaaataacctgcatacctcagcctctctttcctctcatcttgaactagtcagtgtggaacactgaaatgaagcttttattttgaaagtaatttttaagttaaaatacttaattttaaagcctttatttttatctttaatttgaatagctctaagccccaaagaaagtgggcaaacataa

SEQ ID NO: 232545 - DNA, 383 bp, Glycine max
agcttagcactacagagaaagggtggtttgttttatggagggcctgtaatcatacactacattacgcatgctcaactaaatgccttttcatgtatataaaggcgtaggttggaactatagcttccctcaaatgatatccacatgactggcttttttgcgaacaaccttataggcgatgacaaaatatcacataaaagttcatacaatgctttaaagtttaactatggaacttaaaaatgttccgttacgaaaaattactgatgaaaacttgaagaatgaaaatcttttgaccgagtcactttttttggactatggagacctcaatccgcctatagccatgtgtcatggtataggaaatttatttctaccccacatacatatat

SEQ ID NO: 232546 - DNA, 425 bp, Glycine max
  unsure (1)..(425): unsure at all n locations
tgtttgtgtgtggacaccaactatggctgcacctatttactttctaacttatgaaaagagaactggctgagaaaatgaccggttaaaaaactatcttacattgatggcatcacaacctgcccttcggcaggggtgggacacacgacccgatggtgtgtatttcaagaaaggaagacacacagagtcgccaccatcttttatttgaggaaaacgtcacataaaccagaatggaagaggttgaaggtctgtgtattttgaaaatgagggtttgagagttgtttatgcacggngaaggtaatagctccccacgcgcccatcacaagagacgacaacctctaatcgagtgtgcaaatcataacttcaatattatgtattgtctctttctatgcttttttatggatatatccctttttatgcctttttta

SEQ ID NO: 232547 - DNA, 423 bp, Glycine max
  unsure (1)..(423): unsure at all n locations
ttaagtcacctgcggcatgcaagcttataagaacaagattgcgttaagctttttctatatgcangngaattaggacgcatcaacaagaatcaagccaaggctattgtgcaagcaatcaatggggcaaaacacaccaaatgattataatgatggatggctcaaattctcacaaaggtaaaatcatcactttcaaattgagctttcaaaactatcatgacatgtagagaagaatcaaggatttcaagtcacaaaatgtcaagaacttttattttcaaaacaattacccatttcttgaacatatcctataattcaaagaaaaacatgcaaagtcgtacgtgcacatgatattgacccaaatattaaactgaaatccgagaaactaaaacattaacaattaaccaactaacaaatagcaaaaccaac

SEQ ID NO: 232548 - DNA, 431 bp, Glycine max
  unsure (1)..(431): unsure at all n locations
tataagaacaaaanngcctcaatcattacgcaaaatgtcatgttattatgacgcatcaacaagaatcaagccaaggctattgtgcaagcaatcaatggggaaaaacataccaaatgattatgatgatggatggctcaaattctcacaaaggtaaaatcatcactttcaaattgagctttcaaaactatcatgacatgtagagaacaatcaacgatttcaagtcacaaaatgtcaagaactcttattttcaaaacaattacccatttcttgaacatatcctataattcaaagaaaaacatgcacagtcgtacgtgtacacaaaattgacccacaatattaaactaaaaatccgacgaaactaacaacattatacaattaacacaactaacatattaacaaaaccaactaaactatcataaccaaagaacact

SEQ ID NO: 232549 - DNA, 409 bp, Glycine max
  unsure (1)..(409): unsure at all n locations
agcttcctcctattggtgttgtcgattgtgtgngagatccatgaccctcatagtatcgtgttgtgttcagtgtatggttagattttgcattacctccagcataggccatatattataacctttgttcaagtaccttgctcttatcagcttcctgcatgtagatacacatttcaatttttccattgtgcttaagaaacagctgcagcatttgcagctgatatttctatcttctctctgcatttttcttacttgaaggacattaacaaaagccatttttttgtatttttcacacgtttttgttttcgtatttgacattnttgtcgcattaattaattatattatattaacatacaattagagaatgagagatgaaatctattaacaaattcaaaattttagtttgagcctg

SEQ ID NO: 232550 - DNA, 445 bp, Glycine max
  unsure (1)..(445): unsure at all n locations
tattaagctntaagcgtgctataattaaatctcttttttatttatgaaaacaaacaaatcctagactaggttggcgtaaaaacagtctagattctaagcacaaccacaaaacaactagggttggcccaagaaaccaagcaaatgtttggggatggttagtatttaacttcaccatgatatacctctgtcacatagtatattactggcataaccacattttcatagtccatattttctaggtcactatatccttcaacttgcagagttaatctttgatcaaaacaaagatgggcgcaaatacccctttattaatcttaaaggtttatcttagtaattcccaccatctaataattttcataattgatacatatgttntgttagctttaagatataaattaaatgacattagggattacaacttactttcggcgaaagtgtcacgtac

SEQ ID NO: 232551 - DNA, 378 bp, Glycine max
  unsure (1)..(378): unsure at all n locations
gatccttgagtcacctgcggcatgcaagcntgagaaattgccatgatcggattatctagacatacccattctggcttcnggatttgagatgatgtctgtgatgcttgtatgctcatattgcccatcgtcaactggtatggatgaaatgcccagttcccctacgtactgaagagagacaatgctgcgttcttattggctagagatagacgctactaaagttggaaggttaactctgaattctgtggtaaatggacgttaaagcgagctaatactatcttgaaacgctttctagcactgggagactgcttgcactgctgctaataaaataacttatgatctaagtgctcgatgaccccttgctctggccaaaatgcctga

SEQ ID NO: 232552 - DNA, 301 bp, Glycine max
acaccgactatgtacaccggtttctcatctcaataaggatcaaatgaagttcaaccgagcatgcgtgttgccttctccttaaatcacttgataaatgaaatctaacctgacgttcacgctttcacctccgttcaacccaaaaaggcaacatggttaataactcgtcccaatttcttcgtaggtcatcattaacttctcaaaatgtctttaatgatagacaataaaggaatcaatcggacgtatgtctacggaactttacgtgtagtgaagtgattaataaccaaagtgaaactgatactaa

SEQ ID NO: 232553 - DNA, 345 bp, Glycine max
gaaaccggtacacatagacaaggtgatcccctaaaagttgaagaagatgcaagtgccgctgtggagggcccctcaattaaacccggaaagaagagattcgttcgaaacacttccataattatggagcaccccatccaacaaaaatcgaaaacatcaaatgcatggaaaataaaaggcgcacatcccacaatctagaataacatctttgactctcgatgatatgacactacattcacaaaaaaggagattaccagagtccttggaatatgacaattaatcaattcatttatattttgggagaaccatattcccccctataaaaaacaggcagcgaggagtcatgca

SEQ ID NO: 232554 - DNA, 396 bp, Glycine max
tgtagagcccgaagaggtttgatctatatattatgtatagaactctgcatggcatcattcacatgattccaattagttatctttttctccataaattgcgttcagtttcatcttaaattttggaatgacattttttcacgatatattcaagtgtttctgttttcattatgtgccaccccatttgattaaaattccaaattgtccatgtttcatagttggaggaaatcaatgtagccctacaaccaacatgggaagctagggagcaaaatgctccctacaattgccaccctccccaaacagagggatattatgagacagcaacagcacattgcagcagtacattgagaattgggaatgttcatctccctcaatgcgtagaatgtgtagcagattgtg

SEQ ID NO: 232555 - DNA, 404 bp, Glycine max
  unsure (1)..(404): unsure at all n locations
agctnntacccacacaagcccttattactcatctctcttggctntaaccttaccagatttctggcaattcctttatacttatggttggatttacatcttccaattattaacatatctcgttgacttttccttgcattgtcacaagtattacttacactagtttaccgtcattattatgttagcactacatccttattaataataccatattaccataattctccctagtcaacataatgtttcctcatttaaactttatctatcattcctttgatactttgagttacccaccaagatcaagtataatgctactaatgctctatgacactcctaatcttcgtcataacttacaacatataattcctcatacctaggtcatacctttaaggtagtgtaaaacattc

SEQ ID NO: 232556 - DNA, 436 bp, Glycine max
  unsure (1)..(436): unsure at all n locations
tgaaggtgtctaacccaccatgtggcataatagaattctagtaatangnctactatcatcgttattatttctttggtcgtcattgagggaaacacttgggctgccagatccctccgcctttgggcgtattctttgacagatctgtgcccccttctttgcacatgttctgtagttgcatcctatccgaagacattatactgacactgcctaacggaggcaaccattaggtccttccaagaatggactcgggaaggttccaagttagtgtagcaggtagcagctaccctagtaagactttcatggaaggaatgtattagcaattcctcatcttttgtgtatgcccccatcttctgacaatacatctttagatgggtcntggggcaagttactcccttgtactcgtcaaagttcagcaccttgaacttggaggggtgat

SEQ ID NO: 232557 - DNA, 418 bp, Glycine max
agcttccaagagtattttgttgatgctcaagattattaaagattcattcaaacaagattaaagaatcaagaagattcaagtgaagattcaagagaagactcaagatatgcaagaacctcaagaaaagcatcaagataagtataaaaagaatttttcaaagaaaagagtgaataacacaatttgtccaaaagaatttttcaaagaaaaatcttttaccagagtttttactctctggtaattgattaccataaggcagtaatcgattaccaaagcacaaaacagttttataactgttttacaaagtagtaatcgattaccatgggcatgtaatcaattaccaatgtttatgaactttgaatttcaaatctcaagagtcacaacttgtgacaaaatattttcaaaatagtggaatcgatta

SEQ ID NO: 232558 - DNA, 423 bp, Glycine max
  unsure (1)..(423): unsure at all n locations
ngatgctcgagactcgactacgctaagtgttattgtctcacgctcagaatgagaccctcaagagagacgatggatttagtctggagactgtgctaaaaatgacatggtcatgctaaatggaaagccttctagagagcagtgttttggaccttgtaaatggcattaagcataacttagttgtaagcagagacccttctagagaaagggtacctagactaagcacgagacctttgggataataatcggtattcaaactctaactataatctactctttgttctttgatatggaacctagaacttggagttgcctgcaaaagagatgtttgagtttgttacctctcgatgtgttgggactctgtgcttagttntatgtatttttttttcttttatgaagtcaaccaccttgggcaagagttggatt

SEQ ID NO: 232559 - DNA, 367 bp, Glycine max
  unsure (1)..(367): unsure at all n locations
cgcacggangactcccataagttcggcatataaaattacactcatgattcgccccattatgatgccaagccttccaggaaatgaacattattgtgatctctgaagatacctctcactctatttgacaaaatgtgagcttgtaaagaactttttcctttccttgaattggagtatgttctcgaatcaccaagataaactggttcttctatatcccccacaatagcggaggaggcaaaaaatattcttattatcccagatgtgcgtggcagccccagagtatatcactctatgtgtcatattcatgacaacctcgcttaataaatgacattacaatgatgtcatcttcttcaactattatgtcatagtc

SEQ ID NO: 232560 - DNA, 416 bp, Glycine max
agcttggaattgcatttgtacacctattatgaatctcctatgttggacctacatacataaaaacagccccaccatcccaatttatacaaaatcatattcatacaccattggggcatttgaccgagcagttggtgagcgcatgtttggacatgaattgcaagagaatgggagcaatgtggcatgccccattgcttcagaatacaacctaggcctaaggccttttcattcaaatcctcaattcaagaaaacaagcaccaaagcaaaccaaaactgcctcacaaatataagcatgttctcacaatttaaggcaccaaaagatgaagaaaacacatcaatgggaagcaaaaacatcaaggatggaatacttacttgttggagtgaatagaaacaccaaaaacgaaagcaaaacgcgatca

SEQ ID NO: 232561 - DNA, 295 bp, Glycine max
  unsure (1)..(295): unsure at all n locations
cgtcgcagagcgtacagtcaaatctgggttctatctttggtagaagacnccacagaggccattgcctccctcgcccagtattatgatcatgccgttgaggtgctttacctttggggacttccatctctcacctatggtagaagaatttgaagagatcctatgatgccctctacgtggaatgaaaccatacctcttctcagggtgctatcccttattagctagaatattcaggatagtccaaatcttggcgcgtgaattataccacaggaagcaagtccaaaatggggtggatggt

SEQ ID NO: 232562 - DNA, 354 bp, Glycine max
gatgatgacgacctagagtccacatcagggtatatttatcttccacttgcgtctgcagccgtcgtcaatagtttgcctacttcaaagactcaagctttagctctcatagccatgcttattaattggagcattgcgttgaggcatgccttccaaaggcctgagtccaccacctgttggtacgggttgtggcgatgcgttgatttccgtggtgtgtgaccttaccttgtgctccaacatgggtcgatgcctttatcatagacagcagttcgtgccagtgtaacacacattatgttctattttcatccagatcagaacccttcggatcatactgcgaatgttgttacgacttgtttt

SEQ ID NO: 232563 - DNA, 436 bp, Glycine max
tcttatacaaggctcatctcggaggagaagctccttgttgcatggcttattacctaacggatggcgcctactgtaacgtgttctcctttgtgttacactgcatttccatggtggataaacgccattaaaggacctcattggaactccaagatacagcgtccatataagccctacatgctagcttacatcgcgtggatatcagagcacaagagctactgctatgtgctccatagaccatcattactttataatgctatacgcttctcttacattgacgtctgttcattgaatacaccatgactctactgacatgtattgtgctaaaggtattgaacttgatgattcacagcttgcaccgcatgaacgcgctatataagctagatgagatttgatatgcgccatactcgtgatatgaacttgaaccatgaatgtgatg

SEQ ID NO: 232564 - DNA, 419 bp, Glycine max
agctttcataggtgaaatcaggtgcagccatttcccttagagtcctctcacgaggtggaggttgtgccatgttctcagaatgtgcaaaatcagaatgctcagaatcagaatgctcaaaattataatgctcaagatcaggatgctcaaaatcaccaataacagaatgcacagattcaccagttatggaatgctcagaatgatcaaaaggtataaaatgatgcctaactaatctatgaaatgtcctatctatctcaggatcaaagggttgtaagtcagatggattgcctctagtcatacactacattcagcatgcacacaactagttgccttgtcatgtaaataaaggtgtaggtttgaactacaactaccctcaaatgatatccaaatgacttgaaattttgtgagcaaccttataaaat

SEQ ID NO: 232565 - DNA, 451 bp, Glycine max
  unsure (1)..(451): unsure at all n locations
tctaagcccaatttgacaacccagaaccaatttgttttggcatcacaatagcaacaagccttggcacaggctcatgcacaaaataaccttgggaattctaattatggtgacatggatcctcgtagactttttggtcttcctcgaggtagcttaagtgcaaaggatggccagtctaccagaaatgatggatctatttgctctcaaatgcagtcagattcacctaaggttgcactagctnttcaaaaattaaaaaaggtcaattagaatttagaaatattaatgtttgattaacatgtataatataatatctttaaattcaacgcacatgcacacacacacacatataagttctatgaattgcttgagtgagtctccagaacccttgatagttgatacttctatacataaacaaataagtacattntactcttganaaaatactaataaagaa

SEQ ID NO: 232566 - DNA, 428 bp, Glycine max
  unsure (1)..(428): unsure at all n locations
agctttgagccaagatcctgactcaccttanaccttgacccagcgtgagaatgtcaatccttaccctcggaagcaaaaaagaaaagaaggaaaatttccaatcaaagagaaagcaaaaagaaaagaaggaaaatttccaatcaaagagaaagcaaaaagaaaagaaagaaaattcccgatcaaagaatgggagaaagtaaaaaaaggaagaagaagaaggaaagaaagctcctgatcaaggatcgaaagaaaacagaagaaatgtgcagaaaggtctttggaccggacaatatctgaacaatacagaattgtcaccaaatgaacgaaaaaaaggaaaggaaaccatgacctaaagtggttntctccctttaattgccaaccaagatattgtgtgctagcgactnntttgccccgcactaaaccaaaac

SEQ ID NO: 232567 - DNA, 421 bp, Glycine max
tctggctgagaagacaaagaagaagatggaagaagctacacagtcaggacgcgttgatggcgtaatcgaccctccatcccccgtcagacaccacgtgaagtggaagatggtctgcaccaagaaaacaggggagatgacgactgaggccgcaaaggaattcactgagaagatcgtaagtctttttcaactaatcattagaattatatctctttattttgtgaatgccatgtacaaatgtgtcttttctatgcaggattcctttgaggagcaggcgacatagagatccttcgtcccccatggacgttaggatgttctcaccactgctattggacatccagagcaccctgtgcgtgtccatgctgctggagccagtgtcaccatcaagcaatacttcggatcgactccatgaacgtcccacaac

SEQ ID NO: 232568 - DNA, 422 bp, Glycine max
  unsure (1)..(422): unsure at all n locations
agcttgtacaattatgattccggctagttgtttctctagattattagacattctcttcctaagaatgaataaaatgtttctcgaccaaagagagagattggatgaatagaaaaggagcaattgtgctaattcacgttcaacgaatatcacttcattcacaccacaaacccggagttagacaattcttctggtttatgaactttatacaggaccatacaaatacaatgcaatgaacatttcggtgatggattagaaatgacagtcacaacattnttttttttgtttacagttcttgtttatgtcaggcagattgctatctgtacaatgtaagcttgcagaatgcagggtttggcatttcattacggtgctcgttcggcaccaagtggtttgaaagtcttctgtttcccattgcatttggaatg

SEQ ID NO: 232569 - DNA, 453 bp, Glycine max
  unsure (1)..(453): unsure at all n locations
tttcggaagctatttgacaccttctgtggcaacaccgatatgatggtaactttctgcttgattgttaaatgttaatttttacactcaattattattaattttattatttccttgatctgtttgttcaggttgtgatgcttggtcttgatgctgctggcaaaacaactatactttacaagcttcacattggagaagttttatccactgttcctacaattggtgggtcttattttttttttattaagtcttcatttaaaagtgcaaaatccttaaacatatttgttcatctttcaacttcattcatgtgacaacacgaattaagttattctgtctggagaaccaaaagatgttntctgcttggcttttgtttctttcattgcataaattcgaggattagcagacttgtatatttgttttgttgactctgtaatgactctcgaagccttcttatgg

SEQ ID NO: 232570 - DNA, 422 bp, Glycine max
  unsure (1)..(422): unsure at all n locations
agctgcagtggaggggtttctgattttattgataantcttcgcattccccaccatattagtagatccacaattatataggacagctggagacgacaaggaaatattggaacaagtatgttggtaagttagcccagcaaatatttataaaattatcaaaatcggattaaaaaaatattgtgtcagcaaaagacatacccaataactggcactttgaggaacacgttccaaagggtgggggaactcatatgttggcctgcatattcaaaaggtatatttaagtgacctcaaatatttaaagaaataactgacaagggatgataaaagactgttgcattaattaaaacatttttgtactgtatgaacaatgaanatcaattcaagaattataaatctatttatatctttggtaataaaaattatc

SEQ ID NO: 232571 - DNA, 437 bp, Glycine max
  unsure (1)..(437): unsure at all n locations
tagcattcaggctgaagcttagttgttttcaactcttattgatttgggcttagcttaaccttggctagcttagcggaaataatcaacctcaggtaccagggttgtgcgctaagcgcttgaaactcgtggcttatcgcatgaaagattatgcgcttagcgagaagcaggcgcttagcaaaatgactaattttcaaaaatgattttctaagttttaaacttagtcctttcccaggaaattgtaaccctcaagtttaccattcaaagggagtctgatatgctccaatgttcagattatacagcaagttcccaatgatccaatgcatgaaaaaccaaaaataacacaaattgaaactgggttgcctcccaaggagtgcttctttaatgtcattagcttgacgcttttacctcactaggcgatcttatgttntgtgtctcac

SEQ ID NO: 232572 - DNA, 408 bp, Glycine max
  unsure (1)..(408): unsure at all n locations
agctgtgatggtgtcgagaagttatcttatgtttgtcatcatcaaaaagggggagaatgtgaatgtatgtatacatgattttgatgatgtcaaagaagaatctaacaaggctgcttcaaatgataagcatttgcttcaagaataattcaagattgcttcaacaaacaaagccttgtttcaagattcactaaagaccaagccttgccttaaaacaatgtgctttcaagacatgcaaggctctggtaatcgattaccaggaagtgtaatcgattatcagaagacagggttgagaaatagctgttgaaaaaggttttgaatntgaattttcaacatgtaatcgattaccatatgcctgtaatcgattaccagcaacgaaactttggaaattcaaattcaaaagtcataacc

SEQ ID NO: 232573 - DNA, 462 bp, Glycine max
  unsure (1)..(462): unsure at all n locations
gacctatgaaactcagcttaagaggatgccttaatggaggagaagattgagagatcgggggagcacganattgaaggaataaaagagggagagaagtagaactttgaagtgtgtctcataagactttcattcatcaaagttacaacaagtgttacacatgcttctatttatagaataggtagcttcctcgagaagctttcttgagaaaacttccttgagaagcttctttgagaaaacttccttgagaagctagagcttagctacacacacccctctaataactaagctcaccttcttgagaagcttctttgagaaaacttccttgagaagcaagagcttagctacacacacccctctaataactaagctcaccttcttgaaaagcttccttgagaagattcctaaagaagctacagcttagctacacatacccnctataatagctgtcataccctaatttcg

SEQ ID NO: 232574 - DNA, 411 bp, Glycine max
  unsure (1)..(411): unsure at all n locations
agctntacagcagattttagtaatgacccactaacctagaattaaaataacttaatgccattaacctagggaattaaaaaaaacttaatggctgagtgtaactgaaattgtggcaaccaaaagtcacccccaacagccaacaagtcagccaccatttggtctcccaaaaggctgatgcctaggttgccaattgggcccttattacaacttgaactaaacctaactaaagcccttttaattgattaacccaaaacatatttttggtcagccaactttacaaggattgggtcattatttagacaaactaaacactctaaaaattgagacaaagtggtgtcatttagtcctcctccatttgggccatgatacaactcacaaccttggacttttctccttgaaacttgggcttgt

SEQ ID NO: 232575 - DNA, 448 bp, Glycine max
  unsure (1)..(448): unsure at all n locations
tgtangattatggggtacccatcacatgtggtactatgtggcggtcgggcgatggtgcacaacaagtttttccacatccacaatgcgcgcataaacccaccatcccctgttgcccacctccaactgagctcacgtactcccacgtagcccatatcctcgtttctctcaacaccggttccccatcaatcctcccaagcttccacaacatccaagcaaaacaaaattcacacagcacgagctatcacagccaagcaaaacaaagcaaaggcagaaactctgctcaacacatcaaccaaaatcacagcttttctcacgtaaagaccacagtaacaattccttcgatccaattcgttaaccgttggatcgactccaaaattttactagaagtctatagtgcataagcctacattatgaccgttgggatctactagaaaacatccagaactca

SEQ ID NO: 232576 - DNA, 414 bp, Glycine max
  unsure (1)..(414): unsure at all n locations
agctnttgcaaagatacctatgttntgtaagcttattattgttagggtttcttctgcaatggctagctaaacaccctagttggggatttctaatgaacaactgatgtaaatacctaatatctaattgattatgttttatgtgttcaatgcttccttcaatgcttaatgtttgtatgcttttggtctgatcatccatttgtgtgcatagttaggtgactttagcattgggaaatgtactgtttccttagaacttgattgaagcaggatcaaaacttagtcttacaagagggatctgcagattaagttttggttttcattatgttgttacaataatgctgtttaggctaggcctagtcttacaagagggatctgcggacgaagcttangctaaattangctgaacttttgtaagct

SEQ ID NO: 232577 - DNA, 448 bp, Glycine max
tctagccaaatagacttaccttgacttaattcctttgatagcccttttgagccttgtttccctttccttgttttgaagctcactacaagccttaagtgaaaaaccatgatatcaccatatccttaaggaattttggagctttggaattgttttgggaataagtgtggggctttttgtttcattgaataacatgttttgttggccatgcttcatgatatattttgagccatacttgatgtacattgcatattggttaaatattggacatgctgaatatgatgttgtttctcaaaggctacagagttaaaaaaaaattataaaaaaaaatcgaaaaagaaaaagaaaagcattaaagttgagtgaataagatcttaaatgacaaaagaatgatgagactctcggttcctactctttatgttacaatttatctttacttctttttaatttt

SEQ ID NO: 232578 - DNA, 276 bp, Glycine max
agcttaatagacgcaggtcgggtagattattgtcaaacgtgcacgagatgcgaggaggatataccaaaatctttgcattggtatcgagcatgccctcctgatgaaactggacattgctataatgatgcgccctcacattacacaacgagcataatgtcaacctttacgggatcaatcgcgctattgatgaccctaagagaaaaagctttgccttttggttacgctatgtcgcgatcgtttatgaataaaacatacaacgattctttgtcatatgct

SEQ ID NO: 232579 - DNA, 131 bp, Glycine max
gcttgagcctctaaggaagcaccgtatcgaggtgagcttaccaattcaatccgtgtgtccagccaatcactcacttatcatggacgttctcgaacccaatcctgtcaccgatgatctctcatgaaagcttc

SEQ ID NO: 232580 - DNA, 419 bp, Glycine max
agcttgagctgaatgggctgatcaatgttttgacaaagtaatagggatagaggttttagatgaattgataatttggtgtgtaattgaaggctcttgagttctgtaactcctgttgtgagaggtaatgggagcacaggaaatatgtatataaaggcaagttgtgtgggcctacgggaagtatgattttttgtcgggatagaaattggaaggggatacatttgtaggtttgggttattcttgtttatgcatcacttgcagaaacacctataacctgacacttttatgtgtgtacaagttcttaatggattccaaacatccatgatgatatgaaaataagttgaattatttatccagaagattgtgaaagatgtttccctgaaaatattcttgttatttgtttaactcataaagtgtgtggg

SEQ ID NO: 232581 - DNA, 438 bp, Glycine max
ttaagggttgaactagaggatgtatgctttttcatctttgaattcttattgttgtttaactagtctcaccacattataaatattttcaattcaaataaaactactgttcgatcgtaaagaataccaatcatttagagaaaaaaaaaaaggaaaaaaaatagaataaattttggcaggacgcatacaggggaggctttgaatttgctgggccattagtcgctttccactcgagcggcagtgacttgttgagacgtgagacttgagaaggagtcaagtcttgtgtctttgattacaactacaaattgccttttggacagaaaaaagaacaaaaaaataatgagcaatattgcatatctcttattctgatggtggagaacattgttatttacaaagcacttgtatccatgagaaaataatgagccaatataacacttacac

SEQ ID NO: 232582 - DNA, 406 bp, Glycine max
agcttcctcggggccattcctgcgaatgcaaacatttggaaagttagtttttaccaagaaatgctacccttaaaacaaaaatggcatacaaccccctccaataaatacaaacatcaatgtaaatttagagcaagcttatgcgcacacttctttacgaacgttcacttgcacaagacattcttataactaagaaaaatgcacccatatacaatcaaggcaccttcgttacctagattattcacatgtacttccaaggtgtatttgttacctacatcacacacatttcctttgctaaattcacatacatgcatactctaagcactttggctatcaaaaattgcatacgtgcacatcttggtatttctcatacctatacatacacaaacttcatgatgaatcttgacta

SEQ ID NO: 232583 - DNA, 458 bp, Glycine max
  unsure (1)..(458): unsure at all n locations
ggacctataaaactcagcttcttataagctgaaccattgtatcaataaacacatgttgagttntattcagaaaattagagtttatctcttttatcttagtgagagtgattctcctaaattcttgagtgattcaagaacaccttggctgtatcaaaggactttcacaacctttgtgtgttgccctcgctggaaagagtgattctttccttcctttcatcatcacccttgttctttcaaaccacaattccagaaaatccacctctacccagaattatctcgtggccataactcccattttacgcactcaaattaagtgattcttgagcctaaattgaatttcaaaacgagacctttcacctcgtgttggaatcacctcatttggagccctgtagcttcagttattgccatttctatatttctgttcagccaccacttaacctacgttttaccatcccatt

SEQ ID NO: 232584 - DNA, 414 bp, Glycine max
  unsure (1)..(414): unsure at all n locations
agcttctgatagaccgagcagttctattaagattnngaatatgaatatccttacgctctgcagatatataaggtgacattttaggattccatttttttagtaccgtggccaaaatgaactcctgcttccatcatctcttccaagattatgtttcaatatctttttgtcatttatatttattcccacacttttctttcatttcaaaatcgaaattctataaattttttgaaatgaaagaaagagacccgatataatgaaatagaaataagtgttccaaaggaaccttctctttaaatgatcgggccaagtcatgagtatgagtagttgctaaaatatattacttcttattcgtttaaaaattagcaaattcctttatttatgaataaataatatacattaaaattcttctatact

SEQ ID NO: 232585 - DNA, 422 bp, Glycine max
  unsure (1)..(422): unsure at all n locations
tanagagacaggagtaatggagtttcctaatccctgtcctccccaagcttcttgcaactctctctcccttgcttcacggcgagtcattgaaaaactaactgagttatctggctgctgagcaacaaccatcttttcttgctcaagtctggatttatgtttaaccaacacttgatccagaccagcttcatttgtttccaaatgaatgtttcctaagctcagtcctccccaagttatttgcaactctttctcccttgcttcacgacgagttgttgaaagactaactgagttctctggctgctgagcagcaaccatcttttctccctcaagtctggatttatgtttaaccaacacttgtgtcaggccaccttcatttgtttccgaatggatgtttctcggacttctctatactgtgccccattctt

SEQ ID NO: 232586 - DNA, 256 bp, Glycine max
cgctcactccagaggggagatttttttcaggatttctagaacttcagaacttcaaaacttaggaacacaccttaaaaactgttacctgtgaacatgataagaaactgaaccactaagtcctcttcttttatcttaatcgctccccttctcttcctttttttctcacaacatctccaatttaccaagcactggggaaccctctcctgccatccaggagggccccccccttcctgctcgtgctccgggaaaccttaga

SEQ ID NO: 232587 - DNA, 247 bp, Glycine max
atctagggagggctcttacctctcttcttgcttcgctgcatccctagggaaatcccattaagactatgactcaaatcacctcataagcccacagcaagctcatcactttgctctactatcctcaattggataggaactcaacctcttattcttgataattgggactaaaatagctcgggtttcttcactaaatgcaacatgctttgtaagatacaaacttcactgatagacacattgctttcgataa

SEQ ID NO: 232588 - DNA, 477 bp, Glycine max
  unsure (1)..(477): unsure at all n locations
acctgcggcatgcaagctgccgcccagctcgcccaggcgagttatgttgtcttctccagaagcaacaaccttctggaggaatcttctggaaggcccatgtgggcctgattgctatttacaccccctttttactaaatgcacccccttttctatttttntgtaattctttttccgtaacgttagaaactttacgaatttcgtaacgatacttattttccttccgtaaggttacgaatccttacggattatgtatttactccttttttacctttcgaagaagtcacggaaacttacggattgcacataaacacctcttttgacttccgccacattgtataatttcacggatcgcgcaagcctgcttcctttatatttctgagacgcctcgggacttcatttgngtaacaaaggaacgccagtatctcatagcggctaaccaaagatctgatgtcatcaagttatatatccccgacaaaa

SEQ ID NO: 232589 - DNA, 428 bp, Glycine max
attgagcgacaagacctctaatcaggtgcaactcatacttactcctcataaccatcagaggaaaaacttagcaagtcaagcaacctatcctcagactggttggcatgaccttcaactaggggcaagtttaactactcctcaagagcatcaggggagaagctccgccaagcaaaaggaagccccaccaaatgggtgacaagacctttaactaggttgaaattaaacctaaaatgattgtatgtcatctagtttttacaaaaccaccatggtcctacctctacatcgacaaagtcttgcttcctacgccatcaaagattccacactcacgacgtcttattcatactaccacaagtatggagcattgcgtatataaaggccaacatataaacatacataaatagtgcaaaattcaccatctaaggaaagca

SEQ ID NO: 232590 - DNA, 321 bp, Glycine max
  unsure (1)..(321): unsure at all n locations
gctttataaggcccnagggttctcatgagccttaaggtatatttccggcccatgggctaagtatgaacccacttatctttgtacatagtagattaatatttcttttattctgtgccttgtatttaaggctcatcttgtagggtgggtaccctatacatgtaagatttttcagcccttgtatgttagggctcctagactaggttttgtattatgggtagtgttgttatttcacatgcatcaaatgaatatttgatgtgtgtgtggagaaatatatttaattgaattgggagaagcccgatccaattctatattataggggga

SEQ ID NO: 232591 - DNA, 370 bp, Glycine max
tcacaccccctataatagactaagctcactctcatgccaaatattcatgaaaattcaaaatataaaagtccctactaccaagactactcataatgccctgaaattgatagctaaaaccctatatactgaatggccaaattacaatgcccaaaagatggataatcatatcctaatatttacaaagaaaagtggacccaaccatggcccatgggctcaaaaatctaccctgaggctcatgaggaccccatggccttttttagcatctctagcccaatcctcttggagttttctatacaataccctttggggggggtatgattgcttcattaaggattacaataatagtcatacaacttctctgacatacagt

SEQ ID NO: 232592 - DNA, 396 bp, Glycine max
  unsure (1)..(396): unsure at all n locations
tgacttttccatgggagaagtctctacatattgcctcccttgcccagtattatgatcagccgatgaggtgcttcacctttgggaacttccagctatcacccatggtagaagaattttaagagatcctatggtgtctctatgggggaggaaaccatacctcttcacaaggttctatccctcattagctagaatttccatgatagtccaaatctttgcgcatgaattataccacaggaagcaagtcgaaaatggggtggttggaatgccgagaaaatatttggaggcaaaaacaacaatcttgncacgttaaggcgagtgggccccgttcatatatattctcgcactgcttgatttcggaagatacctctttcgaatgtgattggttggggaccttgc

SEQ ID NO: 232593 - DNA, 422 bp, Glycine max
  unsure (1)..(422): unsure at all n locations
agctnagaaaggagacgattttgttattctattgaagnnggtattaaatcagaattcagcccatgccaaatggttaggccactgtttctgtttggttccagttaaacacctcaaataaaactctaagcacctgttagctacttcagtctgtccatctgtttgtgatggtaggcactgctcaacttcaattgagtcctgcccttttgaacaactccttccaaaacaaactcatgaagagtctatctctgtcagaaactattgaagcaagaaaaccatgcagccttactacttctgtgatgaataactcagctacttccttggctgcacaaggataactcaatgcaaaaaaatgatcatacttcgtcagcctatctactaccaccaatatagtatttttccttgagcttttgggatcccccatg

SEQ ID NO: 232594 - DNA, 370 bp, Glycine max
  unsure (1)..(370): unsure at all n locations
gccatgagagttnttgttaggtctgcatactctttctttgatgataagncaaaagattcttcttatgaagttgaaatgaaatgagggctattatcattgattattaataacgctgatgagcttctgatgaagtttttaaggaaactatttttgtattttttggtgatggttgtagaaaaggtgatctttcaagagatatgggtgtttttccttttctttattcactctttggcatatcaagaggattggtagtgatccttttttgtggaaacaaagaagtggatttgaaagatttgtggctaagtttgggatcactaatgagacactctttaattaatattttgcgtgagtgtttggggcatttttcatg

SEQ ID NO: 232595 - DNA, 442 bp, Glycine max
  unsure (1)..(442): unsure at all n locations
agcttgccaacccatggaagctcctaatatctcccacactttttggggtgggccattcttggatggccttgattttctcagggtcattttggaccccatttctaccaactacaaaccctaagaaaactatattatctacacaaaaagtacacttcttatatttgcatagagggtgtttttcctaaggactgaaagaacttgcctgagatgtcctaagtgatcatctaggctcctactgtacactaaaatatcatcaaaataaacaactacaaatctacctatgaaatccctcaagacatgatgcataagcctcataaaggtgctgggtgcattagtgagcccaaaaggcatcactagccattcatacaaaacaaaattggtcttgaaagcggttttccactcatcaccctntgtcatcctgatgtggngatacccactttta

SEQ ID NO: 232596 - DNA, 408 bp, Glycine max
  unsure (1)..(408): unsure at all n locations
agcttaactcatccaaacatggcaagttcaacatggtttcaacaaatttcttcacaaataaccatcatgaagcagaaacctagcaagactacccatcatatctcccanaacccaatacccacgaaaatcaagtgagaaagaagtccacccaaacctgaaatttcgaggtccacacgtagagatgcgcttcacgactcccaaaatgccctcctttcgcgatttggagcagaaatggtgaccaaaggttggagctttgttggagcttcaatggtggaggaagaagaagagaatggcaacgtgagagagagaaaagagctttctgaaattttctttggctgagtgaggagagagaaaacaactttntggttaaaaagaaaagcttctctcttttcttttaatttaatttaa

SEQ ID NO: 232597 - DNA, 407 bp, Glycine max
agcttgtctcaacgtgtatgcgagacatataccttcctgtattaatcgtcgccaagtaccaagaagagttaggtctagccacggcccacgagcatagaatcgcggatgagtatgcccaagtgtatgcggaaaaagaggctataggaagggtgatcgactctttacaccagaggcaaccatgtggatggatcggttggctcttaccttgaacgggagtcaagaacttccccgattgttagccaaggccaaggcaatggctaacacctactccacccccgaagagattcatgggcttctcggctattgtcagcatatgatagacttaatggcccacataattagaaatcgttaggaaacttgtatggtctctcagaccttgactagatacgacttccttttttttgaat

SEQ ID NO: 232598 - DNA, 439 bp, Glycine max
  unsure (1)..(439): unsure at all n locations
agcttgttcaaagaagtcattgtatctattcggcaatgaattagctgaagaaacatgagtcacatctgacccttcagattcacaaaaatatcttttcattgccttctgtaacagcatggaaagcaatctatgtaatggaatgtgtacagatatatcttgtgaataacatcataggctatntgtggccaatcaggcaatgacaaaaaacgcggaccatctgattccacggggaaatcttcttccatggcattatcatcaaacgtgggacgcatacaggtattttctgaatcaatttcattattttcagaacactgcttaccatgatcttcactagaacttacaagcctaccanatgtatatctaccccttccaaacttggatattgttctcttaaatgctgaaaaaatgccatcacagacagcaccactgttcggagatg

SEQ ID NO: 232599 - DNA, 345 bp, Glycine max
  unsure (1)..(345): unsure at all n locations
caaatttaatcatcctgcttggatgaaagataanaattggcgcaaatgaagagggtgagagtgaaagggaaacccatgctgcgactgccatttctatacagccaagttcccaccaacccaactatgtcattactcagccaataacaacccttctccttacccaccacccagttatccacaaaggccatccctaaatcaaccacaaaacccaccttccacacaaccaatgctagacaccacctttagcacgaaccaaaacaccaaccaaggagggattttgtagctaaagcctgagaattcacccaattctggtgcctatgtaacttgctcattattacttgtact

SEQ ID NO: 232600 - DNA, 419 bp, Glycine max
agcttatgagaccaaaacatgacaaagaacgtttccaacaatctaattctcacactaatctagtatatcttggcctattctttatatagctttatgattacccaattgattcaagaactaagggcaaccctgcatattcgcgtggtaccatggactattatataaaatatttctgatcatcatcaataagaaaaatacagatattgttgataattaattgaacaatagtatattaaaatcaaataaatatcttgtgtcacaaatatactgaaagcgcactcaattcataataataaagcaatcaaacgtacaatttatatgtactagaaataagagaaagacacacattataatcatagataatattttaaagcatgaaacaagggaatagaacacatcaatttcacaatttcacatcg

SEQ ID NO: 232601 - DNA, 470 bp, Glycine max
  unsure (1)..(470): unsure at all n locations
agcttggagatgcctcaatggcatctcctttcactgctaagcatgcatctgttgctcccaccactgatataattcgtcaaggtaggagtaccctattgacaaccctccagatgtttaaaattctgggtctcaattgtcttgctactgcatatgtgttgagtgtttgtatctagatggtgtcaagctaggtgacatacaagccacaataagtggtgtcttcactgctgcatttttcctctttatctcacatgcacgccctcttcccactctttctgctgaacgtcctcaccccaacatcttctgtgcttatgttttcctttccctcctgagacaattttctattcacctgctttttctgatctcgtctgtgaaagaaagctgaaaacacatgccagatgaatgcattgagcctgatgcagattttcatcccaacctggtgaatactgtntcctatatggtgagcatgatgc

SEQ ID NO: 232602 - DNA, 429 bp, Glycine max
  unsure (1)..(429): unsure at all n locations
agcttatgctgcatacatctaccatanacctcctcaacctcagcagcaaaatcagccacaacaaaacaattatgacctctccagcaataagtacaacaccgggtggaggaatcatcccaaccttagatggtcgaatccttcacagcagcaacaacaaaacaacaacaaccttatttcccgaatgttgctggcccaagtagaccatacgttcctccaccaattcagctgcaataacaacaacagtaacaaccccaaaaacagcaaacagttgaggcccctccgcaaccttcccttgaagaacttgtgaggcaaatgactatacaaaacatngcagtttaacaagagaccagagcctccattcagagcttaactaaccagaatgtnacaatggctacgcagttaaatcaacagcagtcccagaattctgac

SEQ ID NO: 232603 - DNA, 425 bp, Glycine max
  unsure (1)..(425): unsure at all n locations
gacaaaaaatgggccaataaatgaagcgggagttatgtctttacatatccttgctcacaaatttaagtacaaaatagtgtagtttaataaatacaagtttaaataaaaaataaataaacaattcaatatgtagaatagaaaggatgatgtatctacaaatatgttagcattatatttaaggtttatttatgtgttacatgagtgggaatgatctatttattaaaaaaaaagttagacttagactttttaaaaagtcttttttgattaaaaaggccaagttttaggctaaaaaaaaccttattaagcctggnagaattacttggttatataatattttatatatattacatattacataaatataacacatatgtgatatgtatatttaataatgaatagtaatattaataataatgtgtataata

SEQ ID NO: 232604 - DNA, 413 bp, Glycine max
  unsure (1)..(413): unsure at all n locations
gtctaaaaagacgcaaatcctgattcatcatgctnttgataaaatgcataaaatactacggcacatgaagagggtgaaaaatgatggagaagcccatgctgtgactgccattcctatacagccaagtttccaccaacccaacaatgtcattactcagccaataacaaaccttgttcttacccaccgtccatttatccacaaaggtcattgctaaatcaatcacaaagtccgtctaccgcactttcaatgacgaacaccacctttagcacgaaccgaagcaccaaccaatatatgatattttgcacgagaaagcctgtaaaattcaccccaattccagtgtcctatgctaacttgctccatatctacttgatacttaatggtagcctaacccttccaaggtcatcaacctcatt

SEQ ID NO: 232605 - DNA, 437 bp, Glycine max
  unsure (1)..(437): unsure at all n locations
ctgcaagctgcatttgccatgggttctagatgcatttcaacaaatgcttctagaaattggcgagcctttgcagccccttgagacatgtcatcgggttcaaatgctctcttacgtttagaacctacctgcaaaatataattgcaaatttttagtgacattccaatgacgtagtttctaaaatgaagagaactatagtaacttttttattataattttgcagagagaagcacagatttcctgtaggaatattgaggctactatttctgacattctttttacgaaattcagacaactaanaaaaggtttctgacatgttaacaataaaatattaaaacaagaaattaaaagtagctcagcaaacagaggcacacacgagacagtgacatcctttgaagnttgaacataagtattatattaagtacatgagcaagtgacat

SEQ ID NO: 232606 - DNA, 376 bp, Glycine max
gagaggggggagtccaaattgatagacgaaaaacgggccagaagttgaactttgagtttctctcaccagactctcattcagcaaaggtaccataagtgttacacatacttctatttatgcctaggtagcttccttgagaagctttcttgagaaaacttcttgagaagactttttgagaagctctcttgagaagccttcttgagaagattcctagagaagctagagcttagctatacacacctctctaataactaagttcacctccttgagatgagaagctagagcttagctacacaccccctataatagctaagctcactcccatgcgcaaatacatgataatatataagaagtgcctactacatagactacttca

SEQ ID NO: 232607 - DNA, 358 bp, Glycine max
ctctacctttgaacagacattttggtcaagtaagttcttttctgcatcaaactgatcaaatttgatcttctgatcatctatgtgcatttccagcttacccttccccatatccaccacacaatggcggttaacatgaagggacgacccacaatcaaagggatttcaaaatcctcttcaatgtctataacaacaaagtctgtatggaaggcaaactgctgcaccttgactaaaacatcttcaatcacaccatacggccttgtaatagatctgtctgccagcagtttgcctagagtcattctagttgccataatctccaactctccaattctcctacacatggagagaggcatcaaattat

SEQ ID NO: 232608 - DNA, 397 bp, Glycine max
tcatgtctgttttaacaccaaagtggagcccttttttcttcatttgcatgagctgaaccaaggggaaaaggggtccatttctttcttctgtgcacccttaatacaagcgctcttggagggtaccttccattcatagcctttggaaaggggctcttaatcttctctctcttattgttgtccttagccaaattatacaagcctctcattcatggtcccaaatttcattttcattcttataagtttgagacatcaatgacctgaaccccttgttcatcttgaccatttcatgtaacgtcatcatgttaaggtaggtctctctaactctcgaccctatgattgttgataacttccttgacatgttgtttgaaatttcgagcttgtttcctgcttgaattat

SEQ ID NO: 232609 - DNA, 415 bp, Glycine max
  unsure (1)..(415): unsure at all n locations
agcttcacacaatgtatttntctcaaacttgagnnttataatactaantactaagtcttttctgacttgatgattgatatgatgcatgtttatgtgtgtatccctacaatgccataatcaagaatcaccaatcttacttactaaaccactaagttcatgaaatatgcatgtttaatggtttaacatatagatatcacctatccttttgctaatatggacaattgtcacaaagttgactaatgctcaagaggttatgctttattccatcaacatataaaacattctttatttgtgtcttgtactgantttcaatgtttccttctcccataatattccctttattggtgtcttcanaagagatgtatcctctttcttttgatacaaagtcagtaagtttgaacttgtcacccatcat

SEQ ID NO: 232610 - DNA, 417 bp, Glycine max
  unsure (1)..(417): unsure at all n locations
agctngataaataaatagaaatatttatttatgccagaatattggntcacaggcaccacaaggatagctaagccaaaagttgcacaaattataattatggcttaaattatttgttgttattattttaggaagtttacttttgttccgtcaaatttaaaatgtgatttttcgtaaattaaaaataattcaattttgatgcttatcagagacttaaaaattacaaattgggaatcgaaagtggattatttttaaattacgagactaaattttttaaagaaaatttaaggaactaaagcaaatttgagtcaaatttaagggaaaatattattattatttttcgataactntattattattattattatngaatggtggtttgctttttttagtagacacgactaacgagtaatgaatgag

SEQ ID NO: 232611 - DNA, 277 bp, Glycine max
ttaaaacctgagatagccacatggaaagaaatgaatgtgtttatgaagaacacattctttccaccttcttgtgagaaagatgcttatgaaaggcttcataacctccacatagatccagaatcttgagactccatcaataatcgataatgactatgaggagagcttattacaagagcctaaaactttcatggcaaggttcctatgtgggcttaataaagacattcaatgcattgtgaagttgaagcactatgataagttggaggatatggtgcacaaa

SEQ ID NO: 232612 - DNA, 448 bp, Glycine max
  unsure (1)..(448): unsure at all n locations
agcttcatgtaacttattatattancatttctatatctctgnngcgtatatgatgaccaattgtgatgatatgaatacatctccaaagcaatcatattaagatcatgtgtagttaactgcaaggttattaacaaatctgcaagttgtaacagcttctgacatatactttttgcataatttcatacataacaaaattcacctcaactttatcttgctaaccttgcaacatgagttctttagatatgatttatttactgcagttccagtttaagactacatgtgtttgttagttactgtgtgcaaaattgtattgatagtgtaagagttacgtgttactcattgaataaatacttgattgttgtatggctaatgtaaatcaacagatattttgatgattaatgttatcaccacgaggtncaggttacactgatgcatctatcttatgaat

SEQ ID NO: 232613 - DNA, 376 bp, Glycine max
aactaaaggaacacttgattatgttcacgctaatctctagtggccatcaaggattccatatcactttggtgcaaggtacttcttgtccattctaaattattactctcgaaaactttggatctacacctagaaactaaagatgaatcatttgagaacttcaagactggaaaacacttgctgaaaatcaaacaaaaataaaagtaaagagattttgaattgacaatggacttgagttttgttatgatttcttcaatgattttttcaggaacatgggatagcaaggcgcaaaacaattgttggtactcctcagcaaaatggtctagcaaaaagatttaatataaccattctggagagagtgagatgcatgttattgagt

SEQ ID NO: 232614 - DNA, 357 bp, Glycine max
  unsure (1)..(357): unsure at all n locations
gaagtgaaattgagaatgaaagtaaattggagcaaactctcacgtcacacaagtacataacatcaatttaaacgtgctcgaactggatttacacctaaattctaccgaatcaaaatttgactcctcaacacccaattttaccctagaaatggctctttgctcactatggacatttgtctttctctctagcacagcccaaactttctcataagtcctaaatgacattacaagctaggattaactcactntaacctccagataccactaaatccagatatggccttccaactctcatagactcactattgttgcactcataacaccatatcctcactttctaaccctaggttaactcta

SEQ ID NO: 232615 - DNA, 375 bp, Glycine max
  unsure (1)..(375): unsure at all n locations
ttttttacttcttttgttcattctttagattggacttaattgtgaccaacattggagaaatatcaagacctcgtgtcttagagcatatcattgatgttgtttgtatttggaagtgggaccttggtatactcttattcctttnggtagntgttaattgataaagctgatttgtgtccatcattagagaatgttactgcataagttggtaccttaataagaataattgctaattaccttttacaatattacatttcaactaaatgtgttggtttatttgtaacttaattttttctttgcatattacttggagtggggctggtgaaatcactggatttcatttcaatntttccatgctaattgctcatattaatgctc

SEQ ID NO: 232616 - DNA, 388 bp, Glycine max
  unsure (1)..(388): unsure at all n locations
tgagaacctgngatgtacctaaacaggcgagctcctggcagtcaacagataaaaggaacaaagaccactatgcatggaggcttgtggtggctggccaactgtgaattttgtgtaatatgtggattatgcctctggtaatcgattaccaagggtgggtaatcgattacaaggcttaaaattgaagacaggaggctaagatggtctctggtaatcgattaccaaggggtgtaatcgattaccaggcttaaaaacgaagtcaggaaacttagggagcctctggtaatcgattaccagcctgtgtaatcgattacacagaggaatgggtcactggtaatcgattaccacgcatgtgtaatcgattacacagtgtatttttgcatatttcatg

SEQ ID NO: 232617 - DNA, 306 bp, Glycine max
  unsure (1)..(306): unsure at all n locations
tgtatacttctggggttatatcaaattactttttaagaaatgtatgtaaagtgtaaacatgttatcaatcctcttgaaatcttccgccattatttcagatttgtatttcttatgacagantgttctcattagttatattttctaccaagtacacatttatgtttttgggatgttgtaatggtgaatttcttgttcacgtgcttaaggcaacagggtgagtgttcaactcgaatgttgtgcactaaaaagaaaaaatgaaagagttttaacttgatgaaaccatgccaggntatctcattggtgaat

SEQ ID NO: 232618 - DNA, 363 bp, Glycine max
aaaaataacgagcctaatttctaaaatatctttcatagtctttaagaataaattcatcttacgtttatgtaagaactggtaagattttcttaaaggaaaacatgaatattttctttgttcggaaatttaaaaattatgagtaatgtatatgtatttactatcttcttgtgttacggataattttagaaggaatcaggtcactgtctgagtgcgctttcacgaattgagtgcttttgtttggttcaatttatgcaatttgcttatattttaaataacctacatacatttgaaagttattaacttttttttctctcacttgaagaattcattgaagttagatactagcctctatctaatgataaa

SEQ ID NO: 232619 - DNA, 427 bp, Glycine max
  unsure (1)..(427): unsure at all n locations
agccttagacaaaatggatgagtttggttgtttttcatgatatnctaattgaagaatttcaaggttgtttatatttacctcttcatctaatccttctgatgtagtgtctgtcatcaagtaaaggttggcttcttcttcttcctttgtttcttcatcagaagactgtggtctagttctcctcatgtgttaatcaatactttcctgtcctttggtttgaagtactttttcttgtgagccgatttatcaaggtttggacattatgacttgaaatgtcctgggttcttgcactcataacatatgatggagcttttctccttatccattctttctttatgtggtttcttggatcctttccagtttgatccactccttttcttccatatgttccttacttcctcatgatgaagactaactgatcatcttcata

SEQ ID NO: 232620 - DNA, 359 bp, Glycine max
agcttatgcgcatactgcttttttaattttacttgcacaagacattctattaactaagaaaaatgcacccatatacaatcaaggcaccttcgttacctaaattatttacatgtacttccaaggtgtatttgttacctacatcacacgcatttcctttgctaaattacatacatgcatactcaaagcactttggctatcaaaaattgcatacgtgcacattctggtatttccaatacctatacatacacaaacttcatgatgaatcttgactatctacacaataaggtgctacatttcatgctcttttcaagtgttttttttttttactacctaaagccgcatgcaaattcaagtatatt

SEQ ID NO: 232621 - DNA, 438 bp, Glycine max
  unsure (1)..(438): unsure at all n locations
agctntactagagcatctgcattaatttctaggtatatattatctttctttcacatgagaatttgggagtacttattttgtagcaaagtccattaaattagaattttgcactgaataaaataacaaattgggtagaatttactggtaagagtaacttgtaatcttcttctagattatattgcgagtagtgtaacgatggattttaagaagatttcatgatataaaaaaaaatgaaagacaattaaaggaaaattgtaagatttattaccctgttcagcccttaaatttttgtccgttactcttgtatataatcaacaatggaaggtaaaaaaatcctttattgtggacaaaagcatagtccatatatttttgtgaaaaaaaaaaatattataaattttacaaaagaatatatctcatgaatttcatattttaaaaaaa

SEQ ID NO: 232622 - DNA, 328 bp, Glycine max
  unsure (1)..(328): unsure at all n locations
ccttttatcttttccatgttcacgccctaattctctctctcaaacacacttatatatatgtatatggtccctcttatcttttccaaaccaaacatagcagcccatgtcctaattatagaaagccactaagcaatttcttatttcatcatattatataattagttaatagggagggggaatgaatccatgcagagtcaaaggaaccaattcaagacaaataatatcattagcaatttataactgttggggaaagacgaaacatngtgcagacaattccaaaaataaaataaaatggaatgctacaaaaaaaaatattactaataaaatg

SEQ ID NO: 232623 - DNA, 402 bp, Glycine max
aaataggtgatgaaataactagagaaaataccaaccatcagcagcaacaggctaataaggagctctagttggagcatctaatcattgaagaataattggattatcctcataatagaaattgagaaacctaacaaagaatgacataatgctaattagaactgcgtaatgaaaaaaaaggcttattgttattggttgtggtaacaaacctgccatatcaagagaagtcataaatgaccctgtataagttatcgacacagtttgtttcctgcaaacattaccaaacaaagattgtgacccattcacttaaacgatatatgcagtacctacatgcttaaagtacactcctattgaggaaaggataaagatattgataagatatacgatttatgacaaatatccaca

SEQ ID NO: 232624 - DNA, 331 bp, Glycine max
ataatcatgaatcatctttgaatcatctatctttctatcttttttcaacatcatctgtaaaacatctttcaatcaatgtttctacacaattttctaattcatttctctttactttctaaaaggtttgtatcaacactttctctttcaagagaaggtctttgttcaaaaacttgtgttattcaggtttttcattctcttctcccgctgccaaaagaacgaaggactaaccgcctaaattcttttgtgtctctcttctcccttacaaaagatgcaaaggactaaccgcctgagaattcttttgattcttcccttccccttaagcaaaggattc

SEQ ID NO: 232625 - DNA, 443 bp, Glycine max
  unsure (1)..(443): unsure at all n locations
gctaagaataattctaaagaaatttgngttattatatgntaacacattatganngaatcatgangtgatataaaattaaaattaattattatcattatacatttttgagatgtcaaaatctttttgcaacatgtattatttgacgtaatgaacagtgaaataatttataatagattgaaattcagctaaaaaacaaaatgatataacaaatatgtaaatcttttttttatccatgtaataagaatattaagtcgtaagccaccacaactaacatgagattgtcctaattggtggtccaaagttttcgatatataactgcattaaatatttaaaagaaaaactctatttctgatggtggtccaatccaactcaaataatattgtatatggtgaaaaaagatattgtggtctaaanaaatattaggtcatcaactaatatgtgaa

SEQ ID NO: 232626 - DNA, 398 bp, Glycine max
tacacgatactcggttcacaccactttaattatttacttgatgacccggggcactcgccgatagatttttcatccacacagacaagtagtacacccagagtgagaacactattttggtgttgttgtcggcgaacttcttccttttggaaagtttagttgaggttgaaggcgtaaattcattattttttgatccattgatttttggttttgctaatatttgtttagctcagaaccattgttctttggaattggttaactactatcttgcttggtttgcatacaaagaaggacttctggaagtgttttgatcccataaacttggatataacacaacttgcgggaaggacgcgaaatggaataaaagttttgcaaacattgtgtgcaccaattcagagaac

SEQ ID NO: 232627 - DNA, 344 bp, Glycine max
atggccttgattttctcaaggtccacttggaccccatttctaccatctacaaaccctaagaaaactatattatctacaccaaaggtacacttttctataattgtataaaggtgttcttcctcaagactaaaagaacttgcttgagatgtcctaagtgatcatctaggctcctactgtacactataatatcatcaaaataagcaactacaaatctacctatgaaatcccttaatgtaacaccttgagatgttattaattataaatcgatgtttgattgggattagcttgtttttgaatatatgtttgacttgaatgatttgaaatatgactccaattagtcatgt

SEQ ID NO: 232628 - DNA, 289 bp, Glycine max
tggaccatgtcaaaaccagccaccaatactgccatctattgatccttatgccttcagccaaccatttgcgtgtagcaagaaatgttgctttggggtttgcgggaaagcacctctgatattcagccaagacaaggattcccaccaaataggttggatcttgctgcagcggaagagtaagtgggctgcatcctccttcatgcttctgcagaaagggcaggacatatccgtgatctgcacctgccgcctctccaagtattttcttgtggcatctatctctaagaacccccac

SEQ ID NO: 232629 - DNA, 397 bp, Glycine max
  unsure (1)..(397): unsure at all n locations
acacaattcaagagagattaatacttattttgattcacaaatccagccacatatcagcaccacaacttaatttcttcataggcatcatataggaaacttagaaaacaaaacaagttcaacaacaagactacttctaggaattgatntagaacatgttatgaactaaataacatgcatgaattagactcgaaattcaaaagataggctaagaatgacaagaatacatgaaaaaatgtatctagaattcaatcaacaaaaccaaaattcaacacaaacttagaacataatgtgataattattatgactaaacatgactctaagacaacatggattaagagatttacacttagattttgttgtttttctctaatcaatatttaagaagaaaattatatct

SEQ ID NO: 232630 - DNA, 373 bp, Glycine max
  unsure (1)..(373): unsure at all n locations
ggcttaccgaggatgagccttggattttgtgaacctttgaggatcaccaagcgtagatcttgggtttgatgagtcttatttgcaatgcatgtgttgtgctcttgcacacatggcacttgccggggtggcatgtattggaaacgtaatggctcgctcttgcatacgtgtcacttacaaagnggcacatagaggagatatgggggtgtgctccctcatatatgtcactcgccgggggtggcatatactggagacgctatgttcagaattataatgacgtcaccagggaggaccttggtgttttcgctccgtttgtaaatcatctanggaattgacggacctagngtttgggtgtcgggctcttgcttcatgccac

SEQ ID NO: 232631 - DNA, 440 bp, Glycine max
  unsure (1)..(440): unsure at all n locations
agcttctaaactatatacaagaatgaatctctgataccacttgntagacaagtggcctcatatatcttaagaaggggggggggttgaattaatatattctaaactacttccccaattaaaaatctatttcactttctattcaagttataaattcccttaataataacttcttaaatattgattcaaataaaacaatttgaatatgaatataaagcaataataaacaaaggagattaagggaagagaaagtgcaaacacagatttatactggttcggccacacccttgtgcctacgtccagtccccaagcaatccgcttgagagttccactatcttgtaaattccttttacaagttctaaacacacaagggtaatccttccttatngtttataattcatttacaacaagagacccacggcctcttaatcccttatagaatg

SEQ ID NO: 232632 - DNA, 401 bp, Glycine max
  unsure (1)..(401): unsure at all n locations
agcttgtcatcattttctgtttatccttttangaagaacatatgatacttaattaaggctcacttcctaggtcctaaaatcaagatgttaaaagtgtcatcacataatttggcttactaatatagattttcatgaagcataattggagtttcaacttctgtgacaaattatactaatttggaagactaaaaattctcaagtcattcaataagattggagtgctaaattgagaagaaatgacaaaatagttagtacaaccccaaaattgctcaatataaagacaccaaaaagacaagtttattttcaatcttttgaccgcttgtaatcaaatgtctgaataatttgcatgacnatttacacaatctcattggcacctattggtataagtcacaaacttgtgt

SEQ ID NO: 232633 - DNA, 451 bp, Glycine max
  unsure (1)..(451): unsure at all n locations
agctttcacatacatgcacttnctatgtgttcgngntcatttntctctgtcactatctctcattgaatattgccaccacaccaccaccccacaaccgtcattctaggccccctgatccccatatccatcattgaccatttgatcacaatcacacggaattaggccatgccccaccacccaaactcacacggaaacaccataattgttttcataaatatcaccagatttagtatgcaaatgttggacctaaccttgtccatataaatatatgcacaacataaacaaagcctatcctacaccaaactttntgcatttccatcactctgtgttttggttctccgaggccttattaaacaaacaaaactacgaacatgaagcacttccacttggttctcttcctcgctcttctgttccttacaccaagagttcatgccattatgatcaaattctc

SEQ ID NO: 232634 - DNA, 486 bp, Glycine max
  unsure (1)..(486): unsure at all n locations
ttaagtcacctgcggcatgcaagcttgcaggacaatctatatatcatatttgttctagagctcgaatacagggaaggaaaggttaacctatctcataatctatccttcttaggtgtcatatgcaagggagtttcaattctgagctttcatttataattngagtcctaaaacaactcttnnngccacctttattttaattagttgcataatattgattagttatcattggtttgaagtgatttattagagaaaaggtcatattttttgcaatatgcacgcccatggtagtgtttaatatattctcaaggtgcttgagaatgtattggttggccatttaaatnaccggaataggtgtgaaatatatatgcgactgaagagtgatgaagcttatctgcttttcctttgagttaangangctgaatgtgatatacattatatatctggtttcgaatatgccgatattatttatatataattaactattca

SEQ ID NO: 232635 - DNA, 360 bp, Glycine max
ctatcactatggatgtaccggttcttctttgttagtatatattttaaaaatttggcatacacggggaatttgttgaaatgcttctccaaaaggcaaagaatgtctattttcttgaaaatatcaagacatctggccaaatgtctttctttatctttccgagaaggtaccaaaggataaggtacttctttgccttcatttggaagaataatcttcttcttttcagagatggcctcactcttgactctctttatctaatcatcaacaactgtctctgttttgttttcattttcaactctctttcttttctccttctttatccttctttctcttctctttatggtgtgcttcttcctacatctc

SEQ ID NO: 232636 - DNA, 407 bp, Glycine max
  unsure (1)..(407): unsure at all n locations
gactngatggggcctatgcaagttgaaaagccttgaggaaaaaggtatgcctatgttggtgtggatgatttctccaaatttacctgcgtcaactttatcagagagaaatctacacctttgagcattcaaggaggtgagtctaagacttcaaagagaaaaagactgtgtcatcaagagaatcaggagtgaccatggcagagagtttgaaaacaacaagtttactgaattctgcacatctgaaggcatcactcatgagttctctgcagccatcacaccacaacaaaatggcatagttgataggaaatataggaccctgcaagaagctgctagggtcatgcttcatgccatagaacttccctataatctctgggctgaagccatgaacacagcatgctacatccacaaca

SEQ ID NO: 232637 - DNA, 440 bp, Glycine max
  unsure (1)..(440): unsure at all n locations
aagtcacctgcggcatgcaagcttctaaggaagagagctgagatatgatatgtgttgacgaacctagctctaactntgcaggaggttttctcaaagaagcttctcaaggaagttttctcaagaaagctactttgagaagctacctagtctataaatagaagcatgtgtaacacttgtggcatctttatgaatgagagtcttgtgagacacaactcaaagttaaagttctccccctttgtcttccttcaatttcatgctcccccctctctctttctctccctctttcttttccctccattgaagcatcctctccaagcttcttatccaaggctctatctggaggagaagctccttcttccatggcttattccctagtagaaggcgccatctctcacactctttcctttttctttcgctgcatctccatggtggaaaatcac

SEQ ID NO: 232638 - DNA, 272 bp, Glycine max
  unsure (1)..(272): unsure at all n locations
atggctgcgaaacatntcacaattatacctcctcaactctcagcagccaaatctaccacagcagaacaattatgacctctccagctacagatacaaccctggatggaggaatcaccctaatctcagatggtatagccctcaacaacaacaacaacagacgggttgcttcttacaaaatgatgctggcccaagcagaccatacattcctccaccaatccaacaacagccacagtcccagaaaacacaaatattgagagtcctcacaacttcct

SEQ ID NO: 232639 - DNA, 443 bp, Glycine max
atgtgcaccaaagagtcttaccccactttagttgtcatgaatcagagaacttctatcaatcagatggaagtagtccaagaattcatttgtccttcagaagcacaaggagatcctatatacctcaaccaccggttttctgtttttaccgttaccgggtgatgtagaagacccaaccgcaacttgtatgagcggacgccctggaagttttggtgactctggacttggttgcagaagggacgccctttcagggtttgaaagcatgagttgttgcatgtcctttgaaagaacattgaaaatggccctaaggtctccctttagtttctgagaggtagccacagaatcaatgccactctttccagattgctgcagctgataaattgcatctaagttaaataaaaacactcgacaataattttaaagcatacataattctatgatcagga

SEQ ID NO: 232640 - DNA, 401 bp, Glycine max
agaagagatgagtgaatgggtaaacaaatattgtctgtttcctctttgatttaagattgtcatcatcaaaaagggggagattatgtgagcattgacttccaagattattctgatgatcccaaaaatcaagagttaagcaagttccaaagaattgagaagtcaaaagcttcaagaatcaagattcaagaacaatcaagtttcaagattcaatcaagtttcaagaattaatatcaagattcaagaatcaagagaagactctatcaagataagtactaataatggttttcacaacattgagtggcacatgaaattttacaaaatctttaccaaagaggttactctctggaatcgataccataaggtagtatcgataccagttaccacattgtttcaaattgttt

SEQ ID NO: 232641 - DNA, 418 bp, Glycine max
  unsure (1)..(418): unsure at all n locations
agctntactatgcaaagaatatccagtgtaaattccttcatctgacttagcatcaaatattcctatggtttcttttccattggttaatacaaaacacttgcaaccaaagacatgaagatgtgagatgtatggtttcctaccattgaacaattcatatggagtttctttaagatgggccttattaaagccctattcatgatgtaacatgcagtattaacggcttcagcccaaaaatattttggaagaggaatatcattcattaaggttctagcaatntcttccgaagacctatttttcctttcaacaactctattttgttgagggggtctaggtgcagaaaaattatgttcaatgccatgctcttcacaaaataaatcaaatttcttatttcaaactncaccccctgatcactcctaat

SEQ ID NO: 232642 - DNA, 438 bp, Glycine max
  unsure (1)..(438): unsure at all n locations
agcttgcaagaactagttcagcatatactctttatgagtatagagcagttcgttgagaaagtggcctggctaggagcccgaccttcttttgtgggggataatgaaagttttacagcccaggcacctcaacagcatgagccaaaacaagaaaacgatcactcatcgaagccaccatctatggagctgttgattgttaaaaaacaagattagagacgagatccaatgaggttgctcatcatggaccagtgccagcgtcagctgatgcaccatttccaggagtggatccatcttcacctcaacacgcagtagactcttccattcctgtcttagagatacatgagggccanaccataccagttctacctttggacacttctnctccagctactccaatatgacatctaacaaatgagaagaatgttcagatacaggacaatc

SEQ ID NO: 232643 - DNA, 389 bp, Glycine max
  unsure (1)..(389): unsure at all n locations
agcagtgcacaatgttgtatacaaagttttggcaagntctgtttttccgactccaccaagtccccatacacccaacatgcgtacagtttcatcataaggcttcatgtctaggagtgacattacctcttctacgcggggtccaagtccaacagggtttgaccagtatataatggtttaggagctatatttttctggaccttctcaacaatcttctcaataaaatcgatctcatacctgcaaggtgcacaacacattgttcgatcgatagcantaattatttcattatatgtttaagcactgaaataaccgttattacaaaaaaaaattgaataataatatatcaatcactctcaactataaataccttattaacaaattactatacccga

SEQ ID NO: 232644 - DNA, 419 bp, Glycine max
  unsure (1)..(419): unsure at all n locations
agcttgagattggtttaacaagaaacttttatgaaagctctcacaaaaatacacacattttgtcaaaatgccaaaagtctcttttcttcaaaatgagttcaatgcatatagtgtagctgaggtgcaactgaaaaggcaccaatttatttaactaaaatacaaaatacaaaaatattcaatatggaccttcaaattagtttgggccttcagtaataaagattcttgggagtgtctctgggccttcatccttctctacttgggccttgtcaagtatggttactaccatttgttggagggtatcctttgactntntggtcctactcctggtcataggtccctgtatttttgggcaactttgatattctcatcatttcctccttcttggaaagcgatttctctcaaatcttcaagatcaccac

SEQ ID NO: 232645 - DNA, 362 bp, Glycine max
gggcgatggtgcaaaacaattcttcacatccacaaatcacgtataaacccaccatcccctgttgcccacctcaactgagctcacgtactcccacatagcccttatcctcgttcctctaacgccgggtccccatcaatcctcccaatcttccacaacatcaaagtaattcaaaatccaagaatcatgaactaacacagccaagaaaatagggcagaggcagaaaactctgcccaaaacacaaaccaacatcacaacttgttacactcaaataccccagtaatattctcttcgtccaattcgttaaccgtggatcgactcgaagattttactggacgtctctagcacataaatctacattatga

SEQ ID NO: 232646 - DNA, 241 bp, Glycine max
aagccctcgtcgagcctagtattcctttccttgactagaagctcactacaagccttaagggaaaaaccatgatatcaccatatcctttaggaattttggagctttggaattgtattggaacaagcgcggggggtgtttggttcatcggacaactagctctgtaggctatgcatcatgatgtattctgggccatacttgatgtacattggatattggttaaaagttggacatgccgaatgaa

SEQ ID NO: 232647 - DNA, 324 bp, Glycine max
tcccgctatgacttgagaaacaaaggtgatcagactacaagcatagatttaaaaggtactaggttgcctcctaatagcgcttctttaacgtctcgagctggacgcatgatggttgtctgtcacggacctagtactttgcttatccttggcttttgacttggtcgcctattggtcggccatgggtcgtaagcaacactctaacctctttgtggatgagctgaagtgaactctacatgtgatggcggtgcgtttattgcccgctgtcggccatccctatgctgctgtggtgtttctccctgcgcctgcctgtggacgcaatacttc

SEQ ID NO: 232648 - DNA, 408 bp, Glycine max
  unsure (1)..(408): unsure at all n locations
ccttaagtcacctgcggcatgcaactnacaagttgaagtgatgtgctgtttctagnggagacacttgaatttggtgccagacctcaaggtgatggcactcacattcttcagattctgcacagtttgtgaagacaatttgttagaatgttgggactgggcttggttcatctgagtagccatctccccatcttatttgtcagactctgaatggaggctcttatctcttgctgaaattgcatattctggatggttatttgcctcactaactcttctaaggaaggttgaggaggagcctcaactgcttgttgtctttgttgttgctggtgatattgctgcattgaaggaagaacatatggcttgcttggaccagcaacattctataaaggaaggacaggcttgtgttgttgt

SEQ ID NO: 232649 - DNA, 303 bp, Glycine max
  unsure (1)..(303): unsure at all n locations
gatttacgagacatcttgccaaacaatatcaggttagtcataactcgcctgtgctttttcttccatgctatatgtagcaaaagcattgatcctatcaagttgatgagctggaaaataaagtcacaattatactatgccagttagagatgtattttccccctgctttctntgacatcatgattcacttgattgtgcatgtggtaagagaaatcaaatgttgtggtactgtttatctactggggatgtaccttggtgagcaatacatgaagatcttataagggtatacaaagaatctatatcgtc

SEQ ID NO: 232650 - DNA, 447 bp, Glycine max
  unsure (1)..(447): unsure at all n locations
agcttgagctctcataccatactccttttacaaaaacngantgcaggcttaaataggtggccttgttcgtgctcgcgcgctaagcgcaactttgaaccgcttagcgcacattagtgtaattcggcttagcgcgtgcctttctcgctcaccggatggatgaagcgctgtgctcattgagatgaagaggtgggctcagtgaacctgaatagctcatcttcttccatattcttcctcgcgcttagccaatgagtgctgcgcttagcggacgctcgctaacccaatagattggcttagcgagaaggtgaaaaacaacacttcaaaacttacctaattaacctgaaattgagagaaaatgagtattgcacacacaagatagaattactaaatatttttacctatctttactagaataacttatacactacaaatgccataaattaaggagtt

SEQ ID NO: 232651 - DNA, 459 bp, Glycine max
  unsure (1)..(459): unsure at all n locations
agcttttattagatagaatttgccatattttttttttaaaaaaaatatgacattctacatagggtatataataaatgatttagaaagtgactatacaacattggttgtagganaaactaatgtgaaaaagatgctttctacatcggtttcagacaaaccaatgttgtaattactatacaacattggtttagataaaatctatgtagaaaatgtcttttctacattggttnttaccaaaaccgatgtagaaagtgttttatccatatcggtttttcctataaccaatgttgttattggatttcttgcactttttgtatatttcttattaaacaacatcaattaaggaataattgatgttgtatactaaattntaacatncgatntaataatcgatgttaaaattgatactcttaatgataatangtttaatattggctcataactaatgttgaaagctaa

SEQ ID NO: 232652 - DNA, 435 bp, Glycine max
  unsure (1)..(435): unsure at all n locations
tgaactttgttttgcttggtttgggncaaaggtaaaagggatgcctcacattatttccatgacacaaatgcaaaaatgatgatttggaaattttatgcaaaactggtcattgcatgcacctatgcggacactcaagtgttaaaatttatggccatgtgaagctagggcttatgatttatttcctctattttaaatcaacccaatgtttccaaaatatgttcttttatcaatttgtgcattcattcgagtgcatttcgggcgtccggggaaatttcacagcacttaccctttaggtgtagacacgttttttttctctttaaaaatcggacatgatcaatgaagttttttttcgaagaagagttggaaatcatcttctttcaaaagcatgccgtgtttatccagacaacttatttctcttttttcacctttttctta

SEQ ID NO: 232653 - DNA, 357 bp, Glycine max
  unsure (1)..(357): unsure at all n locations
gatcttaagtcacctgcagcatgaagcttattgcctattaagtctacttcttatatatagccccaagagactcagcatagggatgcacagaccaaagatacgtatgtgaaaagattgnttgaccaagtgaaggtgctaattgcaaagaagaatgaaagctatgtcaagcatgcccactataaaggaaggaagtggtacttgaacacggtgatgatcctgaacatttgaggacaaatgttttccaagaaggagggaatgatgagaatcatgaaactggccatatacaggctataggcccaagtggagaaaatcgaaggcccaagtggagaatgacaaatcccccgtgtggagaaagat

SEQ ID NO: 232654 - DNA, 351 bp, Glycine max
acattcaggtacaccggctctgtaggttctgcaatattcttacattgtatgattcccggttcttgaatttgttgattaaacctgggatgagaaggttgaggaaagagctgtagtttatttttatttttgtgttatacgagttggtcaactgatcgagaatctattatctattactgtacgtatcaaataaaatccaactcttatctatgtttcgttactaaaatagaacataaaaatcatttcaaacttaaggttatgtttcgtaaaattatttaaaaagttaattgaaagttaaaaaattaattggtagttgaaactgtagtttattaaattataagtgtttcatgatag

SEQ ID NO: 232655 - DNA, 423 bp, Glycine max
gctttagccatttaaacagattcctgtatcttggatgctggcttgtcaaactattgtcggaaacaaagaaaactctggcaaggtatctttcacaatcatagtaggtgttctgtgtgtagcaagagtggtgtcacgagtgtaagagcacagcatataccatgtcatgatctacttttatttaatcggattggatgccaattcactacaactgccattaacatatcttttcctatatgaagtcaataatgggaccctcaatgatgaagacaattatagcatgtagaaagtatatttgcatttacttgtctctctcaccttaaaatcgatgaaattttgtgagtatggaatctttttctatttgttagatgtctcaagaatgggcataaaatttgagactcaagaatgataatactttcaaataag

SEQ ID NO: 232656 - DNA, 401 bp, Glycine max
  unsure (1)..(401): unsure at all n locations
agcttgagcagattaaacgaatattttttntactcggatgtctgattgagtcccataatatatcgagacgctcgaaattgaatgttgaacctcagaggctattcaaacgacaataactttttactcggatgtccgattcagtgacgtaatatatcgagacctcgaaattgaatgttgaacctctgagcaaattcaaacgacaatatatttttaatcggatgtctgattgagtcccggaatatatcgaaacgctcgaaattgaatgttgaagctctgagcaaattcaaacgacaataactttttactcgggtgtccgattgagtgacgtaatatatcgagacgctcaaaattgaatgttgaacctctgagccaattgaaacgacaantaacttttactcgga

SEQ ID NO: 232657 - DNA, 389 bp, Glycine max
  unsure (1)..(389): unsure at all n locations
ctctgcctgaagatctacgggcagaagttctggcatcccaacaagctcagtctgttcaacctccagcttatgcaccaccttttgcagaagatattgatcccgagtttttagctgctttcctccagatattcaagcagaagttgtggcccaacaaagagctcaaatggttgcccagcaggctgaaggacagccagttgacatggataatgcctctataattgctacttttcctgcctgaatgcgtgaagaggtttaaatctttattttgtttcgtgcatttattgaggaagttctatcttgtgaaaatatgacatgattctaatccttggattttgctctgtacttaggntctttngacttcttctgaagctgttctgtcagcactacca

SEQ ID NO: 232658 - DNA, 474 bp, Glycine max
  unsure (1)..(474): unsure at all n locations
agcttataagaacaaaatntgtctcaatttatttccaaatatgcatagtgaaataaggaagccatcatcaaagaattcaagccacaggctatttgtgctagcatatcatatggggcaataacacaaccaaattgtttattgatgatggatggctcaacattctcacaaagggtacttcatcactttcaaattgagctttcaaaactatcatgacatgtagaggagaatcaaggatttcaagtcacaaaatgtcaagaacttttatcttcaaaacaattacccatttcttgagcatatcctataattcaaagaaaaacatgcaaagtcgtacatgcacacaaaattgacccanaatattaaactaaaaatccgacgaaactaacaacattaactaagtaacccatctaacaaattaacaaaacccacgaaactagcataaccaaataacactcccccacatactttaacaacaca

SEQ ID NO: 232659 - DNA, 277 bp, Glycine max
tgctattaacgcaaagacgctctgccatgtatattgtttggtggtcatgttgcggttttgagattgaaagttgcacggctgagcttgtgtttttgaccaaacgtaacagggccatggtatgttgttgttgttttggttgggtttagaattaaaaggcttcttttgatggtaggtcttggatgagtataaatggacgtattgaaataaactgctcagtcgtttcatcacttaatagagagaccatataatcttattcacgtatgatattgtcaaaaat

SEQ ID NO: 232660 - DNA, 391 bp, Glycine max
  unsure (1)..(391): unsure at all n locations
gctggcgggggcactctccaccgacgccgacgacatcgaccgcagccacggaaacttcctccgaatcctcgacgtaatcgaaagactccgcgccacgcctccggcggttncatcaccggcggcggtgcttgacgacggcgaagcgttcggagcaaaagacggcgccggcgccacgttgcagagcacaacggcgtcgttttcgagctccagcgtgatctcaacaagcctcttgtgatgattactcctcaggtcgttgaggaacaccggcagcatggcgccatacgcatgttctccggtcaccggcgacgaggcatcaaaattttccggcaaatcaaactcgccggtgctgcatcttcgaaacgacgactgtctcatcgaaagtttcagcaat

SEQ ID NO: 232661 - DNA, 274 bp, Glycine max
tcccctcacctctgctcccttggcttccgctgcatctccatggtggaaatcaccattaaggacctcatttaagctctaaaacccacctccataataccccacaacaatcttcaatcacttttgctcctacctatcctcatttgtgatgaggaactcacacctacgtagctcttgataattgtgagactaaaaatagtctccgtgttttcttcactaaaatgccaacatgctttggtaaagagacaaaactttcaactgatcagagcaacatatg

SEQ ID NO: 232662 - DNA, 415 bp, Glycine max
ctgaggctgcagcttaagaagggctagctaggtcaattatgtctagggcctcaaagcaaagggaatgaggttatgttcaaaacagtcaagaggctatgggcgcttcaaatgcgaaagggagcgagaaggttagggttcaaaacacagtcaagaggctaggtgcttctaatgcgaaagtagtgagaatgtggatggtcacaacaaaaaaattattttctttttttatttattttgattaacaaaggtttcttttaatataaactagcataaattttattacacaatacattctaaggcggttttaataaccgtcttataatgtgcgtcgtgaattgtattttcagcacaataattacaaaattgtaccgaccacttttaaagggtttcttataaacgtcgaaaacgatgtctaaaa

SEQ ID NO: 232663 - DNA, 92 bp, Glycine max
  unsure (1)..(92): unsure at all n locations
agctntatcaccctccaattaagaatatatatgtatcaacttagagtggtcgaaaatgcatctgccaaccactgcttgatttgttttggggg

SEQ ID NO: 232664 - DNA, 352 bp, Glycine max
gcttacaactaagtacttgggagagtttttccctaacgaatgcggatcacaaccttcacatcaacagataatgtcaaacaattatctgaactaaacttggaccatggttatatactattgtgactacaacagattttgaaaatatcatacccacaggaaagcttcactagtctaaaattgaggctcatattggtaggaaaaaacatcataacacgtccctactaggcaaattaaaactattggttgacctaattaattatggctcccatctggaatgttaacaaaagggttcataattaccaacggtgccacttggctaatatacacataagaataactgtgcaacatatta

SEQ ID NO: 232665 - DNA, 331 bp, Glycine max
tcaattgctaaaacaaaatacatcacctttgaaacaacaacttcttaagaggataagtcataagggagtggctaatacctcagtgtcggggacaaaaaaagctttcaagaaaggattaatcacaagaggataagaggatcactcatacgtgattcaattgcggtttctaactgcgattcaaaagaggataaaatgtaatagtaatgaaaatgactaaggagacttgaattaagaagatgatgattggcggctcctatctatgaaactcgtatttgacttctgttggtattcaacacacctatgactttctattggtaattatgatcatgaa

SEQ ID NO: 232666 - DNA, 358 bp, Glycine max
gcagcttctacacatgatgcaaatatgataatattttttatatagatcaataataataacgataataaaaacattgtcgaataaaagaaaaaatgcgtacaaatgtcagggggcgccaaaaggaataagatagatacctagcattcttttctttattgttaattcagctgagaagtacactttgaatttcacaaagactcttgtcagtactggacactttagtttaggagccttttggcgcatccaaacatcatgcatgttcatttcatgtgcaaacagaatggggagatcagaaagaaacaaaagagctagttaacctttattttggtggggccatattaattcatataaaaaacct

SEQ ID NO: 232667 - DNA, 428 bp, Glycine max
agcttaagcccatggagaggcgaaatatcttcataataaacccctttaacattaatagtgtgccgcattctcagggattttgacaccataagcatagctgtgctatgtttacatgaaatggccccattgcagccacctactgtgataggggatgctatggcgatgcatatagcaggtaggggctggtattcactggcacgatactatagggcactattgacaactatggtgtgatgcactgtattgcactattgacaactatggtggaccaactagaccacttgtctccaaaatggcataatttttcagtgaaggctgggtcttaccctgctctcaacatcaattatatctccctacccaaccaaactaatgcattcttacctaaaacacatgagctgtgaaccgcaacagcgtcttcggtggacatg

SEQ ID NO: 232668 - DNA, 389 bp, Glycine max
agctccaattggcagtctgttaaacatatttttgctcttgcccaaattggtagatgttacacgtgcatgcaaagatttcataatcccagagtggaagaatgattctgcacatcaaacgctctcatttatgaaccaatcaagatcccgtattctagttgctgagccaccaacttatatttccctttttgacctcattgctattatagacagccacatattaggctctcctatcatattggctattgggtctttatttggttgtcctgaaggatctgagattgcagttgttaatgttttgaaaccttgctctgataaaaaagaagttgaaccccgaaatgggagcagcaatatggttggcaaagaaatattgccacaagaagcacgtcttg

SEQ ID NO: 232669 - DNA, 437 bp, Glycine max
  unsure (1)..(437): unsure at all n locations
caagctgatgcccaagagaagtgtgaatgatctttanaagatgttntggcttttacatgcccaactcctttgagtggcatttgtattggttgttaaattgattgttgcacctttgtacatttgatatctttcttgcattatgcatcatcattacttctctgttgtttaagttggtcaaaggtgaacaagaacactntaatcgattacttaggtcatctagtcgactacattgttcttgagtggttttcaagatgttggatgaacactttaatcgattactcaaataatataattgatgacttcattgaaataatcgattaccttatagatgtaatcaattataggtagttataactattctctctataaataaccagcttgtgttcgcatctatacatcatgagaacattagataatactcaatacatctttaaaat

SEQ ID NO: 232670 - DNA, 341 bp, Glycine max
gcttcttgcggaagatagtgtttttttttaacaaatatttaattttggctcctttattacttttaattgcataaactaatttataaaataattaatactattatgcataaataattaaataataaaataattaatattattatgcataaataattaaataattagtgaacgtaattatgactaatatttataatttgttttttacgcgcatgtcaaatattaatttaaaccataaaaattaattaattcctaaacgtgattattgttttataacaaaatgaagaaaaaagaatttttattttataataataagtaaaaataaaataatatttaatgcgtat

SEQ ID NO: 232671 - DNA, 436 bp, Glycine max
tcacaagccggagaagaccatgctttgatcatgagagaaagagaagcgcagcaaagtttctacgaaaatgccaaggaagaagcacagaataagttgattactttgaagaatgagtatgaacctgaactaacacaaagccttgaggccaaacttgctgaaacaagtgaagagattcaggttctccaagagcagatgaaagaggcacatgcttctgagatggattcagtgagacgaataactttggagatcaaagaagccacaaaaacacttcaggaagttgctgaagaagaaaactccctgagaaacctagtggattcccttagtacagaattagaacaagtgaagaaagagcaagaggaactcaaggagaaggaaaggcagcagaagctctgctgttgacctaactgatcaattacagagtaaaccaggagacaca

SEQ ID NO: 232672 - DNA, 369 bp, Glycine max
  unsure (1)..(369): unsure at all n locations
ataacactaaaagcggtgatatatattaaatcgcgtcaaatcatctaatacaaggacaacctctaagacacaacagaacacctaatggtgatcccaacaacagtngtgaaggtatgttgctgctgtaagcaatatgtcttgaaagtatttaaaagcaaaatattcttcttcttagattgtataacaaaaaaacaatgggaaaaaagaacaaaaagatagttgatttgaaggacgaagagcattggaatccccagctaatatgtataatacaacacaactaatcagtatggcccacaagaccattcaaataatggtatcaattaaaccttaatggtcatgtgcattaattaagaactagtattataaaac

SEQ ID NO: 232673 - DNA, 300 bp, Glycine max
tataacataaacgggatgtgagttagatctcggagactcattaagattaaggaagacttcgagactcaatgagcagtttattattacttatcaataaggttctcatatacagagaaaaacttgaactcacattcgttagaaatatggatatgtttcttagcaactgaatcaacttttgctggtcacaaacaacataatataaaaactaataacatacatttctaacattaattatcttaatggaatccacattattattattaactgatctccaaatatagagtataccattccaaaaaa

SEQ ID NO: 232674 - DNA, 432 bp, Glycine max
gcttgccttaacaatcgtaaacaacacatcttctttgactatgttactaccctgtctccaattgcatcttgtaccaatattgcgtcactagagatgtggaaaataatattagcatccctggcttcattgtcaaagaaattaatatccttctttagcactgcctgcaaatatttcaagcgcaaacgtgccggttgcctctcccctgtttgcatccagaatgcaacacctgaaaaaatagtagtaattaaatagtgatcatgtactgagtgtggttatattggtcataatatctcttgtatatccttcattgagcccttttgtagtcaatgtgagactagctagtaactactcacacttgatttccaacaagaacattacttggaaagaaaaaatgaggtccaagttataagatgtcccatccaagctgatacc

SEQ ID NO: 232675 - DNA, 439 bp, Glycine max
  unsure (1)..(439): unsure at all n locations
cagcttatnaataantaagaaagtggaatcgtttatcaatatattaaaaagtatataaacttacgcttgaaactaatcataacagttaaaattataaattttttaaaaaaattaacgaattatcttaattaaaaaatagaagactaacattataaattttttaaagtaaaaaaaaaatctaattaaataatgagacgattaaaaacataaatataagataataagaagacaaaaattatattttaacatttgtgatgtaaatcaaatggaagaggtgacgagatattattatttaatttaatgattttattttacatatttgcaggaaaaaaaaaacacgattggaattctatataaatgattgtgaggcgatctttttttcttacttcgggttctttttcttttataacacctattatagcaaaaacaaatatttttt

SEQ ID NO: 232676 - DNA, 397 bp, Glycine max
aaaagccaacatctctagtggccctcttgaccttcctatggatgccaataggcataatcctctcaatcctaaggagctacctcaacactcctctgccagaaagacttgcttggtacaaccacaagcttcttggaataaggggcattatgaagggtacccctccacccccaccaaagaagggccaaagtggagtcctatttgtatgtaaccacaggacagttttacaccctgtggttacagctgttgcattagggaggaaaactagctgtgcgacatatagcataagcaagctcactgacatatatttctcttatcaaagctgtaccactctctagggaaagagagaaagacgctgccaacacttaaaagctgcttgaggaaggggatctggtgatct

SEQ ID NO: 232677 - DNA, 470 bp, Glycine max
  unsure (1)..(470): unsure at all n locations
cgaccgggatctcatagtcacctgcggcatgcaagctngcttgtggggcttctatggaggctttatctttgagcttcaatgaggtcctttaatggtgtatttccaccatggagatgcagcggaagacaaaggagaagaggtgagaagaggcgccatccactagggaataagccatggaagaaggagcttcaccaccaagatgagccttggataataagcttggaaggatgcttcaatggaggaaaagatagagggagagaaagagagaggggggagcacgaaattgaaggaataaaagagggagagaagtggaactttgaagtatgtctcacaagactctcattcatcaaagttacaccaagtggtacacatgcttctatntatagactacgtagcttcattgagaagctttcttggaaaactttcttgagaagctctttgagaaaaattcttgagagctagagcttact

SEQ ID NO: 232678 - DNA, 444 bp, Glycine max
  unsure (1)..(444): unsure at all n locations
cacccatagcaccgcggctgcagctttaaggaaaatggttgacaaggttcatggttgatatgggtatctggcatatggcctatctggacattaagaaacgggaatatcttcaagaatgatgagtgtgcagtggaaaggtatcaaatatagatcctggatgtggattaaaaaaaagatgaagggaatagaggatgtgtatttgtatgcgtggtgtatagacccaatatttggattaaaccagcagcgataaacactttcatgcagggcaatgtattatggtttattcatatcatgtaactcttttatctgggtctgctattgctcacgacttgtgacataaccacagtttaatgaattttctnttagctgtaaaaaaaaaaaaaaaaactaacgatgacgtctggtctgttgaaagaaatgtctttaaatctacgcttatgtatg

SEQ ID NO: 232679 - DNA, 421 bp, Glycine max
  unsure (1)..(421): unsure at all n locations
cgcagctgcaacncccaactggtgagtgaagaaatttttcggaaattctcatactttgtcctaaaagagagatatctcgcatgaaatattggagtagcagctaataaaacaaatcatgcaattcaccatgtgtacaaaggtgagtcaaactaacatcatgaaaagattaatttacatgataatcttagtttgaccattgacgataagtccatacacaaatgaagatagattttgctttcttacctaagaatatattcataaggtaaaacttttaaatttgttaaatatgaataaacagttatgttatttaactcacaacaattgctcccaaaataaataccacccattaaaataactaatctttcttggtgggtctttgtaaaatggttttttccttagaggtcactcctctcctcacatt

SEQ ID NO: 232680 - DNA, 409 bp, Glycine max
tggatgagttatacatacccattctgttttagggttttgtgatgatgtttgtgatgttgtatgctgaaaaactgctcatggaaaactgttagagatgaaatgtagagttaacctagggttggaaagtgagaatgtgatgttatgagtggaaaaagagtgaggctttgagagttggaaggttaagtctgaattctgtggtaaatggaggttaaagtgagttaatactagcttgaaatgtcattttggacttatgagaaagcttggactgtgctagggagaaaaacaaatgaccaaagtgaaccatgagccatttctagggcaaaattgggtgttgaaaagtcaaattttgattcggtggaattttaggtgtaaatccagtttgagcaagtttagatggatgttatggact

SEQ ID NO: 232681 - DNA, 429 bp, Glycine max
  unsure (1)..(429): unsure at all n locations
ttcttagtttcagatgatgcagatgagtttgttgctacttcatgcactcctctaatgactatagcatcatttctagcgctaaactattgggagttggaagccatcttctcaattaaatttctggcttcagcaggggtcatgtctccaagggctccaccactggcagcatctatcatacttctctccaggttactgagttcttcataaaaatattggagaagaagctactcacagatctggtggtgagggcaactagcacatagttttttaaatctctcccagtattcatataggctttctccactaacttgcctaatgcctgaaatatcctttctgatggttgtggtcctaaaaacagggaaatttttntctaagaatactctcttgaggtcatcccagctcgtgatggacctcggagcaaggtaatat

SEQ ID NO: 232682 - DNA, 428 bp, Glycine max
  unsure (1)..(428): unsure at all n locations
aaaaatagaagatcactttcttatctntccaaggactgctcacaagatccatgtgaagttctttaatgtcctataggccttgcacaaggcaaatatgttatgtaagcacaaaaatccaaaaataagccacaactatcaattaaactcaaccattttcctaagaccaaaaatgaattaaggtagaaaaatagtagtcaaagagagctcaaataggctaagaagaatagaaaaatactaaactacaaatgctcaatcaaattcccctacactttatattttgcactcctggacaaaactaanagactaagaaaaagaaatcaaactaaaaacaacaaccacaactaaaagaaaagtatgaaaaggcacacacanttttcaatggatcctaacaatgcnacaaaatgagagagatggaaaatggaagaatg

SEQ ID NO: 232683 - DNA, 407 bp, Glycine max
  unsure (1)..(407): unsure at all n locations
tctatgaatttgcaaccaaccacttcaaatgtttccatttaggttgttatgagtggaatcaaattctttttttccatctattcttttagntttgtactcggctgcacatcattgttagtccatatataactctgtgcttntagattacaacagaatattactcatgagtagtattatggaatactacattattaaactacattcaatattttgatagtgtagtttgatattttattatcgaactttatcattgcttcatgtatacaatgggacaataggtcatgagtactattaatgaaattatattttctcctttctaccctactaaagaatgtatttatgattatcatcgctctaaatttattattttctaatatattgcagcaatgcagtaaagtttacacatg

SEQ ID NO: 232684 - DNA, 391 bp, Glycine max
ccaaagctagcacagctgataacctatataaagctttgcatccaacatacaatggcgtatgcgcatctgtttgaagagcatcgtaaatatctgcatgacattcccgaaagccctcttgcccaagatcacgtatcatgtcttccatgagatctccgctttgtagatcaaccggatgaggtggacatgttgctgtatgaccaaccaactcaccatgccatatccacttagtgtacgtcgggctaaagccatcacatatcagatgcgatctaatgtcatccaacgaatgacgcctcccgttgacacatttaacacaagggcagacaaaattgccatctgtggctgctgaatgtatttcggcaaatgacaaatactcttcaactccatgttcata

SEQ ID NO: 232685 - DNA, 433 bp, Glycine max
cctgcggcatgcaagcttgaagagaatggaagagggaggttatgatttcttgagatagccacatggaaagaaatgaaggtgtttatgaggaaaacattcttaccaccttcttgtgagaaagatgcttatgaaaggcttcaaaacctcacacaaggtagcaagagtcttgaagagtaccatcaagaaatgataatgactatgaggagagctaattacaagagcctaaaacttccatggcaaggttcctatgtgggcttaatagagacattcaatgcattgtgaagttgaagcactatgaaagtttggaggatatggtgcagaaagccaataaagtggagagacaacctgagaggaagcattcctacaagaagacctatcactatgtactttctagtggtaaagacaagtccaagaaggatggatcttccctacc

SEQ ID NO: 232686 - DNA, 437 bp, Glycine max
  unsure (1)..(437): unsure at all n locations
agcntatgaataccttctttgcccatagtgtncttcagatacatagcnacagatactacctcctcaggtgtcactttcccatcataatccctgccagaacatgactaagcatttgaatgacatttatttccaacagttagtcataaagatttttaagggaaaagaaataaaaacctttatccatgtttcagtgctaactagaatcttataaattctatatgaattgaaaacttgggacggattcatttccaggaggagtaacggccacagagttctggtactggttaatgacttaattcataagagagagaggatcccaagtaatggattcaattgtgggtatgtaagtagcgcttgtttcgtagaatggtcaaacatttaattcttcagtaaaatgaaagagaaataggatttggaaaatcctgtggatagacatc

SEQ ID NO: 232687 - DNA, 444 bp, Glycine max
tgcaagctttcttgagaagctagagctgagctacacattcctataatagctaagctcacccccatgacaaaaaaacatgaaaatacaaaaaaaatcctactacaaagactactcaaaatgccatgaaatacaaggctaaaaccctatactactagaatggccaaaatacaagggcccaaaataagaaaacaacctattctactatttacaaagaagagtggacccaaccttggcccatgggctcaaaagtctatcctaaggttcatgagaaccctaaggccttctttatcaactctagcccaatcctcttggagcctcttgctcatggctctggtaactggtcctttccagggaagattgcatcatctggcaaatgcctttatgtaattataaaaggaatgtactggctgagacctcttccaagaggtgcaacacatatgtact

SEQ ID NO: 232688 - DNA, 438 bp, Glycine max
  unsure (1)..(438): unsure at all n locations
tatgcgcatatttacttacgaacgttctctttcacaagacattctatcaactaagaaaaatgcacccatatacaatcaaggtagcttcattacctagaatatttacatgtacttccaaggtgtatttgttatttacatcacacacgcctccttggctgaatttacatacatacatactcaaagcattttggggtaccaaaaactgcacatgcgctcatcttggtatttctaatacccatacatatacaaacttcacgatgaatcttgactacctacacaataaggtgctacatttcatgctttctttttttttcaagtttttgctacctaaagccacatgcaaattcaagcatattctcctttgctgactaaaatngtatccaaattagaaggtatatattctttgtaatatgttttcttcacataacatgcaacata

SEQ ID NO: 232689 - DNA, 379 bp, Glycine max
agcctgacaaggcagtcggaggagagaagattttatttaatcaccataacaataatcatcagtctgagtattattatcaatacaaacccattatcaccataaaaaaaaagcttgttaagcttagtgttttaaccacatgaattcaatatgagtctactgatcaatcattttggattgaccttcttatacaaatttataaggttcttcttttacgcaatatttcactaagttctaaaataattaagtgatcaaagatatctttaagcaaacttttaaatagacttgaagacaaagtcgaacttttatggtagtcaagccgagcctttgaaaaaaagcctatggcaggtaatgagttaagatcaagccttgcgtattcaac

SEQ ID NO: 232690 - DNA, 440 bp, Glycine max
  unsure (1)..(440): unsure at all n locations
agcttatccttganaccggatgctgtaaccactggcccatctagtgaaaacacgtctctctgcaatgagaaagattcagaaatgtgtaaatgcttcagaacaactatcgccaactaagattgttacaagagttaagattacaaaaaaatagttaaacatttaacaggaatatacttatttaccctttaaacccatggatcttttacatttggaaaagtatcatgcctccagtattcagttattgaaaatgaaaaaacatgtaagataggaatgtgcaacaaacctgcattccaccttcagaaaagatgcgaagatagttaaaactagttactgctgcaacccaagcagaaccaagtgcaacaaccttcacttcttctccttcaaagcgcatagaccactgcaaaaattttaatcagtgagaatatggtaatctttcacat

SEQ ID NO: 232691 - DNA, 358 bp, Glycine max
gtgattataagtttgactgtaaatgctggtcaatttgtcatattgaatgtgaaggaacgctttaaccatatgcaggtgagagggcgacccttaaattatgaaagaaaccactatcattagaactgatttttgcgcgaatctttgaaggtggactaaacgcatgaaatcgacgatgaacaaggccatgtttgattgtgataaccacttatccaaaaatctgaccatgagcgtgaatgaatatgcccttgcccccattttgagctgaatgaattattgattgattgaaccctgagcctatataggggtagctccatctaccctgacttatgttgtaggagagcatcatgcacaggaagcg

SEQ ID NO: 232692 - DNA, 277 bp, Glycine max
  unsure (1)..(277): unsure at all n locations
aaaaaggcccgcaaagagtgaccatggncaccatactaaacaatcacgggaaaaaaagaacacaaaagctcactacgaaacaagggatgagtagccaacacacgaactgctaatcactataggatctgaatattaggcatatgatataattcttcacaacaccatgggtggacaacctttgaatttgccgtccaacctaataacacgtgtttctattgctccttcaatagactaaacacgaagtttcgcctgccatcgccatgagcgtcagatcgca

SEQ ID NO: 232693 - DNA, 433 bp, Glycine max
  unsure (1)..(433): unsure at all n locations
agctncggaagaaagtgatgaggcacaattttctattgcagatcttgaaagagcctgggtagtcaaagagaaattcaagtccatatccatcaaagtctaaagaaagtatgatgaactaagggacgtctatatggccaccgctgaagccttggaacgagaaaccaagaaggcccgaaaggaagaacacgaccacaacaaagttttgaggggctttacagggcagcaatagtgagctcaagctccgaagaggtgaaaggaatcatcacgggtcaaaggcatgatcttgaaggacgagctaaaggcttgccttatgtcgaaaagaaatttgtcccaacagttaagcgagactgaagggaatatgtgggccatcatcgatgagtgcaaagagaagctaaatttagcagcgactcacgagcaaggctagaggatgagt

SEQ ID NO: 232694 - DNA, 429 bp, Glycine max
  unsure (1)..(429): unsure at all n locations
gctngcttgccacacaaccaatgcctatttccacctttagcacaaaccaaaacaccaaccaaggaaggaatttttgcacaaaaaagcttgaagaattcaccccaattccggtgacctatgctaacttgctcccatatctacttgataattcaatggtagccataaccctagccaaggttcctcaacctccatattttcaaggatatgactcgaatgcaacatgtgcttatcaaggaggaggcatggggattccattgagcattgtaaaacataaggtgcaaggtctaattgatgtgggttggctgaaatttgaggagaatcacttgtgaattctgacattggcaggtgacaccatacatagggcaatttgaaggttgttgttagatgtctctaatgactcattaggattttcaagtttatgccattatt

SEQ ID NO: 232695 - DNA, 435 bp, Glycine max
  unsure (1)..(435): unsure at all n locations
agcttgatatgggaaagcgtggaagagtttttctttctacttttgtntgttgaccacagagtggtacctggagatatgtcgcgggggtcaggagaccttggggacgtcaggtggggtgctattgcccaaaaccaagcttggctaatcccgacccaacccggcatagtcaatcagtgagaacctgcgacgtacctaagcaggcgagctcctggcagtcaaccaataaaagaacaaagtccacgaagcaaggaagcttgtgtggcggctggccaactatgtatcttgggtggtatctggaaattagcctctggtaatcgattaccattcgtgggtaatcggttacaggggttaaaaatggagacaggatgttaaatggcctctggtaatccattaccaattgtgtgtaatcgattacacagggtgatagggcactgg

SEQ ID NO: 232696 - DNA, 406 bp, Glycine max
  unsure (1)..(406): unsure at all n locations
agctntgnatccaagtcactctctgggtggtgaaacttctccttccaaggcttattctctagcggatgacacctcctctcacctcttctcctttatcttctactgcaactccatggctgaaaatcaccattgaaagaccttattgaagctcaaagattcaacctccatagaagcttcttaagcaagcttccatcacacatactataacacaacatcattctatgctacatcgatctacaatacctagctcattcctaataaagaagaacctatctctagcaagaggtttaataaagatgtcagctagttgatgttcactatcaacaaactcaatgtaacaatcaccttttgatacatgaactcttagtaaatgatgcctaatatctatatatttaggtctaaaatg

SEQ ID NO: 232697 - DNA, 435 bp, Glycine max
  unsure (1)..(435): unsure at all n locations
agctttcaacttgtggtgtccttatctttatggtcacaacttcttaatgtaacatgcatgccacatcaagttcaaaacatattataatcgatttatatacatcaggtttgttttttcccttattaaaaattaatatttcagaaaaattaacaacatgcgagaatacttttttagttgatggcgttattttnttaattaaaaggataagaaaacagacgtgaaccgggaatctgaatttgatccattaaagccctttatgaataaggttaatgtgctaaggacaaaatttagctattttttaagtattttatttaccgctttttggtttaattagagtaaaataatttatttcaataattcatgtagtaaaatttaaccattaatggccgcgctttattattgagataaaactctaattttaactaaaattaatac

SEQ ID NO: 232698 - DNA, 399 bp, Glycine max
agctctgacttgagtcatcaagagagtatatatatgtgaccatggcatgagtttcaataatcatcaatcatctttgaatcatctatctttctatcttttttcaacatcatctctaaaacatctttcaatcaatctttctacacaattttctaattcatgtctctttatctttctaaaagtttgttatcaacactttctctttcaagaaaagttctttgttcaaaaacttgtgttattcagctttttcattctcttctcccgttgccaaaagaacgaaggactaaccgcctaaattcttttgggtctctcttctcccttacaaaagattcaaaggactaaccgcctgagaattcttttgattcttcccttccccttaagcaaaagatttcaaaggactaa

SEQ ID NO: 232699 - DNA, 387 bp, Glycine max
  unsure (1)..(387): unsure at all n locations
agccaaacccaatcaccctcattaagaactagctcttttctctctctattgcctttattagaaacaccttcgttggccctctatttggttcttaaccctctcatgcaacttctttacaaattctgacctaaattccccttctttatgtataaaagaagtgtccaatgggaggggaatgaggtctaacggcgttaagggattgaacccataaacaacctcaaaaggggactgcttggtggttctatgaacccccctattgtaggcaaattctacatgaggaagatactcatcccaagacttatggttgcctttcagaagagcccttaaaagggtggataaagacctattcactacctctgtttgcccatcagnttgtggatgacaagt

SEQ ID NO: 232700 - DNA, 282 bp, Glycine max
agcctatcaaataactgagagatgcattcaagattaaatcaaaactccacaaatcataacagaaccaatttcccataaacaggaattaggacttgccggaaattataattataaccccttatgaaaaatcctaagtcttaaaacttcaaacatgttccaacagcagcaaaccaggtaaatattttatcattcctcttgctcaccttactaagctgttggagtaattgaagctgatgatgaattggtgccttctctgataaatacttcaagcctttcctaaat

SEQ ID NO: 232701 - DNA, 328 bp, Glycine max
aggcaaccctccattagcgaaggcctttcacgtggacttggaaactgtgtgatgcacaaaactgagagaacggtggccctgcggtaataagacaatctcttattcagccaccctgataactcaaaataatataacatcgcgtaatttcaagagctaatatgaaaatggaaatcaaatgcgagttgccgatggggatctacctattgttgcttcacatgggtaagaaatcagttaggcttgcaaaatcaaaatccgcttatagggtaaccaagctcatgtagagctacatgacatgaaaaacggaggtgaaaatataaaacacttgacc

SEQ ID NO: 232702 - DNA, 195 bp, Glycine max
gaaaaaaatgaatgcgacccattcccctagaaagactcggcaaaaaaaaggcgcaaaaacaccccgaaccaagacacgaacgggcgcacccctaccacaaatacggaggggaaaggcggcacaaaacacctgtgtcgcggccaaagagccatactccaaccaatttctaaacacgagaacccccacccacgagaa

SEQ ID NO: 232703 - DNA, 398 bp, Glycine max
tgaacaatcgatataacaatatctcgtatatagaacatggttttgtacttgtccatggttgaatcaattatcagaatgttaacttgtatttaagcctcaggacaagaaaccaatggaatcagcaaccaacaatattgacagaataattgcaaatctcatgttcaagagcatggaggtcaacatacatcattctccaattacatcatcgacaaactccattcaacaagttattgaaagtaataatggtctacatggaaacagctccaaagccatgaatatggaagaaaagttttgctattcccatccccaaaaaatactagtagatgccgaaattccaacgtttagactaaataatcaaccaagggacacaggttcaaacattacatgtgaaggcccat

SEQ ID NO: 232704 - DNA, 344 bp, Glycine max
acaccgcttgaaaaccacaggaacagactcattgcctcaatactggtgacaaaagcacaatctactctatattcatcacaataatgcgtctagcattgtcatgcacaatagccattcagaaagacagaaagagctaaaacaacccaccaaacaaaattgatagaaattggctactacatgaaaaaaaacatattaggattagagcatatctataatcgttcaaatctttggtactgacacttttcatgccatctcttcatttatcgttaaaaggagaagtaaaaacaaaagtggcgtgacgaggacaggacaatagaagagacaaggaaaccaatggggagtac

SEQ ID NO: 232705 - DNA, 412 bp, Glycine max
  unsure (1)..(412): unsure at all n locations
agctttaaaggaaagatggctgcacaaggttcttgtttgatatggntatctgatatatggtctatttggacattaagaaatgggaatatctttcaaaatgatgagtgtgcagcggaaaggtatcaaatatagatcctggatgtggattagaaaaaagatgaagggaatagaggatgtgtatttgtatgcgtggtgtatagacccaatatttggattaaaccagcactgataaacactttcatgcagggcaatgtattatggcttattcatatcatgcaactcttttatctgggtctgctattgctcacgacttgtgacataaccacagtttaatgaattttcttttagcttgtaaaaacaaaaaaaaaacgaacgatgacgtttgtgctgttgaaagaaatgtcttaaatta

SEQ ID NO: 232706 - DNA, 392 bp, Glycine max
  unsure (1)..(392): unsure at all n locations
agctngnataaggagaagagaattccatctgtttatcaatatcctccgcggattttgttgcgcatggaacaattntacttagccatacacttcgactttgaaatatgtctccttacatcgattgatctccaaatgaattgtgatcggatttaattctcgtgaacggccaaaaaagttgattgtgttcttacagaatatgatgtgccatcaaagtttgaacaatttgatatagatattcttctttacaattttatgaagaagaaaaatagatatttttaatttttgtgtcctgcttaggatcagcaacaagggttcgatgatcttcaaaataaaccactaatgggcctttggattgcaggggattcacatcccgagaatagattatgagcact

SEQ ID NO: 232707 - DNA, 410 bp, Glycine max
  unsure (1)..(410): unsure at all n locations
gctttccacagtgaatacaacacctaatgttatattagangggaactgggtatcttaacataagagatttcagatggactctaatcctaatcccacagccgaccttttcacgagatctctacttaaccctttggttaaatgatcggccaaattatgctgagttctcacaaacttcactgatatcacaccatgcatgattaactcccgaaccatgttgtgtctaacacccaagtgtctagacttcccattatacacttgactatatgccttagccaaagtagcctgactatcgcacatgatagacatgggaggtataggtttgggccataatggaatcttataaatcagatttcttaaccactcagcttctttaccagctgctggtatagctacaaattcagattccattg

SEQ ID NO: 232708 - DNA, 420 bp, Glycine max
  unsure (1)..(420): unsure at all n locations
agcttgatggctagtgtaaacattttctatacatataagncgcgaaagagattgaacgtgatgctagtggaggaacacttatatnttgatggttgtttaaaaggcattacatttgttcctatggatgtctttacttctggactaggttatagcttggaatcataaagcttttcaccccccttccccaattcaaaatgttgtttagagtattttctagtcttgagtttaatataattatatatacttgaataccacaaacatttctagttgtccttttgtgcctgcatgaatatatatattaacagttacaaatgatgtttaacagagtcccagatggcaactcttaatcttcttggtgtggatagcgtactgaccacggttcactattctaacccatattgaagatggagatcattttac

SEQ ID NO: 232709 - DNA, 423 bp, Glycine max
  unsure (1)..(423): unsure at all n locations
attttagtagatgaagatgaatctgtggccacctcatggactcctctaaggataatagcatcattncttgcactgaattgttgggagttggaagccatcttctcaatcaaattcctagcttcagcaggggtcatatcaccaagagctccaccattggcagcatcaatcatattcctatccatgttgttaagtccctcatagaaatattgaagaaggagttgctcacaaatctggtggttaggatagcttgcacacaatttcttgaatctttcctagtactcatacaagctttctccactaagttgcctgatgcctgaaatgtcttttctgatggcagtggtcctagatgcagggaagaatttctccacaaacaccctcttaaggtcatcccagctgaaaacggacctgggagcaaggtagtat

SEQ ID NO: 232710 - DNA, 374 bp, Glycine max
gacattcaccacagattctgccttcttctattttcagattgggaatgcctctaacagcacctttgtcaatgattattttcatgcctcttaagtgcagatgtccaaatctttgatgccatatattgacttcatcttctttggaaactagacatgtggaggagtaactggtttcttgaggtgtccataggtaacagttgtcctttgatctgctgcccttcattaggacttcaatcttctcatttgtcaccaagcattctgactttgtaaagtttacattgagtccttcatcacacaactgactgatgctgatcaagttcccagtcagtcccttcaccagcagtactttgttcaaactatgaagtccttcatggact

SEQ ID NO: 232711 - DNA, 329 bp, Glycine max
gggggggaggtaaattttttcccccaataaacgaccaatcgtaaatagaattttgactagacccagcagattggacatacgtacctaccttaggagggggaaagcctatctatattacatagcaccactatatgatggatcagactaatggaggtgtgtatgtgataaccataaaaacaagcgtggtccctgtcaacatgttaaatattgagagcctatctgattaatcagataggagccctatttcaacgccacatgcctctcattgtttgctgaagctaccaggccaaatgagtgcgtcggcgagcattgactttttatgaccaaaa

SEQ ID NO: 232712 - DNA, 381 bp, Glycine max
gactgcagcagcaactggcgggcggggagaggaattttcttccccgcagagctcgcaaacaacaacagttccacgacagaaaaaccattacctcggcgaaatcaatactcttatataatggatgctaagacacaaccacaaactaaaggcaagacacttgcatagaagtaaattaactcgttaacaatagcaaaaaatcaaccccacaccaaaatcggacgataacacgtggatatcaagaatcaactgtcctatccaacatacaataattggcggtgaacagagatgcacatgccatattacatgcccctgatgcacataacccttgacatggcatactcccggaactgtaaccacaagtcgtctaaacttcaacacgac

SEQ ID NO: 232713 - DNA, 416 bp, Glycine max
  unsure (1)..(416): unsure at all n locations
atgcaagctggagcaaaggaatacagagtctgtgcatatcgngtacctgcttgagacctccattctgggcagtccatgggctattttgatattccagctagacaagtgtttggccaggtaacggatcattatgtcactaccatatatgaatagcacggaagaataaaaagcatttaatctattaaactcaaacaaacatggctcggatgtgtagtatattcgtacattgtaattgatagtccatccaaaaatttgctaatatattgtatttatgcatcctacagccgaactgaaatgaagggacaaccttctggaaacaggcttattttactgtttatagttatatgaccatttaacatcacgactcctggagaaaaaaacttcaaaactagtttccttataccggctaaatcatc

SEQ ID NO: 232714 - DNA, 392 bp, Glycine max
tattgcccacaagtagaggctgaacttagccaatgcttttgtaatggctaccaatctcctggcggaagcagattgcttttgcattcgaggagctaatttttctgaaaaatatgctataggatgaccattctgactcaacactgctcctactccaattcccgaagcatcagtctccaaaatgaatggttgtgtaaaaacaggtaaggctagcactggcgctataatcatggcatttttgagcttaaagaaagctgcttctgcttcagaaatccacacaaaaatatctttctttaacaaatctgttaaaggggcaacaatgtgggcataggctttgacgaatcttctatagtatcctgccaaaccaagaaaccctctcaatcgtttgctattgg

SEQ ID NO: 232715 - DNA, 394 bp, Glycine max
  unsure (1)..(394): unsure at all n locations
agctnttcgattcattctatgcacccttattggtccacattgggtttcgggcattnttattctcgtttttgtttactttttataccccctgttgacgtgcttaagccattttacttaagtcgtttctcgcttaacttaaaaataaaataaatttccaccgaacgtttgaattgtattatccattaacttcggttaaaatcaattccgaccgttcggtcgtgccgtaaccacgttggaaatcaaaaagaggtaaagaaataatataataatcaaaaaatatctttttagtaaaataaagcggaaaatcaatcggacgttttctctttgggattcctcattcttaatcgaatggattaataactanagtgaaactaaggctaaaatcaactcgcct

SEQ ID NO: 232716 - DNA, 423 bp, Glycine max
  unsure (1)..(423): unsure at all n locations
agacttcatagggaaagcaggtgcagcctattnccttagagacctcctacgaggtggaggttgtgccttgttctcagaatgtgcaaaatcagaatgctcagaatcagaatgcccaaaatcataatgctcaagatcaggatgttcaaaatcaccaatatcagaatgctcagattctccatttatggaatgctcataatgatcataaggtataaaatgatgcctaactaatctatgaaatgtcctatctatctcacgatcaaagggttgtaagtcaaatggattgcctctactcatacactacattcagcatgcacaccaactagtagccttgtcatgtaaataaaggggttggtttgaaccacagcttccctcaaatgatatccaaatgaccttgaattttgtgacccacccttttaaaatatg

SEQ ID NO: 232717 - DNA, 413 bp, Glycine max
  unsure (1)..(413): unsure at all n locations
agctggagcattccgtgatgttaggttatttcaccttccaacntttggattgaagagtttcactatgaaacctgataacaattatatgtggactatcatgtatgcactttgctgaaaataaatttgaagcctgtgaagatgacataaacaaaggtgcattatgtattgctctttttccgccgtttcaatcttacagctccactggagaaaggacagccttacatttttcgtgttggttctggtcaggtaaactctggatgttgcttttaatgttatcaagcttaagaattttaccttcattattgaagttagtgttcaacttgaaaaacaatatgtttggggccaaattgtttgataatcattttgaagattaactggatttcaacccaatgagttacacagtgatacaagga

SEQ ID NO: 232718 - DNA, 404 bp, Glycine max
atttatatccgaatattttattcctttattaatatatatgcgaggcgtaaagggtgtcacaaagtcaactatctgatgtcttgccctaaacaatgacaaatgctaatgcaaatatattatttgcccaatctcgtgcaattgctattaatagtgtccctttgtatcgaccataaagtcatgttccatcgatttgcaccatgagttcatagaatgcaaatgcatcaatgcatgccttaaatgatcaaaaaagtcaatggaatatgaccttgtttggaattggttcgcccaactcgtctattgcaaagtttggttgaagactgacaattattccattgacgaatagttgcaatgctctcacataatttgggaaaatgtttgatgaatacttcctaataccataatac

SEQ ID NO: 232719 - DNA, 373 bp, Glycine max
actcgtgcctatgcccaccaaatatatattgatggatatttcaatggtgatcctcattcaagtactctctctttctctccctctacgtttgtgcttatgtatgcatgtgcatatgaatgaacactctcgattgttccatgtgctcatgaactattttggctctcttactggaatcatcataggaaattttcttgtgagcaaggaatctccacatcgtcctattttacttgactttggccttacaaagaaactatcaagcaccattaagcaagcacttgcaaagatgtttttggcttctgctgaggttggttttggcttttgcgcttttcatgattatggggatactaataacatcatatatattggttatgta

SEQ ID NO: 232720 - DNA, 388 bp, Glycine max
  unsure (1)..(388): unsure at all n locations
ctgcagctgttaaaccgggggagaggcacattgcncaaaattataatcctgttaccaatggcacggaaacttaattgctagttgatgatacttggtgtcaacgccatccatcttcaccatctttgttttagacagaacaacaaacccatgcgtaaaatctcaaagatctgtgctaaactgctacagtataatcaacactcaaaccaaatacgtgtattattaggcaaaaatggtgatcttgggagtcaaagagtgaggaagagaaacgaatagggcgtgtgcttaaccgttggagtccgatggatacctctccatttcataagagtttaactgaagagtgtctgtttatgccacgataaaagatggtgggggggatatataaccgatg

SEQ ID NO: 232721 - DNA, 304 bp, Glycine max
aaacttatcccccgaggtccgattaggcgccttatacatctagaggctcgtaattgaacaacgaatgctttctagaaattctaatgtacataactgttcaaacagatagccgatttatgcgcataatttattgagaatgctgaaattgaaccactaatgctctcgaaaaatacaaattgccataacttgtcacacggaaagtcgattcacgcgcatactatatctagttgatcgaaactgaaaaatgaaagctctccaaatattcatatggtcataacttgtcccacggaaatccgattcaggc

SEQ ID NO: 232722 - DNA, 382 bp, Glycine max
  unsure (1)..(382): unsure at all n locations
gcaagcttgaaaagggttcttagtggaattattattgcgccgngaaggcgcgtaggcactgcagtgtctcgctttcaaacgtgacgatcaaactatattatcgcggtgaagtcctgggatttaaaaacgggtttcccaggatagcttgaggcgttggagaacgagattcggatccttcagcgcatgtcttttccgcacgtggtaacttttttctgcgacgacgcctcctgcgagcagcggatccttcatatggagtacatgccaggtggcacgctcgctgacctggatgctgacgtggaccaaattctagagagaccctacacttgctgccttggagctctcttaaacacttgcactcaactgcgttctcactgcgacgtga

SEQ ID NO: 232723 - DNA, 299 bp, Glycine max
ttaatcaccgcggctgcacttaggaggagaggacgttttctgcacataactgaattccactgcatggacaaggattaacacgaatttgcaaccatatattcgaccacactttatctttgcacataattccatcaccatctacagaagaatacctgcgagatactatatgatgaatatccccaactatactgcattccattcaaaaaagaaatgaaaggataattctcatttatcttccaccgggatataagagggaccctcagggcttttacccctaaccaatagcacatttgctcaat

SEQ ID NO: 232724 - DNA, 425 bp, Glycine max
  unsure (1)..(425): unsure at all n locations
agctnaatttgagtggtgggggcgctattacctgatatgctcctaaaacgcatataagacaaaaatgagttcttcttgaacagcacagccacagtccacagataatataaaaaaattgtgtcttgcacaagaacaagaaaaaaaaaggacatatgtgtcgataaactgagtgaggattattcatctttctacagtcatcaatgtaggcgaaacgaatgctcttatgacagatacaaagcttctaaataatcattaatgtaggccaagctcggccaatgatctgtacgaatacgaactaaagttgaaacatcaccaactctcatttggaaaaggagatggaaccgcggtggaagtatattagaacaagaaaacacccaggtttgtttgttactattgctatagcccccttctatactcttatcatt

SEQ ID NO: 232725 - DNA, 350 bp, Glycine max
aaggaacttatcatctctatctgacacaataatcctacgcaaaccatagagtctcataatttccccaaagaagagctttgagatgtgggaaacatcatcaaccttatgccatggtataaagtgtgccattttgctaaacctatccaccaccacaaagatagagtctacacgtctttaggttcaaggaagcccaagaacaaagaccatactaatgtctaccgagggtgcaaatgggatgagtaagggtgtgtatagcctatgaggtatcaccctagactaagcttgtaaacaagccacacacctagtgcaatcactacaataaaaatgaccttatcctacagacaaaaact

SEQ ID NO: 232726 - DNA, 434 bp, Glycine max
agcttatttatattattgagatattcttataaaatattacaagaaattcttttataaaaaaaatcttctaaaatccatctaaaattctaatccagtacatcccattaaacttttattgctttcacagatatgtcaagacatcctaataatggagtggaaactaaagaaacacgcataacaaaacgattcagacagatacaaagtgattcatacttgatctcatataagattactttcttaggtacatgccaaacgtttttctctaataaacttagcaaaagccaccattttctcatggtctgggagggtttttttaataactgcaacatccttgaaattattataccatgaatgcaagtgaaggaatttctcatcttccaggaccttcgcgtcaagaatatcttctgcaaccacaagaattttgaatatggacc

SEQ ID NO: 232727 - DNA, 233 bp, Glycine max
attgaaagaacaaaaatatactctaacgattcagatactgattacataggagaagtgaacctaaaagtgaaaaaaaaggtctaattcatgatgaaataaaatgataaattatgtcacagggaatgttacatcacctcgcatgattgataaagctaaggtagggctatcatgaatgatatattacagaatcagttttggtatggctagaaaagaggacaagcttcaattttgat

SEQ ID NO: 232728 - DNA, 434 bp, Glycine max
  unsure (1)..(434): unsure at all n locations
agctntctctagtttattatcataagaccctcactganagcttccatggtgatccctacatagttctctaaaccctgcctaagatggttcttccaaaagtcgacttagaatctatagaatttaagataatntttctaattacaatcttagaatttaaaaaaaattaaaaaaaaaacctaccgtaatatttttttatcatataaaaattcaccataattgactatagaatttacaaatcatatttgataaaaatcgtctctcttccgaacatgatgatattgtgttactcaataaatttttttttaaattcatgattgatttggtgaaaaaaatcttacaacttaaaagaaagtcacatttttcccctaattataccatgcaataatattaaaaaattcaaatgaaattgtaaattaaattatatatgaagatta

SEQ ID NO: 232729 - DNA, 432 bp, Glycine max
catgcaagctttttttttagtagtgtgttgaattttctttattataatttatgcaacaaggttggctaattttctggattgacaaaattttcatgttacgtttggaattttaatgttgttatggtaatgtcttaaatttgaatctcatgcaacatgtaaccactgtgtttgggcaattctagagactagaacatataccttgtgaaaagaaagaaatgtggcggagaaagatagactgccttcttagtgttagtgatcacattgttgagttaataccttcgtggcaaacatttccagatggaagtaagcttgaggtacaatttgattgaatactcatttggacttcaaatttcttctcgataaagagttctctatttgtgttttaattgacttacgaattgcaattgtgatgtttgaatatggcgattctac

SEQ ID NO: 232730 - DNA, 416 bp, Glycine max
tgcaagcttgatctttttactgtggaagattagttatgattatttgataataatcttacgcttcaaaacgtttggtgaattaattttaaagagatcataataattctaataaaaaatttatgttaaaaggttgttttaaacttaaataaacattataagataccaagaagatctaacttagaatgtggttgaattggtgtcaatcgtttaatacttatatttgatttcaactgttaaaaaaaaaaaggcaattctgctaaattataaagaaagcttcacaacgacaaagtgtaggctaattttattttttaaaaaaagttgctcaatatcgctgattaatatttgatcattgatttatttttattccatcaaaattataaatcatatcaaaatttatttagaagctaatcaacacc

SEQ ID NO: 232731 - DNA, 368 bp, Glycine max
cgcttctcttacttggtgtgactgtacattatttatgacaatcaactggctaaggatttatattgatcattctcacatttataatacatcttgaagcagtttgaaattaaaggactaatttatttatattgtgacattaaaatttcttatatttttgcgccaaattccttggaggttatttccaaattcccatcttggtttggtctttgcaccttgggcctctgaacctaccctttcgtaaccataggggccgacacttatttaggaccacttgggaaaacatttgacataataaagctattggacatatataggtcccatcccagtaaaatatattctatttaatcatccattattattatatataa

SEQ ID NO: 232732 - DNA, 321 bp, Glycine max
  unsure (1)..(321): unsure at all n locations
tccttanatggccgaggaccaaacacaaaaataacatattaaactttcctatggattgtagtcacaactcaacaaacggggttgttgtttgttttgtggtggaggatttgtaactgttcacagacatggtgggtgattgtgttctttgttctacaatgaatgcggtgaaagggcatgattagtatccgtggtgtccctgtccgtggaaactcttggcggcgacacaaaggtgttgattttgttgcaggtttttctagaaatagaagagtggactgaccactccctctttggaggatactatcttttttgcacatgaaaggc

SEQ ID NO: 232733 - DNA, 321 bp, Glycine max
ctgcaacttaaaggtacataaccttattcttctgggaagacaatgtaagctacttaattgggaatatggtcagccgaactcaaagaatctcttcaatctttggctctcctttattcaagaagaccacgcaaggccttaacggggaccttctacccctatatatatgggaaacaataaaaccacccctcggcttttgcaaaaaactacttttaaacgctcaatgcttgaaaagacactactttcaatgcccccacaaaacatgattgagggcacaattattgaccaatagctctattccttcttatgaaggaaacaaaggga

SEQ ID NO: 232734 - DNA, 390 bp, Glycine max
  unsure (1)..(390): unsure at all n locations
cacaagttgagttttattcagaaaagtagagtttatctcttttatcttagtgagagcgattctcctaagtccttgagcgattcaagaacaccctgngtatatcaaaggacttccaaacctttgtgtgttgccctcgctggaaagagggattctttccttcctttcatcttcaaccttgttctttcaaatcacaattccagaaaatcgacttctgcctagaattatctcgtggtcataactcccgttttacgcactcaaattaagtgattcttgagcctaaattgaatttcagaacgagaacttctacctcgtgttggaatcacctcatttagagccctggagcctgagttattcccatttctattttctgggcagccaccacttaacata

SEQ ID NO: 232735 - DNA, 423 bp, Glycine max
  unsure (1)..(423): unsure at all n locations
ccggatcttaagcgacgcggctgcagcttctagctgtgattggtgtatttttatctcctttcggggctctaaattgggggagtgggctcaaatatatggggcaattttgatttgtttccttgcttgattaagttgaattagggttggtatgaactggccctangcctataatgcattttgaaacaataggacatgccacattgtccccgttctcttgctattgatgcctaaacgcgcgcccaccaagtgttcggtgaaatgcctcaatggcattagcgcgtgacttttgtaaggagacaacccatggggtattttggtttgtgcatanttttctattttcggaatatgtattcattcccgaaaaaggctagagtaattgcccaacatatatcctagttctagaaactgaaattntatgcaaaa

SEQ ID NO: 232736 - DNA, 424 bp, Glycine max
ctgcagctataaaatactagattggtagtttcagatagacacattgctttcaatagtaaaagaattatcattataattgacaggttgcacgctattatattagattagacaaatttcttttcaatatcaaaataaatttagaaacagagtaacacaagaactctgttttcttgtctcatattttttcttaattacaagtataacagtagtctaatagttgcatatttatcctaacttacctttttttttcttaaccctctcattcatcagggaaaaagaatcctaactaatccacataatttatgcagtgtatacaagcatttatacatcctaaccaaatgacagcaaataacaattcaatttagacatcctaaccaaatgaaagcaaaatacaataggtgatgcattaaaattaaggagtttg

SEQ ID NO: 232737 - DNA, 271 bp, Glycine max
  unsure (1)..(271): unsure at all n locations
agctntgggtctcttaaaagtttaatgacaatcttgcccctggcttgtttttctataaatttgctgcacctgcttccgattttacgcttcctttgtggatcactttcactatcgtcctgtgtgctgggtggtttttgcacatttgttggaagtagttgttccgcgaaggttaaatattgatgggtgttaatcgagttgctattcttattccttggaggtcccaatttatggtttttttggggtttttttttgtgttcctaaggtacaaaag

SEQ ID NO: 232738 - DNA, 422 bp, Glycine max
agcttaaacataattatttagttaagtctctttttttttttcattcaccaaaacaaaaaaaaaaagttactttttattactaagactggctttagtatctgtatttcgaaaatgatgattttggttcggggttaaatatattctttatttctctaattcaactttttttttttgacatgcaaagtttgatttttctttcattctagttcttttgtaaaatatatttattctttttaaaattttaatatgatttaaataatattttcttattgcttaaagtgtcattcaatatttcaaggataataactatattttataagaattaaaataattttttatagggatgaaaataaaaaaacattacgttactggaaaatatatatttaagctctttctctattcttattatcttatattggaaa

SEQ ID NO: 232739 - DNA, 424 bp, Glycine max
  unsure (1)..(424): unsure at all n locations
tcaagctangcaattattacataagggcttcatggctggtgcttctcgttcatacagagaccaaagaagaggatcgccactgattcgggcaaggtgacaaaggcgactgattactgcattattatcattattactattatatctagacgtagcatcaattttgttgtttgacatcttttataatttatgttgtggttgaatacttttttctattcatcaattgtttaaacaatgtgcaccaagcaacaacaacaacctctttaatcgattcttaaaacaaatatcaacaactgaagaagcactgataatacataagtttcttacaaaaagtatgatttttatacaataaaacatgactacacatatttagcacgcatatatgcaatatctcatcagcggatcttggtttccctgatttttgcac

SEQ ID NO: 232740 - DNA, 411 bp, Glycine max
tgcttgcaacaatctttctcaaatcatggaaagagggggaaatgtatcaagtgtttcttttactagcaaaaataacacgggtcacgagaggaagctcaatataaaagtataaagacagaaaaaacatgaaatgaatatgggtcctctctttaatttctccacctcttgacttctctggattttgacctggacatcaaagtccttacacctagtcgcacttctacatgcgcctgaagacattatgaatttatgataagttcacacatttcattattcttaaaagccacacatataggaacttttaattccttttggctattactaaacaatctctaattacatttaaagatcaatcttaaaaatacaaatgaatcatgtcttttccacatccaatcatggttgtgaaatgag

SEQ ID NO: 232741 - DNA, 467 bp, Glycine max
  unsure (1)..(467): unsure at all n locations
tataaaatataatntatacatcagtagtggatacattttctacgtacgctcctattcttgcaagacagcgattacagntgctctcataatgaaaattatatatttgacttctatgacgaagaatatgacgataataaagttaacaaataaattcatttctctcttgattactatgttatcggtatagtatattcactcattttgtgaaagactaattttcataaaagaaaaaagtctgactaatctctttggtgaaatctttattcttaatcatgttatattttttcatttacacaagttgaatttaataccttctttaagaaggacaagataaaaattattctggatgttgattaaggtacaggtatattgaatatccatgaatcgaatagcaatataattgatcttatcgggatttcttgtgtggtcctgcaggcaatagtttggacgtgattacttgtctgatc

SEQ ID NO: 232742 - DNA, 425 bp, Glycine max
  unsure (1)..(425): unsure at all n locations
agctngaaggtgcgtaccccaccatattttcatttaattcactgggaaggggcctatttattatgatcatctctttctctgtcattggaggtgccacttgagcggccaggtctctccacctttgggcatattctttgaaagattcgtgcccctttttgcacatgttctgtagttgcatcctatctggagccatattagaattgtattgacactgcctaatgaaagcaaccattaggtccttccaagaatggactcgggaaggttcccagttagtgtaccaggtaacaactaccccagtaagactttcttggaaaaaatgtatcagcagttcctcatcttttgtgtatgcccccatcttccgacaatacatcttttgatggttcttgtggtaagtagtctccttgtacttgtcaaagtccgacacc

SEQ ID NO: 232743 - DNA, 480 bp, Glycine max
tactaacttcaaaataatggcctcataagcactagtaccttaatgcatccactttataggcctcccattgttaatgaactgggataccactatctgaaaacccgcatgcaagatttcataaaggctatagatttaaacattcgggaagccataaaaatatggccgtatattcccaccatggctgctggaaatacaacagtataaaagcctaggtaagattggagtgaggatgaaagatgactagtacaatataacttagaagccaaaatcataattacatctgccctaggaatgaatgaatactttatggtatcaaactataaaagtgcaaaggatatgtgggataccctactagcaacacatgaatgcacaacacgatgttaaataatctatgataaacacattaactcatgaatatgaactatttaggatgaatgccaacgaaagtatacacgacatgcataagatgttcacacacat

SEQ ID NO: 232744 - DNA, 421 bp, Glycine max
  unsure (1)..(421): unsure at all n locations
agctttttgccagttgacgggaatatatttgccatcgcggtcagttcagccaccgccggaatgcatatcacgctaatggcgttgaaaattggcaagggcgatgaagtgattacgccttccctgacctgggtttcaaccctcaatatgatttccttgttgggtgcaacgccggtaatggtggatgtcgaccgcgatacgctgatggtcacgcctgaagctatcgagtcagccattacgccacgcactaaagccatcattccggtgcattatgccggtgcgccagcagatattgacgccattcgcgccattggcgaacgttacggcatcgcagttatcgaagatgctgcccatgccgtcggtacgtattacaaagggcgacatattggcgcanaaggtaccgctattttttcatttcatgcca

SEQ ID NO: 232745 - DNA, 484 bp, Glycine max
  unsure (1)..(484): unsure at all n locations
ctatanaatactcagccttnctgctcgntataaacaggaataaccactctttactttcttaacagggtggatgtcaaacatggcttattgtcctgcgagttgctgaaaggctgtgatgacatggtcggcatcggcggtagtcatattcgggaacagcggcaaagaacagatgcgctcgctattccattcagtattcggtaacgacagcgtaggaaaacgctcgcgataataattttgtgtgtgagcggcgcggaaatgtaacccgggaccaatgcctctttcttttaacgcttccatcaacgcatcgcgactgataccacatcgttgttcatcgacacgaataataaacagatgccacgcgtgaacgtgcggtcacgcggtaaggcttaatggctgaaatgggagagctgccagtgcttgctgatatggctggtgcaatttcgcgccgacgggtgttgaggtgctctaatttgactaactgtgc

SEQ ID NO: 232746 - DNA, 422 bp, Glycine max
aagcttgatatcctttggtccggtaactttttttttctcatgggcacccaaacccaatcttcgggttcgaagacaaccttctttctccctttgttggcttgtttagcatagcttttatttttcctctcaatttgatctttgactctctcatgaagcttcttcacatagtctgcctttgcttgaccttctttatgcttaaaaacagaaacattaggcataggcaaaagatcaagaggagttagtgggttaaaaccataaacaacttctaaaggagaacaattagtggtgctatgaacagctctattgtaagcaaattcaacatggggtaaacaagcttcccaagtttttgagttcttcctcacaactgtcctaagcaaagttccccaagtcctattaacaacctcacgtttgcccatcggttt

SEQ ID NO: 232747 - DNA, 442 bp, Glycine max
actcgctgaatgacaacgagctctggaattaatggcataactctcaatggaccgccgattcaggcgcataatatatcgacaagggcgaaattgaacaacagaagctctcgaggaatttaaatggtcataacttgttacacggaagtgcgatttaggcgcataatatatcgagacgctcgaaattgaacaacggaagctctctagaaattcatatggtcataacgtgtcacacagaggtctgattccggcggatagtatattgagaaggtcggaattgaacaacggaagctctcgagaaattcaaatggtcataacttttgagacggttgtccgattaaggcgcattatatatcgtgaagattgaaatcgaacaacggaagcttgtgagaaattcaaatggtcttaacatataacacggaaggcttattcatgcggcatatat

SEQ ID NO: 232748 - DNA, 415 bp, Glycine max
  unsure (1)..(415): unsure at all n locations
agctttgtgttatcaattacactatttttgtaatcgattaccagngtttgtttctgaataaatcaaaagatgtaactcttcaaagggtttttgactttttcaaattggttttaagtttttctaaaggttataacttttctaaatggtcttcttgattagacatgaaaagtctataaaagcaaggctttgttttgcatttaaattattctttcaatcttgaacacttattcaatcaatcttttagaagccctaaatctctttgaacttcttcttcttctttgcaccaaaagccttctgaagttttctgtgtttctaaaccttgaaaacttgtgctattcatcttttcattctcttctccctttgccaaaaagaattcgccaaagactaactgcctgaattctttttgtgtctctct

SEQ ID NO: 232749 - DNA, 461 bp, Glycine max
  unsure (1)..(461): unsure at all n locations
tactaatactcagcttgagatacantgcggctgatatgctgatcttttctaaccttgcacacttgttgcccaaattcctttgatctcttatacatcagccaatacacgttccattttcaaatatccatgtgaaaataacattcttgttgcctcgatattttctctaaaactattcttttgtccgtcattttttcaaagacattttgctactggtaatcgattacaataatctggtaatcgattaccagagagtaaaaactctttggtaaacatgttttgagaaaaatccatgtgctactcagcttttgaaaaaaccttctcatacttattgtgagtaagacttctctcgatgcttgaatcttgagtcttgaatctagatcttgattcttggaacttgatccttgaatctgattcttgatccttgaatcaactatcctcttgaatcttgaagagttcttcaa

SEQ ID NO: 232750 - DNA, 426 bp, Glycine max
agattgagaaaacaatctcattaatactctctcaaaccttactaaactcttgcttcctattcctttatggccggaatttgtattggtgccttaatgaacaggtgaaagtacagtaattgcatgattatgctggaataagcaccattgttaggttgacaacaaacccaattggcaatttctctgagttataagaactaaaggttttgctctcggtgctgatctttctaaagctattggagccattagacatgctacaaataaatctgtcatacgtacgataagagaatggtactatgattagtcttctgtttttaaatgaaataggaattcaccatgtttatcattcagtgttcttatctcttggcacacttgaatacggctattggactatattgttaattaacaccctatatatgatctatacaa

SEQ ID NO: 232751 - DNA, 421 bp, Glycine max
agcttactagctagctactagaatggcttaccaaatactatatctgctttgtttaattaaaatacagctgaaaaaaaattatggagacacaccttgattgaagagatcaattgatctagttctttgctcttgtgccccttcttaattggactctcctcatccttgttaaaatcactcgagtcttccagtacttccattgttttcttgccttttcctttatttttgatgtcattgttgattgagttgttattcctttctaactccaatgccaaatttctctctctttcttgttgattcttctcttccaaatcaataattcttctacttcttcttttttctgtaaaatctatttcatcttaaaatctcacttgttttcttgttgacactatatgtatcaagacatgaagttgagaagctaaac

SEQ ID NO: 232752 - DNA, 481 bp, Glycine max
  unsure (1)..(481): unsure at all n locations
tataaccatgacttgcagaatatcctacatcttataccccatatttacagtagagctcaaagaatacaccatcttattgcctaacacccatgactagcanaatttcttacacccataattacagtggaactcaaagaatgaaccagcttatatcaatgccttgcaataaagtggcattcacctttaatcttgaagctacctgcaaaaaaacacaatttattaaacatacatcaaagataaactcattatcagtgtatgtaaggtagatctgtgattatggttctcagttctcaccactgaaaacagtgcagaaagcccaacaccaacaccaatccagaagagaggtgaccctctagaatatagcaaataggaccaatatgaatgtgaactaataagcaatagatatcaacanatctaaatcaataaagtatcgatcaacccaccccacccccagtagttagaagtacccattatataaata

SEQ ID NO: 232753 - DNA, 403 bp, Glycine max
agcataagcaccttcaattgctctttgctcttaatattcgaagagtatccttgtggaaccttcacccgacgaagacactaacaaaaacttatcttctccttcttggacaaaatatggcaggctgggggcaagtaaattttcttcccatcaaaccatggatgcaactgtgatcgtatacccatatcagctagatcttgacaggtattcaagtcatccttcgtcttgccttgaatgttaaggagcgtcccaatcacactgtcacaaacatttttctccacatgcataacattaatacaatgtctaacgtcaagatcacaccagtacggaagatcaaagaaaatggacctcttcttccatatgcaactctgactattatccttcttttgggtcttcgcaaatacaa

SEQ ID NO: 232754 - DNA, 430 bp, Glycine max
  unsure (1)..(430): unsure at all n locations
ntatctaaatcagatcaaattttatttgcttaactcaaccttggctagcttagcggaccaaatcagcttctagatgcaagggttgggcgctaaccgcttgagactcgcagtttatcgcatgaacagagatgcgtttagcgcgaggcttgcgcttagcgaaaggactgttttttttttcagaaaatatttctctaagttattactcagtcctctttccaatacattgaaacccttatgttaaacatccaaagattggttgatatacccctatgtacagactatatagcaagttccaaatgatttatatgcatataactaacaaagataacagaatttaaaattgggttacctcccaggaagcgcttctgtaacatcattagattgacgctattacctcactgtgtgatcttatgtttgtgttcctactttc

SEQ ID NO: 232755 - DNA, 404 bp, Glycine max
  unsure (1)..(404): unsure at all n locations
agctntaaataggctctgaattcacgactctgcgcttagcgcgagtaagtggaattggacttagtgctagtcttgcgcttagcctggctgaaggcacctgctgcgcttagcgcgcggctttgatgttgatgctctgccagattctccttcgcgctaagcatgctgaagctacgcttagcagtggatgcacgcttagcccaactgctgagctaagcccaactgctactttttgcaattcaaaacttagcctctttttcacctgaaaatgcacaaatttcatcattaaatccaatggatatgttctagagacagcgttaaccataaaattgtagaagtaaagactttgactttggtgttttgatgatgtcatatgatcatggcgttttgatgccttatggaaatgc

SEQ ID NO: 232756 - DNA, 346 bp, Glycine max
ttataagcgcgggtctgggatattatagtcaagcggtctcgatatacgaagatgatggtccgagtacattggatttggtacgaccatgccctcctgatttcaactgggaaattggcgagtggaggaacgccccggcatttatgcaacgagcataatgtaaacctttacggttttaaaagctctatagttgggcctaggctctatagattttccttctgtaaagctttgagtcttttgtttttgaatctataatacaaggatctttcttcatcagatcctacgtctctacccattctcattcatgtgcatgtttacctctttatttctgaaacggcagaaccgatga

SEQ ID NO: 232757 - DNA, 431 bp, Glycine max
caagcttgatatcaaggctaaaattatggttctttattgtttttaaaaatcctaatatacccattaaacaacttcacttaatattaaataattttaaaatgaaatttagcatatttgactgctttgaaggcttgtggaggggattctacatgaaaatggaggacaaaacctttgtttgttgatccaactattgtgaggtttatataggtgttccatttcttatgcgaataatacattgttattggttggcagtgctgcaatttatatcatgtgatgattgggaaattgaaagatatataatgacatgaggacaagattgcaccaactgagaaaaacaaaaggagatttagtatttggactagatttttggttgtgcctgaatttagtaataacaactatcctcattgtacgtgcgaaattatgcaaagtta

SEQ ID NO: 232758 - DNA, 490 bp, Glycine max
  unsure (1)..(490): unsure at all n locations
tgcatgatttacatctccctctctctcaagcaaatgncttcttgatatcatcacaatcttcatgagttacattctccccctttttgatgatgacaaccacctgtaggttaggagcaacaacaaagaaaatatctatttgcatatagtttactcccccttggttttacaatgattgcttatatgagacaattgaagatttcatatttttcatatataaaaagttgtctcataaaacaatagataatttttcttactattttatcttttatctttctctccccctttgtcaacatcaaaaacaaatcatgaatagagaggagaaagatgttaccacttgttgcaatgtatgagaatcaagtgatatcaaaaggcattagaacaatcattcaatattaatcaagcanaaacaagtacaataacacatcaatcaaacacaatcaaacacaatcaatcatcaaatatttcaaatcaaattaataagataacaatc

SEQ ID NO: 232759 - DNA, 431 bp, Glycine max
agcttcttttggaccttgaacaagcaatttacttttctttcagaaccatgctatgtgctcgcgactggtctctttcttcccttcgcaacttgagttcactattgctaccccatagagctccgcgaaatttgttccggccatactcttccttgcgagccctcttggtctcttgttcaagggctcttgcggtaattgcattctcttcccgtaacccggcacactccttccgaacgtgtgtagcggccaacttgaacttctccttggcaagttttgcctttcctaactcgcttttgagagcttggacttcttcgtcctcttccggtgcttcaaaactctcttcgctgacgacttttaacttggcgagccaatctaaacctcgtatatggactttcagccattcgtggtacccaccaatgatgccattacgaatg

SEQ ID NO: 232760 - DNA, 486 bp, Glycine max
  unsure (1)..(486): unsure at all n locations
cctaaatataacttcaaaaaagaggcgcacaaatacttatttcttatgttaatcnacaaagacctccatcttaaggaagggtaccactactggaaaacccgaatgcatatttttattgaggcaatagatctataatatctgggaagccatataaatagggcctcatatacccaccacagtacagagagtttcaatagatggtagttcatcaagtgaaagcataactatagaaaaacctacagatagatggtctgaagaggatataatacgagtacaatacaacttaaaagccaaaaacataataacatctgccctgggaatggatgaatatttcacggtttcaaattgtaagagtgctaagaaaatgtgggacactcttctattaacacatgaaggaactgcacatgttaaaagatctatgatatatgcactaactcatgagtatgaattatttagaatgaatgcaaatgagaatattcatagcat

SEQ ID NO: 232761 - DNA, 422 bp, Glycine max
  unsure (1)..(422): unsure at all n locations
agcttgagatgaggaagtgtngaagggttaaacttcctgtttttattgncgaccacagagtggtacctggagatatgtcgcgggggtcaggagaccttggggacgtcaggtggggtgctattgcccaaaaccaagcttgaccaatcccgacccaacccgggcatagtcggtcagggaaaacctgtgatgtacctaagcaggcgagctcctggcaatcaacagataaaaggaacaaagaccacaaagcaaggaggcttgtggtggctggccagctgtgaattttgtgtgatatgtggagtatggcctctggtaatcgattaccaagggtgggtaatcgattacaaggcttaaaaatgatgacagggggctaagatggtctctggtaatcgattaccagggtatgtaatcgattaccaggcttg

SEQ ID NO: 232762 - DNA, 479 bp, Glycine max
  unsure (1)..(479): unsure at all n locations
gggaatggatgtcttaactatgctttcaagtgagaatttttataagatttgaaagaatcccatctattaatgaagtcaattcttcctgttagacattagacgatctattactagacgacccanacatctcttacagttttgatgataacaaagatataaatttatattaaccattttgttgtatgtaagacataggtttaatgactggaagcaacactaggagatacatattcattactagataagttgtctactagaagcacaaagtactcatccagtccatccaaacaacgagtggaataagcactttatttaaattatctatntattccagtttataggattatgtttacaaggaacatatctacgaaactaccttttatttcttttatatgattaacggtcatattgagttatgaataacagatatggaaagtcccaaccctatcagacagaaatacgcagtatccgcttaattt

SEQ ID NO: 232763 - DNA, 423 bp, Glycine max
agctttagaacacaacataatatattgtttgtgttcatttgagttctaatcaatggttgtgtgttacacgaccttgcaaatgtattttgttttcatgagtgtcacttagatattagcctatatctcatagtgatagcccaccactacacttactaggtgaaccctcaacgagtgatctatgaccagcaccacacaatcaactatcatttaaaatgatctattcattaaattaaatatgtatacatcaaccttataattgcctaagtttaccgtacacctcatcataggaatgagaattgaaacgactatacaaaaataataatttcgatgtactttaaccaacaaataacttcattgttatcggttgaattccattcatgagatcgtcaatcacacaaagacgggtgtccattgttgtgactg

SEQ ID NO: 232764 - DNA, 429 bp, Glycine max
tctagactctctacaagactgaagctctgataccacttgctatactagtggcctctaatatcttaaggagggttgaatgaagacgtcacaaactttctactaatgctaaaatgtctatgatgattctaacccagaccccaggattccttgtccaatgaactcctacctaattgtgccatatccacttactgaatagatgccatactcgatattaaatcttctagtgtacgggaaggagcagggccctctcttatttatactcgttgggccacacccttgtgcctacgtacagtctccaagcaacgcgcttacgagttccattatctggcaaaagccctttacaagttctgaaccccacaaagacgacccttacttggtgctcagaccgctatacgaccagagaccgtcggtctcttactcccttttcag

SEQ ID NO: 232765 - DNA, 429 bp, Glycine max
agcttaaccattttggcccataaggagtttgtttttaatattgccatctattgagcccgccttcattactcattgtagggtgttgctaggtgcaccctatgccattacttgtgcaccctgtaatttaagtgaagtggcaaaaatatccttcacttaaattttaaaaaccagcctccctcgtggtgcccatacaatgccgcaaaccaagcttcctcctcctccacctctctatgttctctgccgcactgccaccatcctcagcttccattgctaccatttaggctgtctccaccatcattgttccgtttccacagccgtcaaggtaagtgtttgacgttttatttggttggttgtgttgcatttctaattcgtataacgcatacggtattgataatctatatgagttatacgaaataattatatcatata

SEQ ID NO: 232766 - DNA, 435 bp, Glycine max
aattcgatattatacaattagactccaggagagaataatcaaattacatactcgaattcatgctgtacgggtaaaacgtgaaaataattcaatcttctatcgcaaatatctactttatgataaaattgacaaattatacatacctcgtgatccctgtgagtaaaccatgaaaataatgtcattttattccaattaattatacaaatataataaaaattcttgggggataaaactcattatatagagtataactaatcacaatattatgtctaattccttatacgatccttaaacaacttaatatataatattaatcaaattatagatgctgcggctatccatattaatacaattataagatcacttaacataaacttatcatatgaaataatctatttgaattcagatcagattaatcatgggaatatattcata

SEQ ID NO: 232767 - DNA, 425 bp, Glycine max
  unsure (1)..(425): unsure at all n locations
agcttgtaaaaggggctnaagttatgatttactttacactccgaacaagggtttattatatttattgtgcgtttctgtgtctattatatttatcatactgaacctaaaccctctagagtagagagcttgacaactgaatgacactcgtacactttgttttatattcacaagaagcacttctcttaaacctcaagtcttcccttaaaactttatgttactccttattaactgtatacttggatggttgtgtgtgtataacacacaatatctttaacaaaatgttatatcaatcgaacaagatcaagttactcaacctctgaattgttaagtggctatctgttaaagatattggaataaactatgatttgaacatgttaggtgtagtaaatgacaaattgcatgttcaactgatggtttctaagata

SEQ ID NO: 232768 - DNA, 482 bp, Glycine max
tacgtcatacctcaggtcaccatgagttctctaatccttgcagtataaactgacagaggtccttgggttaacctcgagttcctgaaacagacttaggttttcaatataacaacatgggtaagttacaatgaagacatgaagtttagacgaaatgtacctatgtaagttggcgatggacaacaaaaagcaagctgtcacggtcttcagcgcgatgaagaacaacaagcttagatgcagaacaagggaggttacacggagaagaagagagcgcgagcaaaataggctgcgtatgatataatttagaatgtaagtccaacattggttttccatacaaaaccgatgttaagattaatttgttaacatcggttttcttcaagaaaccaatgttaactattcatacgttaacatcggatttcataagatcgatataacgaacataggttaacgtctgttttcttataacctgatgttacgaagagata

SEQ ID NO: 232769 - DNA, 417 bp, Glycine max
agcttcaagaattatggcctcatcaaattatttgtttccgagggaaattctataaacagacctcccatctttaatggagtgggttaccactactggaaaacccgcatgcaaatcttcatagaggcaatagatttaaatatttgggaagccatagaacaaggaccttatgttccctctataatagccggaagtgcaacaatagaaaaacctatagcagattggactgagaaagaaagaagattagtacaatataatttaaaggccaaaaatattattacatatagcttaggaatagatgaatactttagggtttcaaattgtaaaagtgctaaggatatgtgggatacactacaagtaacacatgaaggcacaacagatgttaaaagatctaggataaacactttgactcgtgaatat

SEQ ID NO: 232770 - DNA, 462 bp, Glycine max
tcatgatgatgaacaacaattgtgatgatgccaatagctccaataattgattcaagatttcaagatcaagcattaagaatccattccaagattcaagattcaagagaagaaatcaagaagcaacaagtcaagacttcatataggataagtattaaaagatttttttataaaccaaatagcacagttttgttttacaaaagaatattctcaaattttctaagttaccagagtgattactctcaagtaatcgactaccagttggcagtaattgaataccagtgactagtttggttttaaaaatgttttcaaatgatttgtaacggtccaaaatgattttcaaatagtggaattgattacactatattagtgatcgattacacgtgaatctaaacgttggaattcaaatccaattgtgaagagtcacaacttttcataagatacatggtgtaatctattacacca

SEQ ID NO: 232771 - DNA, 416 bp, Glycine max
  unsure (1)..(416): unsure at all n locations
agctagcattccacatattcctttnngctatgttcacncagangaaaaacctttgattctatgcagcttattgtgtaattcacacccatctgttgccattgattctatgaattgaaggattagctcttggatgtacctaataagcacggtttatgttaatctaaatagaatggacacaaaagtttactcctggtgcaaacagcaaacctatccctataagaaaatcttctgttacaccttcatgagcttgctgactaattgctgactcatcattcatatcctttattatttggatacatgatacagtcatattttttctctagagccttccctaacaatccctcaggcacctattggatttatgtagataattataaatacttttgaatcacatgtgatgcaatattatatcaact

SEQ ID NO: 232772 - DNA, 415 bp, Glycine max
agcttttacaaggattgagcttttttttttatgctcaaataaaattcatattttttttcttagcctgctataactgccacttgcattaggacggggcagataacccattttgccacctttaacaaaaatagaaaaaaaaaggtttgatgaaaataatatttcttgtttttaaaataagagcagattatatttgtctctgctaagacatgtttatattatactcttctctcattattttaaaaaaaatatttttttctcaaactcagctgactttccgaactccagtttttcatcaggactttcattacctctgtgacagatatttcatcctctctaacctatcactagcattgcaggcatgaggcatccattcatatcctaacagaatttgatgagatgacaatagtctggttag

SEQ ID NO: 232773 - DNA, 341 bp, Glycine max
tatacatgttttgatatgttatttaatggaattacacattggtagaggatcgaaatcttgatctacgttttctggatctagggtttctctatacagctagttcttcataatcatcccatcgtcctcctttcttaattggcatcgtcaaacccatcggagtagtaaaccccaccagattgctggcagaatcaatcacttgagactcaggcagagacattgacgttgatgattcgaatttttggattcttcatcgcgaatcgcggatctaatgtttcttcagaaaacaaagtctaatatctctttataacgaatctacagcattcttgttaatagaaacttga

SEQ ID NO: 232774 - DNA, 302 bp, Glycine max
  unsure (1)..(302): unsure at all n locations
ccccaagactataccttattatatgttataatatcataaatgttaactcttctaacaaattataagtgtctaaagctaatattatttcacggctttagacattcaaaccagttattagataataatactttagaggtcagccatttaatacgctataagatctaagttattattatcttagggttcagtcttttaataagttttaagctacatttgtatttcttgacagatggctaccgaataatccataataagagataacgttaacgatttcctngacgatgagctacactctgatgttc

SEQ ID NO: 232775 - DNA, 357 bp, Glycine max
aacactaaagttctatgagagcattcacccattccttattctcttgacaaaccatatactatgtctctatatcacaacctccatacttagtatggggcctcacttaatagcactcaaaaattactcgagacacagatgcttacacctcttatatcataaacttttcgttatacaatgatactcatgcccaataccacataatgaacttctcatcacctgtgtattggcattaatgttcctcgcacaaaatttacctatgacactcaccttactttggaacaaatttgtcttgattcataagagtgccctcctaatactcatggacaggtatacaacactcgagattgtttttactca

SEQ ID NO: 232776 - DNA, 331 bp, Glycine max
gcttttgacaacgaaagaagacgacgaagatataagttcaatgacactcaaaaatcaatgtggaaaaattgcttgtgtaaagaatgaattggaaaagatagatgatctaatgctcaacatagccttacttttatagactcttcatgtctggtcaagaaaaccattacaagagttatgacctttagaaaaacttaacaccaatttgaaaaagtcaaaaaatatatgaagagttacatcttttgatttgttttgaaactatctgatgagaatactgaaactggccaaatacatgctaaaggccctagtggagaaggacgaaggcccaagttgg

SEQ ID NO: 232777 - DNA, 436 bp, Glycine max
  unsure (1)..(436): unsure at all n locations
actcaactgatgaagatgaatccgtggctactttatgcactcctctaatgaccatagcatcttgttttgcgctatacagttgggagntgttacccatcttattaattaaattactgtctttaagacgggtcatgtgctgagtccttcataaaaatattggataaaaagctgctcaaaaatctgatggtgagggcagctggcacataattttttatatctctcctagtattcatataagctctctccactgatttgtctatctgatggtcgcagtcctacaagcatggaacattttttctaataatactctcttgaggtcataccagctctggatggaccttgtaccaatgtattatatccagaactttgccactccctctatagaatgaggaagagccttcacatatatgtgatcctccagacatttggggcttat

SEQ ID NO: 232778 - DNA, 424 bp, Glycine max
  unsure (1)..(424): unsure at all n locations
agcttgtcacccagctcgcccagacgagtatggttgctttttccanaagcaacaaccttttggaggaatcttctggagggcccaagtgggcctggttgctatttgcacccccatttttactaagtacaccccctgcctttttttggtgattcttttttcgtaaagttatagaaacttacgaatttcgtaacgatacttgttttctttccgtaatgttacggaaccttgtggatcacataatcatcccctttttgactcacggaatgttacagaacctcactaattgtgcaacgatgcttccatttgatttccggtgtgtcacggaaccttacggattgtgcatcaatattttcttttgctttccagcatgtcccggaatttcaaaaattgcctaatgatgggcgccaagcacctcacaaggacc

SEQ ID NO: 232779 - DNA, 485 bp, Glycine max
  unsure (1)..(485): unsure at all n locations
tatgcgcatatttccttacgaacgttcacttgcacaagacattctattaaccaaagaaatgcacccatatacaatcaaggcagcttcgttacctagattatttacatgcacccccaaggtgtatntgttacttacatcacacacatctccttggctgaatttacatacatgcatactcaaagcatttcggggtaccaaaaattgcacatgcgctcatcttggtatttctaatacctatacatatacaaacttcatgatgaatcttgactacctacacaataaggtgctacatttcatgctctatttttttcatagttttactacctaaagccgcatgcaaattcaaacatattttcctttgctgactaaaattgtattcaaattaaaaggtatatattttgttgaatatgttttcttcacatatcatgcaacatagttatatatattgtttgcgagacatcttgactaccagaaattatatatac

SEQ ID NO: 232780 - DNA, 421 bp, Glycine max
agctttatgataagcttttagccttgaaacagggtcttccaatcttgggagtagttaactagttgaatcttttgctttttgttgggcatgtcttcaatgaagtagagcttagtgatttgcctttaacttctcctgactgaagtagtctttggacgagtcctttgggactgcattggacgaaagggtctggactcctcatgtgttttcttgattcgttgctccttgggaacaatttcgacttctttttcttcttcttcttcttcttaggcttgcttcctggtctggaccttgccttactactcttgaaggatcctttgaacctttttagcgagtccaaaggtctctagagctttatcttcatcagccacagttctggctaacctcttctacctcctctcttgaataccatcttgatcaacag

SEQ ID NO: 232781 - DNA, 467 bp, Glycine max
  unsure (1)..(467): unsure at all n locations
tcttcaggtgttattccttccaatctctttgaagggctcctattctaaatgaagacagttgtagacactgcctctccccacaagtacttgggtagactcttgcctttcaacatgctccttaccatattcattatggttatgttttttctttctgcaactccattatgttgaggtgtgtagggaggagccacttcatgaattatgccttcttgatcacaaaattcttgaaattctgcagaaacatattcaccaccaccatctgttctcaatatcttgatcaatgagccactttgcttttttgccatatttatgaacttctcaaagacttcaaagacatcactcttccttcttattangtaaactcatactttcctagtcaactcatcaataaattatatgaagtatatgtntccacccagagattcattctgcatagggccacacacatcagagtanatcacctcaag

SEQ ID NO: 232782 - DNA, 432 bp, Glycine max
  unsure (1)..(432): unsure at all n locations
catgcaagcttaaaaaacaaatgcctaatcattcgttttatgctgngaaanaggacgcatcaacaagaatcaagccaaggctattgtgcaagcaatcaatggggcaaaacacaccaaatgattataatgatggatggctcaaattctcacaaaggtaaaatcatcactttcaaattgagctttcaaaactatcatgacatgtagagaagaatcaaggatttcaagtcacaaaatgtcaagaacttttattgtcaaaacaattacccatttcttgaacatatcctataattcaaagaaaaacatgcaaagtcgtacgtgcacacgaaattgacccaaaatattaaactgaaaatccaacgaaactaacaacattaacaaattaacacaactaacaaattaacaaaaccaacaaaactatcataaccaaagaac

SEQ ID NO: 232783 - DNA, 475 bp, Glycine max
  unsure (1)..(475): unsure at all n locations
cttgactaattcagaatagacaggtaatttcagagacatgaatggaataagattggagttttcaaatgcttggaagcattcaaaattctcatttgagaagaactccatatcaatgaattttgggtctacaatggaacaagaggaaaagaggtttgtgtaccgtatatgctgttcctctgatgagaataatgatccacagggaatggagggaggaattggggcttcctgtgaccctgaatgccactgacttcgactcgaggttcctttccgctttttcgatggttccgccatttgaggagttttttcgggatttcaattggttcaaatgaaagagattgaaaaaaaatgaagtttgggctttgcggggagtgatttggacaagaattgagtgagatatggctggaagatnaattgngggcgagggttttcgagagagataaatgttgcacggttcagaaatttgaaattgatatat

SEQ ID NO: 232784 - DNA, 422 bp, Glycine max
agcttcggatcaaaatattgagcttcttattatattacaggactcaatcacacatccgagtaaaaatttattgtcgtttgaatttggtacgagcttccgttttcaatttggagcatctctcgataaattatgacactctctcgggcatccgagtaaaaagttattgtcgtttgaattttctaagagtttccgttttcaatttggagggtctcgatatattacaggactcaaccggacatccttgtataaagttattgacaattcaattttctcagagcttcggatctaaattttgagcgtctcgatatattacgggactcaatcagacatccgagtaaaaagttattgtcgtttgaatttgatacgagcttccgttttcaatttggagcatctctcaataaattacgacactctgtcgggca

SEQ ID NO: 232785 - DNA, 419 bp, Glycine max
  unsure (1)..(419): unsure at all n locations
aggaccttaaatctcagcttcaaaaatggatgagtacagctctattgcatatcttgacagaacccgagtagtcgaagagaagttcatgtccatagccatcaaagtctgaagagagtatgatgaactaagggacgtcaatatggccaccgctgatgccttggaacgagaaaccaagaaggcccgaaaggaagaacacgtgcaagcaaagttttgaggggctntatagggcaccaatattaagctcaagctccgaagaggtgagaggaatcatcacgggtcaaaggcatgatcttgaaggacgagctaaaggcttaccttatgtcgaaaagaaatttgtcccatcagttaagcgagactgaagggaatatgtgggccggcatcgatgagtgcaaagagaagctatatctatcggcgactca

SEQ ID NO: 232786 - DNA, 446 bp, Glycine max
  unsure (1)..(446): unsure at all n locations
cgggatccttaagcaccgcggctgcagcttcatggtgaacaggttctttcttttccttagagtcctctcacgaggtggaggttgtgccatgttctcagaatgtgcaaaatcagaatgctcagaatcagaatgctcaaaattataatgctcaagatcaggatgttcaaaatcaccaataacagaatgcacagattcaccagttatggaatgctcagaatgatcaaaaggtataaaatgatgcctaactaatctatgaaatgtcctatctatctcaggatcaaagggttgtaagtcagatggattgcctctagtcatacactacattcagcatgcacacaactagttgccttgtcatgtaaataaaggtgtaggtttgaactacagctaccctcaaatgatatccaaatgacttgaaattntgtgagcaaccttataaaatgatgaga

SEQ ID NO: 232787 - DNA, 439 bp, Glycine max
  unsure (1)..(439): unsure at all n locations
gggtttgaggtacttacccgttgaagactgaagaanacgaagaaagaacgatggatcttgaagaacggtcgagaatcttcgcgtaattactcacggaaatgttacggaaacgttacggaagcgcctcggcttggattttcttcacggaaataattttcctcagcaaattcgaaagagagagaagtgcctaaggggctgaacccttttcttcttcacttcttcccctatttatagcaaaataggggagaagcttgccgcccagctcgcccaggcgagccaggttgcttcctccagaagcaacagccttctggagggcccaagtgggtctggttgctatttacacccccntttttttactaaatgcaccccccttatctatttntttggtattctttttccgtaacgttacgaaactttacgaatttcataacaatactta

SEQ ID NO: 232788 - DNA, 414 bp, Glycine max
agcttactcataagggtcaagtttttgtgttggatgcccaatgtgagagtagtttctgtacccttaaggaaaagttgaccactgcaccagttttaatgttacctgacccgagagaaccttctgtggtgtactgtggtgcatcctatatgggtttgggaggagtgcttatgtaacggggacaggtagtgacctttgcttcttgacagctcaagatacatgaaaggaattaccccacacacgatcttaagttagcagctgtagtttttgctcataagctttggaggcattacctttatggatctaaatttgaggtgtttagtgaccataagagccttatatatttgtttgatcaaaaagagcttaacatgaggcagaggagatggatagaagttcttaaggaatatgattttgagc

SEQ ID NO: 232789 - DNA, 473 bp, Glycine max
tctcaaggaagttttctcaagagagcttctcaacgaagctacctagtctataaatagaagcatgtgtaacacttgctgtaactttgatgaatgagagtcttgtgagacacaactcacagttcaacttctctccctgtttttccttcaatttcgtgctcccccctctctctttctctgcctgtttcttttcctccattgaagcaccctctccaagcttcttatccaaggctcatcttggtggtgaagctccttcttccgtggcttattccctagtggatggcgcctcctctcacctcttctactttggcttccgctgcatctccattgtggaaaatcaccatctaaggacctgattgaagctcatagatccagccaccatacaagctccactagcaagctttcgtcagtaagttccactacacccttgagctgtagcgccactagtttgtaatcactgctctggtggatctcat

SEQ ID NO: 232790 - DNA, 424 bp, Glycine max
  unsure (1)..(424): unsure at all n locations
agcttggacaataacttcgntacaatgtttatttctttgtcacaaataactctaatgaggacatcttttgctgaaactcttgcttcaacgtggggaaatgtcttggtaccatctaagccattatagatccatgaaaagtcctcaacattggggcttgttgtttttgaaatacgttatatattctctgtttttcttcttattttgttcctccaaatcttctacacgagtttgacgttattttactgatctatggcgttgttgaggatagagagcttgtccatctacatatcacaagtattttagttttataattaaaaataatttattttaaattctttaaaaatgaacaacacataaatttctgtaatttgaaggacttaaattaaatacaanataattttataaaatttatattttaaaaaat

SEQ ID NO: 232791 - DNA, 401 bp, Glycine max
  unsure (1)..(401): unsure at all n locations
tcttcaacatcagcaaccccacaattgttgtcaaagttacctcagtcgttgaanaaacacgccagtttcaagtaaaaactgtgctactcgaagaggaaggagccagcggtggtgctctttgcggtgtcgtttgtccacgtgtacgggttcacattcagcctatgggcaatagtgttgtcggagacgatggtggtcatggagaggttcancttgaaggcgatgttgggcgccatggagaggaaggaaaccaaagaggctttcaaagctatgttgcccaacgtcctcgtcatccaagttggttatctttcctaaaccatatgataactcattcttaaaagaaattatttgtttatatatatggcaatgaaacccaattatacacaccaagtctatgtacacct

SEQ ID NO: 232792 - DNA, 387 bp, Glycine max
acagggagagaaagagagaggggggagcatgaaaatgaaggaagaaaaagggagagaagttgaattttgagttgtgtctcacaagactctcattcatcaaagttacaacaagtggtacacatgcttctatttatagactaggtagcttccttgagaagatttcttgagaaaacttccttgagaagcttctttgagaaaacttccttgagaagctagagcttagctacacacacccctctcataactaagctcacctccttgagaagcttccttaagaagattcctaaagaagctagagcttagctacacatacctctctaatagctaagctcacctccttgagatgagaagctagaacttagctacacaccccctataatagctaag

SEQ ID NO: 232793 - DNA, 457 bp, Glycine max
gtctcatgagtcctaaatgacatttcaagctagtaataactcactttaacctccatttaccacagaattcagacttagccttccaaccctcaaagtctcactctttttccactcataacatcacattctcactttctaaccttgggttagttctacccttcgtctctaacagatttccatcagcaatttcagcatataaacaccacaaacatcatcacaaaaaccctaaaacagaatgggtatgtttaactcacccaaacatggcaatttcaacaagttttcagcaaatgtcttcacaaataatcatcacacaacagagaccttgcaagactacccatcatatctcccaaaaccccatacccacgagaatcaaaggagaaagaagtcacccaaacctggattttgaagtcccactcgtagccacgcacttcacgaaccccgaaatgccctcctttcg

SEQ ID NO: 232794 - DNA, 406 bp, Glycine max
  unsure (1)..(406): unsure at all n locations
agctntacatagagctacattacagatgttcataggaaaattcacactatggcttggaagcggatttgtcagcccaagtgtaatgggggtttgggtctgcaaacatccaaggaagctaatcaagcctacttaatgaaaggtggttgggagttatccaacaggaagaatgatctctgggtgcaaattattcgatcaaaatataggtgtggtaactctaccattcctaacatgggatttgaataggacaggttctaacttgtggagtgggttatgtaacacttagcctcaagtacataatcaattagattggaatatacgagatggagctttggttaatttctggaatagctcgtgggtacctggagttaggagtctactgaatgtgactataggtactgtccctcta

SEQ ID NO: 232795 - DNA, 435 bp, Glycine max
aatctgcaacaaagaaaattattagtgtatacgtgtacttatttaacaacgcatttgggccaaactaataaatggatatcatagtaagttattacaacccaaaacagccccaaaatatactatcctaaagtgaccttcaaacataaaatatacctttaaatcaatcaactcatgaattatcttataaaaaatggtctaacctaagtgatcttaattaatcaagtacataagaaatgggttacattataaggcgtgtaatattagactaatggtagtgtctgaatagagatggtcttgacacctattatataaagatgtctaacccatttgcacaatgtgaaagagtcatgatctacactatgcctcctattgctcttgaaaaatttcttaactctatatctgctgaaacttttataataaataagtatgtacttt

SEQ ID NO: 232796 - DNA, 429 bp, Glycine max
  unsure (1)..(429): unsure at all n locations
agctntgattnttgccttttatatgcatttcactgtattttcccacaatgtattggacaacaactggcatatttgggttataccttcaccttgtttaatattgagaaatcacttcacctttctttctttcttccttcaattttattgtatatatggccctaaggttcaacaacacggacagcagttattatatttaagtgttttttcactgattgaagataataaaatgtttattaacctgttgccagtagcctcgttactttgtcattattttaaactattttctgtaatccgtaacttgcaacaagatttttctcactgttctagatcctgattgcagagtgtgcttattgtttttattaggtacaggtaattgattcattgcctgaactgtatcctaaattaaaagctcgggtggagaatgtgctt

SEQ ID NO: 232797 - DNA, 484 bp, Glycine max
tctcagaactgtccttgtcagcatactccagtcctttaccccatttaccatcggtctccgattcaacagcaaaattcctccccgtcgaagtcgaagaggtagattccttcccatcatcactggcttttctactcaatttaacttctttgacagagtccgacttctgcaaggacctcagaccactgttaccagttcttggattcctttttacatctgtcgccaatgaccctgaagacaaacccttctgcttcctactactgcttctgcccaaaccacgcggtgcaggtaacccattaccgtgattgcccccagaagcagaagctatagactgagtatgtgatggtgcacttatgagttcagtccaatcatcatctgttagggtagggccagaattgggagatacgttgcgtgcacttgctgtagctttaagcccatcaaaactgggatcactgcgcaatttccacgatactcattgctctctaat

SEQ ID NO: 232798 - DNA, 425 bp, Glycine max
agcttaaaggtaaactagatgcctcggttatctgttaactcaactggccatgaatcaaaaatttgcacttgttgccagactctgtggtttatgctcctctgccgaccaccacacaaacctttgcccttttgtgcaacaatctgaagcaattgaacagcctgaagcttatgctgcaaacatctacaacagacctcctcaacctcagcagcaaaatcagccacaacagaatgacatctccaacaacaggtacaatctcgggtggaggaatcatcccaaccttagatggttgaatccttcacaacagcagtagcaacaacaaccttattttcaaaatgttgctggcccaagcagaccatacattcctccaccaatccagcagcaacaacagcaacaaccccagagacaacaaacagttgaggcttctt

SEQ ID NO: 232799 - DNA, 452 bp, Glycine max
  unsure (1)..(452): unsure at all n locations
ttgactntgagtcatcaagagattataaatatgtgtttatgacatgagtttcaatcaattatctctttcaatctctttcaactctttctacagaatttctgattcatttctcttcatctttctaaaagtttttgttcaacactttctcttccaagaaaagttctttgataaaaaacttgtgttattcatctttttcattctcttttccctttgccaaaaagaattcaacaaggactaatcgcctgaattctttttgtgtctctcttctcccttttgtagaagcaagcttcatgatgttgaatccagattgattcaagttgttttgatgataacaaagatgatgacaaaaatcccaagagaatgatttcaagattgagtcaagaacaattcaagaatcaaagagaaatttgatttcaagattcaagaaaagatgaattcaagtttcaagagaa

SEQ ID NO: 232800 - DNA, 419 bp, Glycine max
  unsure (1)..(419): unsure at all n locations
agcnttgccaattttttgtaaaagaatagttctatttctttctcatatttatagagaaggaaacttttgtgtagacaagctggctaatgttggtgctttgtctcgtgatttcttcaattggtggaacttgattcccgtttttgttaggaaggagttacttaaaaatagattgtctctttcgaattaccggtttcgccaagttgttgtgggttttgatataataccccccactttcttcatattgttctttttaattccaatttaatgttattcaaggcaggtgactttaattcggggttgggtgtcctttgctgggatactcccctcctcagctattctaagccttcctcaactattctaagccttaattaatgaaaaaaatgtttgtaaccagaaacaatatcataactaacgaattt

SEQ ID NO: 232801 - DNA, 478 bp, Glycine max
  unsure (1)..(478): unsure at all n locations
ntatcatgaacttacctccctttcccaaacagactctttccatgctttccttctacgtggccacgatcatcctcatcatcggaagcccgtcctcatcattcatttctaacagcttgatctaattgatgatgcgtcaattattctggttggtttcactgcagcttcaacttcagattcaattattctggtttgatgatgctaataatgtgaatcattgttttctttgtgatgggatggagagggagagggagagggagagggaccgtgttattactcaaatacactgagagggagagggagagggagggggtatgaagctnttcctcttcctatctactctttctagaaccttcggtagtagagtagagcgcgcattaaaataaaaaataatatacaattcgttatcattcataggcgactnttcaaaatgatcgtctatgaatattngatattcacgccggtcatagatcaagatcgt

SEQ ID NO: 232802 - DNA, 419 bp, Glycine max
agctttctaagttttctggtttcaaaaccttgttcttccatagaaaacaaaagtgtgggatatcttttcattctcttctccctttgccgaaaagaattcaacaaggacaaatcgcctgaattctttttgtgtctctcttctcccttttccaaaagaaaaaaggactaactgcctgaattcttttgtgtctcccttctcccttttcaaagaattcaataagacacagtctgagaattcttttgattcttccctttcccttaaacaaaagatttcaaaggactaaccgcctgagatatctgttgtttccccttcaaaaagtttcaaaggactaaccgccagagaactttgtcttaacacattggagggtacatcctttgtggtacaagtggagcctacatctacttgggttgttgtaactg

SEQ ID NO: 232803 - DNA, 486 bp, Glycine max
  unsure (1)..(486): unsure at all n locations
tgttgatattatgcacaataaccaagtcaacaatccctttttgaaattgataagcttcaccaatggcactgcttgccttaacttgaaaagcaggtgcatcaataaacatttctataggaattaataagttcaaggcatatatttcaatctcttaacaattaagtataagcaatcaataagggatttaataattaagatggtacatgacgtacagagtagtaatatataagaatacaatatgtataagctagaattggaaccaactagaataaacaaatgataagggcaataggagtagagagggtggaacgtangatggggaagacagagctgagttagtaaagggaaacataacaacaacactagatgctctctgaacactgccaacaacttgtctatttatttctttgaaacgtcccttttgaaccaaagaataactgcacctctcttacttttccatgaagaatcctcaataaaacttcacac

SEQ ID NO: 232804 - DNA, 444 bp, Glycine max
ccgcagcatgcagctttcgttgaaaaactaagaggtttttttgttttcttactataatgctcttagactcaaggggagactaaacatcgttcaagagtggcatataaaatactcgtatagctaggattggaacgataaacaactcactttgtaatctacagtttgattaataaaaccctttacatcttgtgccaaggagaactggatgtaactctgtttgagtgaaccaatataaacccaatgtttctatgcccacccctagctgctgaatcgaatattcattctaaggtcatctccgacctagctcgcctccacaagctgtatacctacaccaaccattagcgaaataccttggttaatcattatcgcgagatctaacctctgtttttatcacaacctgtttttttattcagtggacaacactattgcatctatgatcttaaa

SEQ ID NO: 232805 - DNA, 417 bp, Glycine max
tcatgtaacctcttcgtctagatcaccattcatgaagccgccgtattcacatccatttgatgcagctcaagatcaaaatgagctactaatgccaaaaatactcgaagagagtctctcttagatacaggggaaaaggtctctctgtaaacgattccttctctttgagttaatcctttagcaacaagtcttgccttatgactctcaatgttgccttctaagtctttctttggtctgaagacccatctacatccgatggcttttacaccaacaggcaactcaacgagatcccaaactttggtagatgccatagaatccatctcattcctcatagcattataccacaaatctgattccttataactcatggcttgtgataacgtctcaggatcatctttggctccatgtggtaactgattc

SEQ ID NO: 232806 - DNA, 416 bp, Glycine max
  unsure (1)..(416): unsure at all n locations
cctgcggctgcagcttgaggattaggagactatttttgtggtactaggnggcggacgggcgatggtgcacaacaattctccacatccacaaatcacgtataaaaccaccatcccctgttgcccacctccaactgagctcacgtactcccacgtagccctcatcctcattcctctcaacgccgggtccccatcaattctcccaagcttccacaacatccaagaaattccacatcccatcatcatagactaacaaaaccaagcaaaacagagcaaaggcagaaaactctgtccaaaacacaaaccaaaatcacaactttttctcacttaaagaccccagtaacatttccttcgttccaattcgttaaccggtggagcgactcgaaaatttgtctgggagtctctacaacataaaaata

SEQ ID NO: 232807 - DNA, 350 bp, Glycine max
ttgagagacattctgatcgataggggcatgttagtttctatcatttcatatgtacatcatgcatccttatgtacgggtatgaagattgcttctaaaattataaacttcttcagtgcataacacactatgtttaactcgattaccaggttgatcacaatctattacttcatttgtaaaggagctcccataagtgatcaagaaaaccttaatcgatgacatatgtcttgaaagttgtccacatgatgggaagaacactttagtcaattgatacgatatataatcaattacttctttgaaagcattgattacattggatatttaatcgattacagacatgtattactgttttc

SEQ ID NO: 232808 - DNA, 407 bp, Glycine max
agctttgactaatatgactttatttttggtaattacgcacgcataggatgcttaagacatgggcatccaatccattaaagtaatcataattgctagctcttcttttaggcttcgctttcaactttgtacaaacatccaccgtgttatttttttttcacgagtaaagtaacttctcaacaaaggaaggtaaccacaatcaatgcccaccctctttagccaataaatacactaataattacgttccaaaaatataaaaaataaaaatcttatctttgaatttataaaaagtgtaacaagttcgttatgttgtaagttctctccattaacccacacaaaagcatttagggtggtgctgactttgatgtggtgtcccacacaataaaaagggggcatcccacgtaatacag

SEQ ID NO: 232809 - DNA, 454 bp, Glycine max
  unsure (1)..(454): unsure at all n locations
tgccacccagctcgcccaggcgagcattgttgcttcctccagaagcaacagccttctggaggaaggatctggaaggcccaagtgggccacatagctatttgtacccccctttttactaaatgcacccccttatattttttggtaattctttttccgtaacgttacgaaactttacgaatttcgtaacgatacttatttttcttccgcaaggttacgaatccttacggattatgtatttactcttttttagctttcgaagaagttacggaaacttacggattgcgcaaaaacacctcttttcgacttccgccacattacggaatntcacggatcgcgcaagtctgcttccttttgatttctgagacgtctcgggacttcatttattgtgcaacanatgacgccaagtatctcatagcggctaacaaaggttgcatgttatcaagtaataatccct

SEQ ID NO: 232810 - DNA, 418 bp, Glycine max
agctattgagttaaaggatgagtttcttttttttgaatttgaatttcaacgtttaggggcactggtaatcgattaccaaaacattgtaatcgattacaggtttttgaaaataattggaacgttgtaaattcagtttgaaaactttttcaaactcattttgctactggtaatcgattacaacaatgtggtaatcgattaccagagagtaaaaactctttggtaaaaggttttgtcaaaaactcatgtgctattcaaagttttcaaaaaactttttaatacttatcttgattaagtcttctctttattcttgaatcttgagtcttgaatcttgatcttgattcttgagatcttaaaccttgagtcttgatttttggctctagacttccttcatgagactttaattcttcttgagtcttat

SEQ ID NO: 232811 - DNA, 408 bp, Glycine max
tgagatgaggaagtgttgaagggtgaaactttttgcttttattgttgaccacagagtggtacctgtagatatgtcgcgggggtcaggagaccttgttgacgtcaggtggagtgctattgcccaaaaccaagcttgaccaatcccgactcaacccgggcatagtcggtcagtgagaacctgtgatgtacctaaacaggcgagctcctggcagtcaacagataaaaggaacaaataccacaaagcaaggaggcttgtggtggctggccaattgtgaaacttgattgatatgtgagatatggtctctggtaatcgattaccaagggtgggtaatcgattacaacgcttataattgaagacaagaggctgagatggtctctggtaatcgattaccacggcgtgtatcgatta

SEQ ID NO: 232812 - DNA, 403 bp, Glycine max
  unsure (1)..(403): unsure at all n locations
agcttgaattaaagatcacatatggattgctcatttngcctcgctacttcataaaaatggcgatgctacaatttggaaccaatttctttcatttttttttatcaccttcatatggtgggagaagtcaggaaaatggtgcaagaagttccgtaaaagcaaggtaagttaatgaattgcatttctgaccaataactgtatctttcacatcgaaacagaccatacctagaattaccgcgagtattttcttttggccctatattggtttttggctatttacatgagtaacgaaaattatagctgtcctgtatctttaaaaataaattggtcattttgattaagtttattgtataaatgtgtttaaacgacaagatctgatcactcaattagaatgtgtaatctctca

SEQ ID NO: 232813 - DNA, 265 bp, Glycine max
tgatggcattccttaatctgctcacgatcctacatagtaataaacctgttgcaatatgatatgagccattccacttgttctaggtatacacttcaaatccttatctgtattcagtgctatgaatctgtaaattctgcagcatggtactcttttggtgctatttaataactcatgtatacactgcaggaaggtgatgtaatcgcttatcgattgattgagttaacagcatcctggactccggaactctcctccttatggacatatc

SEQ ID NO: 232814 - DNA, 440 bp, Glycine max
ccggacctctgagtcaccgcggcatgaagcttgtatagggaaccgctgcttttatgaagcacagccgagagcaataatctggttcttatctattgacttaagagattagttctcccattattcatggtgaacttttaaaacttttcaggaaaaatatcatttacgacttaaagtgctacaggagagtttgagaggaaattctaacagttgtaatcgccgtacccccgagggaagaagtatgagcaatggcccttctcgtcgtcaatccctaggtggagctgataacttttcaaaactaacctcagatgggttgttatctaaaagatcaccatcctctcaactgaggtcatccctatcctctatcacagttttgacacatgctaaaagaacatctaaatcttttgatggtggcacaacgtcactggaaaggagtaaaatgc

SEQ ID NO: 232815 - DNA, 382 bp, Glycine max
gaccttaatactcactatgatctatgagattctgagaccttctatctaatactcaacttcagcgatgaagcgacactaatctaaatattacacacatagaagagggatcccccgttttctattgctcgattgaataaaccacagatccaatcttgcatattatattcaaacggaaaactgaaaaatgcagtacaaaatctggtatctacataaggaaagctaaaatacaagtatccaattttgagccttcttcccacagaatctgcttgctaattgctaggagaaagtgttcatcataaaaatcattgactcttcggcatcatcgagtgacatattgaattctaatgtaattgctgcataataaaatgtacctatagcaaaa

SEQ ID NO: 232816 - DNA, 413 bp, Glycine max
agcttaagcacaaatgattgtttttattttttagtcaaacattattcatgttatgaatctattggagaatgaaatgactacagatcgatgatgtccgattaaaagataagatgaactgccttaataaagagacaaaagaggtataaacaatcaagctcatcaatacaagagagtttgatatgcttagcacgataaaaagtatcactaattttagtatcaagttctttgaattagattataccccaccaactaacctttctatttaggagtcatgctctgtactaacaactatggcatcaccagctacaatgtgagatggtacctgtttcatacaaaactcatctctcaaattatgctaacctcattgtagagggacatcaaaatcaacccatgttcaataagtagcataaaag

SEQ ID NO: 232817 - DNA, 358 bp, Glycine max
tctgacagagaaagaagaatatgaagctcttagagactcacaaatcaatgtggaaaaattgcttgtgtgaagaatgaattggaaaagatatattatcaaatgcaaaacagagccgtgcttttatatactcttcatgtctggtcaagagaaccattagatgagttatgacctttagaaaaacttaaaaacccattttaaaaaaagttgaaaactattcgaagagttacattgattgatttggtcagaaactatcactggtaatcgattaccatattagtgtaatcgattacacaaagctgttttgtgagaggatgtgactcttcacatttgaattcgaatttcaacgttcaaacacact

SEQ ID NO: 232818 - DNA, 430 bp, Glycine max
  unsure (1)..(430): unsure at all n locations
agcttcataaaagcttgatactcgnacaaccatttcatgactatgtaacacattattctaaatgacaccactcaacttcgtagcacaaaaggccccaacgttagtcagatagagtccaccacccacccattactacaaaaaaaaactttcaaagatgggtattttatacttttcacaacgattttcaatcgtctttgaaatttccatcatagaaagtcaacactttccacaacggtttttaaaccgtcttagaatctcagtttctacatcatttttttaaataaaaaatatcttagaatgtgttattttttattttgaaaatgttaaaaaaatgagaatttgaagatgattttttaaaaactcgtcttagaaagtaaacattctaagacgatttttgaaaatcatctttgaagtatactttctaagacgt

SEQ ID NO: 232819 - DNA, 417 bp, Glycine max
  unsure (1)..(417): unsure at all n locations
gtagttctganatacagaattaaggtgtgcactattttatatttctttgactatgctatatattgagctagagttggatacccatctcctggaaaagaaccagaccaaggcaattgtgtgtggaaggctcattccacaggatgttgcaatcaagataaggaaaataactaaccgtacagttgagatattagagttacaattttttttattagaaaacaaactaagaaactatagaagaacatagcctacataataataataataataataataataataataataatgaaacaaaaccaaacattatttcttatctatctatctatctatctatctatctgtcgcaacatgcctttttgcggacgagcgaagcgaggctcacgagtgcgcttcccaaaggaggaaagatgcacggag

SEQ ID NO: 232820 - DNA, 426 bp, Glycine max
  unsure (1)..(426): unsure at all n locations
agctttgnctttattatatgtaaccctttgttttttatttttagggtttcacttaaatgggctgcttcatgaccctaagcccacaacaacccactttttaatcatttgggctattttactggatcaattatttatttgctataaatattttataattggtttttgttttacatagcaatctttataatcttttgttaaaaacaaaaaataatacttacatggcctatttggatacaaggttggatgtgtttctgaatgcttttctattaaaaaatatatattttcagtagagaacctctcaaaatcacttatgacttgtatccaaataggnctataattagttatatttataatatatcataaaatttctcaacatgatttactaattntttttcgctattcttaacttaaaagaatatatttatc

SEQ ID NO: 232821 - DNA, 431 bp, Glycine max
  unsure (1)..(431): unsure at all n locations
cttctccccaattntctatanatagggggagaagtgttgtgaataagggttcatccccttaggcacttctctctctttcgaatatgcttggaaaaattgtttccgtgaagaaaatctaagccgatgcgcttccgaaacgtttccgtaaggaatttcgcgaaggtttcgaccgttcttcgacgttcttcattcgttcttcatcgttcttcgatcttcaacgggtaagtacctcgaaccaagcttttcgattcattctatgtacccngtggtggccacattgtgtttcgtgtatttttattctcgtttcatttactntttataccccctttttgacgtgcttaagccattttatttaagtcatttctcgcttatactaaaaataaaataaatttccaccgatcgtttgaattgtattatccgttaacttcggt

SEQ ID NO: 232822 - DNA, 418 bp, Glycine max
  unsure (1)..(418): unsure at all n locations
agcttcgagatagagttatgtcgaaccctctcattctttaccagcctaaacgacctccacctctcactcccagccctactaaaaaagctaaaccaccatatgtgcaacgaactccgactgagatagcttttcagcgagaaaaagggctatgctacaattgtgatgaaaagtggaacactaatcatcgttgtaaaggacaagtgatgctcctcatcgctgatgaacaatcacctaacaccgacgtaagcatttccaagctcgaggaaactcatcctaccgccatcgacaacaacatcgaaccatctgttgactcaaattgctctcatattagccctcatgcgttcaggttctccatcaacagacactnttagaatctttggctccgtgaagaacgcacaactaaccattttgattgata

SEQ ID NO: 232823 - DNA, 497 bp, Glycine max
  unsure (1)..(497): unsure at all n locations
ggacctataaaactcagctttgaaatcaaacttgcccatgtaatcgattacaggataatggtaatcgattaccagagagtaaaaactctggtaacttataaaattttgagaaaaacttttcttgtaaaacaaaactatgctatgtttggttttttgaaaaatcttntcgatacttcccttgtgaagtcttcttgatttctcttgaatctttaattcatctttttttgaatctttgaaatcaacttctcttgaatcttgaatcttcttgatgtcatttcttgaatcttgaaattaatcttgatcttgaactttntgactcaatcttgaaatcattctcttgagctttttgtcatcatcaaaacttcttgaatcaacttgattcatcatcatgaagctcgcttctactataggaaagttgtattctactactactacaagngaattcctttgagtatatcatttactatgtatagggtgtntctttgtcatcatttgat

SEQ ID NO: 232824 - DNA, 370 bp, Glycine max
cttgactcatcttctcctagaaggggcatctccaatcacctttccttcttttccattccgttgtcattgatcttcaagaagcaaagggctctattgatgaagaaaatccaatgcttacaagctctatatggagctacatcagtttatgagatataggttgaagttgtgcataatatttgattgatatcattttttgggggatcaaggatatcatgcatatgttacaatttatatgcacacaaaacttgcatatactaaccacccaatttgggtgttgtcacaacattatgaactaaaagagacaaatgtccaacaattaaaattacctttgtagtacggtgcgaaccaattatgctgagtaaatttgcac

SEQ ID NO: 232825 - DNA, 455 bp, Glycine max
  unsure (1)..(455): unsure at all n locations
tgtanatcaggtggaccagtgggatagaggatggtcccagtgtcgacttggccaaagaccacaatactgatgtgaaccttatccttacccatcttacttaaatctgcacaaatccagaataaaaaatagctgtcaaaaccataacacatcaacacaccatataaagtagaaatataagtttaacaacattaagacctttgtcattacagaactctttcataagcatagagaagattaagacctaaatacccaccatacaacaagcccaaaaataggtatgctcaatcgtaacgcatcaaactcagtatgattccaacagatctaaaaatagacataacaaagatttatggcactcccatacataagatcgagatgaaacaagggcttgtttagcacactgagacgtatatagatctattcatcagtaaccagaataactgagcttgaaccgatta

SEQ ID NO: 232826 - DNA, 411 bp, Glycine max
  unsure (1)..(411): unsure at all n locations
agctttggnttttgaaggccgtagctctttatctttctcttggctcggcatttttttggctttccaagataactggttagtgttacttcttgaccgccttttctgtgaatttgactctattgtctcggttatagcttgcagcctatacaactattatgttaataatatctttttccctttccaaaaaaatacaatttaactagtaaatatgataaagttagtgtaattaataaataatttaaatttaaaatatatgatttgatacgtcatttgcggcatttagtagttaatgagaagacacatgccgtgatataaaattaaatttgtgcttttatattgaacacatgagagaaaataagatacccgagtgtctgtatgttttttgtatctcaaacataaaaagctgttgta

SEQ ID NO: 232827 - DNA, 431 bp, Glycine max
  unsure (1)..(431): unsure at all n locations
tcnggaggaagaagcagcagcagaagctgcagagactgtanattctgcatgagcttacacataaatatgcaagttacagagttcaatggttaaaattattgttcagtcataattttcttgtttaaatggatgtggttgacacgcgtataatattatcttaatggtagtaatttatgtttgttcctgcccgaaggttcatgccttttattttgtgacaaaagatacatgattcacatccttcaaattatgtaaaacattgtttttaaaattcaaattttcaattccattaaaaaattgcttttaatttggtttatgaatgactatcattttttggagtttcaaagtgacaatttgtcaatcagattggtgatgcatgtctatttttgatagggcaagttttttacattatttacattaattttctacattat

SEQ ID NO: 232828 - DNA, 329 bp, Glycine max
agcttagatttactccgccctatttgtgttgtgtttactctgaatcatcatgcacaatgtggatctagatacatacgtactcctctaaagatgactggtctaatggaataattatgccctgtgtaaataaaattggttggaacatctcagtctaatcatgttcaacccgaacaaattgaatcgatcctttgtgtgatttataaactcctcggaaggactaaacatttttttgtaagacatttctactatcatttactcgatgctaggccaatacatcaatgatgtgttctaacgaccattatgactgactttttgccacacccatatat

SEQ ID NO: 232829 - DNA, 422 bp, Glycine max
  unsure (1)..(422): unsure at all n locations
agcttatgcacggagaatgaattttgttttngttatgcccgaagaaacaccatttcctagttaaccatgcattaggtaccatgttcaattattttgttttttaagggaaacgggtttatgaacccaacatggttggctcgtggtgcctaacacatgatactaagaatgttgtgtgaagtatcacgcttccccctttttgtttttgttttgtacaggaaatcgctaggatgagcgaacatgagaacaaatggtatgtaatattgcaaatcaaaaagtttgttgaacgcatatgcatgatgatgccatgacttatgcaaaatgtgaggctggaatatgataacggacaaatgcaggatatgtccattatgatgttatgaagagatgcttatgcgatgcatgatctgaatgcattttactgaccc

SEQ ID NO: 232830 - DNA, 419 bp, Glycine max
ctgacaatgtacataaactaaatcatatctttttcctgttcaagtcctattagcatgaactactcagataataacattagctcgagtacttgccatatcaataacctcttcacattggccttctatactgtacttgtcatgatggttactattgcaaggtctaccattgaaccaagtaagctccttcttcatcttacttagagtgggagcagttacatgcatgcatgagagaagcacttttctactacattattttaaaaagctccaaagaaggacatttacacattattgattaagcttgggttacaactctaaaaccaaaaaagagcactaattttgcatataagtagcttggttgtattagatccttctggttgtaactatgacgccatgatacttacatactaatggtactttat

SEQ ID NO: 232831 - DNA, 469 bp, Glycine max
cttgttctttaatgaattacagtctttgaagtttactagctggtcaaaggaagaaagggagggaatccatgctgtatacatgcatggatctaactattgtgattcttacttgattggtagatattccacattggttgatctttcaaggtaggcatgtcaatattcgtattgtgatgaggaagattgtgatcttatgtttcaattgcttaccaaaaagcttagtcgattgaaacttaagcatggtgttgaacgatctccaaatcctgtctctaatgagcttgaaaatgttgaggttgatgttgaagatcctcttattttgcgtacaaagggaagtggtcgtacttcaaccactgtgcgtgggagagttatgaggatccaaaattgcaacaagtatggactgaatagacacaacacaagatcatgtacgagtgtcccatctagccagacccgtgccaatggatgtaatagt

SEQ ID NO: 232832 - DNA, 415 bp, Glycine max
agcttctagccaaatggacggactcttgtttaattccttcgatagcccttttgagccttgtttccctttccttgttttgaaactcactacaagccttaaatgaaaaaccatgatatcaccatatccttaaggaattttggagctttggaattgttttgggaataagtgtggggggtttttgtttcattggataacttgttttgttggctatgcttcatgatgtattttgggccatacttgatgtacattgtatattggttaaatgttgaacatgctgaatgaaatgttgtttctcaaaggctatagatgtaaaaaaaaatcgaaaaataagaaaaagataagcaataaagttgagtgaataagatcttaaatggcacaagaatgatgaaactcttggttctactcttactcttat

SEQ ID NO: 232833 - DNA, 246 bp, Glycine max
tgtctcctgaccccccagacatatgtgaggaaccactctgtggcaacaataaaagccagaagattcacccttcaacacttcctcatctcaagcttgtaggattatggagtacccaccacatgaggtactaggaggcggacaggcgatggggcacaacaaggattacacattcacaatgcacgcataaacccaccatcccctgctgcccacctgcatctgagctcacgtacttccacgtagcccata

SEQ ID NO: 232834 - DNA, 338 bp, Glycine max
  unsure (1)..(338): unsure at all n locations
cttcccagaaaccttatgctcttgcttaantcaataaggaatgaaaaagtggctaaatagagaaatagaaggcgacatgntgaccaaactaccgagctttaccaaagctaaatctaaggcccaaccatgtggggggagttgaaaagggaaattttgatagaacgctaggactctgaaatggaaatcccagaagggcaaattcatatcgagatcttttaaaaaggtatgaaacatgggaaggaaatccccatattggaaccaaggcagaccgtgggagaatctctttctacaagaatagttgtaataggaacaacggccttactatccaaaaagccaca

SEQ ID NO: 232835 - DNA, 408 bp, Glycine max
  unsure (1)..(408): unsure at all n locations
tcattttaacttgtgatcatcataaacatctagaatatctaaactctgcaggtacattcgatcgacataattatcaaataacttacttccctcatttagttggtgtagtagcatgtgtatctcttcacattggggatgggaatgatcttcatcgttgaaagcatgcacattatntntcacttctatccaactccaacctggaacctttttcactcccctttctcgcatcatccttgttacactaaccttctcaccccacatcttgaagcgcccatacatttcatagagtataacatatgtgcagagctcctcaggctccagctctaacaaaattatngctatgtgactagccaattcaatatcaccacataatctacaagcacctaataaaggtttaacaccattgca

SEQ ID NO: 232836 - DNA, 389 bp, Glycine max
  unsure (1)..(389): unsure at all n locations
agcttcttatttgatagcttattctgtacctaggaaagggtatgggccaggggatctcanattaaaaccaaaacaagaagagaaataataaaaaaaatatttttaccttagaggtaagttcatctaatgcaggataagggccatctccaattctattgtacgtgcagcaagaaaactacaaatggcttctaaagcaacctccagggcccgaaattcaaagggtgactctacattgtgtaatttagatcagtcagataacaagagcaagagataatgcaaatacaaagatagatttataacaggaacagatgcaatcaataagtttgttcattacttatggttcatcatttaatgtaacgtaccatcttcttcagcggcttcaacatcat

SEQ ID NO: 232837 - DNA, 399 bp, Glycine max
  unsure (1)..(399): unsure at all n locations
tcttctctgcagaatacagattaatgtcctctgaattaactactccagccaaaatttttagtctctccctatagggaaccacactttcctttgtataccctttcacctttttcgtctcatcatctattaatctctgttaaacaaatatttttatttaacttaacaaataattgaagctaggaaactgcaacaatatcaaattggaatttcacttctcttcctaaagtctggaagattagaaattaagaatatatttgcaattttgagaaggtaactactagaaagcttatgagcatgtcatactaaggacctactttaaaaaggtacttaacaagttttaacatgtgtatctagatagtacatganagcaaatcggtattggaaacaaatcaaatatct

SEQ ID NO: 232838 - DNA, 429 bp, Glycine max
  unsure (1)..(429): unsure at all n locations
agcttaatagtgtatttggattaacttttttattttatatttctnaaanagaagacaaaataataaataattatttctagttttttacaatatcactgtgaatttgtaaaatagaattggttcttgtgtgttatacaaacacactataagacaatcaatgtacatttggatccacgtatgacatgcttcaatttgagttttggatgagttcaaataagattttttctattatgatgtatggtaatctgttagaaatatgattataaattttagactcaagtctcattaaaattattaaaataatttttacatcaacaccaatttgaatcaggctatttattccatgtatactactattagtgaagnagcaaattattaataagggtgaaaagtgtagaagatgtacccagatatccttgcactaacata

SEQ ID NO: 232839 - DNA, 410 bp, Glycine max
aagctggcatctttgagagaaaaaagagatgcatgctgtttatcatctctctctcatgacagacaagaggaccgtatttgatcttgggccttttgggtggatacatcattgaactctattcttggacttcatctctattggattatcactctctcataaatttggtgaatattgtttaagccaattgagtgtgtttgggtatcaacaaataaaggctcaatagaataagggaatatggataaaccacgttcagtcatgtgataactctggtaagaaggatttctatcagagattggatatggaagatggctaccattaggatagatatttagaaatttgcttctaaaacgtatggataaagcatcaataaaaaattgcgaattgctagcatcaatatgatgacttatacc

SEQ ID NO: 232840 - DNA, 421 bp, Glycine max
  unsure (1)..(421): unsure at all n locations
ctatggtgatttatgagtcagaatgtttatatttttaaaacatctcatattggcaatgcatttaccatcataaacttctccaacaatgaatcacttcatgttaaattctcacacgacttcatcaaatgaaaactgcatgcctattactctctttgaaggtatatttacaaaggtctcttatggctctaaaaaattttattttttattttggattcattgcctggatacagtgattttattgaggagtgggtcaaaattggcttgcctgcaaaggcaaaggtgaagacacaacatggggatgcaccntttgctgatttgtgctcacactgtgagaaggaatgagacacattagtacaagctacatgctagctaaatagtactttctaatatttatcacagaactcagacttaccttcacaca

SEQ ID NO: 232841 - DNA, 265 bp, Glycine max
gctcgcaggggataacaaagtttaacatcccatgaatcgttaaggtaatataagttctgcatataacatcaagacaatcacaacacctcaaaaagacattagtatcactgataatcttaactctcacgagaagagttcctgtatccaactcccatataagatcagaaaattatcttatgaatgagaaatgtatgtggccacataataaccaatcattacagtcacaatttcgttattatcattttttaaccatataccatcccat

SEQ ID NO: 232842 - DNA, 408 bp, Glycine max
  unsure (1)..(408): unsure at all n locations
agcnnncaaataaagaaggatgcagctgttttgtttaccaatnacacaagctaaaatcactaagtaaccatgtgcacccgataatcagaaaatgcaccataggatggattacaggaatcaccccaacgcccatgggggtattgaacccatcctatggaccttgatatgaagctttttgggaaaatcgccctatgatcgatgcataacgaaagtaacaaatcttctagacagaaactctcttattatattatggaacaagacatagcaatggcaaaggaaacataccaaaagattggacggacgttttctttaacacggaaaacatttgccgggcgtctccaaggaaaggacctagaaactatggactctacaattaggccgagggtctgccactaataacattaatat

SEQ ID NO: 232843 - DNA, 456 bp, Glycine max
  unsure (1)..(456): unsure at all n locations
attaccttctcaggatctgcttatatatncatgttatggtacttggcctcttcaacagcaatgtcaaaaccaaatgaactatctaaaacatgaataattacgtgactgtccaaaagcaaattattttacagtctcatcagactaccttaaattgtccaattcaaccatgcttcctaagacatcactatcactatcaacgaattttgttccatgaaatcagacagagccaatcacacatggctccactctcatatttataaattaaagcatttatatatcacaccagccaccaacaaatttcttcatcacctaacgattctttctcttgaaggatagaatgcctaccacaattgaagcacatacaaacaaaatcaaacaaatcggcttccaattcatatataattgatgattaaaacaaccacattatacattcaccctagtgtatcactaccatac

SEQ ID NO: 232844 - DNA, 422 bp, Glycine max
  unsure (1)..(422): unsure at all n locations
agctttctaagttatatgttttccaaactttgttcttttgcagaaaacaaaagngngctatatcttttcattatcttctccctttgccaaaaagaattcaacaaggactactcgcttgaatctttttgtgtctctcttctcctttttccaaaagaacaaaggactaaccgcctgaattcttttgtgtctcccttctcccttttcaaagaattcaaaaggacaaagtctgagaattcttttgattctttcctttcccttaaacaaaaaatttcaaaagactaaccgcctgagatatcttttgtttcccctttacaaagtttcaaaggactaaccgcctgagaactttgtcttaacacattggaggatacatcctttgtggacaagtagagggtacatctacttgggttgttgatactgagaac

SEQ ID NO: 232845 - DNA, 460 bp, Glycine max
  unsure (1)..(460): unsure at all n locations
ttggaaaaggatntctatacaaaagttaggcggatattgtcgctaacatgcataacactaattggcgtagagagtggacgccatttagatttagcgtgttggatgttgaatagataggttacagagcaatccttcttagatgatacatcctatcattacatcctttaggaaataaaatttttccacttgtcaaaaactcattagaatattattgatttacactttatgtaattcataaaaatccaaggtagatgagacgagtggtctgccagacctaacaattatgggtctactatgatgctaaaaatagtttacaaaatttatgtggaaaccattgaagatctacgagaattttcactccaatgagttctcatatactacctattaccaagggaaattgataattaaactatcaccacgaagatatgagaataggtctatttcattcttagaacggata

SEQ ID NO: 232846 - DNA, 432 bp, Glycine max
  unsure (1)..(432): unsure at all n locations
agcttattcttcaagttcaaacttcctattgactttcatgagttaaaacattagaatgtgcacatcttatacagttaaggaaacaaaaaaaaaagattgtcaataacaattcagaatatgcataaaaaagaagtttctattagtaccttagaaaccagaaatgcacaaaaattgggagaaggtaaacaatagtgaatactgactatggcataaacataataaagaagtaaaaagaaaattagagaggtcacaaaacaatacccaaaactttcaacattntaatcaagcaaattacagaggtcacaaactcacaatgcacttgtcccacatatattaagttactatcactaagaagagaaccgattaaggtccacaaatggttgtcccaaaggaaacagtatcaaacccaccgcactgattaagaacttacta

SEQ ID NO: 232847 - DNA, 414 bp, Glycine max
actggagtgagggcccggtgaagaacttgaatgtgtctcgtgagagcacgtgagctcagttggaggtgggcaacaggggatggtgggtttatgcgcgcattgcggatgtggaaaacttgttgtgcaccatcgcccgatcgccacctagtaccacatgtgatgggtaccccataattctacaagcttgaaatgaggaagtgttgaagggtgaaacttcctgcttttattgttgaccacagagtggtacctggagatatgtcgcgggggtcaagagaccttgtggacgtcatgtggggtgctatttgccaaaaccaagcttgaccaatctcgacccaacccgggcatagtcggtcagtgagaacctgtgatgtacctaaacaggcgagcttctggcagttaacatattaaatgaac

SEQ ID NO: 232848 - DNA, 417 bp, Glycine max
agcttttccagagacctactctttgtgatttttttcaagagaagggcttcttggttgcaaacactgaatataagggaccaacgtttcttgggttcattgcaagaagcaggaattgcttcttggttgatcactggacacaaaagaccaacgccttttgggttcattacaagaagtgggtataacttcttggttggtatcactggacacaagggaccaacgttccttggggttcattgcaagggaataacttctttgttgtaatcactgaacacaaaggagggaagtcctttgtggttcattgcttgtaaaggattttacaaggatagtggaaatctcaagcaggttgcttggagactagacgtacgcactggttgtgaccgaatcagtataaaactgatttccattctctttatcctt

SEQ ID NO: 232849 - DNA, 401 bp, Glycine max
  unsure (1)..(401): unsure at all n locations
ggcaccancattcattagtccaatacacacttctcatatattcatcatccatccacaattccaatcattcatgctcaatatgatgcattcacctgacctcaactctcatatgcaatatggtaccatcccctaggaaatagccaatgcgtgtccacacgacactctcacttaggaaaactaggcagttagtgtcgaggtcaccctgtcatgcacaggctacacccctccccccccacaaccccactgggatatacctgagtctcaatgaagatgcaaaccgatagacatgccctcaagtactattattcctactcatgagaaactacaaatactttctgacgaagtttatactatttccattgaatattaagtgggaaacattgccccattaatacactgac

SEQ ID NO: 232850 - DNA, 415 bp, Glycine max
  unsure (1)..(415): unsure at all n locations
agcttccaggaatactagtnactttatcttttccttcactattgaagaagcatgcaatgtgtaaaaagatgtccttttgagaattatctaagccatcataccttaattttaatatgtcatgaatgtttgaatttggaatattttggagttttgtcaattcacttttccatgcctctgtacttcttacttcttgaacgaagatttgaacccataacttttaaagccaaaggaataccttcgcaataagaaattgcacttcctgatagatcttcatatccaaggttaggttgtttttctccaaaaattgtcaaacagaaaaactgaagggagtaatgaaaactcgattctctgaccttgtatacttcatcaacttggctaaaactgtgcttatttcaacttgtagcaatgactttac

SEQ ID NO: 232851 - DNA, 449 bp, Glycine max
tcagcgggggccatattgacgtcccttatttcatcatactcttttcagactctgatggctatggacttgaacttctcttcgactacccgggctctttcaagctctgcctttagggcttgtacctcatcactttcttccgaagctttaacctcatcgtctctcacagtctttagatttgggagccaatccaatccttgtgtccggactctcagccacttatgatagccgccgatgctcccattactgcttcccctaagctctttgtcctttcttcacgccgcatcccatgccttgcgaactccttggagtaccctcgcgttgtggtcactaaaaccccgcgcgatgaaaggcgtgatgctttcgtctaatggcgctcctctcatggtgtagccaagctgtcttatggcgagaaccggattataattaatacaaccccttgtctcatcagg

SEQ ID NO: 232852 - DNA, 418 bp, Glycine max
agcttcaagagaagtccaaactcttctccttaatctgatttcaggcttaaatagatgactttgttcgtgctcgtgcacttgtgcaattctgaaccgcttagcgcgcattagtgaattttggcttagcacggcttttctcgctcagcggatggactgaagaagtgcgcttagtgggaagacctttcactcagcgaacatgcacaactcatccttcttccatattcttcctcgtgcttagccgaggaatgatgcactcagcggatggcttgctaagccagcaggttggctttgcgagaggatgaaaatcagtacttcaaagctagcctcattatcctgaaattaagagaaaatgattattaaacatacaaaaatggaagtgctaagtatttattacctcatctttaacaaaagtaattac

SEQ ID NO: 232853 - DNA, 478 bp, Glycine max
  unsure (1)..(478): unsure at all n locations
tgaanagaggaagtgtagaagggtgaaactttctgcttttattcgttgaccacagagtggtacctggagatatgtcgtggggatcaggagaccttggggacgtcaggtggggtgctattgcccaaaaccaagcttgaccaatcccgacccaacccgagcatagtcagtcagtgagaacctgtgatgtacctaaacaggcgagctcttggcagtcaacagataaaaggaacaaagaccacaaagcaaggaggcttgtgtggtggctggccagctgtgaatcttgtgtgatatatgggttatggcctctggtaatcgattaccaagggtgggtaatcgattacaaggcttataaataaagacaagaggctaanatagtctctggtaatcgattaccaaggggtgtaatcgattaccaggcttgaaaacgaggtcaggaagctaggtgagcttctggtaatcgattaccaggggatgtaat

SEQ ID NO: 232854 - DNA, 411 bp, Glycine max
agcttgaactgtgggcttgacttattttttttcttcacctgactcatctgatgatatatgttgaggtgaagcgggctctcttttctaataaaaaagttaattggtggataaaactattaatattttgcacaacaagtaaaaattaaacataattataaatatggttacatgtttaatttctttgaggagaggatcatgctaaatgatattttttgggataaaagtccttgcgttagtataagtctaaaatccttccttcaagttgcgagctgtgagcatgatttctaaaataaaagtgtgtctgcaaaaggtatacagtattgggggtatgtaaatcttatgtgcatgggtgtgaaggagttcatgtgttgttctgtttagaagttattgtgcatctcgatcgaacattga

SEQ ID NO: 232855 - DNA, 369 bp, Glycine max
  unsure (1)..(369): unsure at all n locations
tctcagctttcagttttcgatccagaccttggtctttcacttaaaacgatactgtgctatatctcttgatgctctcctccctttgccaaagagaattcaaccaggactaaacgcctgaattctgtttgcgtctttctactcactatcccaagagaacacaggactaaccacctgaattcttttgtggctcccttccccctttgcatagaattaaaaaagacatcgtctgagaattcttttgattcttccctttaccttagacacaatatctcacaggactaaccgccttagatatcttttgtatcccctttacaaagatntaaacgactaaccgcctgagaactttgtcttaacacattggagggtaca

SEQ ID NO: 232856 - DNA, 295 bp, Glycine max
caacgagccaaaaaccggaatatattattatgattacaaacacacaaaagggaagcactaaggagctataacctatacgcaacagaaaatactgataccaccacaaaataaccacaaaccggaagagatcgatacaacttacacaagttttatacacaaaagatagtcggattcaccgaccaacagccaacaagggtgttgccctagctccatgaagagccatcattttcttctatagtataaaccccttctgcaccattttaaagactaaaagggcttaatcgcaactaattac

SEQ ID NO: 232857 - DNA, 460 bp, Glycine max
  unsure (1)..(460): unsure at all n locations
cagcttgcgcgattggtctttgccagtgaaaggatcgatgttggtctgattagaggcaaatttagtcatcctgcttggacgaatgaganaactgtggcaaatgatgagggtgaggatgaaggagaagcccgtgctgtgactgccattcctatacagccaagtttcccaccaacccaacaatgtcattactcagccaataacaaaccttctccttacacaccgcccagttatccacaaaggccatccctaaaatcaaccacaaagcctacctaccgcacttccaatgacaaacaccacctttagcataaaccanaacaccgaccaagaaatgaattttgcagcgagaaagcctatagaattcaccccaattccagtgtgctacgctgacttgctcccatatctacttgataattcaatggtagccataaccctagccaagggtcatcaacctccatttctc

SEQ ID NO: 232858 - DNA, 410 bp, Glycine max
  unsure (1)..(410): unsure at all n locations
agcttgtagaatggctgtgcatgatacatgtcagggtttggnttggttcaaggataaaagggatgccccacattatttccatgacacaaatgcaaaaatgatgatttggaaattttatgcaaaactggttatgcatgcacctatgcggacactcaagtgtcaaatttttatggtcatgtgatgctcgggctcaggattcatttcctctattttagtcaacccaacgtttccaaaatatgttcttttatcaatttgggcattcatccgagtccattttgggcgtctgggaaaatcttcacagcattcacccttcaggtgtatacacattttttcaaaaactagttatgatcagtgaatttttccaaagaaaagttggaagtcatctcttttcaaaagcatgttggtttttc

SEQ ID NO: 232859 - DNA, 473 bp, Glycine max
taaagtatgcccgagtcatttatccctatgagatgttgttgaagtattggcgatcagaattgccattccttggattatagggttgaaccaagctcatgcttttacaaaaaggttcatcaagtcaagttgaaatatggaaggaaccgtcttgcaaaattggggcaaaagatgaatcgagtcacatcactgcttcgtctactgccaaacatatttaggattattgatgtccttgttacttccagtttcaccttgacaaagatgtcatggaccatgttgaaaatctaaattgattcaaccccatatcttgcgtaaaaattcgcaatacttcaattgtacatcattcgcatgcatccatggctttcattggttgcattgctcgttgcactctttccttaaaagatacaataaaatgaacttaatcattggtataaaaaagaaagggacacgctttacgacgcccttaccgaactcgg

SEQ ID NO: 232860 - DNA, 405 bp, Glycine max
agcttctttgcatgaagcaccacttcattagagacacaagttaatagcaacaagaagaagaataatgcagaggaagattaaccttgaaatggaagaatgccccattttggttcctactaaatagagtgaacatacagtgtcacttttcatcacttgatcatttgatttttgaaaatgttttaaaaagaaaaatcttatgagtgagtgaatatttatgttgattaactcatcatattgttttgtcaccttgtggaggattaacgttttaatagaatgctcctatttataatcaaactaactagctaactagcccaacaaactaatggaataactgactagcagctgttcttattcaactctattatacatcctaacgatatgggtagtactgtccagtgtctacca

SEQ ID NO: 232861 - DNA, 436 bp, Glycine max
taaagaagagagatggtcatgagagaaaagcttaaatgatagaaaggggtaatcgaagattaaggacaactcacagaaaagagaaaaaaaaattccataataatatttgtattttatcttgtgtaaacactttcatactagcttaaccacacgtattttttgtttaaggagtaatgggcgtcttctatagcaattagaagagtacaagaaaacataacagaatcacgtgaacgtaaatactaatgtaaactatacattaaaggggccgcgcgaacgcaggcccccactaccacaaattatgacgtaggctctgccacttgggcagaccttaagaaagcacccctcctaagtgcaatggaggtcacttccctaggccatggaccttcttgatcatccattgaccccgtcaggtaagtatgttataacgtgtacacat

SEQ ID NO: 232862 - DNA, 380 bp, Glycine max
agctttacaacagtgtcgggcattcgattttcatttaccttctttctgggggataatgtgcatgtaactgcaactttcaacttagtaattgtagttcactttagacgtggagaaatgcaggtggtgttgggaaatactaaaatatgacagtgatattttacttttagttaacttgttccttccattgtaattcaaatgctttccatctttgtattaattttgaactattcctattgagataacaagtttggttctgtcgaaatgattaagctgaaaatcaatgctgtggctgtagattgaaaaaaccctgcacaacacgaatcactggaaacttggtaactaagtgcatgtttctaaagcttaaaaaatgtaagctcaaa

SEQ ID NO: 232863 - DNA, 477 bp, Glycine max
  unsure (1)..(477): unsure at all n locations
acagcagtttcgcctagtcaatcagaaacaaagattttgtatccaaaaaagcatatgtttatactacaaatgagcccgagacaggcaccaatgtacattataaatccataattaggctcaaacagtgaaacaaaatgactatagaggaggggttggggcaaataacaagacagtgtcaatagctgggatccttaaacaactatttttttcatgtctaaatactaagtaattacagttcctttgtatgctaatcagtttcagcaagcaatctcttgccagacctgagaccaaaaaaacataaaacaactgtgtaagataacttaccgaccgctcaagtagagataaattacagttgcacagacacaaattaaagaanaataaggacattaattgtgatcatctacagtattactatatagtacgcagaatttccgaacatccatttcaattgacattgttgaatatcagtagataagt

SEQ ID NO: 232864 - DNA, 360 bp, Glycine max
agcttagcccaataatattgctaacaatattggtattatcaatatttctaactccctcccctaaactatagttcacttagcatcacacttgttacaaagtattagaatgtcgcaacatctttaatgtatctcagaatattgttaggatcatattgcaaggtatgaaagttgagtctcacattgaaagtttggcatttaatgtagggttttttaggcctccaccttcatttttccaactacaattgatggcttttatggtgtagttctggtagggtcttaataattggtattagagcttcttcagtgttgataaatggtggcgctacggctaccatggctgaatggcatcatggttttttt

SEQ ID NO: 232865 - DNA, 420 bp, Glycine max
gtatatcaccctcaacctcaacctcaggtataacactctcaacctcgatctcaaactcaacatcatccatatccttgacaaataacattgctataatctctaccttcctagcgtgtcagtagtaaggtggcgtcatctgtgtccaccaaagctagaaagtgtattatgatgggattgtctcaagctcatccaacaccctcattgtagcacagagaattcccacaaatcccgcacaatggtaatccttgtcatgaagccaatatccgtcaagcatcaacgtgctcacatggatcctcaatctctgggccaccatctagatctacatgattttggttgatgggtgggtcctcgatcaccacacataaaccaccaaacaatatgaccctcgagtgtagagcaacccacgctagtgaatgacac

SEQ ID NO: 232866 - DNA, 432 bp, Glycine max
  unsure (1)..(432): unsure at all n locations
catgcaagctcagacgaccgagatggagccgagttgactttattatttaantcggacacgcttcgaatatgatggtacaaaaaagtgaatgtgagcccttcccccctctgaaaggctcgcatataaaaatactttcaaataggatgggaatctttagtcccatattatcacatatgtgaggggtagagggcgtcacaatttacatatatgtatatggttggaacaaaaacaaaacgaaaagagaaggagcatggatactaagttgcttacaacatgatcaaacctggcctaatgtcatgacagcataaatactaactataaacaaagggaccactacacactggcgtaacatactaatcaagtgatagacatgcgtcataccaaagtacaacacagacaagggtaccaaataatcatagttcacctccgaca

SEQ ID NO: 232867 - DNA, 402 bp, Glycine max
ctctatccctcatctctcttactttaatcgctgaaggattttcgcaattagtagtgatacttgcattcaaactctaatcgaacctgtaactgtgactaataatacaagggaaaattgacaaagtatctcatctctcaaaataacttccgatcaacgaacgatttgcaaaaattgcataaaagtgtgaaaactttatattaaccaattcattccgcttatggttgatatcacctatgccattatatttaacacaaacaagtgttgctaatctaaaaaaaagtattaccaccttaacatttgagacatcttctacccaatgtgaaaatgatacaatgctattattggggagaggcgtacctattgagcccaatggtggccatcaataggctcaacatcattatg

SEQ ID NO: 232868 - DNA, 426 bp, Glycine max
  unsure (1)..(426): unsure at all n locations
agcttgcatgatttacattctccccctttctaatcaaattcttaattcttcttgacatcatcaaaattttcatgatttacattctccccctttttgatgatgacaaccacctgtatgttaggagcaacaacaaagaaaaaatatctatttgcatatagtttactcccccttggttttgtaatgattgcttatatgagacagttgaagatgtcatatttttcatatgtaaacaaattgtctcataaacaatagataatttttcttactattttatcctttatctttctctccccctttgtcaacatcaaaaacaaatcatgaatagagaggagaaagatgttaccacttgttgcaatgtattagaatcaagtgataccaanaggcattaaaacaatcattcaatgttaatcaagcaaaaacaagtac

SEQ ID NO: 232869 - DNA, 479 bp, Glycine max
tcgtctcagttcctcgtaccatccacaaacagatggctataatgaggtcgcgaatcgggtcgtggagcagtacttatgggccttcgtccaccataagccaacgtcgtgggggcagttcctgttatgggctgagtggtcatacaacacttcatgccacttaggcatggggataacaccgttcgagatcatctactgccagaaaccacaagctattccagaatatttggaggggacatcgtctgttgacacggtggatgagatgctcatccaacgcgacgaggttttgaagctgctccgccggatactgctcagggaacaacagaagatgaagcagacagtggacgcacgcagacgacctcaagagttcaatatcggggactgggtgttagtcaaactttgacctcatcgtcaaacctcatcttctgagacatcatactcaaagttggcaaaatgtactatgggccattcgcggtggtgga

SEQ ID NO: 232870 - DNA, 435 bp, Glycine max
  unsure (1)..(435): unsure at all n locations
agcttcatgatgaatcaagagtgagtcatatagttttgttgataacaaagatgatgacaaaaagctcaaaagtcaggagcacttcttgataacaaaggagatgatctcttgaatcaaagaacgagttcatgattgcatcaagtacacttcacggatcaggaagaaagttgaattcaagaatcaataatgaagtttcaagattcaagttccaagaatcaagatcaagattcaagactcaagattcaagaatcaagagatgacttagtcgagagaagtattacaaggtcttttcaaaaactgagtagcacatgaatttttctcaacaccttttaccaaagagtttttactctctgggaatcgattactagattattgtaatcgatgactagtagcanaatgtttntcaaaaagctttcaactgagattacaacgttc

SEQ ID NO: 232871 - DNA, 458 bp, Glycine max
  unsure (1)..(458): unsure at all n locations
tgaagtgagacagagnggaagagtcagtctgcctacttttattctttgaccatagagnggaacctggagatatgtcgtcggggtcaggagaccttgtggacgtcaggtggggtgctattgtccataaccaagcttgaccaatcccgacccaacccgggcatagtcagtcagtgagaacctatgacgtacctaaacaggcgatctcctggcagtcaaccgatgaaagaacaaagaccacaaagcaaggaggcttgtgtggtggttggccagctatggatcttgagtgatatttggaatatggcctctggtaatcgattaccaacggtgtgtaatcgatttcaaggcttaataatgaatgcaagaatgtaagatggtctctggtaatcgattaccatgggtgtgtaatcngataccagagctataaatagggccaggaagttgagatggcctctggtaat

SEQ ID NO: 232872 - DNA, 398 bp, Glycine max
agctcgatgaactcttgcagatatcggttattctcgagtctcgacctccatctccttcttcctcttcggcgcaaccagatacttaaccacacacaaacacttccttttctcctcatcggataaagttggatgtttccgggtttgatgacacaaaccctttaaggtggtttgatgacactaatgcctcgtatcgcgttcttctaatggacggcttgacgctcgcatggatccagtggctggtgcacaacaatcaacaggtgtcttggactgggttccttcaggcgacggaagtgtgtatagcatttatcacatatgacgatcccacacgagcgttgttaaatataacctaacaaggatccgctggtgactacctgtcagaaatcgaaaatctcgcttat

SEQ ID NO: 232873 - DNA, 401 bp, Glycine max
agcttaaagacccagtctccatataagctttacaagcaagcttccatcaaaaaacatcatcacttcagccctagggatagataagtactttaaagtgtcaaattgtactaatgccaaggatatgtggaatactctccggttaacccatgaaggaaccacatatgtaaaaaggtctagaataaatacccttacccatgaatatgaattatttaggatgaacccaaataaaaatatccatagtttgcaaaaaagatttacacatatagtaaaccatcttgcatctttaggaaaaatctttcctaatgaagatttaattaataaagtcttaagatgtttaagtagggaatgacagcccaaggtaactgctatttctgaaagcaaagatctctcttccatgtctc

SEQ ID NO: 232874 - DNA, 462 bp, Glycine max
  unsure (1)..(462): unsure at all n locations
taaggcctgtttccatattcaaatcatatcagtgtttctaaagtttctttccatgaaaaaaaatatgaattcatttgggttttggtaaagtccttcattgtttttcattctcaatgttttcaaaaaaattcttttgttgtgttctaattgaaaaataagtttcaaaaatactggttgttgattcttttcaaagcatgttatattcaagaaaaaataattgtttaagtcccgaaaagagttataatctataactatactaatagaatatcaaagcacacgtaagttttttaaaaaattcaaaacaataaataaggtaataaagtactgaaatttaatacaaagcgataaataaacataaagacaagttcacgaattttcgaagatcatggttgaggagctcaatcntctagatgatcatggttgaggagctcagtctnctccaatgaaataatcacaggatct

SEQ ID NO: 232875 - DNA, 410 bp, Glycine max
agcttgggacaaacaaagcgtctcttatcttaaggaagcacaagagtggtaacttccaatccattctgttctccaaattcaagcactgccttctctgacaacacctttgaaactgcataggaccaactaaaaggcttcacactcctgagcaaatccacatcactccaaacactctcatccaccacatctttctcttctaggctgctgaaggaaacagcggaggcgctagaagtgtaaacaaccctcttcacagtctttgcttttaggcctgctttcaatatgcctagcgctccatcaatggctcttttggtcaccacttcctctggctcgttcaccgcacaatcaatcggggtggcatagagaaaaattcaacacaatcctaactgctggacaaaacttctgggccgtga

SEQ ID NO: 232876 - DNA, 466 bp, Glycine max
  unsure (1)..(466): unsure at all n locations
tancacttaaatgaacaatcacagaccaatatattctaatcatcacacatgctatgaataattntaaaactaagaaatatagactatatagcatagctaatggggaagaacataactaaacatttcaagatggtaaacatgcaattataaatcccaaatgtaatacaaattccttgtgaaaagtgacattcaaaaagacaaaacaacaacagtgtttacatgtttattgctgtgttgcatcctgaaacaaaactacacaagtatctggggcacatttatctattgatcacatttacgataatttaagaaacaacgtggaacatgccattgtatggttcaatccatgacaaagtatggcaggcacaacacaacatatacaaaagttcacaagaaacaagataagttcatcttcgtaggaatcataggtatctagaaacaccacgaacataattcaagaaacatacaa

SEQ ID NO: 232877 - DNA, 432 bp, Glycine max
ttaagcaccgcagctgcggcttttatttcgcagagatgattttttgtggccacatcatggactcctctaaggagaatagcatcatttcttgcatcgaattgttgggagtgggaacccactttctcaattaaattcctaccctcaacaggagtcatatcaccaatagctccaccactggcagtatcaatcatacccctctccatggagctaagtccctcatagaaatattgcacaaagagttgctcaaaaatctgggggtggggacaacttgcacacaattacttgaatctttcccaatactcatacaagctctctccactaaattgcctgatgcctgaaaagtctattctgatggcagtggtcctagatgtagggaagaatttccccaaggacaccctcttaaggtcatcccagctggtaatggaactggga

SEQ ID NO: 232878 - DNA, 480 bp, Glycine max
  unsure (1)..(480): unsure at all n locations
nggctttcataattaactgttatgtggtgttattcatttcaagatctacctgagttgaagctggtctcccacggtaggaaagttgataaatctgggagtccagtgcctgggattgaaggccttgttgccggcatcagattaagtccattgattgagtgttatgtggtcaccggcgatcctggacttatatccacatttgcggagaggtgacatagggagactagcaccttccaccttctagtgggggagttgatgatcacactggacgatgtggcatgtctcatccatctttctatcacaggggcattacacaggtttgaaactctgggcgtggatgaggcggtcttgtagttgacggagcttttataggtatccggcgaggaggctcgataaaccatagtgttatctcatcaaatatagtaataggactagtattaaagtttattaattaaataaatatacatacacatagttgttatc

SEQ ID NO: 232879 - DNA, 419 bp, Glycine max
  unsure (1)..(419): unsure at all n locations
agcttcaattactcagtcttatttnttttacaactgaacatttatgactaacatatggtgtgcctttctctctagtaggtacattagcattgtcatcatcccccaaagacacaacatgatcatcaaggacacttacactggaatcttgatgataaaatatgtatgcattatttaaattcttttaatgttgcaaaataaaatacattcatataggacataatcattataaaatatggatgtattatttaaattcttttaaaacaatatggcaaaagttataatagaacttatataaatcaaatgagttttatttctagcttggaactgactactaacagaaggacaccaccaaagaaaaatgttacaatccaactaaattctcgatttcccaaaatttcatgataggaaaaaattgcata

SEQ ID NO: 232880 - DNA, 475 bp, Glycine max
  unsure (1)..(475): unsure at all n locations
gctngacaagtgttgtctgagttgcttttgtcaagntgttcgtgagggacatgtctttggcgtcttatgtaaggtaagtcgttggatttgacaactctgcccttttctgaccattggagagtgcattgaagatagatgttatgttttgtctactactgcaggcgtgtgtgacacatgtgcaatactcttgcatatgtgtcagtcgcggagtgggcacttattggagtcgcggttcgtgcatgagtgggagagcatgatggtgccaaattttagggcaccaattcagctccgaccagttattgaagagttcgtctctctcttaaatggagtgaacgttcgattntaagtcactgctctttgttctctcgcttcagagctttcttttctttctcactcactttcttcgatattctaagggactattcgtttccacaatgccttcattcttgtctgattttgccattgtataggtcga

SEQ ID NO: 232881 - DNA, 131 bp, Glycine max
  unsure (1)..(131): unsure at all n locations
agcttgctgagcaggtatcataaatttttatacaancaacgaacgacaagaaagttttttttttttgtgcgtgctgggggggagtgaagaaacataaactctctttaatatcaatgtcatcattcaattct

SEQ ID NO: 232882 - DNA, 443 bp, Glycine max
  unsure (1)..(443): unsure at all n locations
tactcagcttatagcgcggtctggagacatagtcaagtgttttcgatatgcaaagaggatgttcccagtaccttggatttggtacgaccatgccctcctgattttcagctgggaaattggcgagtggaggaacgctccggcatttacgcgacgagcataatgtaaacctttacggttttaaaagctctatagttgggcctaggctttagagtatttccttttgttaaagctttgtgtctttcgtttttgaatttataatacaaggatctttcttcatctgttcctggtctctacccattctcattcatttgcatgtttacttctttttctgaaacggcagatccgatgacgagtcccccgaaggtactaatacctgggacccgcctatcgacttctagcangagatgaatcanacggaagatgaaggagatgaggatgtggac

SEQ ID NO: 232883 - DNA, 397 bp, Glycine max
  unsure (1)..(397): unsure at all n locations
agcttgccacccaacttgtccagtcgatctaggttgcttcctccagaaggcaccgccttctggagaacttcctggaaggcccaagtgggcttggttgctatttgcaccccctatttactaaatacacccctgccttttgttgctgattctttttccgtaaagttacagaatcttacgaattacgtaacgacacttggtttctttctgtaatgttacgaaaccttacggatcacgtaatcatccccttttttggcttccgggatgttacagaactttatggattgcgcactaacacttccttttgacttccggcatgtcacggaacttcacgggttgtgaaacaatgcttttttttgacttncggcatgtcacggaactttacaaattgcctaacgat

SEQ ID NO: 232884 - DNA, 451 bp, Glycine max
  unsure (1)..(451): unsure at all n locations
tcttggtgaatcttatctaaataagctaaaaattgatttaattagaaaaatcaaattaattaagaaattgttatattacaaggactttatatgtgttaaaccaaaaaaatatttattcatcccttgttgggtttcatttctttctccaatgtatctaaaagacagtaggattatatttttttttcttctttgggttcataatatgcaattgacttataaatagctggattcacgagttaacaggaaaaaagtcaaaaacaatgtgacatccacgttcagaagcaaagctcttcaactaataattaaagttgaagggtactattagaaaatcaagtagaagaaacagtaaaactcatattgttcttttaatcactacacattatcagtatagacagattnttcatgaacccaggtgatgcattacttatccaaagttacgggtggagaatga

SEQ ID NO: 232885 - DNA, 455 bp, Glycine max
cccggattcttagagtcaccctgaggcatgcaagcttgattgaacagtgcatttatattattcagtggttgatacttgattttggaattcaatgtttgtgattggtttgaattgatcaattgtatgatgcgagtgaattgaaatgcgtagatcatatgccttgaatgagcatgcagtcattagaagagaaagaacatggaattagaattataactgaaaatgttagttggtttgtcatgttgattgtgaaggaacgcattagccgcaacctggtgagagtgtgatctttaattgtgagagaacgcatctaccttgtcttaggttgtaggagagcatcattcataaaaggaaacattggttcaaagcaaatttgcccaaatttgggggaattatggggtgaaagcttgtaatggtaagaaaagagcaacacacacaatcatctaataagcagcaag

SEQ ID NO: 232886 - DNA, 453 bp, Glycine max
  unsure (1)..(453): unsure at all n locations
gtctatgttctgtataaatataaattatatgtttagtttgtgaaattcgttgtgagttctcttgcatttgctgaaatttgcagaaaattgaattgcattataaatatgttttgtttgtggctaagctctattgttttttagtttataaaatgacaaacaaatacaactcagtagctgagatcaattctgagaaagaaagttagagaatcatggttagggttgttcatttgtggatggtatcagatatttcgactaataaacaaacatctagtatcaaaataccattttacatggagacgatgctcgtggactcaaaggtatgttcatttcanaaattacaaatttttttgtttgtgatacttctataatattgcaaaattttactgtctattttgaatgtanggagatacagtccatggttttgtcaagcgaactctcatttataagtttgac

SEQ ID NO: 232887 - DNA, 402 bp, Glycine max
agcttgatagcacgcagagactaacgtctttttttgtgccattcatcaaacgcggccgacaagcccgttgacacgaggagatatacgttatcttccgcgctcacaaaatctgtcatactgacttttgagtcacgctgacggccggaaatacccgagtggttatccataacaaattttcgctgtctggaatacaaaaagcctgataacacgcagagactaacgttgtcttctgcgacctttgtcaatcgcgggcgacaagcccgttgacacatggagaataacgttatcttccgcgcttacaaaatcagtcatacatacttgtgagtcacgttgacgggcggaaatacccgagaggttatccgtataaactctatgaatttgcagaagaaaagcttgaaacac

SEQ ID NO: 232888 - DNA, 463 bp, Glycine max
  unsure (1)..(463): unsure at all n locations
tctcaggcgtgattgacgaaaggcacagaagacgactttggtctctgcgtgctatcaggctttttgtcttacaaacaacaaaaactttatacggataaccactcgggtatttccgccagtcagcgtgactcaaaagtcagtatgacagatcttgtgagcgcggaagatgacgtaaatttccgcatgtcaacgggcttgtcggccgcgattgacgtagggcgcagaatacgacgttagtctctgcgtgctattaagcttttcgtcttacagacagcaaaaagtttatacggataaccactcgggtatttccgcccgtctgcgtgactcanaagtcaatatgacagatcttgtgagcgcggaagatgacgtatatctccgcgtgtcaacgggctagtcggccgtgattgacgaatggcgctaaagaccacgttagtctctgcgtgctatcaggcttttcgtctac

SEQ ID NO: 232889 - DNA, 124 bp, Glycine max
  unsure (1)..(124): unsure at all n locations
cgcttgcgccacctacatagcataggcatgnttttgttgatcaacctacgctgtggttgcaaatttgagaatctctcccataccccaatatgaaccaagtagtaaaagggttcctcctccattt

SEQ ID NO: 232890 - DNA, 396 bp, Glycine max
  unsure (1)..(396): unsure at all n locations
gcatcaagctagtgtacattcattaagtgtttactgngaggcaacccagctcattatctttattcgcctaatcattgcatatagataggtttcaactagctcgacatggctatagtacgtgataagcatgttttgcctgacaaacgggattgctaaagcttctctgaagctgcgaatgacgaataacttagaaaatttggtatacatccactcgctcagcgctccctgtgcactaatcgaatcatgcttcatgcgctgagcaagtcatcacctacgctaagagcgccaaccccaaacctatggcggaaggggcttcactaatcgagaccatcgcgctatgcccaaaccattgcactatgagtcatctcactaagggcgcaacataggcttgctaaa

SEQ ID NO: 232891 - DNA, 428 bp, Glycine max
  unsure (1)..(428): unsure at all n locations
agcttgtatgtntttcaatgaaacaatttttattcttgttgtcaactttttacataattacttattttgcatagcaatttcttttcataaatatatcaactgactatataattgtaatatggagaaactttttgcatcaaatgatcaaaagatcactactagatgccagaaccagaataagttgaatcgtttcttgtatttttctgtatcaattcattatttctgtagcaactatatgatgattacgtgtagttaattatgattttgcattactgcagaaaatgaaacatttgcctgtatactttagaattaaatgcttttccatggtgttgggtctaggttgacttttattttaaacccagtcaacatagctggttcattgttttttatggtctcattccgtcattctgtagatctttttgtttttt

SEQ ID NO: 232892 - DNA, 487 bp, Glycine max
  unsure (1)..(487): unsure at all n locations
tctntgggaccttgaacaagcaatcaactcctctntcataaccatgctatgtgctcgcgactggtccctttcttcccttcgcaacttgagttcactattgctaccccatagagctccgcgaaatttgttccggccatactcttccttgcgagccctcttggtctctcgttcaagggcccttgcggtaattgcattctcttcccataacccggcacactccttccgaacgtgtgtagcagccaacttgaacttctccttggcgagttttgcctttcctaactcgcttttgagagcttggacttcctcgtcctcttccggtgcttcaaaattctcttcgctgacgacttttaacttggcgagccaatctaaaccttgtatgcgaactttcagccattcgtggtacccaccaatgatgccattacgaatgcctctaagctcttgatctttccttaacggggtttcccatgccttatggattctntgatag

SEQ ID NO: 232893 - DNA, 421 bp, Glycine max
  unsure (1)..(421): unsure at all n locations
agcttacacatcaaacatgtttatttcttatctcttatgcagacaatataatccaaaaattggagaatttgcttggaaaacttgttgttgtccttaaagtgcaatttgtagaagatccacaaattaatcaagtcttaaaatctattgatcaataggtatgaatttataattcaacttattcaaatattttactatgatatgatantttacaaagaaaaaacattttttttaatttagatacctacaaatggttctactagtaaaaatcatcaaactacaagcgatcctaactagaggtgagttgaaatttaaaaaataatattttgacaatatcatttatgttagcatatggtatatatcgtagtgtatccacactatatatgtatataagaagctgcagctttctttacttgattctctc

SEQ ID NO: 232894 - DNA, 478 bp, Glycine max
  unsure (1)..(478): unsure at all n locations
tagccttcaaggctggcacctcttcactccccttatgttcctatgcctcttncccattcagaccctttagctttatgagccaagctatcccttgcattctagattttagccattcgtgatagccgcctatgacaccattgcttcttcctctaagctctttatctttccttcccattttattccatgccttatggatcttcaaaagtattagcttcgttgaaccctcgtgcgaggaaaggcatgatgatttcctctgatggcacacctctcataggatatcataactgtcttatggccaacacatggttataattaatgcaaccccttgtccccatcagagggacatttagaaatcctttacatgaccacaacactcctgccccttattctttccactgggggaaccaattaatggacagcttcgtcatgccttgcatgagttctcccaatttgccttatcctctcctgaacacatgtg

SEQ ID NO: 232895 - DNA, 419 bp, Glycine max
agcttttaatttcaatgcaaggtatcatttcttacctacgaatttaagttttggttttgaatgtaaaaaaaaaaaaaacaaagggggggggggcatgaatattatgacatgtttgaaagtttttttattattaaaatttaaatttggctgccccatgaggaataccttgcacttaggtagcatggaaaacaccttttaacggtttgtatatatgtgaatgtatatggcataaagataccttgcaaagtgtgaatgaatagtaaaaatgcctttctaaatatgtatatttgtggataggtagtataaggagtctttcaaaaaatgtacccatgtcaaaaatatctcggggaagctttccaaatggatatattatgtgggattgcccctcaagtgtaaatagatgacatgaatgtttcttt

SEQ ID NO: 232896 - DNA, 425 bp, Glycine max
ctcagcatgcaaatcaaccacagcagaacaagtatgacctcttcagcaacagatacaaccctggatggaggaatcaccctaacctcagatggtccaaccctcaacaacaacaacagcagcttgctccttccttccaaaatgctgctggcccaagcagaccatacattcctccaccaatccaacaacagcaacaaccccagaaacaaccaacagttgaggcccctccacaaccttccctcgaagaacttgtgaggcaaatgactatgcaaaacatgcagtttcagcaagagaccagagcctccattcagagcttaaccaatcagatgggacagttggctacccaattgaatcaacaacagtcccagaattctgacaagctgccttctcaagctgtccaaaatcccaaaaatgtcagtgccatttca

SEQ ID NO: 232897 - DNA, 410 bp, Glycine max
agcttcaaagaatgaaaaaaaaatgaaattttggaaccatgaatgagaagcttgcatgaatttgataatgaaacaagaagagaaataagattaagagccaacttgtatgaagcttggaataagaaagaaatggactcctctccctcttggtgaactcgtgcaaaatggtgaaagaagggttccaaattgatttttaaagaaacaagataatgttgaaagcttaaggagacaagcctagatgacaatatgaatgacctatggccaaccctgtttaacatgccaagccatgccttttaggattagagttgcttttgaaattttaaccaaaaatggttaaagtaagtttaaaccaaaaatggaaactcatcctatcctaatcccttagatagaggtgtgtaaccttccttgga

SEQ ID NO: 232898 - DNA, 427 bp, Glycine max
acactccacaatactcacgctcttatagaagtgggtcattctctaattatacggttgttgcaacaatggtagatctctcacacagaaattggctcgagtttctctttcttgcaaggctgtaaaaacttaacttcatgattctccttgatgatctcttaaagctccaaataagaccattgaagtggagtgcactcaatagatagacttctaaagaaagcaaacacaaatgccaaatgtcatgtcatgattgctagagggatcattttgaggatcctttctaatgagcactctaaagttacataagaatggggattctaatgtgagattagaaaggatccatattggtagtagatctcgttgatgaagctcaactaatatttctttctgaagtatcacaacatcattaatttgaacacaacttcttaac

SEQ ID NO: 232899 - DNA, 423 bp, Glycine max
agcttgtaagttgtaacaatcatatatgtttatcctgcctttagttacgaagcacatataattcacacttgattcatattagtcacgtatccgcttcaatgtcttgtcttgctcaagtcgagctgggcctatagatgaaatcacaccacatttaaacgaatttatttctctattgagcacgacaaatttgtttacatattgctttgctcactctagtaatattgtaatacttccctttatttctccctagcatgttaggaccatattatctctaacttgaaccccccctcttctgtcttcgaccagttacaaaatatgcttcatcgacattacagttaaaattataaattttcacatttacaccaaatagtatgtgtaatggagaacatgaattatagagccaagcatccttcaaagacagcc

SEQ ID NO: 232900 - DNA, 434 bp, Glycine max
  unsure (1)..(434): unsure at all n locations
aaaactcagctgtatatggctganttataatcagacagctctgtttttatggttaagcggatccctttatttctttaaaaaaaatgcttccaaatgtagctaaacttttatgtgagtcaagtgaaatcgtcttacaaaaattataccaagatagatgaaattcagaccttagatttaattaaaaataggacttatgaagcttaattcgatctatctatttgctgagtaactattacaagaaagactggaaaatgaactcactgattctcattgaatagagaactggtttatatacagaaaacagttgcaacacataatactagagaagaacatcatacacactaactatgtagttaaaatgtggacaatntgatctctcaaaacacttaatgaaattacatggtttttttgatgtctgatgaaatctttcagaa

SEQ ID NO: 232901 - DNA, 440 bp, Glycine max
ttaagtcacctgcggcatgaagcttgaactttgggctttgacttatatttagttcttcacctgactcatctgatgatatttgttgtggagaagtgggctctttttctaataaaaatgttaattggtggataaaactattaatattttgcacaagaagtaaaaattaaaataattataaatatggttacatgtttaatttctttgaggagaggatcatgctaaatgatattttttgggataaaagtccttgcgttagtataggtctaaaatccttccttcaagttgtgagctgtgagcatgatttcaaaaataaaagtgtgtttgcaaagggtatacagtattgggggtatgtaagtcttatgtgcatgggtgtgaaggagttcaggtgttgttgtgtttagaatttattgagcatctcgatcgaacattgtgaatgttgt

SEQ ID NO: 232902 - DNA, 447 bp, Glycine max
gtctatgtatactagtatacaaaccttggtctttcacataaaacacaactgtgctatatcttatgattctcttctccctctgccaaaaagaattcaacatggactaatcgcctgaattctttgtgtgtctctcttctcacttttccaaaagaacaaaggactaaccacctgaattcttttgtgtctcccttcccccttttcaaagaattaaaaaagacatagtctgagaattctcttgattcttccctatcccttacacaaaatatttcaaaggactaaccgccttagatatcttttgtatcccctttacaaagtttcaaaggactaaccgcctgagaactttgtcttaacacattggagggtacatcctttgtcgttcagtacagggtcatctactagtgttgtgtactgaaacaaagagggtcatccttgggtccttcagtggag

SEQ ID NO: 232903 - DNA, 409 bp, Glycine max
agctgtccccatggatatagtttgttctttttgagatacaaacatcgacctcttgatagctttctacgccattataatactctttaccgtaacatgtgtttgtgatccctgctaatcgtgattaattttacacatttctccccttaattatagttattgagtttgtaaatcatctttcaatttaatagtttaagtctttctcattatattcttctactaatattaaatgctaaagggaatgttttaacacaaaacggattaattatcactatgtgttattcttaaatatttttttgcagaattagagactataataataaatctttatgattttaggaattaaagctaaaataatcccaataccatgtaaatatagcagtatccaagtcttctataatcttatctaatc

SEQ ID NO: 232904 - DNA, 329 bp, Glycine max
gctttaataattatcagagggcttccctttctctgaaatcaagttcggcttgggccttctttcccacctttctgctgaaagaattggaaggattctcaccgaatcaaattctgtaggtcaaaaaaaaaggatttaatttgagctagttcacttgtgatcttttaaggggacctgcatagaattgggctttactaaaaaatgacctaattggttcctgcacctaatctctggaatgtaaaattcaattccaaaaaagccattttcgaatgtaattttacaagtgtttcaaaagcctaaaaatttgcagaaaataaaactggaagtgcaag

SEQ ID NO: 232905 - DNA, 160 bp, Glycine max
atgaatttaaattaaaaaaacctgtttaatatagaagaagcaacatatcggttgaaacacaatagtacaaaagtgaagactttgcaaaaaaattgcgggaaacaagcatattaaacgacttgcgagcaatagaaatacatatatacgttggttgtccgaa

SEQ ID NO: 232906 - DNA, 418 bp, Glycine max
agctttttgttatcagttattttttaatttattttgtcgaatataacccttgtatatcaaataactaaacaaatttttcaactactaataagatagtttgcacataattacttaattcaattaatatttgaagattaattacaatgaccactctttttatttgcttttattacactcgccacccttctttttttttagcattacttttaacctcattggttgaaatttaaatcttgactcaacttgttgaaatttaatgtgaatcactttacacacatgcatttcttgaccgtcattttaatgtggaacaattatgaggttaaatgaatgaataaggatattattgacaaagaaaaatcattaaaaaaacatgtgtttctcatgtgatagtctcaaattaatgtttctcgcgtctaaa

SEQ ID NO: 232907 - DNA, 409 bp, Glycine max
gtcatagacaatcaacaagcattacatgagcatcctgttgagctgattgatggtggtgcaactcatcaagatgaaccataatcctggcctagtttgattcataaagaaacacaagtaagcacatggctttgattgatgaaaattgaactggtgactgcaatcgactcctggattatcattcggttatgtcaaggcttcatttgacttgtttttggcttcgtatttcgtttttcaatatagattaggtaaaattatcgtggatgtcagtccgatgaagtgagagattctgtgactgataccgagcttcacatctctaataaaaagggaatggaatcatcaaactcattgtcaagaaatgatcgtgaaccattagctgcagtgatatatatgaagatgcctttatgtctgt

SEQ ID NO: 232908 - DNA, 427 bp, Glycine max
  unsure (1)..(427): unsure at all n locations
atacgtgacagtaagctaattatgtcctttttttgtctcaatcatatctggctgggtgtgccataatttgtgatatgtctatctggtagaatcttgtgttttatgctttacgatttggtatacctgtttttgaacttgttgtatgatgggtatttagatcaccctatcttttttatgcttctggaagttttatgtaaatgtcgaatatcttaatgttgttgaacttataatgttgtgttgatgtatgtatgatggttttgacaacttttttcactggttctgaaagttttatgtaaattgcaaatatgttaatgttgctgaacttattttttttccttcgatgttgttntgatgtatgtatgatggttntcaccgtagtttctatggctaatatcttaatgttgttgagcttattttttccttatat

SEQ ID NO: 232909 - DNA, 445 bp, Glycine max
  unsure (1)..(445): unsure at all n locations
ttaagtcacctgcggcatgcagctttcagcttttattggagattttgatctccttttggngcctctaaatgggggaatgtgcttaaatatatggggcaattttggttttgtttcttgcttgattaagttgaattaggggttggtatgaaatggccctaggcctataatgcattntgaaacaatgggacatgccacattgtccccgttctcttgctattgacgcctaaacgcgcgcccaccaagtgttcggtgaaatgcctcaatggcattagcgcgtgacttttgtaaggaaacaacccatggggtattttggtttgtgcatattttctgtttttggaatatgtattcattcccgaaaaaggctagagtaattgccccacatataccctaggcctagaaactaaaattntatgcaaaaagaacacaaaagaaggtgcatattggg

SEQ ID NO: 232910 - DNA, 428 bp, Glycine max
  unsure (1)..(428): unsure at all n locations
tacattctcccctttgctaagaagagttttaattcttcttganatcattaaaaacttcatgatttacattctccccctttttgatgatgacaaccacctgtaggttaggagccacaacaaagaaaaaaattatttgatatagtttactcccccttgggtttacaatgaatgcttatatgaaacaattgaagatntcatattttttcatatataaaaagttgtctcataaaacaatagataatgtttcttactattttatcttttatctttctctccccctttgtcaacatccaaaacaaatcatgaatagaagggaaaagatgttccacttgttgaatgtgtgagaaaagtgaaccaaaagcataaaacatcttcatattatcaagcaaacaagtcaatacacataatcaacacaatcatcataatat

SEQ ID NO: 232911 - DNA, 445 bp, Glycine max
  unsure (1)..(445): unsure at all n locations
taagtcacctgaggcatgcaagcttgcttggggagcttctatggaggctggatctttgaacctcaatgaggtcctttcatggtgatttttcaccatggagatgcaccggaaggcaaaggaaaaaaggagaggggaggcaccattcactaaggaataagccaaggaagaaggagctctcccaccaaaaattgccttggataaaaagcttgaagaggatgctttaatggaggaaaagaaagagggagagaaagagagaggggggagcacgaaattgaaggaagaaaaagggagagaagttgaactttgagttgtgtctcacaagactctcattcatcaaagttacaacaagtgttacacatgcttctatttatagactaggtagcttccttgagaagctttcttgagaaaacttccttgagaagcttctntgagaaaacttccttga

SEQ ID NO: 232912 - DNA, 434 bp, Glycine max
  unsure (1)..(434): unsure at all n locations
ggttcgcacatcgntcgcgtgtatgatatccactcatcaaggtttgaagtanaggagaccttcaatcctataacgcaacgtggcagacaaaagtgagcagttaacttgaatggtcattattgtcaatgcggaaagtattctgcgcttcactatccatgttcacacattattgcagcttgtggttacgtgagcatgaactactaccaatatatagatgttgtttacacaaatgagcacatcttaaaagcttactctacacaatggtggcctcttgggaatgaagcggcaattcctccttctgatgatgcatggacacttatccctgacccaactacaattcgtgcgaaaggtcggccaaaatcaacaaggataaggaatgagatggattggctagaaccatctgaccaccgacaaaaatgtagtagatgtggagc

SEQ ID NO: 232913 - DNA, 355 bp, Glycine max
cactctaagaatcaatagctaaaactatcaaacatttaccttagctcaaagttcaacaatggttaatttggtataaagcacaacataggtattactcaattaattgaagagattttgctgcccattattaatttgagaacaaaatccggcaaaacttctatgctaggacctttttatcctgtaaggagactccatcttggataggagaactacaattatctattgaccttgtctaattacaggtacctattaactttatctactgaatgaaaaagaatcccaactaaggaatatgctgctctatggaagataggcctagaatcactaagatcggaaatggagtaatcgctctcat

SEQ ID NO: 232914 - DNA, 423 bp, Glycine max
  unsure (1)..(423): unsure at all n locations
tgtggtcgagctctcattcatcttctatataatccgccnaagattctttttcaatgatctatctacaaatttataatctaactatacctgatctgctatctacacaaagtgacatttctctgatgttttcttattgattccaggaagatgttataataccgcttcttgaagttcaaaaacagctttgcttcatgactgtacactcctatatggatggaggtgctatcgactctactattaactgctcgtgaattatgcatactgaaataccattttaactcttgggagcatgagtgctgctatattctactacactcttgagaattcctatcaaactctgattagaaaatatcatatgaccatcaagcttgtggttgaacttgtttagattgtaaccggactattatgtcgtactgtttttta

SEQ ID NO: 232915 - DNA, 418 bp, Glycine max
  unsure (1)..(418): unsure at all n locations
caagctgcataatgaggttttaatttttattatnattataaaatttaatgcatatttaattcacgttgttataaaataaataatatttatttaatatatattaaattttgtaatacaaataaaatgttgtcataataaatattttttatttttaaaaaaatatacggattacataagtaaatatttattattcaaatttacatgtgcaataaatatttgtatgatttaaattaaattcaattgtcacaatatttattattcaaatttacatgcgcattaaatatgcattagaaatgttagtgataattatgtatagtaataatttatgtatactaatattatttattttataacgtaattgattcattagtttagttggttagagcattgtcatggtaaccctagaagaaatgtattg

SEQ ID NO: 232916 - DNA, 384 bp, Glycine max
  unsure (1)..(384): unsure at all n locations
tactcagcttacatggatgactaggagggcaagtattaaattgaaccnagctgctattctttagtatgaattatatacctaaatttcaacctggtatataatagaatttatatttaattcttgtcactatttagttagcattatatctaaaataaatataagtgaattccccaaatttagattgattagatcgtgtcttaattttctaagtatttataatgaaaaataatctatgctattgtatagatagatacgtaatgtgttaaaaaaaataataatttacgtaggtgttaattgccgcgtatggtagcgtaaaataattaatctatctgtatacaaaatgttgaagtatacataagtcgttataaatactatagtggtatt

SEQ ID NO: 232917 - DNA, 107 bp, Glycine max
aggaagaacactacccaagcaaagttttgaggggctttatagggcagcaatagtgagctcaagcttcgaagaggtgaaaggaatcatcacgggtcaaaagcatgatc

SEQ ID NO: 232918 - DNA, 435 bp, Glycine max
  unsure (1)..(435): unsure at all n locations
tcaagctggactgcgctagagagaataacatatgatctaagtttacccagagccctttctagggccaaaatgggtgtttgagagtcaaatnttgatctggtgagaatttagggggtaaatcagtttgaacaagtctaaatagatgtttggactggtgtgaggtgagaagttgcttcaaatttacctcattctaaatttcactttttaaacctaaaaaaaccattgaatggaggggtgttggacacctaaattctgtgttgctgtgctttaagcttgactttggttagacatgattggtacataattgggacttgtacgaattgattgggcaagattggattaggacatgtgattttcaaatctgccttatgcagattttgctgtcaaatacgtcagcagaatttggcttggcagaaaatgcatgaggtggtggct

SEQ ID NO: 232919 - DNA, 418 bp, Glycine max
  unsure (1)..(418): unsure at all n locations
agctntgaaggaccttggttgtgaggtcaacaacaatagcacatgcccctcataagagattttatcatttgcattcaacaattgacttacttcccgattgaacttgttgatgtggtcatcgagatctcctcccatctccgttttgagttgatacaaatccatcttcaaacaaagtcgattggttagcgactttgatacatagatattctcgagtttctcccacaaggccttcggtgttgtctccttcaacgcattgtgttttatctcgaaagcaagggctaaccgaatcgtgctcacacccctcctttggatcttagtccacttggtttcatttatagaagtcggtctttcatcttctaacgcctgatcaagaccttgctgcaccaaaaggtcttcaatagtactctgtcaaatcata

SEQ ID NO: 232920 - DNA, 416 bp, Glycine max
catgcaagctctcataagagagaatatgtgcatttatttgcctaagagttctctcatgaggtgaaggttgaaccatgttctcagtatgaaaattagtcgtcaaatgctcaaaatcagaatattcagaatcaccagcaacaaaatactcaaaatgcttaaaattcacagaatgaccagtatgcacactatgcctaactaatctatgaaaggttctatctatttcaggatcaaagggttgtaaatcacctagattgcccctagtcatgcactatatgcaacaaatcatgtgtttatcaaacaagcagcaggggagggttaaaactacaactatagtcaaatgatatttaaatgagctaaaattttgggagcaacacccctaattcatgaagagattgaacaaaaaatttaaacaaaaa

SEQ ID NO: 232921 - DNA, 429 bp, Glycine max
ctatagaacaaattccgtagagagggtctaagtgcatgggaattatgacgcatcaacaagaatcaagccaaagcgtttgtgccagccatcaaagaggcaaaacacaccatatgattaatatgatggatggctcaaattctcacaaagggtaaatcatcacttgcaaatctgagctttcaaaaacttcatgacctgtagagaaaatcaagatttcagccacaaaatgtcaagaacttttattttcaaaacaattacacatttcttgaacatatgctataattcaaagaaaaacatgcaaaggggtacgtgcacacgatattgaccaaatatatgaaactggaaatccgacgaaactaacaacattgaacaatgaacacaacttacagatttactaaaccaacaaaactagcagaaccaaagaacactccc

SEQ ID NO: 232922 - DNA, 415 bp, Glycine max
agctagtacactcgacccatatctggtcttgacattaaccagacttaacaccgtcgatatacagcataacgaattcttgcaccccgaatacaaaggcttctttgaatcagtttgcaatttatcatacataggggcatgtgctttctgaaaagactcttgtccaaggtcacgaatcatatcctttaaatgatcttatgtgaaccttacggggtggatcgtttgatacatgctacggagatttggatgacgccacttccagtgaaggaagataagtcagggtagactccacaaggattaccttgataagttcgagattggttcaatgaggaactcagagagaatatttcaccaatatttatcaaatgccctaagaccctttattgaaaacaaaaccaatcttatagtgtgtttaaac

SEQ ID NO: 232923 - DNA, 470 bp, Glycine max
  unsure (1)..(470): unsure at all n locations
gacacttnaaactcagctncaattccacccagagggagatgaggatattgattttaccgaanacacaaagatgatgatcttattctatttgtacaaagatccaacaaatttctaacagtcaaaggaaatcacacaagatcaaatcttaaatcatagaaacgggcacaagagtcattctctacttcaaaactgttatgatatgcgattcaacttggacatctgagggttgatttcccaattttgaaaaactcaatagagaaattagaaaagatagtctttaatgaaaagaacgcttagaaggtctaccttacatgggatgacaatgatatggactcatctgaagattcagaaaacgaagttgtatacctgagtctgatggccaacaattatgatagtgatgaatagggttccttgattaagagttggtcatcaatagtgggtgctcttaacacatggcggcgaatgcatca

SEQ ID NO: 232924 - DNA, 363 bp, Glycine max
tttttttggcacccttttcggccccttaaaggtgtgactcttgcaagaatcttcattaaccagttccttgaagaatgggacttttgtaatggttttttcctaatcaatccctggtaattgaatgcccataaggcgttattcacctaccatcaataggatggactctttcattttgaatttgaaaatttaaacgtttaaaacaccggacatcaattccagtgttgtgttatccatacacaagttaaaatggttaacacaggtggacccttggaattggaagctaacgtgtcaaacctggtaacgatactccttttgggaccgataccgagagaaaactcttggtatgactttggaaacctctgg

SEQ ID NO: 232925 - DNA, 292 bp, Glycine max
gagccgagaacaagtcatatttatataacttttgtcaaaagagttttctttaatcagaatgatttaaagaaaatttcgtgcagaatttttattgccgtcatacaaagattgaaaaccttttgactaaagtctggttggtaaactcctctatatcactattggagaagacataaaacggatatgaatcttgcacttacagttcgtttataactaaattatttatgcataaactaattaaattttgggaaagtattacatttaatctctattcctctctacaagtactatataa

SEQ ID NO: 232926 - DNA, 225 bp, Glycine max
gtttagacaattttatgcgaaatctggagtggactcacctcatccaacaaatttgtgttcaggaaattcttactataaccttcctcgcaattgttgaaaatatttcgaaaaccttagaggaactccatttaacttaattagattttctaaaaacatcaagcatctttctttaacacttgactgactctgtatttggtcttatcgcaaatacggactaaaaactaa

SEQ ID NO: 232927 - DNA, 394 bp, Glycine max
tattaaacacacaaaatggaagtacttaatatttattacctatacttaacagaaaatacttataacactacaaaataaccctaaattggaagagtttgatacaatttacacaagttttatacacaaaagttagtcctattcaccgactaacactagggtgtttagccagctattacagaagaaaccctaacaataataagcttacaaaacctaggtatctctgtaaaagtagctcctcttgcttcctctagagcttttttgccgaaataggcactatggtgtgttgtggaattttgtgccctggcccttgtcaaagttcttaccctaattctgcacaagacaagctttaaataggctatgaattcgcgacgttgcgcttagcgtgagtaagtgg

SEQ ID NO: 232928 - DNA, 448 bp, Glycine max
  unsure (1)..(448): unsure at all n locations
atgtgttggtttaggtctttaaaatccatgtttaatctatgaaagcgaaaatgaccatttcaagggcgtggaccttaaaaatggtttttaagtgatgacaaaaccttggtttattaattgattttagccttagtttcactttggttattagtcaattcgattaagaaagaaaatcccaaagaanaacgtcagattgattttttttattactttattaaaagatatttttttgatatttatattattattttgcctcttttaagttttaaacgtggttatggcctgaaagatcggccgaattttactctaacaaaaatttaaagatgttacaactcacatgatcggtggaaatttattntatttttgattaggcgagaaaatgacttanataaattactaaagcacgtcanaagggagtacagaaaacanatganataaaaataaaagc

SEQ ID NO: 232929 - DNA, 422 bp, Glycine max
  unsure (1)..(422): unsure at all n locations
agcttcgngaagaggtttgaatgacctttatnttatttgaatcaaggggctttgcattccaacccagcagccatgtctgattatactttcaaaaatggtttaatgtttttcaagggcaaacttatgttgtctaaaagctccaccttgactcctactttgttgactgaataggagtacactccagatttaccaagactaacaaacggatggcagcaaccttctgttggaaaggtatgaaaaagacaataatggaatatatccttcgttgtgatgtgtgccagtggcataagtatcaggccatgtcaccaactgatctgctgcagcccattcccatccttgaggtggtttgggcagatatctctaaggattttattactggatttccccttttatagccaaaacagttgcagagagtttcatca

SEQ ID NO: 232930 - DNA, 454 bp, Glycine max
  unsure (1)..(454): unsure at all n locations
actaagctaagcgaaatgtgcaaagaaaaaacaactagaatgtgattaaagaactccaaacccctcccaaaatccaatgcacataaaatcctataacattatgtccaaggtgatattccatcccaaaaacatgacagaaaccacaaacatgtattcatagaatatttgtgggattcattttaataagataaaagaaatccttttatttattcacacatcttttatatttaactacattccctgtgaaatgttaaatcacctcatatacatagaaaagaaatctaagtaggtgtttcatttcaaagttgataacgggcgcgaaaagtcggaaaatgaaaagctatatgagataacttttacttatatgtgggaattatattgtacttcaatanccacctagaatcaatttgacccttnaaatatagtggaaattganaagtaaatcaatattgtg

SEQ ID NO: 232931 - DNA, 416 bp, Glycine max
ataagtgcgggtctgggagactattgtcttgtggtcgcgatatgtgaagatgatgttccaagaactctggatttggtccgaccatgccctcctgatttccagctgggaaattggcgagtggaggaacgccccggcatttacgcaacgagcataatgtaaacctttacggttttaaaagctctatagttgggcctaggctttagagttttcattttgttaaggctttgtgtcttttgtttttgaatttataatacaaggatctttcttcatctgttcctggtctctacccattctcattcatttgcatgtttacttctttttctgaaacggcagatccaatgacgagtcccccgaaggtactaatacctgggacccgtctatcaacttcgagcaagaaatgaaccaaacggaagatg

SEQ ID NO: 232932 - DNA, 398 bp, Glycine max
aatgggtcactcttataggggtgaagctaaaacacatttctcactcaaagatctttcacacaatcagtggcatagcttcaactaaaattttgggagagccaaaataaaattggctaaaatagaagtttggttatttattatattttaggctttagtttggttccttgggtttaaaaagttttattattgcatatgacaaaaaaaatattcattatgctaaattggccttttttgtgaatttgttgcacaaatttgactaacttgatgacatatgacacattgtaaaaaatatcatgtcagctaaccttaacacaactagtgtcaaaaatggataaaagaatcaatttggcctaacaaagataccataagagattaaaatgaaacttcttatacttaag

SEQ ID NO: 232933 - DNA, 321 bp, Glycine max
cccaagaaactcaacataaggatgcacaggtcaaagttgagtattaaaaaagatttgttgacccaatgaaagtgcaaattgcaaaaaaaaatgaaagctatgccaagcaagccaacaagaaaaggaaggaagtggtacttgaactcggggatgatcctggacatttgaagacaaatgttttccaagaaggagggaatgatgagaatcatgaaactggccaaatacaggctaaaggcccaagtggagaaggacgaaggcctaagtggagaaggacaaagcccccgagtggagaaggatgaaggcccaagtggagtaagatga

SEQ ID NO: 232934 - DNA, 392 bp, Glycine max
tgctctaaatttacattgatgtttgtatttattggaggaggttgtatgccatttttgttttaagggtagcatttcttggtaaaactaactttccaaatgtttgccttcgcaggaaatggccccaaagaagcttgcctcaaaaaggtccaggaaagacaaagcggccgaaagaactagttccgctcctgagtatgacagtcaccgctttaggagcgttgtacaccaacagcgcttcgaggccatcaagggatggtcatttctccgggagcgacgcgtccagctcagggacgacgagtatactgatttccaggaggaaatagggcaccggcggtggacatcactggttactcccatggccaagtttgatccagaaatagtccttgagttttatg

SEQ ID NO: 232935 - DNA, 431 bp, Glycine max
  unsure (1)..(431): unsure at all n locations
agcttcatgatgttgaatcaagattgtctcagtttgtttgatgataacaatagatgatgacaaaaagcccaatagaatgatttcaagattgagtctacaattcaagaatcaagagaagttaatgatttcaagattgagtcaacaattcaagaatcaagagaagtttgatttcaagattcaagaaaagatgagttcaagttccaagagaagaaatcaagaagacttcataagggaattattgaaaagatttttcaaaaaacaaacatagcacagttttgttttcaaaagaagttttcacaaaattttctaagttaccagagtttttactctctggtaattgattatcagattcctgtaatcgattaccagtggcaaagtttgttttcaaaagctttcaactgaatntacaacattccaattaatttcaaaat

SEQ ID NO: 232936 - DNA, 419 bp, Glycine max
  unsure (1)..(419): unsure at all n locations
ntataaagtttatttagntatatctctagtgagtgtggattcccaattttctactagctagnacgtgactagattttcctttttaatgtctgacaattatttcactaataagctacttgaagtagtttactgcttttgttgtatgttntacatggcacttgaattggtttttcttttataaatgtctagcatgtgtaagcctaattggctacttaaactaatttaaagcttctgttgtctctatttttttttacatggcactgtcgcggttgtcataccctaatttcgtccggggacctttgcttgatgacatgcgacctttgtttggccttgtaaggtgcttggcacccatcattaggcaatttgtgaaattccgggatatgccggataacaaaagaaaatattgatgcacaatccat

SEQ ID NO: 232937 - DNA, 419 bp, Glycine max
agcttttgcgtcctagaattttcatgatttatttgcagcctagcctcattacaagcctaagaaaagtccttcttattcaatttgtgtttataactatatggcatgagatgaattgcaaaggttgagatccgtgttagttgttgatgattaaataagcctaaacacttgtgcatgagtgaaacagtgaccatgaggctttgggtaatgatccttccttggtatctgccattcctactagcttatttcagttgtgagtcctaataaatatgttcctatctctgaaagttgcatgttttgtgaagggctattgattgaagcattgtttgacattcatttcatgtgattgaatttttctttggaaacaaacacaagttttgtataaccactatagatattgcaacttgaggacaagtgaactg

SEQ ID NO: 232938 - DNA, 454 bp, Glycine max
  unsure (1)..(454): unsure at all n locations
actcagcttgacttagtcataagagattataatatgtgactatggcatgagtttcaataataatcaataatctatcttttacataatcttctttcaacacccttcaatcaatctttcaatatcttctttaatctctttcaacattttcaacagatctttctgatttatttcccttcatctttctaaaagtttttgttcaatagtttctcttccaagaaaagttctttgttcaaaaacttcagctattcatctttttcattctcttctccctttgccaaaagaaggaaggactaaccgcctgaatttttttgtgtctctcttctcccttacaaaagattcaaaggactaaccgcctgatatatcttttgtttccccatacaaagatttanaggactaactgcctgagaattctttgtcccaacacattggagggtacattctttgtggtacaagt

SEQ ID NO: 232939 - DNA, 424 bp, Glycine max
  unsure (1)..(424): unsure at all n locations
agcttgctacatatatggaaaacccatctnaaaaggaagacaattcgagtcatgtggttgcatcaagtaaacctcggtgacaaccaataaaggcccatagtggctttgagtattgttcactagtgaataaagtatgcccttaggcgaaaggaggtgattctagtgtaatgcattatgcatcatgtgcatgtacttctcttgccaaaaaagaaccctgcatggggtcgctgcagcggtgtgttgagttggttgtgcacatgtactatgaagttggcggcattgggttccctagagagagacacttctaatcaaagggtcacaccaatgagatggtagtgtggtagtagtgtaagtgcgattacatctttgtgttactcttcacacaaaaggaacactacaacaaaaaagggaaacaagtgaaaga

SEQ ID NO: 232940 - DNA, 437 bp, Glycine max
  unsure (1)..(437): unsure at all n locations
tggtgaaatngccatgtgtggatgagttaaacatactcattcntgtttanggtttttgtgatgatgtttgtgatgtttatatgctgaaattgctgatggaaatctgttagagacgaagggtagaactaacctatggttagaaagtgagaatgtgatgttatgagtggaaaaagagtgagactttgagagttggaaggctaagtctgaattctgtggtaaatggaggttaaagtgagttaatactagcttgaaatgttatttatgacttgggagaaagcttggactgtgctagagagaaaaacaaatgaccaaagtgaacaaagagccatttctatggcaaatttgggtgttgaagagtcaacatttgattcggtgagatttaggtgtaaatcagtttgacaagtctaaatagatgtatggactggtggaggtgagag

SEQ ID NO: 232941 - DNA, 399 bp, Glycine max
  unsure (1)..(399): unsure at all n locations
agctgtagctggcgaggcatataagcttatatcactntcctgccttgcacatcaacttgggggttcattcgcatcaatcaacactcccacccccctccgtcagtggaaattgttttgagaagcccccaggctatatatgccatatacggtttaatacaaacgtttgaaatgccatattaaacaaatgcctggctttgtggggtaactaatcaacacagcatgagcctatatttctccgacaatgaacgtatttcttcaggtgaacagttcagcctggcttatattatacataaaatgcgaattggtcagggctattattttaaatgaccccgccagtggaagaattatctcacactttattttagtactttttcctattttggggcgggccctcgaaaa

SEQ ID NO: 232942 - DNA, 389 bp, Glycine max
  unsure (1)..(389): unsure at all n locations
ttacccattcgggctcaagtatagacgattgtagnttttaaccaaactttttggcctgcaatggttttggagcataattgcctcccctaaagataaatctgaactctacaatactactatgaaataggtcatggatataaaatatttattgacaaagtgaccaatatctagaggaattatgtaaatgttaatataatttttgtgatttcgaggtctctacttacctatatatttacacttggaatgttttttttttttatgtgtgtgtggacaatgtaataacttggcgtctgcgtgataaaattgtgtatattggcacctcttccaaacgggtttgctgtgtttttggccacttggctaccattctatacaggaactggcattaccca

SEQ ID NO: 232943 - DNA, 421 bp, Glycine max
  unsure (1)..(421): unsure at all n locations
ngcccatcggaaacaaccactgcatattattcgaatgagacacttattgtcgccgcatcatcaaggtcaatggacaagaactcatggtgctcacaagttgcagagacagaagacagactgtatgtgttcaatataaaaatgcgacatttgctcaatttgatccaaaatatccacgcatgtaatcggaattgcaccagagatgaagtagaaagacaatacaagggaaagtgggcaatctattattttaaaaaataaataaataatcagcgtcctgttcatatttaccacatgatactgggtcctagaatcctaccaacaaagtatcagaaggatggcacgattcctttaagaaacacaagtgccgccctcctagcacgataatgatacatacaactgtcaaacacagcaagtatggtgaatt

SEQ ID NO: 232944 - DNA, 413 bp, Glycine max
  unsure (1)..(413): unsure at all n locations
agcttataaggttacagttgttaagcttgttcaacacttttaagttttcctttccatcagattcattntcaaacgcttctcttctcttctcatggctttctgctaacatcaccaaacacagatctgaaacaaacaaaagaggtaagcttcatctttcatcttctgctttgcgccaccacccttttctactccaaagcttcaactttacttgaccacttttcctttatatgtgatgatctgaggttaaaagggtatgaaagctgtgaaaaatgagaattgggcattttttttttttgtgatttttaagatttttgatggtttgtgggttcattaaagcagggaagtcaaaggggtttaccaacttcagctgacttgttaatggtcgcgttcttgctggttaggggcatcagtgt

SEQ ID NO: 232945 - DNA, 408 bp, Glycine max
  unsure (1)..(408): unsure at all n locations
tgngatatcgctcaatgcattcgtcaagaatctcatatagagcctttgcaagtggataacttattgcaatcccactaccaccaaaggccattgaatgactaaaataagtatttgccgaatggctctctgaggggctccctatgtaaatcatttcagaagaattatacttgctgagaacatcaactaggttattcacgttgaagatggtatcatcatcacagagaacaaaccagcgcacatcagagaggcctatgcaaaagctctctctcacaatgcgagaaatccggaggccagaagggtgaccaacgggattagtgtagcggaaatatgaggtgtcttcagaaatcatgatagggggcaatanatcatctccaggttcttcaagcacttgttcctctaaccacacat

SEQ ID NO: 232946 - DNA, 378 bp, Glycine max
acatggagctgtctcggtaaaaacgatgcccaacgtttgttaaccgttggattttctcaaaatttggtctgcaactccacaagacaattttccattatcggaccgttgggatctttgagaagatgtctggagtgtgctaaaagcctcttaatgaagcttctgaaggaagcctttaaatgaagcttctagagaaaactacatggagctgcctcggtagaaacgcttcccagccttcgttaaccgttggatcttctcgaaatttggtttgcaacttcacaagatactttaccatgatttaaccgttgggatcgttgagaaaatatctggagtgtgctagaagctctcgttcccgagagcatctcttatttaagcatttca

SEQ ID NO: 232947 - DNA, 448 bp, Glycine max
  unsure (1)..(448): unsure at all n locations
cttaaaactcaagcttttttctcatcaacctgtctactgactaaaaattctaattgcaagctcgcattcttgttctttctttgtctaacatgcatacttgctcaaacttatgaaaagaaacacagactccatcacaatcatgcattcaatccaaaatcaattcataacaccaattttcacacaaagataaaagtgtttcactgcataatcatcatgatcaagtaaaactgttctatatgcttcaaaacatgcatactaactatccacacaaaaaaaaacataagtatataaacgtaaatcaaaatcactaaaaacaatgtactgaaactaatatagttataatcattatccaaaaagaaaaatcatcaggaatttaaaagtcctgagatagatcctgtgtatcctgagtctgagcatcctnctcatctgtcaagtgaagtactggagt

SEQ ID NO: 232948 - DNA, 405 bp, Glycine max
tgtttgtccacaacttgaaatgaccatttttatcaaataaataacatgccattgcaaataagaaaaacttagattcagttctttagatgttgtttgcgctgttctcccattagaattagagttttaccctgataatccattttagtcctttaatgcaaactttattttgtagattaccaaaaatgaaactctaattctaattgaataacaacatcaacagccaacaataccaaacaaaccttatctaagttttattcttgaaaatatcacccgtgatcacaagttcacagctatgatattgccataattgataaactgacctgggataagaaattgctggattttatctcatgcgatgttaatgaaccagacaagttattattccttaatccaccaagcaaagaa

SEQ ID NO: 232949 - DNA, 358 bp, Glycine max
  unsure (1)..(358): unsure at all n locations
tgtatggaaagattactcttgctgaantnatggatactgnntaataaatncaaacatattttttaaaagggcagagcagtagtacacgagactgccactattgtatagtgtctcatgtttgcaatcttatcccatgaatagagtgactatctcttctactaaaactagagactatcattcaggccacaaagataaccttagtgttatctcatcctttattctttnttatgggtcaaacgttataagtgtattgcacatcattaccaagcatttgcccatacgcatgaaatacggatattcagtgaacagaactatagaagcattggcctatacttgcaccaatacttgtgaaaattga

SEQ ID NO: 232950 - DNA, 382 bp, Glycine max
agttgctcaaaagttgtccacaccatgggttcaaccagcagaggataatgcacatattttatggtggagtgccctcccacaataagacaagccttgatgctacatgtcaaggcaatatgatgatgaagccaccaattgatgccatcaagatcatagaggacatgcgctccaatccctacaacaactccaaggataagagaatcatgaagataacagttaaccaagtggaggatgaaacaactacttctagatttggacaacaaattcaaattgagactttaatgatcagcgcaagaagcgttgattcaatacatctcccaaaatgatcagcgcatgaagcttgtggagacccaactttcttccatacactctctcttgtcac

SEQ ID NO: 232951 - DNA, 306 bp, Glycine max
taaatctagcttaaactctatttaggtttcaagttggagtgaaagaaatggggtaattgggaaacttccctcaacaagttattatcatctaacttgtaaactggtttacgacaaacttccaataaaattactctaacacccatttaccctaaaatgacttgcttactggccattgtttttctttccagccacttttatagtcaatgacattaaactgattactacttacctcttccactgatccttacctcacttaagctactttttactatacactcatttatttacctagtacttcctttctac

SEQ ID NO: 232952 - DNA, 429 bp, Glycine max
  unsure (1)..(429): unsure at all n locations
agcttctatataagctaaacctagtcactcggatgttngattcggggacacaatatatcaaggcgcttcgaaatgaacagcggaagctcccgagaaattcgaatggtcataacatttcactcggatgtctgattcgtggacataatatatcgagacgctcaaaattgaacagcggaagctttcgagaaatttgaatggtcatacctttacacacggatgtccgattcggggatataatatatcgagactctcgaaattgaacaatggaagcgcttgagaaattcgaatggtcataacatttcacacggatgtctgattcgtggacataatatatcgagacgctcgaaattgaacagcggaagctttcgagaaaattgaatggtcatacctttttacacggatgtccgatttggggatataatatatccg

SEQ ID NO: 232953 - DNA, 456 bp, Glycine max
  unsure (1)..(456): unsure at all n locations
actacgcttcacctagaggagacggaccattccaagtgttggagaagatcaacgacaatgcctacaagattgacttgcctagtgagtataatgtaagtgccactttcaatgtgtctgatctatctctttttgatgcagatggaggagccttggatttgaggacaaatccttttcaagaaagagggagtgatgaggacataaccaagggcaaggaccatgaagcacttgaaggtcccatgactagaggcagacttaaacaagcccaacacgtcatagagacaaggctagtcatttgtatagctgccattgatgatgattgaaggcccaagtggagaaagatgaaggcccagaggcagaggcactaccaagactactaattgttgttgaaggcccaaactaacttgaaggcccaagttaaataagttnttagttattaattatttttattggaatttt

SEQ ID NO: 232954 - DNA, 387 bp, Glycine max
gacatcatcctcttgctttgatgctgcagccagttcgtcactctctgcaccctgcacattataacagagataagcattaagcaaagcataaagcctaacaacaaacagtatcatagattgaattatcaaaagctcagatcctctaagtctaatctagagaaccaacaacagtcaacagcaaaccgcccttatattacactgatagattaggaattgaagcagtgtatcactctatctaatttttgcacaaaacttaccgtagtatgatcatgataaacataagagaaaacagtctatgcgctggattttacattgtcgtccaattgcacacatgcatgtatgaataagttggtgactttaacaataattaccttaaaaccataacta

SEQ ID NO: 232955 - DNA, 399 bp, Glycine max
aaaatactcacaatacttgtaatctttccaatggcaggaggtgcatctaaaatactataatttggtttgccgctatatccaacaatcttcaggttgggcttaaaggataaatagccaacatggattgaaccttgtctgtagcacaggaattaagaaaatcatttgcttttgactgtatggatagtgactcgtgtattgacttcctttccaaaatctttgtcgtcctcttaaggattttaatttgctgttttagttaatggcttactgctatagggattcaattcccaagcattagtttttggctttggttttcttttcttcttataatagaaaaaactaaaaaaggcaaaattaattgagttgggaatggaatcttttgcaataatttatcactatatg

SEQ ID NO: 232956 - DNA, 389 bp, Glycine max
acttttaaaccttctgggtgggtcatataaatgtcttcctttaattccccatggcagaatgcaattttaacatctaactgctccaagtgaagattctttgcagctacaatactcagaataactctgatggtagtcatctttacaactggagagaagatctctgtgaaatcaattcgttgtttctgctgacaagtctcgccttgtatcttcttttaccgtcagattcttcccttagcctatagacccacttattctgtaaagctttctttccttctggaaatttaattaaagacgacgtcttattcttctgaagggatgccatctcatctttcattgctagctcccactcaatagagtcattcccttgcgtagccttactggaaacattt

SEQ ID NO: 232957 - DNA, 454 bp, Glycine max
  unsure (1)..(454): unsure at all n locations
tctagcanagcaactagagaccttgactaacacccttagcaaacttccccaacaactacattcaggtaatcatgctaatgtttctataatataggtagaaggatgtgttgtgtgcagaagagctcatgtgttaggcacttgcacgactcaagaggaagcctcaaaagaggtcaattatatggccaaccagaaccaccaagggtataatcaaggagacaatgtgagttaccatctgagaggcaattcaggttatcatcaacaaggaggaaatttctctcagaaccaaggttagccttggaggttccacccaggtaataacttcaatatagaccaaagggatccatttaattgcccccttaatcagggtctaaatctgtatgaaagaaccaccaagccggaggacactctggctcagtttattgcaagctttatttcanataacaagagtattgag

SEQ ID NO: 232958 - DNA, 431 bp, Glycine max
  unsure (1)..(431): unsure at all n locations
agctngtccacaaaaataggtttttgaagtttgtcatttcaatttctcactaagtaaaatggatcattttcaaggtccaacgccttaaaatgatcacctcttaaagtaaaaaagaatcacttgataagaaagaactacgtaggtctgatttcctcatcgcaattgaggaataagtaggagcaaagggaaacacccttgtcgaccacaaaaagagaaaaatataaaaagggtataaaggatataaggacttaaaagggaacataaaaaatcaaggtcatgtttgcacattcgattaaaggctgccgtcccttgggacggacgtgtggggtgctaataccttccccgtgcgtaaatacaactcccgaacctttcacttaaaagttcgtagatcgcgtcttttccggattttccgacgttttcctcaaataaac

SEQ ID NO: 232959 - DNA, 438 bp, Glycine max
  unsure (1)..(438): unsure at all n locations
tcctcgggccatttcctgcgaaggcaaacattnggaaagttagttntaccagtgggacgctactcttaaaaaaaaatggcatacaacctcctcccataaatacaaacatcaatgtaaatttagagcaagcttatgcgcatatttccttacgaacgttcacttgcacaagacattctatttaactaagaaaaatgcacccatatacaatcaaggcagcttcgttacctagattatttacatgtacttccaaggtgtatttgttacctacatcacacacatttcctttgctaaattcacatacatgcatactctaagcactntggctatcgaaaattgcatacgtgcacatcccggtatttctaatacctatacatacancaaacttatgataaatcttgactatctacacaataaggtgctacatntcatgcttttttc

SEQ ID NO: 232960 - DNA, 297 bp, Glycine max
acaacacgaagaagcgattgaaagtcttatgtaacgtgacctacattatgattgtgctatgactataatcatattacacagaccgtaagcctctaacgattggttcatgatttaatactatattgtgtccaactatcccaaaatcaggatgaataccatgctttactttttacgacatactgagaatttggccgtatgatattcaactattgtctaatctaaacacccgatcaaacattgaattgtatcatcggcattataatgccaccaatgcagcccaacattttacactaacct

SEQ ID NO: 232961 - DNA, 390 bp, Glycine max
aggcccctatctctattgcaaagtgcagctcctaaaataaaagagataaatatggtttggattgcaagctcgaaatatttgtggggaataaccatgagaaaaatgtctgttgtgagcgtatagagtctttatatatgataagcttattgaatttataaagaaaataaaaagttatgcactgcaatgtgaaataattttgcactctcatctaatcacttatcaccatgaatgataatgtgttgatttttataatagctatcttaaacgccttactaatgataacgtgaacaaatgacaatattaaaactatttcgcattacctgtgtgtggccattaaagtgttttaacgaaactaccttacaggtcatatttatcatgagttcttattga

SEQ ID NO: 232962 - DNA, 214 bp, Glycine max
taaacaaatacaatgtcggctctaacctcacactatcactcaaatgtggagttacactttttctttcttacactacgttgattaacattgagagcataggttttaaaatcttacgttgagtgatgcacactattaagcaaattgtaaaaccgtattcttcccaatttgtcacacgcatatcatgtccacactagcaccttccttttttaactcc

SEQ ID NO: 232963 - DNA, 415 bp, Glycine max
  unsure (1)..(415): unsure at all n locations
agcttgtaatctaatacacttggtatgttatccattactagaagattaagctgatgggaacagctcttagaaatttggatttaaagcttagaagcttgtaatcgactacaacattagtggaatcgatcacacgacgcagatgttcaaatgacaagtctgaagagtgacaactcttcacaaactaactttgaaatcgattaccacattcatgtaatcgattaccagtagggaattgttgagaatcactcccaaaagtcacaactgtgcaagaagtttttgaatggcgcatcagaggcctataaataggtgacttgcgatacgaaatttcatatgagtttatctgaacggcattgtcttatactatcaacaccaaatnttcttatcactctcaaaatattccttggccaaaacacta

SEQ ID NO: 232964 - DNA, 96 bp, Glycine max
aagaaccagatggcaaatcgattccaaataatagttgaactcttaccgcatttataagttctactttagttgacctactacaagatcgggtgttga

SEQ ID NO: 232965 - DNA, 416 bp, Glycine max
  unsure (1)..(416): unsure at all n locations
agcttctgcatgtttatagatttctatatagagaaaggncgaagttctagagagttttgagagcgtttgttgtgcgatgactggcaaagaactgagcttgaagaggaagccatcctgagagcatgagatgagtttgtgagtgattgtgaggttctaaaggtggaggagacatccccactacttgtatttcttcaatccttcatttttctcttcacttttttgtaaagtaagcttcccagatatggagagctaaatcctctgttggttcttccttgtaggtacttgatgtaaatacctttatatttatttaatgatgttttatgtgttctctatgctaccagtacatcatttcaatgtgctttttccttgatcacgtagatacatgctttgttagggtcattcaatagtgggaactg

SEQ ID NO: 232966 - DNA, 435 bp, Glycine max
  unsure (1)..(435): unsure at all n locations
ctcggcagtngtatctacgcacgaagaatgtattagtcttcccacgcgtcctggaccagggacgacgacctttaatctagtgtgcaaagatgacttcacactgttatattattccttttacatggctcttcgagcttctatgcttcttatattgtgtatctgtttatggccgacaaaggtgtttcccttgctcctacggattcctcagttgtgcattgacattaaaacctacgcagttctttcaaaacgggtgaatcaagcgattctttttacttggaggtggtcatttaaggcgttggaccttagaatgatccattttacttggcgagaaagctaaagcgttggacctctaaccatctcactaggtcgacnanagcggggcttttgctcctacgtattctccatcgaagaggacatcagacctacgtagatctc

SEQ ID NO: 232967 - DNA, 394 bp, Glycine max
  unsure (1)..(394): unsure at all n locations
nagctagtggttagaagtgtttccatttttttctgcatatagaaaaaacatatgttgggagaggtcagctcttaaatggatctcagtgtctagagaaattggtctttggctcccaacttggagataccctaagttcacaaaaataaaataaggattattggcattcaagcgggcagtgaattcttactgaacgtgttggaatgaaatcagacgtctcgtatctgatcttggggaataagacttaaaatatgcatccaggatttgaaccgtttgatcttcattcaatggtgtagatatacgactgtgaatgcgaatgcctgtgttcctctagctttagtcaccacaatgatagcattcatgcacttgattattggatctcatttaaaaatgataa

SEQ ID NO: 232968 - DNA, 373 bp, Glycine max
  unsure (1)..(373): unsure at all n locations
gcgaccaccaacaacanagtactttctgcacctactatatgttgacatgaccaacgcttgtattggaatgctgcgacaatccttcaacaccttatagacacatactgataggttggttgtaatgtgaacatatcgtcaaacaaatgtatcgatagccatgctccatttatcctttgaaatgcgatcaatccaacttgctatggctggactcagtcgacgaaatttttctaagttttgatcaaacacatgcttgcaatgagtgttcgctgcatcaatatttgtatcatcaaaagttgtatcgtgaccttatactcaaataaattatgtataaaatcaacctacccgatttttgaacatctatttatgtatcgcg

SEQ ID NO: 232969 - DNA, 405 bp, Glycine max
  unsure (1)..(405): unsure at all n locations
agctttacataatatgtcaatncgttttttactgctttcggccgcggcaattgtattgcagacttaatatttttttagacacccttggtatagcatgcagatttagtatggagtgtaaaatagattctaagtccttgaaaattagtgaacaaacaagagagaaaaattgagattatgaagcaacagttaaagaactccaagatccttggaatgaaatatacaggaaatgagtaacaaagggcgatcatcatttgttgatttatctgcacaaacaacaaattattggtgctgcatattcattgctttgctccaatgctttatttgactctcttccacaatcttcacctagtgaagttgatgaactatgagcagcaccttggccaccaacaaatagcgagttggact

SEQ ID NO: 232970 - DNA, 440 bp, Glycine max
  unsure (1)..(440): unsure at all n locations
ttaagacgcatgtgaacctttggcatcatcaaaacattcagcttgatcctttgtctacaagctcatgtagcccaagacatctccatagaaggctttgaaagactcgtcaataacatgactgccaacaactatctcgccttcgctgaagaaaaaatccctactgaggggagagggcataacatggctttgcatgtgtcagtcaaatgcatggaccacgtcgtggccaaggtactcatcgataacggttctagtttaaacgtaatgcccaaaagcacgttggagaaatttgccgttaacgcttcccatctaaggccaagttccatggtggtccgggccttcgacggcaaccgccgagaggcgaggggagagatncgacctcctgtacagataggcccccatacctgtcangttacctttcaagtaatggatattaacctgac

SEQ ID NO: 232971 - DNA, 380 bp, Glycine max
  unsure (1)..(380): unsure at all n locations
atcttgtgtttatatttataanagtttattgaatactaganatatttgntcatgtattcttgtcatacttagcctatcttttgaattttgagtctaattcatgcatgttatttagttcataacatcttctaaatcaattcctaaaagtagtcttgttgttgaacgtctttttttttttctaagtttcctacatgatgcctatgatgaacatgagttgtggtgctgagttgtggctggatttgtgaatcaaaataagtcttaagctctctggaattgtgttattcaatataatcgagcataatcaaacacaaatgtgaactatccaagccttaaacaacataaacactactcttgattctaggtaaaattgctgggctggc

SEQ ID NO: 232972 - DNA, 434 bp, Glycine max
  unsure (1)..(434): unsure at all n locations
ntgtggcatagaaagcttttattttgatgataagnttatatatcctgagaattctgctcatggtcaactcccaagaacagtggatgtaattgcagaagacgaccttgttgattcttgcaagcctggagatcgagtggcaattgtggggatatataaggctcttgcaaggaaaaggtagtgtgaatggagtatttaggtagctccagaaaatatactgacataactcctttgcacttgcttgctttcttgaacagaaacttgattgactgattntcatgtaggactgttctcatagccaacaatgtttctcttctcaacaaagaggataatgcaccaatctacagtgttgaagatgtcaaaaacattatagagatagctaccagagatgatgcatttgatctgctaagtgattcacttgcaccttctatatatgg

SEQ ID NO: 232973 - DNA, 426 bp, Glycine max
  unsure (1)..(426): unsure at all n locations
agctggtagaatggctagacatgatacatgtcagggtttggtttggttcattgataaaagggatgccccacattatttccatgacacaaatgcaaaaatgatgatttggaaattttatgcaaaactggtcatgcatgcacctatgtggacgctcaagtgtcaaatttttatggtcatctctattttaaatcaacccaatgtttccaaaatatgttcttttatcaatttgtgcattcatccgagtccattttgggcgtctgggaaaatcttcacaacattcacccttcaggtgtatacacattttttcaaaaactagttatgatcagtgaatttttccaaagaaaagttggaagtcatctcttttcaaaagcatgttggtttttcagcttgacaacttatttttctttntttctccttctttttttt

SEQ ID NO: 232974 - DNA, 455 bp, Glycine max
  unsure (1)..(455): unsure at all n locations
tagcaaatggactngggtgttgcccagnttcatcatatcttccgtaatacttatcacctctatcatatctaataattttcacatttatgtctaattgccattttacttcattgtagtaaatttttaaggcatccattgcctaagaaatctcgggcaataagtagacataaccataacgtgaataatcatcaataatggtgataaagtatctttcctttccgaaagaactaacatcaaaaggtccacaaatatcagtatgcacaatttcaagaagcagagtgcttcttgtagctcctttctttgtatgttttgtttattttcccttaatacaacccacacaaatatttagatccgtaaagtctagataaggaagaatttcattctttattaatctttccatcctttctctagaaatgtgacctanacgtttatgccacaagaaaacatatcgttca

SEQ ID NO: 232975 - DNA, 373 bp, Glycine max
tgatctacaaaaagaacctttacttactaagttggaagtatctgccaaaaatcccgaccgagatatcccaatcttatgtgtaatatcaatatatttacattctcagtataatatcaattttaatctctgggttttgtacttttgtggtttgttactgcggtgtagttgatagataaatcaacataacatgtgcttgtagtatgtgtatgtatcacagcatggttcgtggatgtaaaatatggaataagacatgcagccattggagtgatttgctttatgtgtcttctcctcaatttaatgatgatttacagatgttttatgacatggtaacagaaaagttggagaatgtagtgaaggaattctttggtagctc

SEQ ID NO: 232976 - DNA, 455 bp, Glycine max
agaaactaagcttgtttgaaaccatacaaaacagccattgcaggttcaagtttttttgaacccgctcagcattatagcgcaacaatacttaaaggtgatgggcaccattctgagaaagatagtcctacaacgtcagtgctatagtatttcttttggtgtcaagcattctagaaattcaacaataccaaaatttgtgcattatttacgttatattttgggtcatctagtgtaagtatatttaattttattgattataaagcaaattaaatcttcagggagatatttaagccaccaatactaattagatctggtggaggaatttacaactatctctatcaattgaaaacgttatcagatggttcgcctcacacaaaagttgaaggatgtaatgttcttggtaaactctagataacatggcgaacaaatttgtgtgaaaccggccgttgcagacccac

SEQ ID NO: 232977 - DNA, 415 bp, Glycine max
  unsure (1)..(415): unsure at all n locations
atgcaagctttgaaagctgagtctcggattggtttaattctatacatatatctcactatacattacactgttatttgaaacaatgactaccttagtcaagagtctctgctttaatcgaataccaagtggattaatcgattattatttctctctcattaagntgtttagatgttaacaagaacacattactacaaaagtcatttactacgacgtaccaacaaggacggtccacagaaaaatggcatagaatctttagattgtaagttcaaggacggttattttaaaaacccgtctttgaattggtatgtttttttctctctcttatcttatcatctcggcgacactactaacccttcattttcccctaacctttcacttcctctctcattggggcttggactccctttcttctgcc

SEQ ID NO: 232978 - DNA, 452 bp, Glycine max
  unsure (1)..(452): unsure at all n locations
ntctagaattacaccctcttgtatgacttaaaaagtcactctaaagccacccgaaaatatgacttgaaaagtcactattatagccaaccgaaaatatgacttaaaaagtcactcttatagccaaccaaaattatgacttaaaaagtcactcttatagccaaccgaaattatagagcgacagaaaaaaagagggacaagtttgccggaaatgcatcgactgaaaaatgggagggagaaagaaaagttgaggaaatgtttctcaactggggcaaggaaaaatgaagaaatgagctctctatatatagggagtgaaacactattcaagtgtttatcctgagcgatgtgggaacttgaagcctttttttctttttttccctctttttttcaaactttcatcctttgttctaacaatcccccacttgaaatntgaaaagaagaatttcgaggatttc

SEQ ID NO: 232979 - DNA, 287 bp, Glycine max
tatggaaattgcttttctgcaccacacaatacaaattgatcttctgatcatttacacccatttttattttacctttgcccatatccaccacacaattggcgattatcatgaatggacgacccaaaatcaatgggatcgtcagatcctctacaatgtccatgacaacaaagttcgcagagaatgtaaactgttgcaccttgaccaaaacatttttaatcactccatagaggcctgatatagatctgtctgctagctaatagggcacttctacatggataatctccaac

SEQ ID NO: 232980 - DNA, 126 bp, Glycine max
cttgcctcatatcaaaggtgttcagttatcctacgctcttgtaatcgactccaatcatgtgaaatctgcaacttaatgatgccaaacattcactgttcgtatcataaaatgcgggaaggaatgcat

SEQ ID NO: 232981 - DNA, 378 bp, Glycine max
  unsure (1)..(378): unsure at all n locations
ttgacctcaaatccataggttcttaatactctgggcttcttccctcgatacttgtaaaaagaataaaaacatatatnttagtggtgttaggtttgttagagtagggtaaggtctgaaaacccctttcctgtgcatcttcccatgagggaacatcattcctcaccaacccaatgagtggtgctacaagtatagaaaaatatgaaacaaaccttttgtaaaagtttgttaagtcatggaagccccaaattttctttatacttggtggagtaagccactcaggaatgacctttattctcttagggtccgtggaaacctcttgatcactatttaaaaaattaaggagagtaatgcaatanaacatatctttttctatatttt

SEQ ID NO: 232982 - DNA, 364 bp, Glycine max
  unsure (1)..(364): unsure at all n locations
cagctgtcgaattctggactggtgttgattaactgtgttttcaattgtcccatcttgttagntaaagcttgaatggaagctctggtctctcgttgaaactgcatggtttgcataatcatttgcctcacaagttcttcnagggaagggtgcggaagaacctcaactatttggtgtttctggggctggtgcctgtggttgattggtggaggaatgtatggtctacttgggcccataacattttggaaggaacgagtaagttgctgttgttgttgagggctataccatctgagattagggtgattcctccatctgggattgatctattgctggagaggtcataattgttatgctatggttgaatttg

SEQ ID NO: 232983 - DNA, 420 bp, Glycine max
agcttgtttccctttgaatatcatcatatttcttttcccactttgttaagttgaagagtatttttgtgtttggatgaacattggcaaacttgattttacaaaattaaattaatttttgttaaaatcttgttaagtttattttgaaaaagttgtcctttatttttgttaattttttcaaacgaaattttaaaaaataaaatgattatttttccaaaaagaaaagggctgaaccaaatgtgtgtcaaatatatagtaaattttattgtaaaattccaaaccaatggttttcagaccattagatttgtaaagtatgcacctgtttattgtaaaacaggtgcatgttggatttacattttgaggcttatgtcttgcctaagtagcttctgcatttgttcttacatgtgatgtgaaaataccaat

SEQ ID NO: 232984 - DNA, 298 bp, Glycine max
tagcgactttgcgacgacgagaagtactatcacttatgaagcacaggcggagccattcatgacaagacctatgaaaggatgtatgattaacctcaggttgaaagcgatcatagtcatagatatggccattactcttgtgagcgtagaaccaatgttgattagactgtcaatcttgtcgatgataaagaagatgtagaagagcctacgctactactatcagttcgtattggcgagcacgacgacaaacgcttatggtatcgtgactacggagcaagcaaccacatgtgtggatgcttag

SEQ ID NO: 232985 - DNA, 421 bp, Glycine max
  unsure (1)..(421): unsure at all n locations
agcttgcaaaatgactcctctagagcttcccgttagagttgtctaggatttttctctactcttagtaacaacactgtcaaaaatggtcttgatgaaaagcacttcaacttgatttgaggtatattgcaccatcaaagttgaacaactttcaagtttgtgtagctgcaagacaatctcgcaaggtatgaatccaagtctccacactcaagcgatacaaatcttctaaaaaggaagttgttagtggaaagactgccatggtaggtcaaccaaaaaaagtatttgatatttttgggtaatttcatatctcaaacccaagaccagcttccaacacaagaatgatgaatgacaggctaacaaagaaggcaatagtaactagacttagtgttcatttaatttgtttcttacataaagganaaaaaat

SEQ ID NO: 232986 - DNA, 437 bp, Glycine max
  unsure (1)..(437): unsure at all n locations
tgtgcccgaaacactacatcatccaaactgcagagtataactcatgttcttgaggcttgtcattgcatgtataccgtacaaaacctgaatccaaaatttccttcctaggtagcaactgctgagtatcactcacataagaactgctgccatgagtctttatctgcatcctttttctttatctgtttttcctgatgagcttaaaagtatccatctaaccaagaaccattgaaataataaacaatgggcagataaattaataaattaggatccaatatgaacagcagttaacggatgggatgatattgggctgatattctctttgggggcaatttgcgcaggatgtagaggactaaagctgaaggtaggaccttcaccagctgtattttgaaaagtgaaaagtaaattccaaatgctaagaaagtgacanatcaaaaaac

SEQ ID NO: 232987 - DNA, 395 bp, Glycine max
agctttgagggtgcgtagcccaccatcttttcatagtagagtaccgataatgtgtataccatcacgattatcgtctccctttttgcacatgttctgtagttgcatcctatccagaaccatatcagaatagtactgatactgcctaacgaaggcaaccattaggtccttccaagcatggactcgggaaggttccaagttagtgtaccaggtaacagctaccccagtaagactttcttggaagaaatgtattagcaattcctcatctttgcgtatgcccttatcttccgacaatacatctttggatggttcttggggcaagtagtccccttgtacttgtcaaagtccagcaccttgaacttggaaggggtgataatattgggtactaggaacaactc

SEQ ID NO: 232988 - DNA, 423 bp, Glycine max
tctacaccacttttctaagcttctacaccaccccgtttctctccccctttggaaacataaaaaagccaaagtacgtggtaatcaacacaagatgatataactaaatttcacataatcaatcataagtcaaaaccaaatataatccaatcataaaatactaagtgccaaatatcgaaagataacgaatgttcagaaaatgataacttaaaaagcatagccaaatacatggattacaataaaagataataataatctaaaaactaagacggtggtggaaggtcgaagcatcgccgaagataagtcacatcctcttcaagctgggtgatgcgggtatccatgccttcaaagtgaccatccaaggaatcaaagcgttcgccaacatatgtgcggaggccccttaattccgaaataacttcattcata

SEQ ID NO: 232989 - DNA, 417 bp, Glycine max
agcttgcctaattaacttgaaattgatatatagtgattattaaacacacaaaatagaagtactaagtatttattacctatacttaacagaaaatacttataacactgcaaaataacaataaattggaagagtttgatacaatttacacaacttttatacacaaaagttagtcatattaaccgactaacaactcccccaaatttacagttttgcttgtcctcaagcaaaaagagaacagtttacttgtcctcaagtgacaataacatggagtgactatgtacaaaggtgtatgcaacaaaagttactgattgcatgataagagaatgaagcattatgtactcatcacttgtctttcacaaggtatgcagttatccagagagaagaataaaatgtaacctgaacaattagatggagtta

SEQ ID NO: 232990 - DNA, 440 bp, Glycine max
  unsure (1)..(440): unsure at all n locations
ntgatgatatggtcttcaccgacgaaaggatcaaattgtgtctaaaaagaggcaaatctgatcatcatgctntgataaatgcaaaaaaaaaaaaaaaaactatggcaaatgaagagggtgagaatgagggagaagcccatgctgtgactgccattcctatacagccaagtttcccaccaacccaacaatgtcattacttaaccaataataaaccttttccttacccaccgcccagttatccacaaaggaaatccctaaatcaaccacaaagtctatctaccgcacttccaatgacgaacaccacctttagcacaaaccaaaaacaccaaccaagaaatgaattttgcagcgagacagcctgtagaattcaccccaattcctgtgtcctatgttgacttgctcccatatctacttgataattcaatgggagccataaccct

SEQ ID NO: 232991 - DNA, 424 bp, Glycine max
agcttctatgagaagctagagcttatctacacacacccctctaatagctaagctcacctctttgagaagattcctagagaagttagagcctagctacaaacacccctctaatagctaagctcaactccttgagatgagaagctagagcttagctacacacacccctataatagctaagctcaccccccatggcaaaatacatgaaaatacaaaaaagtccctacaacaaagactactcaaaatgccctgaaatacaaggctaaaaccctatactactagagtggccaaaatacaaggcccaaaagaaggaaaaacctattctaatatttacaaagaagagtggacccaaccttggcccatgggctcaaaaatctaccccgaggttcatgagaaccctaagaccttctttagcagctctagctca

SEQ ID NO: 232992 - DNA, 425 bp, Glycine max
tctacttatgtggcagggcgggcttccttcactttcttgtctccaacgcgagctttgaccactgttcttccttcccgcgatgcttcttttcatgtccgcctgagtgggcttatagcctaaaccatacttcccacgatttccttgggtatttatcaggctagttatgccgccgttgtctttgcctaaacccatcccgggttcataaccgttccccaacataactcgggccatcattaccgctgcatcggacagacaaggctgcccaaagagggagtccacggaggaaatgctgaccacctcaaaagactggaaagcagtttctaacgattcttctgcggcttccacataaggcatggaggatgggcagcttaccaagaatatcttctcgcctgacacgatgaccaagtgcccctccactacgaatt

SEQ ID NO: 232993 - DNA, 382 bp, Glycine max
  unsure (1)..(382): unsure at all n locations
agcttgcttaagatgtggacanatttttactatctgtgtctgatataaaatcatcaagttctggattttctatgatagtttcctctttctttgactcaccaccaccattcatctcaaagatgaagaatggtgaagttccttgatcaaaacttgaaaccgaagaagtaccatcttcaattgtagtaaatggtgtccctagctcagggctgctagttggagtgacaactggtccttttatagaatttaaagaatcatgcttcttcttagtttgttttccaggcatctcaatttgttcagaaagtaatggacataattcttcaaaatccttcttttgtgttccaaccaaattcaagcggagtaccttgggttgggaatgcttcat

SEQ ID NO: 232994 - DNA, 441 bp, Glycine max
  unsure (1)..(441): unsure at all n locations
tttacaataaaanaaaatattggaacttgtacaattttttcaggaaattgtgcaataaatagacattgatcatgtattatgtgaggaaagaacaaggagacggtatttaatatgctttaaacagttttgagcactacaatggtttttggaaaagataaggctaatgggtgtgtaagactatatttttgcagacagggagcatgaaaattttgaatctcagctgattgaatattttttttatctttttgtattctttttaagcggggaaagctctgacctctttttggttgcttatggatattccatgcgcactgtaaaagtacagtgaaagagagagcatctgttacagcatcactctctcttcaaagattctttgtaatcatagttctaatcatagccttgtgatgtttttcactttctactaacgatatagttaagtcg

SEQ ID NO: 232995 - DNA, 404 bp, Glycine max
agcttcaacatcagaccacttccagggtgctggaactacttcacatggacttgatggggcctatgcaagttgaaagccttggaggaaagaggtatgcctatgttgttgtggatgatttctccagatttacctgggtcaactttatcagagagaaaacagacacctttgaagtattcaaagagttgagtctaagacttcaaagagaaaaagactgtgtcatcaagagaattaggagtgaccatggcagagaatttgaaaacagcaagtttgctgaattctgcacatctgaaggcatcactcatgagttctcggcagccatcacacctcaacaaaatggcatagttgaaaggaaaaacagaactttgcaagaagctgctagggtcatgcttcatgccaaagaactt

SEQ ID NO: 232996 - DNA, 428 bp, Glycine max
  unsure (1)..(428): unsure at all n locations
tcaccaaagcgaatgatgacctccagcttcttgaatatgtccaggaagcaagcaaaataccgctcttttttcttcttggaaggcaccaaagagtatgggatatccttcacaggcacagatggtgcttccttcctcgcctctctagccatctggctcttggtcttagagattaagacctcaccatcaatctccttagaattttttttctttttctacttctttatttttctcttcttctaaagctctctcgttattctcaacctctttcttttttctctcatcctctactttctcttttctcacattttttcctacttcctcaactctatcttccttttctagaccctcttttttcctcatacttctagtgaggactgcctngcacttatcctttgggtttttctttgtgttagccacaaatttcccat

SEQ ID NO: 232997 - DNA, 434 bp, Glycine max
  unsure (1)..(434): unsure at all n locations
aaccacctgagctgcagctttcagcagcttcgcaagtccctctttttggaaaggatttgacctcaaatccataagttcttaatactctgggcttcttccctcgatacttgtaaaaagaataaaaacatatattttaatggtgttaggtttgttagagtaaggtaaggtctgaaaacccctttcctgtgcatcttcccatgagggaacatcattcctcaccaacccaatgagtggtgctacaagtatagaaaaatatgaaacaaaccttttgtaaaagtttgttaagtcatggaagccccaaattttctttatacttggtggagtaagccactcaggaatgacctttattctcttagggtccgtggaaacctcttgatcactatntaaaaaattaaggagagtaatgcaataaaacatatcnttttctatatttt

SEQ ID NO: 232998 - DNA, 408 bp, Glycine max
  unsure (1)..(408): unsure at all n locations
tgtcagaattctgggactggtggtgatttaactgtgtatccaattgtcccatctggttagttaagctttgaatggaggctctggtctcttgttgaaactgcatggtttgcatagtcatttgcctcacaagttcttcgagggaaagttgcggaggagcctcaactatttgttgtttctggggctgttgctgttgttggattggtggaggaatgtatggtctacttgggccagtagcattttggaaggaaggagtaggttgctgttgttgttgagggctagaccatctgagattagggtgattcctccatctgggattgtatctattgctggagagggtcataattgtatgctatggttgactttgtgctgaggtaaagaggtctattgaaatgtttgcncataagcttc

SEQ ID NO: 232999 - DNA, 415 bp, Glycine max
agctttgaatttgcttatcagatttacatggcattatgtcgaaggcaagtctctagagaacaagtatgtgtaatttccagcatgggatctaaaatgaatcttaataaagtctatctaaaatgggaaattaaattactgtataaaatgctggtagttgggcaaacggtaagtgtaagtccaaccaccctctggaaaaaattacccagtctctggtgccacggatcctctctaccccatattccattccaacataaacgccagctatagttcctataagcataagagaagtacatcacatggagctacatcattttctaaatgaatgaggcacatcatgcaacacagtcttaccccaatatacaccttctttacacatcttcttcaactgcaacaacacaaaacatacctcgtgagc

SEQ ID NO: 233000 - DNA, 393 bp, Glycine max
  unsure (1)..(393): unsure at all n locations
aactaagcttgagtataggacttggacatctatatatatataaaagggatttaccttttcggtttaaaaagtgatacaggccaaaactacatattttatcatcataaacgacgcaagagagaatggagacacccggaccttatcaagtacttggtaatattagactatggttagccgggacacaaatttgaatctttaaagataaacatgctaatctctttcttttggcaaaacatcttatcttatctttttttcgcatctagnttaaattaaggatgcaacgtgcgggatgacatataaaggcccagacacgtcataaagtagctagctgcctgcattgcttttggtcactgtaatatttaaggaatcaaattggtagcatcatcgatatgc

SEQ ID NO: 233001 - DNA, 389 bp, Glycine max
  unsure (1)..(389): unsure at all n locations
atttgagaccagtaaatttattacgaacaacaaaaatttaaagtctaaaaaatatgtnttagaaagactaaacacgataaaacattataataaaactgaattaaattctcttattctaggatgctatattttctaatcagtatcttaagatgttatgtagataacgtacttaaaattgaataaatatcggtctagtacttatagaggtatcaagatcttaatcatttaaaaaatttgatttctttttagtacagtttgcaaaaattaagctaaagatctccatgtaaaatatttctgacttctgtatatactctttaagccttatagaaagttagagacctccttgtaaagtatttctgacttccataaggcttttcatgtgtacttat

SEQ ID NO: 233002 - DNA, 426 bp, Glycine max
  unsure (1)..(426): unsure at all n locations
actcagctggattgggctacattcaacttcagctatatggtttatagtttctacnaatttcttatgctcaaacacataatggctctatatatttcatttgcctacatggagatgacacgatttccgcatgttataatcagaagtagtacattattttcgttgtaattgatggtctgagtgctaatattaataaacttgggtcagaagcttggcagctatatatttctttctgaatgcgtatatgtttcattgttattgacatgtcctgcagtgccttaacaagaagcaatcttctgtctggaagctttcagcacaatcaaaagaggtcacttcacattgagtattactcttgaagaaaatagacatgagagttctctaatccttctgagcaaatagctcttataaggttaattaacaataaccata

SEQ ID NO: 233003 - DNA, 371 bp, Glycine max
  unsure (1)..(371): unsure at all n locations
ttgatatattataatatgacacacaatgttataattattttattgaaattaaaaaattattttagggaatttattttattgaaattaaaaaattattctagtgattttagtttgacacatgtaatatttgtaagcaagtttttatcacattttatggtttaaaattaccttattgtttttaaagaaaatatttgattttttttagaaaaaagtaaatacaaatacaacattgatttgttgcctgtatgtaatatagatcttatggaataaagaagaagctttaaacccaggaaaactgaaattaaatactaagaatcgaaattccttatttatcaaacagaatactangacaaagttccagtgcaaaaggg

SEQ ID NO: 233004 - DNA, 445 bp, Glycine max
  unsure (1)..(445): unsure at all n locations
actcaagcttaaaggtatgggtgggacatggtttaccaacccagcttataatctatcttcacaaggtaaataacaatgaatagtagctctagttgtctccatgaggtttctcttggttgatcaatgctttttgcaaattttacttatttctaaattagtttattatattcttttaccatacttctctgactaattcttttgttactcttcacgttctgcttgagttttgcagttagacaaacatattttgtatcgatattaaaatttattttctctatatttgtcttgtgacattttttctattttcttatcttggaagaagtgttttgagaaacaaacgaaattatgattatgtatgtttctcttagtcttaagacttgattccaagatgaatcgcagttatttgtttgcttattttgggcatgctngcatatttttctattat

SEQ ID NO: 233005 - DNA, 421 bp, Glycine max
  unsure (1)..(421): unsure at all n locations
agcttnttttttgtgggttgatgggttctgtcgcatataatggcatgatcactggctgacatattctcaattagcttagttgcttcttctagggtcttcagctttatttttccccctacagaagcctctagcagttgcttggtttgtggtctcaacctatatatgaacatattcaattgaattggctcggaaaatacatgggtgggagttcttctcaataaacctcttaacctttccaatgcttcactcagagattcatcagggaactgatgaaatgaagagattgaagctttcccttccacagtcttggactctgggaagtatttctttagaaacttttcaacaactttttcccaggttttcagactgttacccttaaacgagtgaagccacctcttggcctctcctgccaatgagaatg

SEQ ID NO: 233006 - DNA, 459 bp, Glycine max
  unsure (1)..(459): unsure at all n locations
tgcttgtggggcttctatggaggctggatctttgagcttcaatgatgtcctttaatggtgattttccaccctcgagatgcagcggaagacaaaggagaagaggtaagaggcggcgccatccactagggaataagccatggaagaaggagcttcaccaccaagatgagccttggataagaagcttggagagggtgcttcaatggaggaaaagaaagagggagagaaagagagaggggggagcacgaaattgaaggaagaaaaagggagagaagttgaactttgagttgtgtctcccaagactctcattcatcaaagttacaacaagtgttacacatgcttctatntatagactaggtagcttccttaagaagctntcttgagaaaacttccttgagaagcttctttgagaaaacttccttgagaagctagagcttagctacacacacccctctcataact

SEQ ID NO: 233007 - DNA, 420 bp, Glycine max
agcttccctttgggccagcatttggatttcaccgcaccatgatggtttctttgcgcccaaataatgtgaaatacttgttgaacacttgttatgcatgtgaacatagaatgggtagttaagtgttttttccaattttcataccctaatttcgtccggggaccattgtttgatagcatgcaaccctcgcttgaccacttcgaggtacttaacacccatcgttaggcaatccgtggagttccatgacatgccagaagtcgaagggaagcattgttgcacaatccgtaaagtttcgcaacattccagaagtcaaagaagggattgttgcgtagatcgtaatgtttcgtaacattacgaaaagaaaacaagtatcattacgtaattcgcaaagttccataacgttacggaaaaagattcagcaaa

SEQ ID NO: 233008 - DNA, 439 bp, Glycine max
ctggataggatgcttctatggaggaaaagaatgagagtaatggggctcacgaaatggaaggaataaaagagggagagaagtataacattgaagtgtgtctcataagactttcattcatcaaagttacaacaagtgttacacatgcttctatttatatgactaggtagcttccttgagaagctttcttaagataacttccttgagaagcttctttgagaaaacttccttgagaagctagagcttagctacacacacccctctcataactaagctcacctccttgagaagcttccttaagaagattcctaaagaagctagagcttagctacacatacctctctaatagctaagctcacctccttgagatgagaagctagagcttagctacataccgcctataatagctaagctcacccctatgcctgaaaacatgaaaata

SEQ ID NO: 233009 - DNA, 403 bp, Glycine max
  unsure (1)..(403): unsure at all n locations
nagcttgagtgatggagatgctttgattttttaatacaacgacgacttttatgctgtcaaattatatgaatgagggaataaatcgatgtcaacatttttgttctctatatattttaaccttgaatttgttgctctataaagttgtttctgaccttcgatcatcaagggaaagacttggaaacagaaaaagggttaacaggaatataacatacacataaagattggacgtcagtttttactaaacttgtaaaattttatatggtagcaatggggatttgcatgatttctatgcacgaacgatctctgttgcctcattcagcttctatgtggtatattcagtacaaactcaaggagggtgaaggtcctgtcgctcaatgaataagtggctctactgctatagata

SEQ ID NO: 233010 - DNA, 413 bp, Glycine max
agcttgctaaacattaggccgggcatttattggtattttaagattctaatccatatccaattcatatctacttaaatggattggatcttaaatctatattcatatttaaaaaaaaaacaatatggattcaaaatctaatccatttaagtggatatgaatttggtcatatccaatttacatccacttaaatgttataagatttttttttttacaaattttagtaattaaatgctaaaaagtgaaaacttaacacttgttcactttaacttgataaaaataaatcatacacttgaacttgaccaagttctatcataatcatactcaagttactaaaataaaatgtaatataaactctcaaaacaacaaacaattcaaattctgaaggctaaagcacaataacaactactatcctt

SEQ ID NO: 233011 - DNA, 441 bp, Glycine max
ttatgtacttgtctaatcacattacaaaggtgtcctatttaaacattcaatcacactgcttttttcaaaagaggcgggagtcttgattcactatgctctgaaatttgaatttgaaacccaaacaattttttgcattgggatggatttgaattttcaaaccaaacactttgatttcttaaaatgaatttaaccaccacactaaagcatgcaacatcttctttgtaaaagttacatatttttatatacatttgattcatatggttcaactagtaatcaatgatttaaccaatgactcattgatccactacattgactaagttgataaccggttcattttttataacatcgtaacacaatgattcccaaaagaattagatgattaatactaagaaagggaactatattcatgagtgtggttcttatactgctccaaagagcatt

SEQ ID NO: 233012 - DNA, 403 bp, Glycine max
  unsure (1)..(403): unsure at all n locations
agcttatatttattacttgttaagaattttaagccagagtcgattgttcctttgataaagtgaagaatttgttttgcagccttgaaatgagtagtggttaaaagctcgatgtattggctgatgagtactccagtagcatatataatgtttggccttgtgtgtcaaatatcataaactacccaccaaactcttgaaatctatagcatccagttttcttgcttcgtcgaactttgataacttcattttgcactccatcagggttccaattggcttgcatctatccatcttgaatttattaagcatcttctttgcgtagctntgcagagaaatgaagatttcatcttctttctgctttancctcatggcagatagtatgacatttttccgatatcggtcatctcaa

SEQ ID NO: 233013 - DNA, 408 bp, Glycine max
tcaagaagaagatggcctcataaaattctcttattttcttgagggaattctatcaatagacctccaatctttaatggagagggttaccactactggaaaatccgaatgcaaatttttatcgaggcaatagatctaaatatctgggaagtcatagaaatagggccttatatacccaccacagtagagagagtttcaatagatagtagttcatcaagtgaaagcataaccatagaaaaacctagagatagatggtctgaagaggatagaaaatgagtacaatacaacttacaagccaaaaacataataacatctgccctatgaatggatgaatatttcagggtttcaaattgtaagagtgctaaagaaatgtgggacactcttcgattaacacatgaaggaactacagat

SEQ ID NO: 233014 - DNA, 357 bp, Glycine max
  unsure (1)..(357): unsure at all n locations
gaagctagagcttaactacacacacctttctaatagctagctcacctccttgagatgagaagctagagcttagctacacaccccatataatagctaagctcacccccatgccaaaatacatgaaaatataataaaaagtccctactacaaagattactcaaaatgccctgaaatacaaggctaaaaccctatactactagaatggacaaaatacaaggccccaaagaagaaaaaaaacctattctaatatttacaaagaagagtggacctaaccttggcccatgggctcaaaaatctaccttgaggttcatganaaccccagggccttctttagcagctctangcccaatcctttgg

SEQ ID NO: 233015 - DNA, 423 bp, Glycine max
  unsure (1)..(423): unsure at all n locations
gcttggganaacaatatccaactctattaagaattttaagcaatataccaatgggatggatttaacgtatcttgataatggtggacaagattgaatcaatatgctactaaggggacttataatacactttactttcgcaaaaatactaaggagagagggtaatacaaaaatagcagattatgatttattctgagcattgacggcatgcattgcacaggtagttggaacttggaagatgagaagagtcgtgcgtaattaagattgaagactaacaactcaactaaagttgacgtactttttttggttttattattctgttctcacaagctgacaataaaattacttgtttactacccattaaaaaaattatatttatgtaatatttagccattaccctanagatatagcattaagaaccaagac

SEQ ID NO: 233016 - DNA, 449 bp, Glycine max
  unsure (1)..(449): unsure at all n locations
tctcacttncagacagngaacaaaaatctgactgctattaacattctattaanggacgagaatgaccgtctgcagtaacaagtttcttatgtggtgtataagaatggttacctgacgcaataaatacacactgtcatattctctctctctctatgactttctttcttctctctattttgcgaaagaattttgtattttctggatatattaatggttgaaccatgttttggtttgaactttgaacaaccttctgctggtactaccacaaacaatagttgtgactctgcggtaatgactagtcaaaaccaatagcaaaacccaacacctcaacatcccaactgggatgctaacaacctagttgggtaagtaacattatattacataacatagtataacatgtacttaactcttatntttcatttcaatggtttcatggtaataatacaatc

SEQ ID NO: 233017 - DNA, 378 bp, Glycine max
  unsure (1)..(378): unsure at all n locations
acattttgtatcaaacaaataaacatggggttgaaaaatcatagaaggaggtggtgccaaactagatcatgaactaggtcacataacaatgtcacaacttggatcaaactaatcaaataggattatagcatttcctaatcattaaccaagctctgataccatgttaacatagagaaaagatattatggagaataagaaagagagctagggttccatatcaataacaactgcaaattcagtaaaatacaaggccaagagagtaatatataaatgatagaatgactaaactacccttagctgatatatctaatattatctaacactaatcactaactattcctattcaattgngatttagttatcatcaatccagaaata

SEQ ID NO: 233018 - DNA, 444 bp, Glycine max
  unsure (1)..(444): unsure at all n locations
tgcttttacaatctcagctgctggtaatcgagtacttttctcatgtaantgattacatgccttcaaaaatattcaaaattattttaaaaatgtttcatgaagtgttttggccactggttatcgattaccaaagagttaaccttctggtaaaacatttttgcttaaattcattggccaaacttcttgttgtttcaacttggaattcctttcctaaatcactagagatcttcttgatgatgtatcttgaatttcttggatctttgtcttgaattaaactagagaagtgcatgatcacatggcatcatcaaaacatcaaagtcaaagtctttgcttctacaatctccccctatttgatgatgacaatctaattcctacaatcaagatacaagatagaatatatgcacggtataacattcaatcattcacattaaaatcaagtcctcc

SEQ ID NO: 233019 - DNA, 369 bp, Glycine max
aatctcttgcagaaacctgcatcttcaaggaaagaacgtacttcctgcacaaaagcgtggtaaggaaaaaaagtaataacatagattttggccttattgacctcgatacctctactagaaaccaaatgccctaagaccataccttcatggaccataaaatgacatttttcaaatattaagaacaaggttagtctcaatgcattggtcaagaactctagagaggctatccaaacaggcatcaaaggaggaaccataagcagtgaaatcatccataaacatttccatgcaactctctaataaatcagaaaagatactcaccatgcacctttgaaaggtgccaagagcgttgcataggctaaagaacatcct

SEQ ID NO: 233020 - DNA, 434 bp, Glycine max
tgttaaaaccaatattctttttcttgccaagccattactgagtctaacaaaaataagaagatttgttggtttgattacacaatgactgacactctatcgtcttacaaacgaataagaaaattcaacacgtagtgttttctcttgatatgaacaaagtttttagacagactttctaaactttacaagaatttacaaagagagttttttatgcaaataatgaaatagtgaacacttcaaatcaaacttcatgtcttcaaatcttctagtatttatttgcctctttcaatcaattatatgtagtctctaaactgacatatttcctctctttaagcttgcatttgaagaaatggccattggggtattcaacaagtgtattaaatgcatgtacttcttcatgttgagaaaccactcttcgtcgctgacatgttgaacac

SEQ ID NO: 233021 - DNA, 427 bp, Glycine max
  unsure (1)..(427): unsure at all n locations
caagcttaaaaanagtgcgctcttcgcactctatattattaacgnattcgggatcatgctatccctttggatttcttctttaatggcttctataatgatggctctctcatggattctgcttgctgcaccacaacacaaacacttccatatacgcctctaatgctactactcactcatgcattctcgggttgtggctcaaagaaaatcacataactcgatcatctatgtaagtccatattcttttccttttcaaacccttttagctgctcttaacacttgccttggctatttccttagcgcgctctctctctctctctctctctctcgatatatatatatatatatatatcttctttctcaatctaagaaattaataatttcacagatgcaaatagtttttctatgatcagaatccagtaatatatag

SEQ ID NO: 233022 - DNA, 405 bp, Glycine max
aactaagcttggagaagaaaaggacaaacagatagagattttaaattgtagtcggacgcatgcatcgctggtgtaaaaacatgacaatgctattatcaggagaatatcataaaagaaactgcacgaaaaagacatggcacgttatttcaatgttatggcatagtagaaccaataaaacttgacatatttaacaaataatcaaatctcttagatatattaattattctctaacttcattgcgcgtataaaaaaattattaattaaaagagacagacactgattttgataattaacttccagcccttataagtacgtagtatctatcttgttaatttctttatgaaaaatcttcgaaacaacaataataatatatatgacctctgtcctagcatatatagcccgtaa

SEQ ID NO: 233023 - DNA, 400 bp, Glycine max
  unsure (1)..(400): unsure at all n locations
agcttgccacccagctcgctcagcgttttagntgcttcctccagaagcaacagccttctggaggaatcttctggagggcccaagtgggcctaattgctatttgcacccccatttttactaaatacaccccctgcctttttttttggtgattctttttttcgtaaagttacggaaacttacgaatttcgtaacgatacttgttttctttccgtaaggttacggaaccttgcggattacataatcatccccttttttgacttacggaatgttacggaacctcactaattgtgcaacgatgcttccttgtgatttccggtgtgtgacggaaccttacggattgtgcatcaatattttcttttgatttccggacgtcacgaaattcacaaactgcctaatgatg

SEQ ID NO: 233024 - DNA, 438 bp, Glycine max
  unsure (1)..(438): unsure at all n locations
tgtnatcgattacacatatactgtaatctattactatagcaaattttcagaaaatattctcaacagtcacatctttttatgtggttcttgaatggctatcaaaggcctatatatatgtgacttgagacacgaatttgctaagagtttttcagaacagagaaggtcttatcctcttataaagcaaaatcgttttatcctcttacaaattccttggccaaaatacttgtgattcaataaggaattatttgagtgctcaaattgttcaatctatctctttcaagagagatttcttcttttcttcttctttattctgaaaagggattaagagaccgagggtctcttgttgtgaaagaattctaaacacaaagaaagggttgtccttgtgtgtttagaacttgtaaaagggaattacaagatagtggaactctcaagcgggtt

SEQ ID NO: 233025 - DNA, 414 bp, Glycine max
  unsure (1)..(414): unsure at all n locations
agcttgcctcgaagaggtctatgaagttaaggcggccgaaggaactagttccgctccggagtacgacagtcaccgctttaggagcgttgtacaccagcagcgcttcgaggccatcaagggatggtcgtttctccgggagcgacgcgtccaactcagggacgacgagtatactgatttccaggaggaaatanggcgccggcggtgggcatcactggttactcccatggccaagttcgatccagaaatagtccttgagttttatgccaatgcttggccaacagaggagggcgtgcgtgacatgagatcctgggtaaggggtcagtggatcccgtttgatgccgacgctatcggccaactcctgggatatccgttggtgttggaagaggtccaggaatgtgagtatagccagaggag

SEQ ID NO: 233026 - DNA, 439 bp, Glycine max
  unsure (1)..(439): unsure at all n locations
ntcaagaagttgaagagggcagntgacaacatctccagtgttaactttgtccgaccctaagagaccatntgaagtgtattgcgatgcgagcaggcaaagcttggggtgtgtattaatgcaggagggaaaggtagtgtcttatgcttcacgccaattgcgccctcatgaagttaactatccgactcatgatttggaactagcaattgtggtctttgctttaaagatttggaggcactatttatatggtactcgttttgaagttttcagcgatcacaagagcctcaaatacttgttcgatcagaaggaactcaatatgaggcaaagaagatggatggagttcctcaaggattatgattttgatctttcctaccatccaggaaaggctaatgtagtagccgatgcactgagccggaagccttacatgttgnaccatgatgag

SEQ ID NO: 233027 - DNA, 406 bp, Glycine max
agcttctatataagctgaccctatttatcaataaacacaagttgagttttattcagaaaattagagtttatctcttttatcttagggagagtgattctcctaaattcttgagtgattcaagaacaccctggctgtatcaaaggactttcacaacctttgtgtgttgccctcgctggaaagagagattctttccttcctttcatcttcacccttgttctttcaaaccacaattccagaaaatccacctctgcccagaattatctcgtggccataactcccattttacgcactcagattaagtgattcttgagcctaaattgactttcaaaacgagacctttcacctcgttttggaatcacctcatttggagccctgtagcttcagttattgccatttctatatttct

SEQ ID NO: 233028 - DNA, 337 bp, Glycine max
  unsure (1)..(337): unsure at all n locations
tctgtnttcaattacgagcgtctcaatattttacgttcctcaancggacatccgagtcgaagattatagtcgnttgacttttcttacagctcatatttacaatttcgagcgtctcgatatcctacgggacacaatcggacatccgaggtaaaagttattggcctttgacttttctagagcttccgtttcaatttcgagcgtctcgatatcctacgggacacattcggacatccgagttacaagttattgtcgtttgactattcttagagctttcggtttcaatttcgagcgtcttgatatattacagggctcgatcagacatccgagttaatagtta

SEQ ID NO: 233029 - DNA, 406 bp, Glycine max
agctttataagtgcgggtctgggaaactatggtcaagtgtttgcgatatgtgaagatgatgttccaagtacttcggatttggtccgaccatgccctcctgatttccagctgggaaattggcgagtggaggaacgccccggcatttacgcaacaagcataatgtaaacctttacggttctaaaagctctatagttgggcctaggctttagagttttcattttgttaaggctttgcgtcttttgtttttgaatttataatacaaggatctttcttcatctgttcctggtctctacccattctcattcatttgcatgtttacttctttttctgaaacggcagattcgatgacgagtcccccgaaggtactaatacctgggacccgtctatcaacttcgagcaagaaatg

SEQ ID NO: 233030 - DNA, 424 bp, Glycine max
  unsure (1)..(424): unsure at all n locations
tatgcgcatanttccttacaatcgttctcttgcactttacaaaaataaatgcacccatatacaatcaaggcagcttcgttacctacattatttacacgtacttccaaggtgtatttgttacttacatcacacacatcttcttggctaaattcacatacatgcatactccaagcattntggggtaccaaaaattgcacctgtgcacatcttggtatttctaatacctatacatacacaaacttcatgatgaatcttgactatctacacaataaggtgctacatctcatgccttttttcaaagttttgctacctaaagccgcatgcaaattcaagcatattttcctttgctgactaaaattgcatcaaattatatatatattttttggaatatgctttttcacataacattcacatatttatatat

SEQ ID NO: 233031 - DNA, 420 bp, Glycine max
  unsure (1)..(420): unsure at all n locations
agctctgcaacaaatgccactctacttataatttctgaaagatatgttgacaaggaaaaacagatacatccaccaggagaatattgttgtggaaggaaactgcagtgctgtaatatatagaattcttccaccaaaacataaagatcctagaagtgttactattccttgttcaatcggtgaagtcactatgggaaaggctctcattgatttgggggccagtatcaacctaatggcgctctccatgtgtagaaggttaggagagttagaaatcatgcctacgagaatgactttacaacttgttgaccgatccatcacaagacctcatggggtaattgaggatgttcttataagagtgaaacatatcggctttccagatgatnttgtggttatggatgtggaggaagaccatgaggttccagt

SEQ ID NO: 233032 - DNA, 402 bp, Glycine max
  unsure (1)..(402): unsure at all n locations
gggttcgaggtacttacccgttgaagatctatgaactatgaagaacgaatgaagaacgtcgaagaacggtcgaaacctttgggaaattcttcacggaaaacgtttcggttgcgcctcggcttagattttcttcacggaaaccaatttttcaagcaaattcaaaagagagagaagtgcctaaggggctgaacccttttcttcttcacttcctcccctatttatagcaaaataggggaggtggttgccgcccagctcgcccaggcgagccagcttgcttcctccggaagcaacagccttctggaggaatattttggagggcccaagtgggcctgggtgctatttgcacccccanttttactaagtacaccccnctttgctttttttggtgattctttnttcata

SEQ ID NO: 233033 - DNA, 399 bp, Glycine max
  unsure (1)..(399): unsure at all n locations
agcttcaaacaagtactacattnngcttatgggaagactaagaaaaattttaaaccaaagacaacaacctaatcaagggtttaaacatttaaaatcttggacccctttttacacatgctcattactaccttccacacaatgatggcattgtatatgccagtaccagtcttggaacagaccaatgataacaactgtaaactgtgtacttatagaagaaaatataattttgggaggttcatatatccaattaccaattctaacaaagcataaactaaaacaaggttttatatataaccgttctaaacctagtaacttaaagcaagccctgacatgttaatcatccctttgagaatataccacaaaactaagaaaagaaaatctttaatagatatttacaga

SEQ ID NO: 233034 - DNA, 412 bp, Glycine max
taaaggaacactcaaaccatgtgtatttatctcattatctatactccgaagagatcggcagggtctctccctcctgaatcaggttcaacccctaaaataatattttacatgacatgaatattacgtaagaactattgttatttaaaaaacagtttttatctgttaaaaataattaagaggtaattattgagatctatataaagaaatataaaaaatgaaataatttgtggaaatcatttaagtttttaaagaattacaaatttaaaatggaaggttgctaaaattcttaaaactgatgtcacatagtaagacttatccaaaaagtaaaatataaaattaatgtaaaacataacaatattaaatcgcacaaagatattcatatttacaagtattaatgaatcacagcaaatat

SEQ ID NO: 233035 - DNA, 389 bp, Glycine max
  unsure (1)..(389): unsure at all n locations
agctnggttctaggccgacttancttatataatgcatcttgattacagagggataggcgcttatcggttgagggatcgcttaacgtcgacattgccgcaaggatatgggcttaactggcatgagtggcacgattagctcgatgaaaaccagtttaggctacaaagaattgagcttagtgatgacatgtcatgcttagccattgaatacaatgcgcttagcaatcaggccatcgcttagctgaattcagattgaattgaaagaggcttagctcagccttggctagcttagcgggccaaatcagcctgagatgcaagggttgagcgctaagtgctagagactctcagcttattgcatgaccaaagatgcgcttagcgtgaggcttgtgctt

SEQ ID NO: 233036 - DNA, 332 bp, Glycine max
tgcccagagaaggagtccacggaggaaatgcttacctcctcaaaagactggaaagcggtttctaatgactcctctgcggcctccacataaggcatagaggatgggcagctcaccaagatgtcttcttcgcctgatacgatgaccagatgcccttccactacgaatttcaacttttggtggagtgtagagggaacaacccccactgagtggatccatgggcaccccaacagacagctgtagggggggttgatatccatttttggaaggtgacttgacaggtgtgagggcctatctgtactgggagatcgacctcttccctaacctctcggcgg

SEQ ID NO: 233037 - DNA, 424 bp, Glycine max
  unsure (1)..(424): unsure at all n locations
agctttgaagacatgtatatgaacctacacactctcatttagattcttttttgtaaaaggtttatatatattatgtatagntctaaaaaaaaactctcaaaacaccttgaaccccttgagagaaagtactaagtggtgatattggatattcgtctatatgacaattaaaagttagtcattgtgcaaaaaaaaaaaacaacaattttgtttgatttgtatagagtcagcagtagcttgataggacaaagaatattgagttgtaataagcttggtgtagagcttgtgttgtagagctagaagtgatagtgattaatacttgtaacttgctgaagttagtgaaatttggtggtaatcaagagttggacgtagcctcaatggtggagacaaattagtataaattttcgtgtcttgtgcgttttcattt

SEQ ID NO: 233038 - DNA, 430 bp, Glycine max
  unsure (1)..(430): unsure at all n locations
atgtcaaaagttntttacaattaagagtttctgagtatttatagaactaggcttaagaagataactaagcctctaatatggatttttttcatcaagctcaagcccattacacgattaaacaaaaattaagaatttttgtaaattcacactgaaggtgtgcgctatgcctgacagctcatgctaagcccaatttctcctcgggttggaattgggctaaaccagatagctcatgctaaaccagacaactcacgctaagcccgacagcttgcactaagccctagtgctaagctagacaactaatgctaaccccaatttctcctcaggttggaattgggctaagccagacaactcgcgctaagcccaagcgcgcaattcaataatcttcaacgtgctccaatttagctccttgtgattntctccttcctttcct

SEQ ID NO: 233039 - DNA, 420 bp, Glycine max
  unsure (1)..(420): unsure at all n locations
agcttagcccaataatatggctaacaataatggtattatcaatatttctaactccctcccctaaactatagttcacttaacatcacacttgttacaaagtattagaatgtcgcaacatctttaatgtatctcaaaatattgttaggatcatattgcaaggtatgaaagttgagtctcacattgaaagtttggcatttaatgtagggttttttaggcctccaccttcatttttccaactacaattgatggcttttatggtgtagttctggtagggtcttaataattggtattagagcttcttcagtgttgttaaatggtggcgctacggctaccatggctgaatggcatcatggtttttttgtcaaccaccatagganatttgtgaagggaggccagttatggtggctcctattagacaat

SEQ ID NO: 233040 - DNA, 443 bp, Glycine max
aactcagcttaagtatctcgaaatctaaccttaggctcggatttctcttctcgacctcaagtatatcaccctcaacctcaacctcaggtataacactctcaacctctacctcaaactcaacatcatccatatccttgtcaaataacatttctataatctctaccttcctagcgtgtcagtagtaggggggcgtcatctgtgtccaccaaagctagaaagtgtattatgatgggattgtctcaggctcatccaacaccctcattgtagcacagagaattcccacaaatccgtcacaatggtaatccttgtcatgaagccaatatccgtcaagcatcaacgtgctcacatggatcctcaatctctgggccaccaactagatctacatgaatttggttgtatggtgggtcctcgatcaccacacataaaccaccaaacaatatgac

SEQ ID NO: 233041 - DNA, 308 bp, Glycine max
atgggtccgaattccttttactaacagccaacagcaacaaacaaactttattttcaaaatgctgctggcccaagcagaccatacgtccctccaccaatccagcagcaacaacaacaacaaccccagaaacagcaaacagttgaggcccctccgcaaccttcccttgaagaacttgtgaggcaaatgactatgcaaaacatgcagtttcaacaagagaccagagccttcatttagagcttaactaatcagatgggacaattggctacatagttaaatcaacaatagtcccaaaattctgacagattacc

SEQ ID NO: 233042 - DNA, 427 bp, Glycine max
agcctggctcttgcctatatcttggatttttttttctttttacccgttaaagaaggatattttaaaagtaagatgcctaattgataatcattaatgaggaatactaacaaaattatttataatatattcttctaaaaattttatttaccgttaaggggaatttacacatgaattttatctaataatgaaagagtaggttaaaagtgtctaactagcatttttttaagtggaattcagtgtacatagttaatgatattgttttttaagagcatagttgataactttaaactgggtgtttcaggttttcctgtaaagtatcaaattatgcaaaaacaaaattcttgttatgaatattctgcaactctgtcttctttatcctagactttttctaattagaagtcactttaactttaattaccccgagtta

SEQ ID NO: 233043 - DNA, 407 bp, Glycine max
  unsure (1)..(407): unsure at all n locations
ttcaccttttcgctgcatcttcttcctcttcccaatatattgtgatatcttcctcattaattcaaatttcctcgtttagcattcttattatggttggtccatgaccatgagtgaaagattttcctacatatattccattctgattttcgccaataagcgtgcgtgcccttcccatcccaggtacgtctctcgtggagttttaaggtttttcttttctttgctgtcgaaaacctgcaacttgggctgtgcaactttggagttttataggttttctcactttctaatgatcaaacaaacaaacgactatattttcactcaattatatatatatatatatatattttttggtgaagatattttcactcaattatattatagtatcaaaacaaacacanaagttaatgtac

SEQ ID NO: 233044 - DNA, 420 bp, Glycine max
  unsure (1)..(420): unsure at all n locations
agcttgagaaattagtggaatatgactatttttgtcaagcttttcatggggatgatatattccttaatgttttcaatggaatattccttgatgatatattcatttgtgatgggctagaaatcctaatgttattgctgctgttaagaaatttgggttgaaagcaaccattcaggggtagttagatactgagcaaccattaagaaatttgtggcttcttaatctgtatccacatgaaacacggatgtgctaaggttattggtagagcaacagcccctataagacctgccaaacttggtaagaatggcaagtggtaaaaactttaattacatggcagatataatgtgcagattgtaatctggtactcctgtctgcttaaaacaaagcanattctatcacttatcatattcaatacctagaaaa

SEQ ID NO: 233045 - DNA, 459 bp, Glycine max
  unsure (1)..(459): unsure at all n locations
tctttgaagtatgctcttactatgaagagtttaatgttgagcttctaacttgtatctaggttgaaggtgaacttccataagagcaattntggggtcattggagaagatagaggggtggtgtaaagaattgaagatttgttaaattaccacacaatgaccataccttttgaatatttgggtattctgaacaaagtcaatccaaggaaggaagaaatgtggagaccaatcattgaaaaattccaaaagaggttggcggtttggaagcatagacacttngtcgttgctaggagagnnttgctcattaatttcttcctttcttctctcgctttaattctttttaaggttctgcaatgagctatttctaaattgatttgtcttcacaggaaattcctttgcgttagttggaggaaggtatgtcatcctaaaagccatagagggttggcgataatgacattacaa

SEQ ID NO: 233046 - DNA, 414 bp, Glycine max
agcttgctacatatatggaaaacccatcttataaggaagacaattctagtcatgtggttgcatcaagtaaacctcggtgacaaccaataaaggcccataatggctttgagtattgttcactagtgaataaagtatgcccttaggcgaaaggaggtgattctagtgtaatgcattatgcatcatgtgcatgtacttctcttgccaaaaaagaaccctgcatggggtcgctgcagcggtgtgttgagttggttgtgcacatgtactatgaagttggcggcattgggttccctagagagagacacttctaatcaaagggtcacaccaatgagatggtagtgtggtagtattgtaagtgcgattacatctttgtgttactcttcacacaaaaggaacactatcactaaaaagggaaac

SEQ ID NO: 233047 - DNA, 441 bp, Glycine max
  unsure (1)..(441): unsure at all n locations
tgntgaacatgccatgattggatgagttaaacatacctcttctgttgtacgggttttgagatgatgtttgtgatggttatatgctgaaattgctgatggaaatctgttatagacgaagggtagaactaacctaaggttagaaagtgaaaatgtgatgttatgagtggaaaaagagtgagactctgagagttggaaggctaagtctgaattctgtggtaaatggaggttaaagtgagttaatactagcttgaaatgttatttaagacttgcgagaaagcttggactgtgctatagataaaaacaaatgaccatagtgaacaaagagccatttgtatggcacatttgggtgttgaagagtcaaatattgattcggtgagaatttaggtgtaaaatcacgttgaacaagtctaaatagatgttatggactggtgtgaggcgaga

SEQ ID NO: 233048 - DNA, 420 bp, Glycine max
agctgtagaaactcaggtttttttattataaactggcctcttctgttcctccttcccttttactgtatacataataatgagttcctgattagtcatttattttcctctctttgtccttcaccccttcctttgactatttgcctcttagcccgttaggattgtagatctgatcactccaagtcactgcacaatccaaacgatattcataacaccactcgagcttctaaaattgatgccctttgactggttctcgttagaattgttgacacaaacttaagcatagaagaaagacatcaaaatggccacaatcatgaaaaaaatgagcgccacaagctgataaagcttttacatgatactagtgatgtctgagtaaatcaaataatattttacaaagtctttaatggagtcaccattgagagt

SEQ ID NO: 233049 - DNA, 447 bp, Glycine max
  unsure (1)..(447): unsure at all n locations
nttggagacgcacctggacaatatcttcattgatgaccataagccggtcggtaaccttcccaggttcacaaggctagcgtcgaatgttcatacgcatacaaaagtagataaaaaggaaaagcaaagtaaagaagctgtcaaggattctcaggccactaatagacctcgggtgagatcatatgtggaagtggtggctcagaaaggaggcttaggaggaacaacgacagctgtagatggcattccaacaattaccatcgtacctaataaaggtcgggaagtctggtgtaaaggggcttgagttggtatgttgaagaaaccgatgcatgcggagaagatggaggactacatatcgtgggagctgggatatagcatcaccgctagatccctcggagacgacatagtactaattactgttctttcagcggataatgcccaacagcttatcaa

SEQ ID NO: 233050 - DNA, 416 bp, Glycine max
  unsure (1)..(416): unsure at all n locations
agctgttgtttcaagttcctatcttctttggcaaaccaagacaaattctagaggaaggtgtcttcaagttgtccaccttcccatgatatgtagtgtaacaccccaatggaatcacaccagaatgagaaggatccagaggctgtgtaggtatgagattgtataattgaagatgacttaaagaaattaattggtactacctattacaataagatgcatttatttttcagtagtctatcacttaagaactttgggtgaccttctgggaagtttcctggaaaacatatgagtgaggacaaaacacactaaaaactcttgtgctaatttgtggggtcagacattgatcttggaagcaggcataactgattntcaaggtctcaaaaaaggctacctatagagggttctgactggtggaggat

SEQ ID NO: 233051 - DNA, 425 bp, Glycine max
  unsure (1)..(425): unsure at all n locations
tatgctgcanacatgtacaacaaatcttctcttcctttacagcatattcagccacaacagaataattatgatctctccatctacaggtacaatcccggatggaggaatcatcccaaccttaaatggtggaatccttcttaacagcagcagctacaacatcagacttattttcaaaatgttgctggcccaagctaaccatacgtttctccaccaatccagcagcaataataaacagctgcagaaacagctaacagttaaagcccctccgcaaccttcccttgataaacttgtgaggcaaatgactatgcaaagcatgcagtttaacaagagaccatagcctcattcaaagcttactaatcaaatgggatagtggctacatatttaattcaacaactatctcagaattcagattgattaccttttaa

SEQ ID NO: 233052 - DNA, 407 bp, Glycine max
agcttgattcctctatgtataaccctttttatctttgggatcttttcaatatcttctagcatcaagtcaagacaatgtgcagcacatggagtccaaaatattcttggtctcatgacttgttttacctaaaaagaccaaaatcaataaaattgtatgagtagtgtaacaattaaaagttataactataaaaaaacttcattaagcatgattgaattctcacccgccaacacataattacttccattgtccgtcaccacttgaataacattcttttctccaatctcctcaacaaagctatccaaaagctcaaagatcttctgaccagtcttcatgtattcagaagcatccacactcctcacaagatgtgttcctaaggaatctagaagagtcaaccaagcatgccaata

SEQ ID NO: 233053 - DNA, 442 bp, Glycine max
  unsure (1)..(442): unsure at all n locations
gacctttaaactcacctgctcagatctctggatggtgctatttgctgttttgacttggatgggctagaatatgcttgtgatgtgagctcgtataactcttcttgtaggtgtgtcgctcgatcacaagaatgacatggtcactaacttccatattttcaatcaactccatagcttcattacgtgtatttagtttgatcttcccaccagtgaaggcatcatgtaactgcttcgaatggggtcacaagccattaatgaagatattgagttgaatcggctcgctgaacctatgggtgggagtcttctggagcataaccatgatagtggtcaagagcttcactcagngattcatcggggaattggtggaatgaagagatctccacctcttccttagcggtnctggactctagaaaaatattcctcctacaatttctccaccacctct

SEQ ID NO: 233054 - DNA, 377 bp, Glycine max
  unsure (1)..(377): unsure at all n locations
agcttgacttttgtttagacatgatttatacatgatttgggacttgtaggatttgatttgggcaagaatggatgaggggaagtgtggctttcgaaatatgctctttgtgcaaattttgctgtaaaattgggcagcaaaattttgcacaagtgcagaanaatccatgtatttgctggttgtggaaagagtaatgtagaatgagttctagatgtttgctagtagatcccaacggtcaaaatgtaggcttaagtactagagacttccagtaaaattttcgagtcgatcgaacggttaacgaattggaacgaaggaattgttactggggtctttaagtgagaaaagctgtgatcttggttggtgtcttggcagagttttct

SEQ ID NO: 233055 - DNA, 433 bp, Glycine max
  unsure (1)..(433): unsure at all n locations
tgcaaggatctcatgctagatttaaatactaattaatgtgatagatgaagagatcattgattcttaaattaaggaaagatagaaggaggacctctccttttagtggcttttgttttacatacatttttgaaagttttgagaaagaatagggccttatgagagtctattagttgtggaggagcgcagaanacacaactgggacaaattctggccaagtttctttctctttattaggatttctagtttttccatggccatgaacgactagtctccctagtctgagattatgatgtagtcatacttttgtaccccttttttgattttaatgaaacccttaatgttttttagtcaattaaatcttttttattgttccttatcattaatttggaattgatcactttaaatctcagttaatgcatgatagttctaagtg

SEQ ID NO: 233056 - DNA, 398 bp, Glycine max
  unsure (1)..(398): unsure at all n locations
agcttanaggaaaacccttcgcattgtatccttttattttcccgcataaacccaaaactgtctcggtaaaactacaatcccggtttccttaaccgttggattttcatgaaaattggatatgttgttcagaatgcaattgcgcacacgttaaccgttgggatttgcgagataatattcatggagggagaaaagggaatcgcatgatgacagtacaagtggaggtttcaatctcttctccgtctctctgacgtttggaaattctatcggagcagtcggaggaataactggaggaatctcaggaaaccgctagagatgctgctattgctggctgaagacatgtgagtccgctcatgagcagtgcttataaatgaaatatgtgatgaattgtggaataatat

SEQ ID NO: 233057 - DNA, 408 bp, Glycine max
  unsure (1)..(408): unsure at all n locations
ggcctaattaacttgaaattgagagaaaatgattatttaacacacaaaatgaaaatacgaagtatttattacctatacttaacagaaaatacttataacattacaaaataaccataaattgggagagtttgatacaatttatacaagttttatacacaaaaattagtcattttcaccgactaacaactcacccaaatttacagttttgcttgtcctcaagcaaaaagagaacaactcacttgtcctcaagtgacaatgacatacagtgactatgtacaaaggtgtatgctacaaagttactgattgcatgataagagaatggagtaaaatgccctcatcacttgtctttcataaggtatgcagttatccaaagagaagaatganatgtaacctgaacagatagatgaa

SEQ ID NO: 233058 - DNA, 272 bp, Glycine max
tggggagttttggtttctgggggtctagattttctttcccttggttcaacgggagcttaaagatcacatcttgctggtgataaagcggttcgtgcttgagttttcatttggggttcgagtctcatgaacttttgtagcttttggttcctttgctatggctctggatctctgtagctgatttgtagggctagacgaaggctgagttgttttttttctaatttaacttgtcttttgctttctcatacagtttaacatcactgtttgattgtatg

SEQ ID NO: 233059 - DNA, 356 bp, Glycine max
ggcctcagaaatcttaagaagagggggttgaattaagatttcacaaactattccccaattaaaatttctatacatcttttaacccaagtcccaagattcgttttaaaatgaattactaaataataattcacattaaacttactgaacagaaatgataaacaacaataagtaaaggattgtgagggaagagagaatgcaaattcagttctatactggttcggcaaagtctgttgcctacgtccagttcccacgatacccgcttgggagttccactatcttgtaatgctttcaacttcttaacacacaagaaatcccttgctttgtgtcatatgtgtacaacaagagacgtctagctc

SEQ ID NO: 233060 - DNA, 372 bp, Glycine max
  unsure (1)..(372): unsure at all n locations
aaccgccttttggaggaatcttctggagggcccaatgggcctgggttttatttgcaccctcatttttactaaatacacccccagcttttttttggggctccttttttcgtaaagttacggaaacttacgaanttcgtaacgaaacttgttttctttccgtaatgttacggaaccttgcggattacataatcatcccttttttgacttacggaacgttacggaacctcacaaattgtgcaacgatgcttcctttgtgatttccggtatgtcacggaaccttacagattgagcatcaatacttttttttgatttccggcatgtcccggaatttcaaaaaattcctaatgatgggtgtcaagcaccttacaagga

SEQ ID NO: 233061 - DNA, 432 bp, Glycine max
  unsure (1)..(432): unsure at all n locations
actaagcttatgctttattacgatgtctcgaaatccaataaaaatatgccttttattntgatcccaatcttctacggtagggtttaatttgttgtaagtttggttaattctatggatgcagttattacatcacatgattcttgtttaactaggtccctatacttttaaaattcataactgagattaggatatgcctttcaagtttagcatgtgtaatttcttttcttcttagtcaattttttgctttttctgggactaagattcggatacgcgagatacctgttcttgataagttacagtatctccacgtgctgctgtcctctgtgcttccggtgataaagcagatccgccgtgaacagtgtnttcaagtagaacttgaaaagaagttgcgtggtatttgggttcgctggtagttctgtgggtgagtatgtt

SEQ ID NO: 233062 - DNA, 420 bp, Glycine max
  unsure (1)..(420): unsure at all n locations
gcaagctttatcacttttcattcttgagctgattaactatattgccatgattggtgtgcttggatgatnttcatgaatgtcttgactttttggatctccttatgttagatggtacccattcctttcattccttgatgttcattgagaaatatgtgaatgtttttgtttgtctccctttcatatccttggattttgttctttgtttcattttgcccaggagtgcaaaaggctaagtatggggggttttgatgtgccatcattttcttctattttctaaaccctttttgcaccattttaattattgattggtcttaattgtcaattaattaggcagttntattattcgggctcatttagctaatttgatgtttttaatctaatttcaggaattaatgaaacattgggcttactccggatttt

SEQ ID NO: 233063 - DNA, 431 bp, Glycine max
gaattcaccagcaattttctttcttaagaacacctcaacagaatggtgttgtgtggagaggaaaaatagatcccttgaagaaggtgcaagaacccttttaaatggaacaaagctacctaagtacttttgggctaacgttgtagacactatttgttacaccttgaacaaagtacttattagacctattctaaagaaaactccttatgaattgtataaaggaagaaaatcaaatatttctcacctgagagtctttggttgcaaatgttttgttttaaacaacaataaagactctcttggaaaatttgatgcaaaggttgatgagggtatttttcttggttattcattgcatagtaaagcatatagagtattcaataagagaactctaagtgttgaagaatctgttcatgtagtatgtgatgaaactaactcta

SEQ ID NO: 233064 - DNA, 401 bp, Glycine max
  unsure (1)..(401): unsure at all n locations
acttcagtacgcaacacaagaataggttgcactagaattagaaagtattgtcaaaaagtattctttatgaaatatatctcaatatgagtaatcgaactatagagtatccatattgctaagaacaagaaatcagaaacaaccatactatctatgcaattaaggcagaacatcatattacaagcatacatagaattataaggttcctataacaagtatataacgttcatataagaagtaagagttaaacaattaataaggttgtattaagaaattacaaacttcaacaactacattcatgactacacacaaaataaagggagttaagtagtcatgcgtttacacatcaagaaagacatactcatccaaggtatatatatacggttcanaaggttttcacaaca

SEQ ID NO: 233065 - DNA, 446 bp, Glycine max
  unsure (1)..(446): unsure at all n locations
gacctataaaactcagcttgcgaatcgatacacttatntggtaatcgattacaagtgattgtttctgaataaataaaaagatgtaactcttcaaatggttttttgactttttcaaattggttttaagtttttctaaaagttataactcttctaaatggtcctcttggccagacatggagtgtccataaaagcaaggctttgatttgctttttaatacactttttacacttatttcatacaatcctttacaagccgtgaatctctntgaacttgtttttcttctttgtaccaaaagttttctgaagttttctggttttccaaaccttgaaaacttgtgctattcatctttttcattcccttctccctttgctaaaaagaattcaccaaggactaaccgcctgaatctttttgngctctctttcccttttcacaagaacaaggactaa

SEQ ID NO: 233066 - DNA, 155 bp, Glycine max
  unsure (1)..(155): unsure at all n locations
atcttgcatggaattccttccagnattgtatcagacagggatccgaggttcacttcgcgattttggacaagtctacatgaagccttggggacaaagttgaagcttaattcagcttatcatcctcaaacagatggtcagactgaacgaaccattca

SEQ ID NO: 233067 - DNA, 434 bp, Glycine max
ttcttgagagaacttccttgagaagcttctttgagaaaacttccttgagaagctagagcttagctacacacacccctctaataactaagctcacctccttgaggagcttccttgaaaagattcctaaagaagctagagcttagctacacacacctctctaatagctaagcacacccccatgacaaaatacatgaaaatacaaaaaaagtgcctactacaaagactactcaaaatgcctcgaaatacaaggctaaaaccctatactactagaatggccaaaatacaaggccaaaacgaaggataaaacctattctaatatttacaaagataagtgggctcatacttagcccatgggctcaaaatctaccctaaggctcatgagaaccctatggccttcccttggatctctggcccaatctacttggagtctctat

SEQ ID NO: 233068 - DNA, 416 bp, Glycine max
  unsure (1)..(416): unsure at all n locations
agcttactgtaagcttattatttttttgaaaaaaacttattttgataggcttctgctggaagcttgctaaaataagctgaaagcttatagaaaagtcataagctactttcataaatgcccactttttgtatacaaaacataaactactacttgtatgtactttttttccctatcccaaaaatgtaaattatgtgagacatatgtagtaataaatcttaaattgtaaagaataatagtggtaattaaaaaaacgaagtttctcaatgaaaaaaaatgaggtctggcttcaccactcaaacaaatatgttaaattctagttttaagaaatatatcgccagttaccacttcactagcttgccatagatgcattgtattcgaatcatggtagaaaaggctattaatagactatntcttat

SEQ ID NO: 233069 - DNA, 413 bp, Glycine max
  unsure (1)..(413): unsure at all n locations
agcttctacctcagctccctctgtatctgccccatctacttctccagcatcagcagctctagttcttacaggtttttccgcttagagcataaagcattccttatctatgctgtagagcctgcatcagggccagtgatggaagcttgcttgtgaagattctatggaggctggatctttgagctccaatgaggtccttcaatggtgatttttcaccatggagatgcagcggaaggcaaaggagaagaggagaggggaggcaccatccactagggaataagccaaggaagaaggagcttcaccaccaagaattgccttggataagaagcttgaagaagatgctntaatggaggaaaagaaagagagaagggggggagcacgaaattgaaggaataaaagagggaaagaagtggaac

SEQ ID NO: 233070 - DNA, 438 bp, Glycine max
  unsure (1)..(438): unsure at all n locations
taagccaccagctcgcctgcgcgagctgggcggcaagctcctcctctatttttcctataaaatggcgttgggagctgaggggaaggggttcaacccttttggcaatcagatttcacttaaaattagtgaggagaagaagaaagaaggagaaaatcaaggccaaagcgcttccataacgcttccatgatgtttccgtgatcaattctgtgaacgttcttcgccgttcttcgtcgttcatcaatcttcaaccggttagtttttgatttcaaagctttgaattcgttctatgcacccttaaggggccatttgtgttttgtatgttttcatcttcatctcgtctacttttgatattctttntcttcattttaagcgagtgtcgaccgattgtttaagtcgtaacctcacttaatcaatgttaaaatgaattttgaccgatcg

SEQ ID NO: 233071 - DNA, 317 bp, Glycine max
agcttgaagcagtgatggcacggagaatctctagggtggttcatatggtgggaatcttggaacccaaaccattcttgggaagggttcaagattgcaatctcccaaaggtttcaagcgtctaacctagggaatcctttcaggcattgctggcactggaacaagaagaaacagtgcaagaattcataggccaattcgagaagcacatcggaatggtgaagggattggaggaaccatttttggtggagttgtttctcacggggctacaagaagagatcaacactgacgtatggctccatgaaccacaaaacttgatggaa

SEQ ID NO: 233072 - DNA, 448 bp, Glycine max
tattcagacttcaaaggcatggtggcttatcgagcgtggctcgcttaaccgcaactagaatgccaaaagcctctataactcagacctaactaaactaactcgctaagcatgacatgccggcttagcaagttcatacgaactcagaaattaaaacttgaaatttaactgcttgaaaagtcgtagtgcagtggcttagcgagttcatacatatatgcataaatttaaatagaaatgatgaactcgcttagcgggacagacccacttagcatgttcatcaaagaacccagaaattcatccaaaatgaatgaactcgcttagcgagtacatcgaaatttccagaaaaaattggggctttgaagccttaactccctagccacttccaagcataggagatctaagcaaagcccctggtatcaacctacattatacgctaaactaaagccctaaa

SEQ ID NO: 233073 - DNA, 306 bp, Glycine max
acccttcttcccacccccaaacactttccccgcacagactcaaactagacgtgccccagatcgacgggtctgacccactcggctgcggactcaaaacctaacaactttcggaaaaccacggagtaccgaactcggagcggcttacggatgcctctcttaatgtggacggacctgccctagcatggttacaagggatggctctgaaccatcaattgcccacgtggacaggctaccttcaggcgatggaagcccgctttgctctatcgcctgaggaggacccaacaggacagctctcacagttggttc

SEQ ID NO: 233074 - DNA, 357 bp, Glycine max
cactgaccctttcaatatcggagtccaaataacctgaaggaagtcagatctttggataaaataaatagtaatatattaactagatgttcgagtaaacactatgatttgaaataataaggcaaatgacaaaaatatcttctgaatggatttcaaaaataacaagctaggtctctacatgttttaattccaatgtcaattacaaaaagagatatggtggttaatgcttggatatggccttgcatatcctttgtccactaaaagcaataattctagcccaatgagagaatataacttcgatgagaatagttgttaatcttcttcctaaatttaaccaatgtacataataacaaatattta

SEQ ID NO: 233075 - DNA, 340 bp, Glycine max
  unsure (1)..(340): unsure at all n locations
ctcgcaaacggaagcacagatgtgtatctatgggcggttaaacaacacancataaatcagacttcacagctttacccatctatttgctatctttttttaggaaccctacaaaagcggcgcaaaagatcgtctctattcaaagaaactttctatggggaggtcaccgtgaggccaacaagatcccttgtgtggaaggggacacaatgtgccttcctaatataatggatataggtgaaaaccaaatgagcaatcatactttcaaacacacagtgctaacactattacaaaatacactttcaacaggaagtatctataacattctacatcagttctaaaaccg

SEQ ID NO: 233076 - DNA, 401 bp, Glycine max
agcttatgctaggatatctctcgatgttattagtattcaccaggtgattactacgtgatggatagcacattgattttgcttgttagcagaaactagatctaaatatttgcacttatgattgtaggcattgcttttgggacaagatgcaacttctccttatgggctttacaatggtcacagatgtcacatgtgtttgagatctgattcgctttacaaagtgatggagcggttggctaatcctggtattgttttctttactaagaagctcgttctactttcttagaagaaaaggaaagggttaaaaatgacattagtttctcggtcaccaatttcctccttcattttacaggggttaggagacttgtggctgtggaggctggcagcaagcgtgtggaagggat

SEQ ID NO: 233077 - DNA, 421 bp, Glycine max
cgtcctgaaatgaatatcaaagtttcagataatatattcgggtaatgtccagggtgtattgagatacgatggctttgaaggaaaaagattgaatgaatttaatataattatttttataatagaatcgaattgtacgtgttgatttgaaatatatatttggtcatttactgctttgaccattttttatacagttgagttattttaatgattacaaatagaagtatataaatttactgaaaatgaaaaaaaaaagtgaacaccccctaatttttatttttttgaaattttgtcatagacatatatatttggatcgactttgtcatagacatatactaatgatttaagatatgattgatcacgaagcatatcctaatgggggatagcaataattatatggagcgcataaagtatggtcttctgg

SEQ ID NO: 233078 - DNA, 407 bp, Glycine max
agcttgctttactttatgttttaaaatttattttagctatgaagaatatgggtgacaaggattcaacaactcagtatcaatagaagaaaacttcagtctcaaatgcatcgtgccaactgcccagcagcattcttgcctctcaactttcctcattgtagatcatcccggaaaacattccttaggcttcgcttcaggtaagatcacagcatgtggctcggcatccaaaccatcagagattatgaaacagttccaaatggccagagcatccagcaggatctccagccattgacccatgttctgacatgccatgcttgactcacagatgtcatactttctggtgcatgagggctcatgccttcaacatttggccagtttactccatggaatcagttgaatccttcacttgg

SEQ ID NO: 233079 - DNA, 418 bp, Glycine max
  unsure (1)..(418): unsure at all n locations
tgtgaaatgtctctcaatcaagttcctatgaaaagaataaaagcagaatgatgtgataaaaatactaagaatatgttgaaagtgtgcatagaagaggtgaatgctggaaataaacctcacaaccacttcactaagcttggttgggcaaatattgcagaaaaattcaataaggcaacaaatttgagatatgaatataaaaaattaagaaataggtgggattctttgaaaaaggaatgacaattatgggctaagcttattgggaaggacatacgtcttggctgggatggtgagaagaaaaccattgcagctagtgatgaatggtgggaagccaaaattcaggtatgtattattcaacgaaaatagagnttttatgcaggccaatctttcgtttntttattttttatgtgngattcttgac

SEQ ID NO: 233080 - DNA, 301 bp, Glycine max
  unsure (1)..(301): unsure at all n locations
ttggttgccaaatgactaacaatcaataatcttatagatggatagaaaaacttagctcgtaatcttttctctcaagataatcaaggtgttttgaatgagcgcttaagttggttgttcatgtcttcaaatcttctggtatntattggcctctttcaatcaagtgttcattgtctccaaaggatatatttcttctcgaagctcgcgcctaanaatatggtcgttgnggcattaaatatgtgcattaagtgcacatacatcttcatgctgtanaattactcttcttcgctagcatgttgaaaac

SEQ ID NO: 233081 - DNA, 393 bp, Glycine max
  unsure (1)..(393): unsure at all n locations
tctgcaatagagtcttttccaatgatctatctacaacatcataatttaactatacctgttctgctatctacacaaagtgacatgtctctgccgctttcttattgagtccaggaagatgtaataaagcctcttcttgaagttacaaaaacagctctgcttcatgaatgtacactcctatatggatggaggagctattgactttacttttaactgcttgtgaattatgcatactgaaataccattttatctcttgtgagcatgagcgctgctattatctactacactctcgagaattcttatcaaactctgattnaaaatatcatatgaccatccagtttgtggttgcacttgattaaatcgtaacgnactatgtatgtgaactgtttttatgtg

SEQ ID NO: 233082 - DNA, 269 bp, Glycine max
tgtccactttctaactttgcaagatggctaagccaaagccatcttaaagatgttacttcgatgatggtgaagctatgaactaatagctaagggaagcagcacaaatgtgtcttagccatcatttggatgatgtgctacatttaaagctataggcctctgaaggtgtgagtggggatatgaaaaacctgcatggttattataacatggaagccaaagcatcaaacttcatacatgaggagatagaatctgcatctgaaaaaggatgcact

SEQ ID NO: 233083 - DNA, 406 bp, Glycine max
  unsure (1)..(406): unsure at all n locations
ctatannacatccgacaacacacatactttttttttaaatgggacaaaaaaatagtctataatatttttacacaacaaaaatattataaaattttacaaaatacataatcttatacctttaaatatgtgaatcaactaatatgagattgcttaaacttaaggttatttttgacattactaactaaaaaacaagttgaaagttgtaaagccaactaaaagctacaaaattagttgatagctgaaaatttttaagttaacttattaaattataaatgttcaataaaattatatgttaaattagctaaaaaaatattaataacataaatgaacataattatttgatatttttatatagattntaattctattttatgaataccaatattttctgacgcggtataatttt

SEQ ID NO: 233084 - DNA, 325 bp, Glycine max
atcgttcgcgagaattatattcacttgacaaggtttgaaccacaggagaccttcaatcctataacgcaacgtggcggacaaaaatgggcagttaacttgaatggccattattgtcaatgcggaaggtattctgcgcttcactatccatgttcacacattattgcagcttgtggttacgtgaacatgaactactaccaatatatagatgttgtttacaccaatgagcacatcttaaaagcatactccgcacagtggtggcctcttgggaatgaagcggcaattcctccttctgatgaggcatggacactaatccctgacccaacta

SEQ ID NO: 233085 - DNA, 442 bp, Glycine max
  unsure (1)..(442): unsure at all n locations
tttatgatgatgcttgttatgtttatgtgctgaaattacttatggaaaactgttagaggtgaagggtagagttaagctacggttggaaggtgagaatatgttgttgtgagtggaaaaagagtgagtctttgagagttggaaggccaaatcttgatttagtggtatttggaggttagagtgagttaatcctagcttgaaatgtcttttaggacttatgagaaagcttgggctatgctagagaggaaaacaaatgaccaaagtgaacaaagagccatttctagggtaaatttgggtgttgaagagtcaaattntgattcggtgaaattttaggtgtaaatccagtttgaacaagtttaaattgatgttatagacttgtgtgaggtgagagttngcttcaaaattatcccattctcaatttcacttctcaaacctagaaaatcca

SEQ ID NO: 233086 - DNA, 307 bp, Glycine max
tcaactgagctcacgtactcccacgttacccatatcctcgcttttctcaacaccgggtccccaataatccctccaagctttcccaacatccaagtaactcaacattcatacagcacaaactatcacagccaagaatacagagcaaaggcagaataatttgccaaacaccaaccgaaatcacagctgtcttacttatagacctagtacaatttcttcgttccattcgttaaccgtcggatcgactcctaaattttactgaagttctaatgcataacctgcatttgaccgtgggactactataaacatc

SEQ ID NO: 233087 - DNA, 252 bp, Glycine max
  unsure (1)..(252): unsure at all n locations
atgcncacaaaaaacatgtcattaatactcatcgcaaaatgaacaacatgagggtgctgccaaagcacaatagaagtttcatcaactggtttagacaaacaatcttcgcagatgacagtgcttcgaagacattcaaattgttagctattggtctaaatctgaatgttccaccttggacggatatgatatcaatcattattctttctacacaaagtcaccaagatggaaacagtagcacgcagaacagtgggg

SEQ ID NO: 233088 - DNA, 332 bp, Glycine max
cctacacccatactcaccactcatttcacagcccattaacacaaacgaagttcttcctctactaccaatggttgtgttagaacttataatgaccgccacaaatatgttttcatgaacaacggatcgagcccactgcaaaacatcatttcggctgtcaacatctacaacgcaacacaaacaattttagttttctacaacacattcattttattaaatcactcataataatgaacattattacctgagaaatattgaacgcatccgaacaatcaacatgtgggtcattcacaccacattcttgttcattttgatcatccatatcaaacatcttg

SEQ ID NO: 233089 - DNA, 253 bp, Glycine max
ttcccggagaagttttttaacatttctaaacgacatcatccaattgttttttcgggattgaatatattaaacaatggccagtggcgggccttatatgggccccgactgagaatttttaaccgacattgcgcaattttttttacaaacgctggccgataacgttttttttttttacggtaaagaaagtttttttttggggtgcctaaaaaattacaacgtaggcggctatgttttacgtgcgaactcacccgag

SEQ ID NO: 233090 - DNA, 464 bp, Glycine max
  unsure (1)..(464): unsure at all n locations
cttatccagggcattcttggtggtgaagcttcttctttcttggcttattccctagtggatggagcctcccctatcctcttctcctttgccttccgctgcatctccatggtgaaaaatcaccattgaaggacctcatcgaagctcaaagatccagcctccatagaagctccacaagcaagctttcatcaagtggtaatcagagcacaagagcttcaagtaggtgctccttaaacctccattaattttttttctttaccttctcttccattggtgtttcttcatttttctccatgtatctcctcacatgtcttgggctaaatgttgtaacatgattctttatagtttccaccgattaaacttgctatagaaactagatttgattttctatggttcacatttcttgttcttgttcttgaaccatgaattgngctgagttaaagtcctttgagtttggctttgtattt

SEQ ID NO: 233091 - DNA, 300 bp, Glycine max
  unsure (1)..(300): unsure at all n locations
atgaaaggatatgactcttcacaatngattttgattttcatcatttagatacattggtaatcgatttccaatatcttgtaatcgattacaccattttaaaatcaattggaatgttgcaaattcagttagaaacttttgaaatcaattggaacgttgcaaattcagttaaaaagcttttgaaatcaaactttgccactggtaatcgattataggaaactggtaattgattactatagaagcaaagacttttgtcgtgatgttttgatgatgccacatgatcatgatgatttgactcctatg

SEQ ID NO: 233092 - DNA, 162 bp, Glycine max
  unsure (1)..(162): unsure at all n locations
attattgtcacaaatattcttttaaaaaagaaattgatgattatgcattaataatataaaataattttatattatcattcactcataaataactatttaatttatttaagataattttttanaggacatcacatcacatataccattttctataaaaaactg

SEQ ID NO: 233093 - DNA, 370 bp, Glycine max
  unsure (1)..(370): unsure at all n locations
caaaattcaagtgaacattgttgatagaggatatggtatgcacgctggtaatcataataatacattgtcaacataagatgcatgttaatctattagcttttactgattatccgtgccttgtaaatggatgctttgcaccttgtggcccatgaacattgtggtaactgtatttttccgatctaatataagagtagagtgatatctgggtgaaacccattgggtcaaaatttggcttggagatgggatggtaaaatgaatatctagtagtggttcgttaaatgctctggctgatgactcatctctctgacacagtatcaaacgttattccaccatcttgtaaccagntaataatattgaggcatgatggctg

SEQ ID NO: 233094 - DNA, 266 bp, Glycine max
ataattatatttgatttatataattacgaagaaacataattttgtgtattaataatccaatttaaaaaaataatatatgaatataattaatatattaatttatttaacttaattataaattaataaaattaaaataaaatatgcacactattttaaaaaatataaaataaaattaaaaatatttttataattgttaactattgatacataccaaataatgtttacaatattgactaaacatgaaaaatattttaataaattattac

SEQ ID NO: 233095 - DNA, 409 bp, Glycine max
  unsure (1)..(409): unsure at all n locations
ggagtttagagcagcaaaacttcttcttctttctcttgagggctggtctagaaactttgaaacctagaagtgttggtaagcaagntcacccttcactctagccttgttcattcttcttcatcacttgaatcttctctcatgnntcttaaattatgtgaagctcgtttttgactcaagataacttcattcttggttgtacccttctctttcacgtggagactacaatangtaaaggggtggtaggggggtccactctctgaaccctaacctttgtgtctttggaaggtaggtttcattgcatatatgtttgttggttgaaatttgtatatgctgccatgactggaactagatgatatggttgtnttcttgaagttataacggtaaaaatgagttcttngagtgtaaaaca

SEQ ID NO: 233096 - DNA, 381 bp, Glycine max
  unsure (1)..(381): unsure at all n locations
aagcacgatagtgcaaatggaaaagaatgaacgacgagagtgaaacaaagaaattgagtagcttcctaagtgctagttcctacaaaaagtgaagaatccactacaaagcaatgtccactaagattaacatggactatggagcgtagccaaacatcatagtccagacagatgaagtcttgtcactccaggtattcagcaagtagttaagtaccatgtttccaatttccaatttccaattcagcaatttaaaacccttcacctccatttcaacaaacacctcagaggcattaaaaanaaaataagaactcattttttcctcattacaaataagattgaactccagacataatggaaaggagattacagtgtactagtgaactc

SEQ ID NO: 233097 - DNA, 407 bp, Glycine max
  unsure (1)..(407): unsure at all n locations
taatcatcccgcttagacgaatgagaaaactggggcaaataaagagggtgaggatgagggagaaacccatgctgtgactgccattcctatacggccaagtttcccaccaaacccaacaatgtcattactcagtcaataacaaaccacctccttacccaccacccagttatccacaaaggccatccctaaatcaaccacaaagcctgtctaccgcacttccaatgacgaagaccacctttagcacaaaccataaaagaaaaaaaacaccaaccaaaaaggatatttgcagcanaaagcctgtagggttcaccccaaattccgttgtcatatgctaacttgcttccatatctacttgataacgcgatggtagccataacccctgctaggttccctcaaacccccatttt

SEQ ID NO: 233098 - DNA, 247 bp, Glycine max
tgaagtaaagaggatcacacttagatggtgcttggaataggataataggtaccacccccaaattataatagaaatacaatggtgataaaatgagatgactagattttcatatgccaacagttctaagcctaggtctacttatatcacaataagtaatgccttattgattcctagacttaaagaactcatctctaatcttaatcctacatgtcaattgaacctcaactcagtgtaatgatgaggagga

SEQ ID NO: 233099 - DNA, 363 bp, Glycine max
actatcataccctaatttcgtccggggaccatttgtttggtaggatgcaaccttcgtttgatcgctttgaggtacttaacacccatcgttaggcaattcgtgaagttccgtgacatgccggaagtcgaaagcaagcattgttgcgcaatccgtaaagttccgtaacattccaaaagtcaaagaggggatggttgcattatccatgaagtttcgcgacattacgaaaagaaaacaagtattgttacgtaatccgtaaagttccgtaatgttacggaaaaagaatcagcaataaaagcaaagggggagtgtatttattaaacaagggtgtgcatatagcaaccatactcacttggaccttccatg

SEQ ID NO: 233100 - DNA, 482 bp, Glycine max
  unsure (1)..(482): unsure at all n locations
tcacgcttacagacctgccattntcacacctgttgaaggtagctctctctttactggtctaacacttgccatgcttaggggctcaactgactcgtcacccttctacttgtcgaggctactacccacgacttcaaacaatctccctcgacatgggacaatctcgtttgacaatggacaacctctttcgcccacaaaccggctcagagcttaaggtcttatgtactgtccaagatccacaaaaaacatgtgtcatgttatgtggcaatacaagacacacgtcaacccttcatgtcaaccctggcacaggagcacaaacgatgcgcccttaacagttgggctcctcaactgacaagttatatttaacatcttaattatttgaatatgatcgcatctctttatctctgggcaggtattccaaactgcacattatctatanggtacaagtatctactagncaatatctctaagctacatgttatttc

SEQ ID NO: 233101 - DNA, 396 bp, Glycine max
  unsure (1)..(396): unsure at all n locations
tattctctttcgagataagatgttctctttatcaatcttcgatttgtttgtgcattggtttgtttgaatcattgagttttggttgttggttgtcgacgatggtagcgtgaaaatgacattttttctgaactgttgggcatacggatcgccaatctgtatgaatcatacgaaatgtcaattcgtatgttntgaaaaaaaaatatgcacctcttcttctctagncgacgaaaatcattgaacttcaccgtatatccgtaaacaacatgtgtacatcaccggtgacaacaaacactcacaaaagaacgctaacagaangtaagtacactaanggactgtagttttacgaaaaaatgtgcttgagaaataaaaaaattaatctattatttataactaaaa

SEQ ID NO: 233102 - DNA, 243 bp, Glycine max
  unsure (1)..(243): unsure at all n locations
aagctgcaattcaacggctaatacccatctattgtgaatttgaaaatattcttatagttaaatatcccaaaacgagaagcccaaattccatgttagggcccttaatataacatatgtgcagttcttttagacttctatcanacttctgctttatagaaagcacctgcaaataaattcaaactacaggtcaatatattttacttcccagcttatgaccaattatttgacagcatacctaacata

SEQ ID NO: 233103 - DNA, 407 bp, Glycine max
  unsure (1)..(407): unsure at all n locations
gttagatgaaactattggtctatcttcctgggaaattccatgctttggctttataatatcgacattttattctcatataggtttttcagacataaaccagccaaatggagagtatgttttgccaaatgaccgcatggctgttatgacctttgtatcctcccttcctatcagaaaggtgtgcctgtgtttattgtatactgatttcatcaattattgaggttttctgattccaaattattgagtttctcctaaatgtgggttgccggactgttttatatgccattttcattataaaggtgctttcgtgattaataatgatgaatgatattgacagattgggggcattggtaanggcactgaaaatattctgaagcgaagtttcggaattaacacatgtgagcagatgc

SEQ ID NO: 233104 - DNA, 403 bp, Glycine max
  unsure (1)..(403): unsure at all n locations
caacacaaaaagaaccggagcttgatctcttctgcgacacttgttgcatatgcaccatgcnactgatgcgggtgaagcttataactttcgcgtgcaactaaaataatattatggagtatggactataaataatatataagcgagtataggatttacgctatcactctgtagtactggtaagcgtgggatgtgttgggatgagtctatctttgttcttatctgacccagacatttgttatgtcagttatttgaatctgaactggtcccaatcaaggcccgagaaatatagaataaaatcaaggccaccggttgacctattacgataatatatgcatgtatataattaaatccgaatgaaagaacaataacacttctacataggcatatttatgatattatattt

SEQ ID NO: 233105 - DNA, 236 bp, Glycine max
tttttttcaacactttccccccgatgggtcaatcgcttaaataaaataccccaaaaaatacatctccattaacccctttttccatctcatactttttttttgatcgcgtttgcctaaccctccccggcacggccgtttgttctatgggacccacccgggcacggtgggtttttaaatttcggacaaactggccttattggagctgtgaagatctccaaaatttgggggcgcttttt

SEQ ID NO: 233106 - DNA, 142 bp, Glycine max
cgattacacaaagtttataatgatttaaaactgttaaacacacgttgtaacttttgaagattgaaatctgaacatttaaactctttggaatgattttggaaaactcttgtggtattaatggtttaaaagctttttagaccta

SEQ ID NO: 233107 - DNA, 386 bp, Glycine max
  unsure (1)..(386): unsure at all n locations
acgatgaatcgggataatgaatcaagttgattctttgcngttttgatgatgacaaaaaggccaaagaatgatttcaagattgagtcaacaagtttaagatcaaaattaatttcaagtttcatgtgaagaaatcaagaagattcaagaatcaagtgaagtttgatttcaagattcaagagaagatgaattcaagattcaagagaagaaatcaagaagacttcacaagggaagtattgaaaagatttttcaaaaaaaaacatagcacagttttgtttttcaaaagagtttttttctcaaaattttctaatttaccagagtttttactctctggtaatcgattaccacgttcctgtaatcgattactagtgganaagtttgatttcaaa

SEQ ID NO: 233108 - DNA, 148 bp, Glycine max
ttttatcccacacatatttttaagttggctttcataaggcttcacagcctgtgaaaaaagagcttatcttatcccaagccaaatcatttgcctatgaatttttaacctcatacttggccgagcccatttttgaatcgaactcaaaaaa

SEQ ID NO: 233109 - DNA, 441 bp, Glycine max
  unsure (1)..(441): unsure at all n locations
tatttatggtcattttggagtaaatttggttaataaancttggtttatgggtaacgctgtctctagaacatttccattgaatttaatgatgaaatcaatgcattttcaggtgaaaaagaggctaagttttgaattgcaaaatgtagcagttgggttaagctcagcagctgggctaagcgcatatccaccactaagcacgcttagcgcaaaggagaatctgatagagcatcaggatcaaaggccgtgcgctaagcgtgacatcaatgcgctaagcgtcgcaggtgccttcagccaggctaagttcgagattggcgctaaacctaatttcacttactcgcgctaagtgcgagggtgacgctaagtgcaacattgtgattttagagcctatttaaagcctatcttgtgcataattagggtaccactttttatgacagttctaca

SEQ ID NO: 233110 - DNA, 258 bp, Glycine max
  unsure (1)..(258): unsure at all n locations
tccattattttactttcgagtagcaagagcctttttgagagatagaactacantttgggacaattgggtcttattctataatgagttttgatctcttttatttttaatgaaatcttgtatgttgtttggctgggttatgatcattngtggctaaaccccttagaacttggatggttatgtaaatattccatgaactttgattcctcattttaataaagntatcgatagtattcaattggggttttatactatttttct

SEQ ID NO: 233111 - DNA, 456 bp, Glycine max
cacctctctcaaatcagatccttcaagctactgtctagcttaccacaaaattgcttgaaccttgaaactagaactggcttagtcattaggtctgctagttgctcttccgctttacaatactccacaactacattccccgtcaaaacttgctctctgatataatggaacctcagttcaatatgcttgcttttgccatgcaagattggatgcttggccagattaatggcagacttgttgtcaatcatcaagcacacatatttcctctccctcaactttagttcttctagtaaattcatcatccaaactgcctgacaagcaccaagtgatgttgccacatactcagcttcacaagtggataaggctaccacttctttgtttctagagctccaagccactggtgcaccatagtacataaacaaatatccaccagtgctcttaatttgctttggatctctc

SEQ ID NO: 233112 - DNA, 253 bp, Glycine max
gattgatggtgaaggctcgccgtccgaagaaagttatttggtcaaaaggtcacaaataccagtgatatcaattatcatcactagccccacctaaaagtgtggtatcttaattgattatctatttgaaatatttctttgttaatgataacgaatacaattttttatacttttcaactatctcttttattattgacttagaatttatttaagacaaacatatatactattacttgatattttattataataaaaa

SEQ ID NO: 233113 - DNA, 327 bp, Glycine max
  unsure (1)..(327): unsure at all n locations
ttaataattaatcctttctactttcttaaaatacaaaaatactgtcaaccaagaaagtatcatgacttttataattagtcaagggctngatgccaatacaacaacaaatgtaggagttaagatccatctgtcaattcagagaaaaatatgaatcttaagaaataatcaccacaaattatattggggtgagtttaaaaagaatatatatcatagtccatacaaataactctcttttatcctactttcttatagatattttatactatattttcttttttgtcatataactaaatgtaaattactaaatctgtatggattaaaatctcg

SEQ ID NO: 233114 - DNA, 407 bp, Glycine max
  unsure (1)..(407): unsure at all n locations
cggctcttagaccacctaacagtagtagcctcacggtctatctctacatctctgacctctaactttgcagaaaggtaattttgttgatccatggtcgaattgggtgaagaatttggtgcatcattctcagtctcaggagggctcatttgagtgcctttgtcacattttgagagagatgtcacgtcgtccgcattcttagtttcttttcgtttctcatctgcgaagcaaaataactgaaacatttaaatgtgtaaatggttaatccctagttgtatgattattgataatattcaacaagcatatcaagcccagtactcatcgaggcgacagcacanaaaacagaaaatctcatcctcgctttgatcgagctgtctccacacatagccaagacattgtcatactgccaa

SEQ ID NO: 233115 - DNA, 282 bp, Glycine max
  unsure (1)..(282): unsure at all n locations
gaaaacattatcccaccttggccaaaaaaaacatgaatcaccggtgttgaccagaaaaaatgctggccttattctggcaggaaagatgaccgatcgaggtctataaaagaagcatgaccggattacgccgatcgaacatttcctaataaatatcctccaagcattattcagggattgaatggaaaanacaatagcccgcattcggagttaaatagccgcgactgatatttttcatcccacactgcgcaacttctttacaaacgctggccgatatatttttta

SEQ ID NO: 233116 - DNA, 387 bp, Glycine max
gtacctggagatatgtcgcgggggtcaggagaccttggtgacgtcaggtggggtgctattgcccaaaaccaagcttgaccaatcccgacccaacccgggcatagtcggtcagtgagaacctgtgatgtacctaagcaggcgagctcctggtagtcaacagataaaaggaaaacaagaccacaaagcaaggaggcttgtggtggctggccaactgtgaatcttgtgtgatatatggaggattgcctatggtaatcgattaccaagggtgtgtaatcgattacaaggcttaaaattgaagacaggaggctaagatggtctctggtaatcgattaccaaggggtgtaatcgattaccaggtttgaaaacgaggttaggaagctagggaag

SEQ ID NO: 233117 - DNA, 191 bp, Glycine max
tgtgattgaccaccgtggtataatttgtgggacattcttcaaaccttattatacttctaaaaggtggtggctgggccctataacctctttttatcataaaatcgccatttttcttgaaagcgacaatcatgttgttggtggactagtgcaaattttttaattgataaaatggcttgaaaaggtacctgcta

SEQ ID NO: 233118 - DNA, 394 bp, Glycine max
  unsure (1)..(394): unsure at all n locations
aaacattaagagattggcgcttatcgcacttgccccgctaagcccagcttaaaagctncaaatacataattgctttggggcttagctcaagatagcgcgcttaacgctgctacaataaaatttctccagagaagaagtggcgcttatcgcatcatccacgctaagcccactgattaaggttcaattgtctatgcacttagcacgagcaagctcaagattagcgcatgaagactgagtgcttagcgcaaggtctgcgcttagcggataaagaattgcaaaaaaaatattgagtctttttctgtctatctcttcacacaagcttaaaaccccttgttcatactaaacaagctgatatattaattgcatcacaagcaaggtattctaactacatgga

SEQ ID NO: 233119 - DNA, 411 bp, Glycine max
  unsure (1)..(411): unsure at all n locations
agctacggaaaatctgtgacctagccattgttttttcttcacagaggccattggcctcctcgcccagtattatgatcagccattgaggtgcttcacctttggggacttccagctatcacccatggtggaagaatttgaagagatcctangatgccctctatggaggaggaaaccatacctcttcacagggttctatccctcattagctagaatttccaagatagtccaaatctcggcgcaggaattagaccataggaagcaaatcgaaaatggggtggttggaataccgagaaaatatttagaggcaaaagcaagaatcttggcaggtaaaggcgagtgggcctccgtcatatatattctcgcacttgttgattttggaggagtcctttntcccaatgtggatgggttagt

SEQ ID NO: 233120 - DNA, 424 bp, Glycine max
tacgcacaggggtgtgtttatattcaatgtttctacggtgggcagctcaccaattaattttggaagatggactatcttcccacttctgcagcttaagtacctcacaaatgataaatcccccaaactttcaatgcacggaacataatcaaaccatggaggacattcaaattgaagtacccttaataacctgtactttgtaggcataccctttaccaaggattctgacaattcttcatcaccgaaaacatgaagtgatcgaatgttcgagctttcaacgctttccgtcaaattgttggaaccagatgctattgttacgtgacgaatcatcccacttttggataagatcccatgctcactagcagaatggcaaaagcctaaatcttgaatcttctcgcggatcatttcacgtactacgtcatgaaca

SEQ ID NO: 233121 - DNA, 297 bp, Glycine max
  unsure (1)..(297): unsure at all n locations
tgtgccttgagaatgacacgtaccttntatgtgtttgggtgtacagaggaaggaaatggaaaacgaggaagataggatgaaaataccaaattatcacttgttgacaagagaaataataaataagttttttgatagggtccatacacaacaaaatttcccaaagaagaggtgctttctattctctaacagatgtggaagatggaggaatggaaatgatagagttatctaaagataccaactttatccccttgatgttcaccttctatattattgacttcctaaaattgtactttttac

SEQ ID NO: 233122 - DNA, 264 bp, Glycine max
  unsure (1)..(264): unsure at all n locations
cgctggctctacaacatttctttgaaggtttaaagaaatttccagtctttggacttcttgagaaaatttcccaacttctttaccattaagcccaaaatctatgcgtcttcttcactactggaacattctttgtaatcttttttgaagagttggtgttaagggcaatcctctttctttacttttctattntttctgcatgagaatggtgaatcaactcatgttcatatgctagcaatnttgcgaagagagctttcatcgacattg

SEQ ID NO: 233123 - DNA, 226 bp, Glycine max
agggggtaacttagagactttaagcctttgatcattcacccttattttttaacattacacctatatttttatgtgcaatatggccttgcatctcccacgaacaaatagaattagacatgaatagttttgagaacacacactcaaagattatgatatatctatcaaaaattttgataaggagtacatcagacataatgttttcttaaaacttttttactaaagggga

SEQ ID NO: 233124 - DNA, 335 bp, Glycine max
cacctcctgtgtaaaattgggcagctatgcctacatgtgcagctgtgctactaatatattttgagaaaggttaattacaagataaaattgtccatggactaataatatgaaatatttctacactgttattaaattgcaaattatctcatatagtaaattattgacttttggaataattatgttaacagttaaattaacaatatgtttttaattaatagcggaaggttgctcatattaatcgcataataattaaaccttaattattaataaatttatatgctatcattgggatctctccgaggcattaatataatctataaaacgtttttttttat

SEQ ID NO: 233125 - DNA, 354 bp, Glycine max
  unsure (1)..(354): unsure at all n locations
gaaagcttatgatacaaaattgcgaaaagaaaaatgataaaaagatgtcccgaaatgctattttattaaatgaatgattttttcttgttctctaaacacacgaactcatgaagcacaagcacagctcagcatcttgtgtttgaatgtgtgtatagtgacattattttgttacgggggaagggttaacagatgaactttgcgatatttttttcttcttattggggttggccgataaaatggtaattttaaaaccatcccttcaaactttaagaacatgaagtaatgatcttttaaaaaattattgaatcttttattttcttaaatttaacttaaagacaatantggattttatca

SEQ ID NO: 233126 - DNA, 343 bp, Glycine max
  unsure (1)..(343): unsure at all n locations
ttttttctccncctaaaagcaagctcaccttcttgagatgagaagctagagcttacctacacaccccctataatagctaactcatccccatgacaaaatacatgaaaataaaaaaaattctctactacaaagactactcaaaatgtctcgaaatacaaggctaaaaccttatactactagaatgaccaaaatacaaggcccaaacgaagcaaaaacctattctaatatttacaaagataagcgggctcatacttagcccatgggctcgaaatctatcataaggctcatgagaaccctagggccttcccttggatctctggtccaatctacttggattcttcta

SEQ ID NO: 233127 - DNA, 259 bp, Glycine max
  unsure (1)..(259): unsure at all n locations
tttctctattcattcagntttgctggcatttactcaaattataatcattcttgtacaagaatattcaaatgtttgaagtatcaggtttggattggccttcctggcaattattggctttctaattataatatttctagcatttctaattctttttctaaatcatcacaggtttgatagtgtaattgcacctggagatactgtgcacataatcggtcaattcgacctggggggaaattgtgatattgatcacaataaaaac

SEQ ID NO: 233128 - DNA, 392 bp, Glycine max
  unsure (1)..(392): unsure at all n locations
gaatcaatcaaataatggtcaacaagaatcaactntcatacccatcaaaatgctcaacgagtacatccttcttatcctcattgttagaaacatgttgtcaaggtgaattgtaaatgtttatgttcaaatagttgttacttgtgatgcacacgacatattgtgttaaaaattttttaagaaaatcttatatattcgtattgattataattataatttataagcttatatatctaaacacaacttttgaagaaaaaaacacaactactcagacgacagattatcactaataaaatngagcatgacaagaagttaattatatatattaagtgctttatatcaatgtataaattaattaaaatatttataataataatttagatataatgctagta

SEQ ID NO: 233129 - DNA, 293 bp, Glycine max
  unsure (1)..(293): unsure at all n locations
aattgcttggggtaagatgctttataaagtatatactttagtgacaatataaatgataggtcatactctttttaatatttgctcggtggaagccacttgcccaatgcccatgggctatgcctaaatatgttgttcaaatacataattcttttcttgaaccactttctttaaaacaacaattgtttgagacgtangatgcaatgaagctatgccaataaataaatattttaaaaaaagtaaaattcaaaaactatggaaaatatttgcaaaaatatgtatccaaaattttcttt

SEQ ID NO: 233130 - DNA, 391 bp, Glycine max
  unsure (1)..(391): unsure at all n locations
tatgtattttcgcttatatccactttctctctntttctctctttctctctctctctctctctctctctctctgtgggaggacccttgggcctcgaataccaagcatagcagtttcctacctagtaggaagttttcgtgcatttctttcgtgtttctcttgcctgtatcaacatgaaaattgaggacgtagaagataaggagttagtttttgcaaatgattgttgtactaagatgtgcttgaattatcctttgtgtctagtgggaaggtttctcacaaataaaacaatttgagtccatatcatgaaggagcaaatgatagatcgaggtttagagcccggtggagggatctcaatcatggaggcaggttatggagtggtcatctttcactttc

SEQ ID NO: 233131 - DNA, 189 bp, Glycine max
  unsure (1)..(189): unsure at all n locations
aaaaaaaagaactgatggntatatatatatatatatatncttatatatatatatttatatatatatatacccacacacggaacatcgntctgttggatgcgtacctgttccaatcaggttcatacttacgtgtattcttgtgcaacaataattagcatgcgtgaacctagncgcaatgtatatattatc

SEQ ID NO: 233132 - DNA, 339 bp, Glycine max
  unsure (1)..(339): unsure at all n locations
tttttttttccaacaacgccaaatatatcattctctgagattacccacagcccaagacatttatgagattgaaggcctcagtcgaccatctgatgaagatgataactgacataattgaatctgtcccaagttttatgaactcgtcaaatcgcaaggaacctnggaccctgctatcaacataaagaaatcagcaccttctattcttgtggcaaccacgagtctcatctaacttaatcactggataaaatacaattgggagtgacacatgacccacagatatgtccgactagctggtaacaaacaaacatgaatgcctccttcattcgaattcagggtcat

SEQ ID NO: 233133 - DNA, 416 bp, Glycine max
  unsure (1)..(416): unsure at all n locations
ctctatttgaaaatggatcttttactctgtgcctggcaagactgctgacccttncacctgatagttcatcgcatcaaatagacaaaatatatcataagatataagtctcaaagttcataaatagagagagccacacagtcaaaataagcaaactaaccatgaatgcaaaaacaaatattgaaataaataataccactattatgtgtagtgcagctttccaacttttgtacctaactgaaggagacttgtcaatcacttgagagcctgtagcagatgcaatactgtaattaatgaagcttcattgtgagaactgtggtaaaacctatagtgacagacaattagtcatcattatacgcctcctcaaagttgacggaagaaacgtccataggacaaagtctatcanacatttacctatg

SEQ ID NO: 233134 - DNA, 108 bp, Glycine max
ttaatggcacatgtggagggttttttttttaccaacggtaatatgtttggtacttgatttatttagaaaactatcccaagtcactttatagattactactacaatcta

SEQ ID NO: 233135 - DNA, 219 bp, Glycine max
gacgaaatatatatatatctatatctatatatatatgtatatatatatagatatatgtatatgtcacgaggatcaccggcataataaatatagtgttgcgataaatattgtgtatgggagggcacaaaaagaatgtgacgcgctatatatatatgggggggaggaaattgtttataaagagtacgagatatatgtatgtatatatatatatatatggaa

SEQ ID NO: 233136 - DNA, 251 bp, Glycine max
  unsure (1)..(251): unsure at all n locations
tggggtttttcttccatgccatatgtacaaattccttgatcctgtccagtttgatgaggctggaaaatgaggctgcaattatactatgccagttggagatgtatnttccccctgctntctttgacatcatgattcacttgattgtgcatctggtcagagaaatcaaatgttgtggtcttggttatttgcggtggatgtatctagttgagcgatacatgaagatcttaaaagggtatacaaagaatctatat

SEQ ID NO: 233137 - DNA, 276 bp, Glycine max
tgggcgcataaacccaccataccctgttgtctacttctactgagctcacggactctctacgtagcgcattatcctcgtttctctcaacaccggggtcccatcaatgctcccaagctttctcaacatccatagcaaaacaacattcacacagcacaagctatcacagccaagcaaaacagagcaaaggcgagaaactcttgccaaacaccaaccaaaaatcacagcttttcccactctaagaccccacgtacaattcctttgatccaaatcgtttac

SEQ ID NO: 233138 - DNA, 169 bp, Glycine max
  unsure (1)..(169): unsure at all n locations
tttttttctttttcagcttcaattacttggcttaaagcacttggcttcacttctttttagataacagcacccacacttttattttgaatacttacagtttttttttgaacaacaactctntacttgctgcatattgacttactgggggtgctgatattntcttaccatt

SEQ ID NO: 233139 - DNA, 330 bp, Glycine max
ctcccaagagagccatagatttttgtttgacttgggttgagactgaaacttgtgctttcttacagcggtaggctgtgtatatatatatatgactttttatatcaggctgattttttaagattaaaattcgcatgccatgctttctgtatgtgttgcaactacccaatcacgtgacatgcttatcttgattaatctgatgtgagcatgcttgagggttcttcccgcttatgttatgcaacacatttctattcacgatttcaaatgtgtagcaactcgaaacgattatatactgctttttaaaatagaattatttgttggacgtacaattaa

SEQ ID NO: 233140 - DNA, 141 bp, Glycine max
atttcttggggagccaaagcaaggtcacccttgcagctgcattccatctttaatgtctcacctccttcacatagatcaaccagacaaattctgcacacggcttcctcttcagcaatatcttcaccatcatcaccattttct

SEQ ID NO: 233141 - DNA, 191 bp, Glycine max
ataattcagtcattttcaaggggatcatcattttggtatcttccatggttgacgtgaatcaattcattggagagccatctttccaaaagcttggtatatacatgttgtatcataacggatagtttcataaataaagagactttcaggttagttttaagttacttttaggttttgccgctgaatttaacaac

SEQ ID NO: 233142 - DNA, 275 bp, Glycine max
aataaggcagaatcttcaaaatgaagaataatctctatcctttggtataacggatagaccaactttgcccaactgtcccctcttatgttatactgagagcattgatcattgaggcccactttaataaacttattgtcatgatatttgagctttcacttgcaccttcattggcttgactttgaaacttgttataaacaatatgggcgaagctatataagagcaattcccaatcttacaagtttgttttgaaggtgatttattgagcctttgaaact

SEQ ID NO: 233143 - DNA, 122 bp, Glycine max
acataagtctgaactggacctatgctgtgcctatttgatcatagaccttggtctcaataaatactatatatatttgtgataaaaaattatgggaaaatgacctaaagttagcttacaagact

SEQ ID NO: 233144 - DNA, 226 bp, Glycine max
tataggtttaaagcaacaatgtggattttaagaataggaaagaagcccccattattggttgccttcggcactcatctaacaccatgaattccttttgaaactttcaatgacccagcacctctggtaaatctcataaaacctgcctaaatttttaaaaaaaaaatttttaaaaaatcatgagtctacctaaaatgtggtgcaatgtaaacttgataatttgaaattt

SEQ ID NO: 233145 - DNA, 405 bp, Glycine max
  unsure (1)..(405): unsure at all n locations
tacgcaaaaataacaccatccaagcaaacttaactgagtaaagactagttctctcctttttccataccaatatgtcctcctcactcagaatccaattaatacttctaaagtcatgaccttcttttatctaagcaaattactatatctatttctcctaatgatatagagatttctccattcccatctccacaatcaatttccctcccaccggtcacctaaacctaacaccctggcttttatggctactacaaggctgtataatctagtatactncctatatgtgaaaataaagcactttcacccaaaggtcttgagaaaataaaagtatcctctaaccccccaacccccacccaccttctaacaaactcagatgccagagtctttctttcctctcatagttactct

SEQ ID NO: 233146 - DNA, 125 bp, Glycine max
  unsure (1)..(125): unsure at all n locations
cctttttcattctctattaatcataattgaaatacatagggtattggttctattgtacccttgaaaaatntggacaantaaagtgctctgaatgcttaaaaatttttgaacctttaattggtaaa

SEQ ID NO: 233147 - DNA, 238 bp, Glycine max
ttacacacctggcaagatttttctgcctctaaggcagaggcccaatcttgatgcctatttgacttcatttctttggagataacatgtggagagaactggtttcttgaagtgtccataggtaacagctgtcctttgatctgctgccctttcatagaacttcactcttctcatttggcaccaagcattctgactttgtgagtttacattgaatccttcatcacacaactgactgatgctg

SEQ ID NO: 233148 - DNA, 160 bp, Glycine max
ataaatatggttgacatatttttcggttggtccaaaacttcccaatggtaacttaactgatcaaagcttgagatcatgttgcttaacaaccatgcctgtatgaattcaagtttatataaccttttttttttaactggtttgtagtaagaaggcgatcaaa

SEQ ID NO: 233149 - DNA, 471 bp, Glycine max
  unsure (1)..(471): unsure at all n locations
tttgagcgtctagatatattacgggtatatatctgacatccgagcaaaaaggtattggcatttgaattntgtgtattcattttttagcatcaagaattattaaatgactcaatcggacatccgagtaaaaagttattgtcgtttgaatttgctgacagcttttgtattcaatttcgagagtctcgaattattaaatgactcaatcggacatccgagtaaaaagttattgtcatttgaatnttcttagagcttttgatttcaatttcgagcatctagaattattaaaggactcaatcggacatccgagtaaatagttatggtcattngaatttgcttagagttactgttctcaatttcgtgcgtctcgatatactataggactcaatcggactttacagtaaaaagttattgtcatttgaatntgttgagagcttctatattcaaatttcgagcgtctctgattattaaagg

SEQ ID NO: 233150 - DNA, 184 bp, Glycine max
tttttaattcattttatgtacccgcggtggtcacattttgtttcatgtatttttattctcggtttcatttactttttatacccccttttgacgtgcttaagccatttatttaagtcattcctcgcttaatctaaaataaaataaattccaccgatcgtttgaatggatcatccggtaatttggt

SEQ ID NO: 233151 - DNA, 453 bp, Glycine max
  unsure (1)..(453): unsure at all n locations
ctatgcttcttgaatgtggttttccatgaggaatctccttggaaaagacatctttaaattcctgcaataagggttgaacactaggagaaacataaatagttaactgattagaattatcactctctctcttttgtgtatcactcttttcctcgggtgtatcactcttctttttcatattcctttgtggagcctcactatattctttctcttggtctctcttttctctcattctgatttggtcatcacacacttctctaggggatagaggtttaagagtaaacaaggaagatttgactattcgtctgtacggctcttctttgttacggntcaacaaacgttgcatttgtgttagccatgcgtccagaaataaacgctgagaatcgtccagttgatgatatacaccaccattgtcaccagctcttgccatgattaaggaacaaagaaatttgcagt

SEQ ID NO: 233152 - DNA, 226 bp, Glycine max
gcagaatacccttcgcattgacaataatgaccattccaggtaacctcccacttttgtccgccacgctgcgtaataagaatgaaggtctcctctacttcaaaccctgtggagtggatatcacacacgccaacgatgtgcgaacaagcttgttttttatttttcctaagttctttaacaagctttgaacaatatacttgtccttcatttaactgtggttgggcttggc

SEQ ID NO: 233153 - DNA, 392 bp, Glycine max
taccaatctagtgagatcatccacaattgtaagaaaatacttgtgtccattcaaagaatttgtggcacaaaggccccaaatatctatatgtttcaaagagaaaggattataagtattggaattattattgggagatgaagatttctctgctttgctctatggcaagtatcatagacaaaggttttatcacaagtcaatgtatgataagtttgtttaacaattgtggcctatcatatgaatgatgacctaaaggaatatgccaaacatcaatgagttcttattacaagacaacatagacttaaccaaattgaattgttgcttgatacctgtaaaattgagctaattgatacccattttggctaacatgaaataattccttactttattttttt

SEQ ID NO: 233154 - DNA, 227 bp, Glycine max
taaaacattttttttgttttctaacacaaaacaatgggtatgtatattataaataatccacacatcttctctatatatatatacaagcggcgtgaatggcccctggaaaaaaaatagagagagaactttaaatttgaaaagaaaaaagaaattttcttgaatttttattttccgcctcaaatttgtcattttatctaccacaaaaaggatgcctatggttctccctc

SEQ ID NO: 233155 - DNA, 395 bp, Glycine max
caccaacaacagaaatcctctttctcaccttatcatcatatactctagccttgagtgcaccaaagaaatatgcaatcataaattgcataccattagtcttattgtaatgtaaggacatctaagagctaaatgacacctagagaaatgtgtaggcatcgtatcggagacccgtatcggagacgtctggatgccctgactgtgactgacgtgtgctggatgccctatgctgagcaccgaggagtcaggggttttgacttgatatcgtcgtacaccggccagctcagatggggtcagattgtcatgtatgttcgacctgagcgggttcttcgtacagttggctacctttagacggtcccttcgccgccggtttatgattctttgacgggtgattatat

SEQ ID NO: 233156 - DNA, 173 bp, Glycine max
  unsure (1)..(173): unsure at all n locations
aagtttacacacacacgtaaataaaaaaaaatccaattttatggccaatccatttacaccaacaacgaataaaaaaaaccatgattcatgaagaaatgaaccanaaccagtattgttgctaactacataataaaaacacgtattgtgggtccagagtttgctggaatctgaca

SEQ ID NO: 233157 - DNA, 187 bp, Glycine max
gacatgccgaaaaccaaaaaatattgatgcacaattccgaagtttccgtgacacaccggaaatcaaatggaagcatcgttgcataattaagtgaaggtccgtaacattccgtaagtcaaaaaagggatgattatgtaatccgcaaagttccgtaacattacggaaagaaaacaagtatcgtaccaaa

SEQ ID NO: 233158 - DNA, 454 bp, Glycine max
  unsure (1)..(454): unsure at all n locations
aattcgcgctgttactgcttatacaaagaggaccgaaacaaaaagccaaatggatcaaatccaaaatctgtcagagattaatcatcaaaagaaacataaattgatgctaaatatagttatcatgatgcttaatatgaagcgaaagagaaacataaattgatggagttatgactcaagcatccggtgacaaagacaataaattgaataaaaaacaaactgaaacaaaaacaaatttttatccatgtggtatcaaatggagggaacgtcttggttaatgtaaaaggaaatatactaaccgaacaaaaaaagttatcatatgaattcacggatattgagagccttcttgagagggttggtgttccatgcctncatagtaattgatgaaattgagagcctttntgcattcgatgttgatctgattatatgaattgaagaatgaaagtggtgtgagtat

SEQ ID NO: 233159 - DNA, 222 bp, Glycine max
  unsure (1)..(222): unsure at all n locations
ggagaaaagaaacagaatatttattggagnttccctgtattctgagtcagaatcattaagaatggggaggattaaagatatcccattggctgccaaaactgccttcttcactaaaccagtctcaaacttacaaattccaagaagagcacgtaatgcaagctttctgtagtgagctgagnttgaccctgagttagagctagcaaattggtgatgatgttttct

SEQ ID NO: 233160 - DNA, 344 bp, Glycine max
  unsure (1)..(344): unsure at all n locations
gcttatgctgcaaacatttataatagacttctctatctgcaaaccaacaacaacagaataattatgacctttcaagcaatagatacaatccaggttggaggaatcatccaaatctaagatgggcaagtcctccacaataacaacagtctgtcgctcctttccaaaatgttgctggtccaagcaagtcttatgttcctcctccaatgcagcaacaacagtagtcacaacaaagacaacaagcaactgaggctcctcctcaaccttcttagaagagttattgaggcaaatgaccatccagaatatgcaattntatcaagagacaagagcctccattcagagtctga

SEQ ID NO: 233161 - DNA, 236 bp, Glycine max
  unsure (1)..(236): unsure at all n locations
tcaagcncgcacagaaacaatcatcaaacttttacaagagaagcttgagcacctttagggatcggacacatccatatggatctaaataaaagagccagaatggtgtgaagggctttctctatgaaatatcagcggaagacaagtacattcattgggtgaaactccatgacatatgagacattttcctctgcttttagttcaactgaatcttctggtgaagacactgaagcattaag

SEQ ID NO: 233162 - DNA, 374 bp, Glycine max
  unsure (1)..(374): unsure at all n locations
gcttaccactgtccggatactccatgttcttgctgttcttcataacnggcaccttcgacaactggatgtatacaatgctttccttcatggggatcttaatgaagaggtttatatgaagctccctccaggacttgttgtggataatcccaaccttgtttgtcgccttcagcgttccttatatgggctcaaacaagccagtcgccaatggttcacacggctttcgtcatttcttctctcccagggatttcgtcaatcctcagttgatcactcgcttttattatattctgataatgataatgatataacagctattcttgtttatgttgacgacatcatcttgacaggaaataatctcgagactatagcacatgtta

SEQ ID NO: 233163 - DNA, 458 bp, Glycine max
  unsure (1)..(458): unsure at all n locations
taaagtttagtaagttttagtttgaggagcactattagtattatcttatggatattgcagacgattcctaaacactctatggggtgttgtatatgtttaaggtggttaaaatcaagacttttcatcatattggcttccaaagtccaaactgtggaaagtggctccccttcatagacccacctaattacatcctcttggaaactcccaaatactgtcttgaatgatgtcaatacaatttaattttctttgctgtcatcaattaatttatccttacacctttcagtttaagtatggacgtctactttatggcttcgcatctctgttntcatgctttgttctgtgcaggattcgtgctngataatgaagaccgaactgttacacgatctgatttgtacttcaaagagctatattctcgttgtggattacatgtttacaaatcaaggtaaatcgcacatgct

SEQ ID NO: 233164 - DNA, 410 bp, Glycine max
  unsure (1)..(410): unsure at all n locations
gcttctagccaaatggacttaccttgaattaattcctttgatagccctttngagccctgtttccctttccttggtttgaagctcactacatgccttaagtgaaaaaccatgatattaccatatccttaaggaattttggagctttggaattgttttgggaataagtgtggggggtttttgtttcattggacaacttgttctgttggctatgcttcatgatgtattttgggccatacttgatgtacattgtatattggttaaatgttggacatgttgaatgaaatgttgtctttcaaaggctaaagagttaaacaaaaaaaaatcgtaaaaagaaaaagaaaagcactcaagttgagtgaataacatcttaaatggcacaagaatgatgaaactcttggttctactcttca

SEQ ID NO: 233165 - DNA, 398 bp, Glycine max
attggcttcgcaggaaggatcgagttttcttaaaaataaggcaatttgatcatgctactaggacgactgagaaaactggggcaaattaagagggtgaggataaaggagaaacccatgttgtgactgccattcctgtacgaccaagttttccaccaacccaacaatatctttactcagccaataacgaaccttcttcttacccaccacccaggtatccacaaaggccatccctaaattctaccacaaagtctgtctaccgcactgtcaatgacgaacactcaccttagcacaaaccaaaaacaccaaccaagaagtgaatcttgcagcgagaaagcctgttgaattcaccccaattccaatgtgccatgctgacttggtccctatctacttgataattc

SEQ ID NO: 233166 - DNA, 459 bp, Glycine max
agcttccatcattaggcttgcaaaatcatagttgtttggtactcgaatgggcaccggagtgaaagtttggaagtaaaccctactatcattgggaataatcgatccattaggaaaaatgaaacccaaccttgagttgacaatcgttgactgctagtttctcttaaaatgccatactttgtgtatcaattgggagagtatgtgaaagcaagataatgtgtgatttattagcgtttgccgtgtctcatatatatacacggttctcaccgacatattgcttcactttttttttacaaaagaacacgcgtgaacatgtttcgtttttatgtttcctactaaaccaatgtcgcgcatcagaatgtgttgtcaaggcagtccatgtcgtgtcacgctcaaactttatatgcatgcatattactatgtgttgcaatcatgacaatgttgtatcgacatgcgtaattg

SEQ ID NO: 233167 - DNA, 437 bp, Glycine max
  unsure (1)..(437): unsure at all n locations
cttgatctagcttgaaatgatttatcaaagtagtcggtatttttctacaacttccncaatntatagtttttgcttgttctcaagcaaagaaacaacagttcatttgtctttaagtgacaaagacagtggccaatcataaaaaaatcatgtttgattcatcaaggatatcaaccatatgaactgaatatcatggaatgcttaaatcaatcacttctcacaagcatgcagtgtttcaaagataggagcacaagtattagagtcacagctgaaataagctagtaagcatgacagaaatcaaggaagaatcattaacccaaacctcacagtcattgtttcactcaaactcaagtgtttaggcttattctatcataaacaaccaacacaagttccaacctgtgcatttattctcatattaacaacaacggacacacaaaaat

SEQ ID NO: 233168 - DNA, 389 bp, Glycine max
  unsure (1)..(389): unsure at all n locations
acttgttctttcacataaaagaaaagcgngctatatcttttcattctcttctccctttgccaaaaagaattcaacaagtactaatcgcctgaattctttttgtgtctctcttctcccttttgaaaaagaacaaaggactatccgcctgaattcttttatgtctcccttctcccttttcaaagaattcaataagacacagccttagaattcttttgattcttccctttcccttaaacaaaagatttcaaaggactaaccgcctgagatatcttttgtttcccctttacaaagtttcaaaggactaaccgcctgagaactctgtcttaacacattggagggtacatcctttgtggtacaagtagagggtgcatctacttgtgttgttgcaa

SEQ ID NO: 233169 - DNA, 386 bp, Glycine max
ggctcgtccttagtcacgggaagccggaaggtccatatcaccttcttaattgtacacatggggcactgcgcccccaaatgcacaagtaagaagagataattttcccggctctcgtgtccgtaaaatgcattcatatcatgcatcgcataagcatctcttcataacatcataatggacatatcctgcatttgtccgttatcatattccagcctcatattttgcatgagtcatggcatcatcatgcatatgcgttcaacaaactttttgatctgcaaattgcataccattgttttattgttgctcatctggcgttttctctcaaacaaatacaaaaaagggaagcgtgaacttcacactacttcttagttcatgtgtaagcccaccac

SEQ ID NO: 233170 - DNA, 457 bp, Glycine max
  unsure (1)..(457): unsure at all n locations
tgttccacctaaatagcataggatcgtgattggttatttgtctangctatggntgctaattcgttaatctctcccacacccaagtttggaccaagtagtaaaagggtgaccaaagagttaactacaattccaattcttcattaccagtcaaataaactattgttttcttctatagaccaaaatncatttatatgttggataaaaatgttggtcacaaagctgattctctccatcaagatgaacaacaataaggaaaacaaactttctcaccaatgcaattttttagctgtgaccacattgtcaacaaattatttatataaatacatacgatctgtatgtctatcaaattgatataatgtatcaatatttaaaactcaaaatacaaatctaaattgagataaactaaatttaaacaatagggagaaataaaaaacttaataataaattagtgtgacat

SEQ ID NO: 233171 - DNA, 447 bp, Glycine max
  unsure (1)..(447): unsure at all n locations
agctttttggagtagaaacacgggaccatctcattttatttcagaaagtcgtatctagtcaatgtctgagagaccatacaagtttcctagcaatttctaattatgtgggccattaagtctatcatatgctgacaatagccgagaagcccatgaatttcttcgggggcagagtaggtgtccgccattgccttggccttggctaacaatcggggaagttcttgactcccgttcaaggtaagagcaaaccgatccatccacatggttgcctcttggtgtaaagagtcgatcacccttcctctagcctctttntccgcgtatacttgggcatactcgtccgcgaccctatgctcgtgggccgtggtagacctaactcttcttggtacttggcgatgataactagcatgttggtctccgtctcgcataaacgctaagacaaagctcttttgg

SEQ ID NO: 233172 - DNA, 435 bp, Glycine max
  unsure (1)..(435): unsure at all n locations
ntgagccaaaatcctgactcaccataaaccttgacccatngtgagaatgccaatccttaccctcggaagcaaaaaaaaagaggaggaggaaaatttccaatcaaagaggaagcaaaaaaaaggagagaaggaaaatttccaatcaaaggaaaaagagaggaaaggaaattcccaatcaaagagtgggagaaagcaaaaagaaaagaaagaaaaattctcaatcaaagaatgggagaaagaaaaaaagagaagtaaaaaagaagaaagctcctggtcgaagaaaccagaagaaatgtgccgagaggtccttggaccagacgatgtctgaacaatacagaattgtcaccaaatgaacaaaagaaagaaaaggaaaccatgacctanaagtggtcttctccctttaattaccaaccaaaatcctgtgcgctagcaact

SEQ ID NO: 233173 - DNA, 435 bp, Glycine max
  unsure (1)..(435): unsure at all n locations
agcttgcanactgtacctccgaccgaactctgnttggtttctatcctggcccaagtttatcgtgggctgaagcactggttccgcttccctaactgcattggaggcggttgccgnggcattatcctctagagttttctggagttttagcatggcctccgtgatagaagccatttgatcttttaaggccgatagatcggccttcatctgctcttgcacgccctcttcattatccattnttctggattgagtgttataggggtgcctttgtgcattcttagttatggtgaactccctaaagaaacatacaacggtgagtatgccaccaaaacatgaatatgcaaatgaatgatcggagcacttggatccaccccaagggttttttagataatgtgatgagctcagaacttctcattttataaaagaacgaagctttca

SEQ ID NO: 233174 - DNA, 443 bp, Glycine max
tcttcttcaccacccacaaccacgagtagccactacgttctcgtcgtagttctccgttgaaaccccacaccgagaggaacccttcaatcggagcagaatctgttaaacttgtctcgcggttttggtagagaacgaagctcaatctgaacttcgtggttttcttcaaggtaactgtgattctacacttgttccttgttagattcagcttgtctttgcatcttttcttactttggaaccaccattgtatgtttttatgcttcctttgaaaaaccctatagaaagagactttgttaaagttatctttttatgaaatgggtgttattttcgtaactcttactaaaccctgatcacatttgcatgatcagaattacaaaatgatatttcttttgtgaatccaaattcccttaccttttcttgattgcatgagttttgactaagtattg

SEQ ID NO: 233175 - DNA, 238 bp, Glycine max
  unsure (1)..(238): unsure at all n locations
agcttcaatgaaggaagagaatgagagatatatagtgatgcaatcctaccctctaagggcatgggntanannactccccnangattgggcctcacatgcaagagaagggcctatggctcttaagagccttaatgtccgattcaggcccatgacatgggctaagtatcaaccccttatctatgtatattacactaaggccttattatttctggcgccggtatttaaggttccaaaaaat

SEQ ID NO: 233176 - DNA, 408 bp, Glycine max
actacttacatggctcatcctctagaagacggtgccttatctcaccactcaaccattaactttcgctgcaactccatgggcgaaaatcaccaaagagagaccttattgaagctcatagacccagactccatagaaactgttcaagaaagcatacatcaaggttatacgtagacaatgctaaaaaatgatagctgactcaattggaaacccaagattgcttaccagacctttaagtcagatcccatcctttattgctaatattaaagcatgcattctacctttgtagaggataaaaccacaatgggctaaagagttaacttcaaactatgaagagagttgccaatgatgaatgcgtacctaggcatagttctgcttgcatacaaaactacagcatagtcaaaatctaaa

SEQ ID NO: 233177 - DNA, 395 bp, Glycine max
agcttattatccaaggctcatcttggtgtttaagctccttcttccatggcttattccctattggttggcgcctcctctcacctcttttcctttgtcttccgctgcatctccatggtggaaaatcaacattaaaggacctcattgaagctcaaatatgcagcctccatagaagccccacaagcaagcttccatcaagtggtatcagagcacaagagcttcaagtaggtgctccttaaacctccattaattatttgctttaccttttcttccattggtgattcttcattattttctccatgtatctcctcacatgtcttgggctaaatgttgttaacatgattctttaaagttctcaccgattaaacttgctataaaagctagaatttgatttctat

SEQ ID NO: 233178 - DNA, 378 bp, Glycine max
actaacccgcggagtcgattgtgtcttatttatttattcaatgcttatctccagatcatgtctattcttacagagtctatgtcgtgccccacgaatgcagagtgtgttctgaagcgaggtataataatagtacgcaagaatcttgtctttaaccataaaaaaaagggtcaattagaataataataatgattataattataagtatagaagtaatgaacaggtcaaaattgagtgtggtgccataagagcacctctctatgcttgttattcgattgaaaaagcaaccccagaacatttcgcagactcttgatgaaatctggcggatcttggcatcagactgttagatttcattggtagcattacgtatccttggcgacc

SEQ ID NO: 233179 - DNA, 447 bp, Glycine max
  unsure (1)..(447): unsure at all n locations
agcttcacttgtccagaagcaccttcaaagattccagagcctcctgtaactgccagatatgtgtcttggaatgtgagataggctccttgcactgatatgtggccatagtttccaaagtagaagctgtaaatggcctcatatctatcaccctttntctcaggctcatgctggatgagcacacacaagcctgcagttatccctagtctcttttgcaagtctccagagtatatcttgttgctgaatggcactaagtctcctagagagttaactggcttctggcttagcctaaggtatgcaggacttcctcggtcgcgttcgttgatctcgtagacaaagagttcttgaactttggctagataaataatgaacaaattcatgaataaggaatgctatagctctgtgtaagttatgggtagagaatgatactannagagggtttctaatatg

SEQ ID NO: 233180 - DNA, 430 bp, Glycine max
  unsure (1)..(430): unsure at all n locations
ttccgcaagacatatgggaaaatctgggactngactatgatataagttntcgtggaagtcatcgcatccttcactcagtactatgaccagccgctaaggtgcttcacanttgnggactttcagttggtaccaaccgtagaagagtttgaagggatcttgggatgctcgctaggaggaaggaagtcgtatctgttttctgggttttacccctccatggcaagagtagcaaaggtggtcaagatctcggtgcaagaattggaacgagtgaaacaaaatagaaatggggtggttgggataccaaagaagcgcttggaagagaaagcgaaagctntggcggatcaaggagagtggacttctttcattgatgttttagcactattggtgtttggggtcgtcctctttccaaatgtggatgggctaatggatctag

SEQ ID NO: 233181 - DNA, 465 bp, Glycine max
gcttgctatcattaaacaatagttccaataattttgatgcaaaatggtaacactaactgcttttcttgttgcaatctttgctaacccgcggctagttaaatgcttgtccacaacctattcttgaaagtcatggttgtaatcatgaatacttttaaatataataaaagtagtagcaaattaagttactcttggatgtacaattactttccaaccttctattttcctcaaccaagataagaatatgatgtggttatatacaaacacagttatcttggaagcctttgaggaaaaatctaaaacatgaagcaaggtagcaatgtccttcaaaaggacattaaacaatgagtaacataaagagacaaaaaaaggattccatattttttgaatcaatttaccacagttacataattagtttcattatctagcactatgtgaacaacattctcagcttcaacccactcaata

SEQ ID NO: 233182 - DNA, 405 bp, Glycine max
  unsure (1)..(405): unsure at all n locations
ngacgaaatcatcatcccaagccttgagttcatcctctctcttgttctcatcaatgtaattcgcctcaacgtgtttcttgcaatacttgataacattcaccagaatcttgctggtaacattgggaagaggaatttcgccgtcggcgcagttgtcctcgatcatgtgctcgatcgtctgcaactccatcgccaccacctccttcacctcgaaggcctttctgtccaaactctatagtgttatcatcttcgtcaaagccatctcaatctctctccaaaaaaactcttttattgattcagtgcgttttgcttctcaagtgagtgaatgattctgtttgttgaggtacaaggtgtgcctggctcctccgttattttaatccactgaggcaaaggaattgattgtctgga

SEQ ID NO: 233183 - DNA, 464 bp, Glycine max
  unsure (1)..(464): unsure at all n locations
agcttatgctgcanatatatacaatagatctcctcatcctcatcagcaaaatcaaccacagcagaacaattatgacctctccagcaacagatataaccctggatggaggaatcaccctaacctcagatggtccagccctcagcaacaacaacagcagcctgctccttccttccaaaatgctgctggcccaagcagaccatacattcctccaccaatccaacaacagcaacaaccccagaaacaaccaacagttgaggcccctccacaaccttccctcgaagaacttgtgaggcaaatgactatgcagaacatgcagtttcagcaatagactagagcctccattcaaagcttaaccaatcagatgggacaattggctacccaattgaatcaacaacaatcccagaattctgacaagctaccttctcaagctgtccaaaatcccaaaaatgtcagtgccatttcat

SEQ ID NO: 233184 - DNA, 426 bp, Glycine max
  unsure (1)..(426): unsure at all n locations
tcgacctacacttaagtgtgtgtcatgctcaagctggctcacttcacgcttaagcttgaaatccatgcactagctcantttttctttgcatgtcatctcacttaagcctagtccaaccttctcttaagtatggctcaacctatgcttaagcttggctccacctacacttaagcttgaaaactagtagtccattttcccttgcaggttatcatacaaaagaatgacaaatccataagattaaaacctaatttacccttgtttgtacaagaaaagactaagactcaaagtagtgattcaaagaaatctcaacccttatatacacatttcaaagctctcaaggaatcttcaatagatctttcttcttttggaacaagtacaatcacctctttagtgatcatcatagcttttacatccaatcttcattat

SEQ ID NO: 233185 - DNA, 443 bp, Glycine max
  unsure (1)..(443): unsure at all n locations
agctngagatgaggaagtgttgaagggtgaaactttctgcttttattgttgaccacagagtggtacctggagatatgtcgcgggggtcaggagaccttggggacgtcaggtggggtgctattgcccaaaaccaagcttgaccaatcccgacccaacccggacatagtcggtcagcgagaacctgtgatgtacctaagcaggcgagctcctggcagtcaacagataaaaggaaaaacaagaccacaaagcaaggaggcttgtggtggctggccagttgtgaattttgtgtaatatgtggattctggcctctggtaatcgattaccaaggttgggtaatcgattacaaggcttgaaattgaagacaggaggctaagatggtctctggtaatcgattaccactgggtgtaatcgaataccaggcttgaaaaacaagtcaggaaact

SEQ ID NO: 233186 - DNA, 395 bp, Glycine max
  unsure (1)..(395): unsure at all n locations
tactcctacttccatagaatgctgcagcctttgtctaactcgctgnctcagaaaggtatgcttttcaacacgtgtccattgcaccatttctttgcagagtggtaattgtagatcagtagtccctggtatttttgcaacaaaatcaattatgcccctcactatctttgctgtttttgccttaggaatcaaggaaaagaagggcctcaactgagtaagaaggctatgcagatcctctgccctattttgttccctgagatgctcagtgaggtttgtgatggcctgttctttcatgcgcagagcatctggagaagaagaaggataatcaagtacctgataaagaatggagatggactcggatgggtctttggcatccactgccagatcaagtgactctg

SEQ ID NO: 233187 - DNA, 468 bp, Glycine max
  unsure (1)..(468): unsure at all n locations
agctntgcgaaaagcttgccgctggagctgacccatcaactgccctaactccttaaggctggtgacatctaggcccttaatcttgacttgatagaatctttttccgatttgatttgtccccatcatttacctaaaaaggggtgaatcaaggctctgatatgaatgatgcaatgcacatgcatgaaacgaaaagaagaaaaacaagtggtaatttacatatacgagaccgaaaaagatccatctttttaatactacactctaggcattgcggcgctccaacatatgtattaaaaagtgacgcgttactctaaagagacaagatatcactagatatacatcaaaactataatttatgtgctattcgcagaagaatgcatgagaacaaatggtacagagtgtgcttgctccatgcccctatttggggacctataggataatatctangggtctctaataactactcccaac

SEQ ID NO: 233188 - DNA, 476 bp, Glycine max
  unsure (1)..(476): unsure at all n locations
cgatactatagacaactcaagctttaagagcaattcccttctttntcttatcattgtcttcgtgtttatttagtctcaatagttccatttcgtgttcctataactttccaaatagtgtagcaagagacatgttagataaattacgtgattcagtaatggctgttaccttaggttgccattctctgcttaaacatctcaatactttatttatgagatcttcattttgaaaatttttccctaaggatgcaagatgatttactatgtgtgtgaacctcttttgcatgtcttgtatactttcatttgcattcatcctaaatagttcatatttatgagttaatgtgtttatcctagatcttttaacatctgttgtggcttcatgtgttacttgtagggtatcccacatatcctttgcacttttacagttngataccctaaagtattcatccattcctatggcagatgtaattatagttttg

SEQ ID NO: 233189 - DNA, 449 bp, Glycine max
  unsure (1)..(449): unsure at all n locations
agcttgtgtctcactttcaacatctcgattataatatatagctgcaggaagttgttgtactcaaagtttctagatgaagcaacaactataagactttggagtaaaccttgatcacattcctctaaaatatgacaacacaagtgctatcaacctaacaaaaaaccatgtcatgcattctaggactaagcacatagaaataaggcatcattttcttagagatcatgtgttaaaaggagactactgcttttgagtttcttgatagtcagcatcaactaccagactttttcactaaaactcttgctagagataggttctttttcattagaaatgaactaggcatattggatgcatctagcataggataaattgtttgtttgcatagtgtatgattcatattgatactcatatcatttgnttctggttagttcgagtctcaattatggatttat

SEQ ID NO: 233190 - DNA, 441 bp, Glycine max
  unsure (1)..(441): unsure at all n locations
tcatctaactggttgatcatccaatgcaaccttctattactagtccatttcggcattntcaaaccacttctagttatgctcgtgatcaaggactcaatttccacattcatattgctcttgcatacagtttcctcatgattgcagtagtaggttcggacgctttcaagccagaggatgacattatttcttgtggcactatcacttgtcagctctcccacaatatttggtaagggcacggatattccagaattagaggacaggaatcacctccagaaagcaaagataagaaattagaatagctgaaattctcattaccttccttttgattcattacatatatatatagtgcttgaaatgaagaagataaacactaatcctaacagtcttgccggcaagcatgggacatgccaaaactaattactantcttggggacaagcaaa

SEQ ID NO: 233191 - DNA, 388 bp, Glycine max
  unsure (1)..(388): unsure at all n locations
agcttatgcaggcaaagttcataatgagtatagtgggaaaaatgaagttcttcctttgacttcaaatcaagcaagcagacaaaggcatatacattaagccaagtatgtaaaggaacttctgaagaagtttaagatggacaatgctaagcaaatgaaaactcctatgcatacaaccactgtacttggattggacgatgaatcgaagaagatggaagaaagacatacaaaggaatgataagatctcttctatatctcacgacatctagacctgacataatgttcagtgtatgtctctgtgccaaattccaaaagaaaccaagggaagttcatctatctgcggtcaaacatatatttagatatcntgatggaactcttaacctttgtaaca

SEQ ID NO: 233192 - DNA, 455 bp, Glycine max
  unsure (1)..(455): unsure at all n locations
tggcattgattctaataagattaatcccctgtttactatattcttaccagcccattntttagatgtatttacaatagttttcatatgtaatatgatttaaagaaaacaaaagttatgtatatatgtgattgtattataatgatttagttattgttgcgtttgattttgtttggatcagactcttgaggcattttcagccccaacagggaaaaccagcactatgggagctagattcagatcaacattacactgtcaagtttcatggtctgtatttagcaagtgatagcattagataaagagtggattattgagttgcaccagtacgtttttgtccttttcatttaatgaagcattaaatatttaattntcaagaatttaattggtgtatatgaacttttcatantttgacaaatttcagntgtatacctttttatttaaatctgtctttaactttg

SEQ ID NO: 233193 - DNA, 442 bp, Glycine max
agcttgacagtctttgtgatcttatttggtatatttctatccctatcacatagcttgcctcacccatatctttcatttcaaagttgctagagagaaacttcttagtctcatgaagaagaccaagatcattagcaagatatcatcaacatacataattagatagataaccttactcccactgaccttcaaatatatgcaccgatcaacagtattttccttaaatccaaaggaaacaatggtatcattaaacttgaaataccattggcgggaaacttgcttaagactatatattgatttctttaatttgcacattttgtattcctttccttcaactaagagtcccattggttggtccatataaacattctcctccaaatctccattaagaaagacagttttcacatccatctgatgtagctccaagtcataatgggctactaat

SEQ ID NO: 233194 - DNA, 451 bp, Glycine max
  unsure (1)..(451): unsure at all n locations
nttattgattagactgttgctatcaacctanacactattgttaaggatacttgngtgtggggagctgcatgtaatgggatcttctctaccaaaagttatgcctctgtggtgggaattcaactcctgggttagggaggacagagttgttcattgtaggcccatggagaatttcctccagctctcctccatagcaggctcgaaggtttccaattgaagaaagaaaatatggtggatagcagctacaaggtcaatatggaagctccgcaatgatatcatctttcataatcaacctttccaatatgggaggactaagttggtggataacacaaattttctcacttcgtcctggctgaaggggcgggaaaaggactttaatgttcctttccatcaatggtcctcagctatgtctatgacttataattagagtgtgctctgtacggtcaggcttctg

SEQ ID NO: 233195 - DNA, 411 bp, Glycine max
agcttggaggattatggggtacccgtcatatgtggtactaggtggcgatcgggcgatggtgcatatcaactctccacatccacaaatcacacatgaacccaccatcctcagttgcccacctataactaagctcacgtactcccatgtagcccttatcctcgttcctctcagcaccgggtccccattaatccctccaagcttcaacaacatccaagcaattcaatatccaaacatcatgaaccatccaaaaccaaaaaaacagggcagaggcagaaaactctgcccaaaacacattccaataccacagctttccttacccaaataccccagtaacattctctttattccgattcgttcaccgttggatcgactcgaacattccactagaggtccctaggacataaatctaca

SEQ ID NO: 233196 - DNA, 420 bp, Glycine max
  unsure (1)..(420): unsure at all n locations
ctgatgtgagaaacatggaagagtcagtcgtcctacttttgtttgttgaccacagagtggtacctggagatatgtcgcgggggtcaggagaccttggggacgtcaggtggggtgctattgcccaaaaccaagcttggctaatcccgacccaacccaggcatagtcagtcagtgagaacctgtgacgtacctaagcaggcgagctcctgacagtcaaccaataaaagaacaaagtccacgaagcaaggaggcttgtgtggtggctgaccagctatntatcttaggtgttatctgaaaattaccctctggtaatcgattaccattcgtgggtaatcgattacagggtttaaaaaaatggagacaggatgctaagtagcttctggcatcgattaccaattgggtgtatcgattacacaatatg

SEQ ID NO: 233197 - DNA, 297 bp, Glycine max
  unsure (1)..(297): unsure at all n locations
agcttggtgacgaactatgtatggcanatcttcattgttgttattcagtatacacaaataagcttattacaaatcttctagacttgggctgataacatgcagtcctcttaaacccttacctcccactttttcgtcatgccaaggctccagaaccccaacaggttttgcctatttgatgtactcggaataaacctcaatagcttcttccgcaatgtacctttcaacaatagatacttcaggacagtgtagattctttgtatacccttttaaaatctccatgtattgctcaatcgggta

SEQ ID NO: 233198 - DNA, 403 bp, Glycine max
  unsure (1)..(403): unsure at all n locations
tgtanngtattgggaagtatgttgtatgactcatccctattaccgtatacttgctcgagggcccattggttttctagccatgctttacgatatgtgatgatgtatccgaactcttgtctaacaaatgcgatgaatgttggaaaggttagttgctcattttcttcaactatcgcaaggatatttttgcctacaagttttgaatccatcttattgtgatcttgtgaaatggttggcatgacgcatgtgtgaggcccttctatcattctaatttcccaaacttttagattttttctttcggacactctaagtctccattggcacacatcagttgggcaacataagacccatgtatccttcacacacctcttgtgtttgaaagtgacatggttcttaacgtgcgata

SEQ ID NO: 233199 - DNA, 444 bp, Glycine max
  unsure (1)..(444): unsure at all n locations
agcttgtctcagtgtctatgcgagacagataccaacatgttagccatcatcgccaagtaccaagaagagttgggtctagccacggcccacgagcatagaatcgcggatgagtatgcccaagtatatgcggaaaaagaggctagaggaagggtgatcgactctttacaccaagaggcaaccatgtggatggatcggtttgctcttaccttgaacgggagtcaagaacttccccgattgttagccaaggccaaggcgatggcagacacctactccgcccccgaagagattcatgggcttctcggctattgtcagcatatgatagacttaatggcccacataattagaaatcgttaggaaacttgtatggtctctcagaccttgactagatatgatttctttttttgaaataaaatgagtnggtcccatgtttctactttcaaaagc

SEQ ID NO: 233200 - DNA, 387 bp, Glycine max
  unsure (1)..(387): unsure at all n locations
ntaattntntgtttaaactntntgcactaaagggaaatcatatgatagctntgaagaagaacatcataggtcatttcctcttcatcgtctaatgtagcacaaaaggaagtatcagatttagaacaagtttttaccttagccttattgtctgtatctaccatgagacaaatgttggcttgttcataatttgagatgcaactattctcattgtatgagtcatcccatgtgatcataataattttgtttttcttgtcctgagagtatctcctcttctttagctggggacctttaagcttcatatgtctaggcttctgcactcaaagcaaataatgtcattgctcccctctttgttnttttctttgaatctagaattttttcttctggatg

SEQ ID NO: 233201 - DNA, 413 bp, Glycine max
  unsure (1)..(413): unsure at all n locations
agcttgtggaggagcagattattaatgatccccttatagntgagctacccctagttctagatccagaggcagatgtattgaggatccccttatagttgatccttatagttgagctacccctagttctagatccagaggcagatgtattgaggatccccttatagttgagctacccctatttagaatctttaatgacatgtcttgtaatattgtccgttgtttgaaggggattttttttttttaatcaatgtacgcactttctctcatgaaaattcccaatttacaacagtttgtggtatatcccaaagtgcaccacttatatgcttcattgaaaagtcaggatttgtcaacctgacttctaaatggtggttttttttataatttaaattttatctttaaatttaaatttatgt

SEQ ID NO: 233202 - DNA, 429 bp, Glycine max
  unsure (1)..(429): unsure at all n locations
ntagtagacactgattggtcctttacttccatatgcaaaagtgttgnacctcaacataattgctttagaagtaatataataaccaagactagaactatgtaaggagacataataaccaatgatacaaaaatcagaaatttcactatacaattatctacaaattgtgacatttttggcaaaaagatttttataaataagacaaacataatagattcgcaacttgctaaataacaaatgatcctaggacttgattttatcacacatgataatagatcaattactattgcaaaagataatttattaatctctacaaactcacaaatatcaccaataataaatgaactcacattagagttatgaacaaagcgcggtgatacccctaccaaccctacacctaccctcaattcccaatgtccttgtgacatacct

SEQ ID NO: 233203 - DNA, 404 bp, Glycine max
  unsure (1)..(404): unsure at all n locations
agcttctatataagctgaaccatttgattattaaacacaagttgagnnntattcagaaaattagagtttatctcttttatcttagtgagagtgattcaagaacaccctggctgtatcaaaggactttcacaacctctgtgtgttgccctcgccggaaagagtgattctttccttcctttcatcttcaatcttgttctttcaaaccacaattccagaaaatccacttctgcccagaattatctcgtggccataactcccattttacgcactcaaattaagtgattcttgagcctaaattgaatttcaaaatgagacctttcacctcgttttggaatcacctcatttggagccctgtagcttgagttattgtcatttctatatttctgtccagccaccacttaatc

SEQ ID NO: 233204 - DNA, 449 bp, Glycine max
  unsure (1)..(449): unsure at all n locations
agatactaagctttagtcgtcatagacctcctctgaggtgcgggctagctaactttgcatctgtgcatncatcgcatgcactaacagacgttgagcgccgcccaactgatggtactcgtcaccaccaccacctgctccagccataattcaacaagaaaataaaaatgtgcaataaaaattattaaagtttcaagacctcacaacactctactcacgtcttcttagatggtagtacactcgagtttaatgctcttaataggctnttgggtaatggattccctcttgccttctaccactcgtgttttcctcttagttcctggatggaccacaatagacacaccagggtatattaaataaagtgaaagacattttatgatcacaacatattggatttggatacaacttggcctgacttgataacatatttaacattcgatttgatacacggg

SEQ ID NO: 233205 - DNA, 466 bp, Glycine max
  unsure (1)..(466): unsure at all n locations
atccttaagncacctgaggcatgcaagctgcataattttttttaattcggattattattataaaatntaatgcatatttaattcacgttgttataaaataaataatatttatttaatatatattaaattttgtaatacaaataaaatgttgtcataataaatattttttatttttaaaaaaatatacggattacataagtaaatatttattattcaaatttacatgtgcaataaatatttgtatgatttaaattaaattcaattgtcacaatatttattattcaaatttacatgcgcattaaatatgcattagaaatgttagtgataattatgtatagtaataatttatgtatactaatattatttattttataacgtaattgattcattagtttagttggttagagcattgtcatggtaaccctagaagaaatgtattgaatcgattcaattacaacttcgaata

SEQ ID NO: 233206 - DNA, 449 bp, Glycine max
  unsure (1)..(449): unsure at all n locations
tactaagctgagactaattgcttgttcttccataagcagtagttatttttgcactctcacccatctccattacaagcctttcttcttcctgaacacacatggtcattaattcattgatagaccatttatctttatgtgtgttgtaggaaatcttaaatggcccatattcatgcggaagggtgttcaaaatgaaatgcactatgaaagactcagacatatcaacctctagnttcttaagttgagctgaaatatctcgcattttcatgatgtactcacgcacacctttcacactggtgagccgaagagaagaaaacttcatgatcaaggtgctngctaaagtcttatctgaagtgatgaactgatcatcaatggccttaagcaagtctcggaccttttcatgctggtcaacagaaccacgtatcccagccgagatttngtcttaatgaaca

SEQ ID NO: 233207 - DNA, 462 bp, Glycine max
  unsure (1)..(462): unsure at all n locations
agctngaggctttggaggaccacagagaatccatccttttagaggaaacagtagtaagaggatgaagccatattctataaacaagggaaaacaacctatgtctacgtccaacatgagccaatcaagggggactgggttataatgtttttagtgtgggggaccacatcttatgaggaattgcccacaactccaacagacatatgagaaccgttgttatgtttgtggcaaggtaggccattatgctcgagaatgtagggtgactgggagaccaacggtaactgccaattccaacaccgtcaatcgtggacccactaattcctcaaggagcggtaatgttagcaacaacaacaacactagtggtggaagacaaaaggtaccctcccgggtatttgctatgagtggatcagaagctgctgcctccgacgatttgatacagggtaagtgtttgattgctgataaact

SEQ ID NO: 233208 - DNA, 448 bp, Glycine max
  unsure (1)..(448): unsure at all n locations
ctcagctacacatgatagttcctttaaattcattgaatgttatttggatcaattatcttaatatatcaattcattggagtctttaattgctctttttgatagtttagttgtaaataaataagtttttcttaggataattttttttaatcaagtttctactaattaaggttaaatttggattataggatcatggtgaagtgatgatggatgaaggagcatgaagcaaaagaggcaaaaaggacaagattttagcaagtggttgcaaagaagcaaatggcactaaagcttgaagttgttcatgcttaagcgccaaaagaaagaatgcggtaaatagaaataacaattggtcaggaggcattcaacattnttgtttgtgcgcttaagcgccactctaggtgctcttaaacatcaatctgcatgtgatgaccttttttttttggacatgttg

SEQ ID NO: 233209 - DNA, 149 bp, Glycine max
  unsure (1)..(149): unsure at all n locations
accaacccgagcgagcgggccaggagaggttgtttagncaccccgcattgtttcgtcactgactcgccttactatactttcaacaatctgaacctactactgaggctaaccaacaatccgttggtcgaaagagatacgaaaaaaagaaa

SEQ ID NO: 233210 - DNA, 420 bp, Glycine max
acctgaggcatgcaagctggccctatgtactatgctttagttttttgttactcgcgttcgcatgcttctatctggcttgtcagacttcattccaaaatctggacatttcttccatctagatgtagcccttggctcgctcgcgcagcttttccatgctactgagtggtttcttgcacagattgtctgtgaacttgtcaaggcatactgcgaggagcatggaatgtaatgctacctccgggttgagattttggatctggacggtggtgtgcccaaatctgtccatgaattttctgctcattgtttacttgtcagagactggccaacgcggtcgaagtcatatggtgagacctactggcggtgtactacccactaaatcattcgacacggtgcaaagctatctatggacctatgggggtccat

SEQ ID NO: 233211 - DNA, 460 bp, Glycine max
  unsure (1)..(460): unsure at all n locations
agctggtcaagtatcaattctatagtcctcttatcaggcaanggaatcccagattgaagaatcaccggagctcctaccagtagaaaaaaaaacaataacaaaaaaacaaattgatgagaaaacacacaaaggacgatgtagaaacaaaaccactagtaccctttcagcagtcatcacttcttcttttcaaattatctatatataatatagaaagaaaaaaaatcacacccacaaccacaaaacaagtaccccaattaaaatcacacgaacctgaaacaggaacagagtggagccctttcgattccacttttctgccctttacctgtcatcattagaaacaaacaaacaaacgcacacacaattaatagcgtccaaaggccaaacacttcactcatcacatatatntatataatagagattgtgatagagacacaaacaatacagagacagctacagagag

SEQ ID NO: 233212 - DNA, 202 bp, Glycine max
  unsure (1)..(202): unsure at all n locations
tttttaacacgacnagcggnagagagaactcttcatacctgggggtcgctccatatacacttcatccttaataataccattaacgaacacactctttacgttgatttgatacaacatcataccatgatagacaacaaaggatagcaaacaattgtttgcctctaaatgagcaatacgagaaaatgttttagtataatccata

SEQ ID NO: 233213 - DNA, 416 bp, Glycine max
  unsure (1)..(416): unsure at all n locations
agcttctaagttgtattttcaatcccaaatcagttttccttatgtatggaagaaagattggagcaactcaaattntgataattatatgaaaaggtttcaattaattgaagattgattatgtttggtttaacattattttcttcaagagtttatgtcaatgtgatagcacgtagcaatagaggcccaaacgcattagcaggaaacccgtagattcggaggaatacattcgctaggttgatattttaggctattgcaatagtgcacaaataatacattctattataatggaatcactttatcctttcttttggtttttagtggaatatctagtggtacaggtgtcaagcagggatagggtctgttagcattttctattatatgtctatgagtgtgcacctatatatattgaatgaaat

SEQ ID NO: 233214 - DNA, 382 bp, Glycine max
  unsure (1)..(382): unsure at all n locations
acatagaaactcaagctggagaaatgctgacagaagatgagagttgttttctttttcngagcatcaataggaattacttaattgtcatacttaactaagttataagaattaattaattatatctataatttatttaaaagatttataaaatgaaaaaaagagcaaaaaaaattgatacaagaaaaataatataatataatatctaaaaaagaagaagtctcactacaaacactaactagaaaaagaaaacaagttgcttaagtgtgtgtctagtttcacattagagaattgattctgggttcataattaatnttaaataacttttcacaattttggcttcattttagataggagacccaaattgattattaagcttaaattt

SEQ ID NO: 233215 - DNA, 444 bp, Glycine max
  unsure (1)..(444): unsure at all n locations
agcttcatgatgatgagatatgttgattcttgtngttcngatgatgacaaagatgatgacaaatagcccaaagaatgatttcaagaattgagtcaacaagttcaagatcaagattaatttcaagtttcaagagaagaaatcaagaagacttcacaagggaagcattgaaaagatttttcaaaaaacaaacatagcacaattttttttttcaaaagagtttttctcaaaattttccaagttaccagagtttttactctctggtaatcgattaccaatttcttgtaatcgattaccagtagcaaagtttaatctcaaaaacttttaactaaatttgcaacgttccaattgttttttaaatggtgttatcgattacaatatattggtcatcgattaccagagtatctgaacgttgaaattcaaattcacttgtgaagagtcacatct

SEQ ID NO: 233216 - DNA, 411 bp, Glycine max
  unsure (1)..(411): unsure at all n locations
tgtgtaaattgtatcanactcttccaatgtatggttattttgtagngtnataagtattcttttgttaagtataggtaataaatactaagtacttccattttgtgtgtttaataatcattttctctcaatttcaagttaattaggcaagctttgaaaagtgttgtttntcaccttctcgctaagctaatctactggtttagcgagcgttcgctaagcacaacactcattggctaagcgcgaggaagactctggaagaagatgagctgtataggttctctaagtgcaccgcttcagtccatccgctaagcgagaaaggcacgcgctaagccaaaattcactaatgtgcgctaagcggtccataattgcgctaagcgcacgagcacgtacaatgccacctatttaagccagaaa

SEQ ID NO: 233217 - DNA, 398 bp, Glycine max
  unsure (1)..(398): unsure at all n locations
agcttccatcacctctccaaaggcaagccttccgcanagtgtacggaaagattctagatttgaccgcggtggaggtatttacggaagctgtcgtatccctcgcccaatactatgacaagccgttgaggtgtttcacgtttggggacttccaaatggtatcgactattgaagagtttgaggaaatatttggatgccctcttggggggagaaaatcgtatattttctccgggtttcttccctccttgagcaagattgcagctgtggttggagattcggcaaaagaggtggatcgcatgaagcaatctcggaatggcgtagtgggcctgcctcggaaatacttggaaggcaaggcaagggatatggcgagccaagaaaagtggggcccgtttgcggatata

SEQ ID NO: 233218 - DNA, 437 bp, Glycine max
  unsure (1)..(437): unsure at all n locations
tcctcggggccatttcttgcgagaacaaacatttagaatttagctttacaagataatgcttatcttaacgcaaaaaatgtcatgctaatctctctgattntagaatgaactgacccctcacctagaaacagctgaaacacgtatgtgtggaatatcctactatttatatcaacatagaggccatccaacacattctaattgtcatacatatatgcatttgaaaagaacatacattctcacgcccaaggcattgcgtcaaaactcacacttaatttatatcctaaacatttgctatttacaaactacctacgtatgtttgaaatatatatcatacaaatttttattgcttcactcacatttattcatattggcaagctatttacattatgcacacacttgcattcaaaagggaattccgtgctatcatacatttattt

SEQ ID NO: 233219 - DNA, 445 bp, Glycine max
  unsure (1)..(445): unsure at all n locations
ngcntatgcactcctatacctataatgtttttgtntctctaaagncagcttggctctaaagtgtaccaataaaagcgattctacttttaaatttttggataaaactttgatacanatacttttggtgttattcttcaattaaaattagagtttcaataacctaggttaacatttaatgcacatttttattacaaaaattgttaacataaaattctaattctaattaggaatagtactaaaatcatccttttttggtctaggccataggtatcctccattaaaggctatcctatttgagccgaataatattattatggacggaaaagttctttctctagatatctaacacacttgaatatcaggattcgaactcgagaccactgactaagttggacaactccatgcagtttgaccatgcctcatggttagaactaaagccctaatg

SEQ ID NO: 233220 - DNA, 404 bp, Glycine max
  unsure (1)..(404): unsure at all n locations
agcttgngtgaaagtgtatgcataacacctccttgtgtgagagnctatatggcagagattacctacagttgactcatcagctggaccttcctagtgtattgtagacaacattgcatgagtataggcatactccaatactctcaaggatcaatcactataatccctccaaagcattatttcacaaaaattttggctactgattccttacattatgggagtacatgcataatccaatactctcacattatgaactacccttattatgctgacaacacctttcgtacagacatgtttttcttttttgcattaaggcattagatcaaatcccatataactttgattcttttcctgtttcagctattctcattctagcaagctattatgaggaacatacaagcgagtga

SEQ ID NO: 233221 - DNA, 354 bp, Glycine max
ttaccaacaagaatagaagagagtgtttgtatattgatatgagcctgggtgcttcaaagctccttctatatataaccttcatattcaagtattcattgtctcacaatggttggatttttcactctgctctttgttagaagtcttgatcccgttgaaccatttaatgcttacattaatacatgtcccttcttcatgcacagtccatactaatagggtagtgcgtcgtgtactttagtacggaagtcacttatttcatcattaagttcgcatcaacagagcatgccttttgatgaggatcaacgtcttccacattctggacgttatatattcgttcatggaccttgacttattctt

SEQ ID NO: 233222 - DNA, 403 bp, Glycine max
  unsure (1)..(403): unsure at all n locations
agcttgaatctagaattgggcttgggcttgaatccagaattgggcatggacttgaagagggcagactaatttattctacaaaattagatcttatcttatcttattttatctagatattatttagatttgatctcgtctagatattatttcatctagatcttatcttatctagatttgatttcattttacttatgggcttggatttaaaacatatttgtaagctttggggctgaaaaactatataacagcaccaaggttctagtttagctctctcttttctctctcatctatttttcgtatttagttttagtctctcttctctttctctnttattttcattttttacaattccagtgcagacttttagttttatcaataaaatttcgttctctatttgattaat

SEQ ID NO: 233223 - DNA, 376 bp, Glycine max
  unsure (1)..(376): unsure at all n locations
ctgcatagaatagagagtgtatacctgttttattcgtacatatgatcgnacggccagggaaaaaatcaagttttacttttgaagtcaaaaagtaatttccaaacatgcaattcttcatctttctagtgttggatttacatttgtactgagttttatcgtaattgaaaaatccactgccatttaatttattcttttgcataacaggcttgagttgtgaattccttggcttttgcaaaattaggagaagtcttagttgctggagtatgacaggtgaaaattatctcaaactgtgtcctgcttgtatgctttntttttttttgtatacctattactgaaatttcactggaaacatttgcatggacagaaaagctatctg

SEQ ID NO: 233224 - DNA, 349 bp, Glycine max
tacaacacctattctacgatggttctaagtggaccaccttagaaaatgagcttgttgcattgttgtaattattgtaatgaaaaatgccttttacaacacacattctaagacggttattgaaaaccgccttagaatgttatggataataaaattttagacgggttttagtaaaataccatcttaattctgctgaaaaaaaattaaaaccctagctagcctgtaggaactctgtcgtgcgcctccatactctacctcgacatcaagagagaggaagaaagctgagaagaagaagaagaaaagaaaactcacttacacacactctctgcacttgcacatgcaccattctcac

SEQ ID NO: 233225 - DNA, 302 bp, Glycine max
gctgatcatatcttctacacttggagagatcacatgcaagtccttagaacccttaccacgcactgtgtcatcatgtatagactcatgatggccaacaagtgtaggcttacatatgtattctgaccatcattgaggggctaaacttgcaatgctccactcaacaacagacgctactgtacaatgtaaattctttgtataccctactaagaacctcatgtatcgttgaaacggtgacaaacgacgtagatctgcaggaccactatagtcgaatgtctgaccagatgcacaatctactgaatcat

SEQ ID NO: 233226 - DNA, 422 bp, Glycine max
agcttcacgtgaatatatatagtaaaagatttaagatatggaacatagactactaaggtcactgttgaaattgaaaattggaggagtcccaccaccacttgcaagatgagagggaaaatttggctgctagtctctactacaacaatggtattcacaaattaaaaacaaattaggattctgcgttccaaaacttactagctagtaatctcctacacacaacacaaccaacccacttgcaattaaatggattatcagttaatggtacaatttaaaaaggaaaaaaaattgataaaaagaatttaaacagatcacatggcttcattgaacaaataaattaattctgtatcacaatgaggaaacagttactagtcatttaaatcatatacatacacaacttcaacatagttctcaacacgacagca

SEQ ID NO: 233227 - DNA, 351 bp, Glycine max
  unsure (1)..(351): unsure at all n locations
ttgagtaactggacatgcangtacgataattggtaatgaagatatcgatagtattaagtggcctggttctgcatggagatgtctcaaggtaatcagattcttttcaagtaaagatttagtcacttacacatgaagacttgtcaattagaagctcaaacctaggattggtttgttctatatttgtttctgattctgttttgcgttgtactagttctgagaatttcttagtagtttggttttaactttaccgaggcagctactttgttgttgaatttgttggttgttttgggttatgggttctaagggtttcatgttttgttgaggtgcangggaattgatgatgtggtggtg

SEQ ID NO: 233228 - DNA, 427 bp, Glycine max
  unsure (1)..(427): unsure at all n locations
agcttgtagggttcaccccaaattccgttgtcatatgctaaacttgatcccatatctacttgataattcaatggtagccataaccctagccaaggttcatcaacctccatttctccgagaatacgactcgaacgcaacgtgtgcttgtcacggagaagccccggggcgttccattgagcattgtagggctctgaagtgtagggtgcgaggtctaattgatgctggctgaaatttgaggagaatttcgtgtaaatcctgacattgacaagagatgccacacatggggcaattttgaaagctgttgttaggtgtccctaatgactcatcagggtttccaagtttatgccattattgtaaaccacagctacaatgttaaatgaaatggataaagttgatatctttgtccctcatcctctcacanacgcat

SEQ ID NO: 233229 - DNA, 386 bp, Glycine max
cttttcatagtagagtctcttaatgtgtctaccatcacgattatcgtctccctttccattattgggggtaccacctgggccgccagatccctccaccttttgggcgtgttcttttaatgatccgtccccctttttgcacatgttctgtagttgcatcctatccggaaccatatcaaaattgtactgatactgcctaacaaaggcaaccattaggtccttccaagaatggactcgagaaggttccaagttagtgtaccaggtaacagctaccccagtaagactttcttggaaggaatgtatcagcaattcctcatcttttgcgtattcccccatcttctgacaatacatctttagatgggtcttgagacaagtagtccccttgtact

SEQ ID NO: 233230 - DNA, 459 bp, Glycine max
  unsure (1)..(459): unsure at all n locations
agcttatgcgcatatttccttacaaatgttctcttgcacaagacattctattaaccgaaaaaatgcacccatatacaatcaaggcagctccgttacctagattatttacacgtatttccaaggtgtatttgttacttacatcacacacatctccttggctaaattcacatacatgcatacccaaagcattttggggtaccaaaaattgcacatgtacacctcttggtatttctaatacctatacatacacaaactttatgatgaatcttgactatctacacaataaggtgctacatttcatgctcttttcaagtttttgctacctaaagccgcatgcaaattccagtatattttcctttgctgactaaagatgtattcaaattaaaaggtatacattntttgataatgtatcttctttacataacatgcaacacatttatgtatatttttttgtgagac

SEQ ID NO: 233231 - DNA, 438 bp, Glycine max
  unsure (1)..(438): unsure at all n locations
tctaaactntatacaagaatgaagctctgataccacttgttatacaagtggcctcagatatcttaagaaggggggcattgaattaagatatcacaatcttttctaaattaaaaattctattttgattntaacccaaatcccaagatttctttcaaaaatgaactcctaaataattatgcaaattaatcttactgaatagaaacaataagcaataaacaataaacaataaaagagtttaagggaagaaagattgcaaactcagatttatactggtttggccacacccttgtgcctacgtccagtccccaagcaacccgcttgagagttccactatcttgcaaaagtcctttacaagttctgaaccacacaaggacaacccttcctttgggttagatttcttacaacaagagaccctcggtctcttaatcccttttagaa

SEQ ID NO: 233232 - DNA, 445 bp, Glycine max
  unsure (1)..(445): unsure at all n locations
ngctggtgaacagagagaccttttttatgtttttagaacangaacaccagagcagagatcgggttgaaattgaaagggagttgaatcgactgaggaagaattgaaagagaaaaactttgggttctagagggttccgtttagcttaggatcaaggtcctacgtttgaaagttacgtgcagagaatacaaaaaataaaaaaaaatgataatacatgaatagttgaaaatataattttttttaatgtgtgtattattactttttaattaattaattaataatttataagtttaattctggaatactttaatctttttattaaagatattgtattataaattaataataggcttgatatgacaataataaaatagacaatactttaacttcaaagtaagagtatcttctattaataattntttatttcacacacactatataacaaaat

SEQ ID NO: 233233 - DNA, 261 bp, Glycine max
aatatagcatacaatccatattttcctgacaacccacaattcatatgtcacagccctaaacttatttactttcctctcttatcagcacacaaaattcatttgtgacattgttcctttaagctctttattgggcatgtgaatcaacatttctataaaaaatcaaaataacaattgcattgtagcactttatcacatactggaacttcattatatgtgtgaggtatcaattgctctgaaacaaaatcaccaagaactctcccc

SEQ ID NO: 233234 - DNA, 439 bp, Glycine max
  unsure (1)..(439): unsure at all n locations
agcttgcagagntatgtcttgtataggtttaatcagttacagccttattgtaatcgattacataattgtttttgagacaatgactattttattgaggagtctatgctttaatcgattaccatgtgatataatcgatcacttctctttctacaagtgtttcagaagtaaacaagaactttttaattgattacgttgagtatctaattgactacattgttcttgagttgtttccagttttggaagaacactttaatcgattaaaaagataatccaatcgattacttcattgaattagccgattaccttatagattgaatctattataggcagttataattggtttctctattaatatccaccttgtgttttctctaatagcacaactttttaagcttctgaagagctaggatcacatgttgttattagttaaagaaagaaa

SEQ ID NO: 233235 - DNA, 450 bp, Glycine max
  unsure (1)..(450): unsure at all n locations
ntggttgtagaanactggtactaatctggaatgttctattttaaatccctntgtggtcttctagaattatgtcttatctttcaaatgacctcaatttcatcctaatgtggattctggttatggtggattcaggtacaaggtaggttttgtatatctaccatttcgtatcaatttcagatatgtcaagttgacttattgattgtaactgtactacatattttcctaaccttgttccattactttcttctacaatttataagaataattacattaagacataaaacacggaatttgacaacgacatgttgctagggcaaacctagactgagaaaagagggaggaccaatcacaaaaaataaaatacatccaacaacctgtgttttttattgaataaatacatccaacaactatataccattatattttataaaaaatattcataatttgatg

SEQ ID NO: 233236 - DNA, 443 bp, Glycine max
  unsure (1)..(443): unsure at all n locations
agcttccatcacctctccaaaggcaagccttccgcanagtgtacggaaagattctagatttgaccgcggtggaggtatttacggaagctgtcgtatccctcgcccaatactatgacaagccgttgaggtgtttcacgtttggggacttccaaatggtatcgactattgaagagtttgaggaaatatttggatgccctcttggggggagaaaatcgtatattttctccgggtttcttccctccttgagcaagattgcagctgtggttggagattcggcaaaagaggtggatcgcatgaagcaatctcggaatggcgtagtgggcctgcctcggaaatacttggaaggcaaggcaagggatatggcgagccaagaaaagtggggcccgtttgcggatatattaactttgttgaattttgggtttctcctctttcggaacgttgac

SEQ ID NO: 233237 - DNA, 435 bp, Glycine max
tcctcggggccatttcttgcgagaacaaacatttagtatttagctttacaagataatgcttatcttaacgcaaaaaatgtcatgctaatctctctgattttagaatgaactgacccctcacctagaaacagctgaaacacgtatgtgtggaatatcctactatttatatcaacatagaggccatccaacacattctaattgtcatacatatatgcatttgaaaagaacatacattctcacgcccaaggcattgcgtcaaaactcacacttaatttatatcctaaacatttgctatttacaaactacctacgtatgtttgaaatatatatcatacaaatttttattgcttcactcacatttattcatattggcaagctatttacattatgcacacacttgcattcaaaaaggaatttcgtgctatcatacattcat

SEQ ID NO: 233238 - DNA, 389 bp, Glycine max
  unsure (1)..(389): unsure at all n locations
cctgcagctgcagctttaactgaagggcaatattccatttgtttttcaaacggtgtaatcgattacaatatattggtaatcgattaccaacgtatctgaacattgaaattcaaattcaattgtgaagagtcacatcttttcataaaatgctttgtgtaatcgattacatggttttggtaatcgattatcaatgacaagttttgaataaaaatcaagagatgtacctcttccaatggttttctcaagattttctcaaggctataactcttccaatggttttcttgaccaaacatgaagagtctataaaagcaagaccttgacttgcatttcaacaattcttacaatctttttgaacatctttntgaacttcttcttcttcttcctttgcc

SEQ ID NO: 233239 - DNA, 357 bp, Glycine max
ctgacaatgaaaacggagtcaaaaaatagacaaaattcaaatcccaggtcagtttatagtagaagacatataacaaatgcgaactccatttatccttcataggatccaacaaatccttggagaatgtctctgcaaagcaaatctcagacacagagcaataaatgaattcttaaatgccaccaatctaatgatgcatcatatcatggaatgactcttctatcatctaatactacaggcacaaaagtaagagcaatatacgaatctcagacatagagaaataaataaatgcttacataatgttcacatcaagaagatgtgctttgcaataagataaaatgcatacggcaaacataatga

SEQ ID NO: 233240 - DNA, 452 bp, Glycine max
  unsure (1)..(452): unsure at all n locations
agcttctttgagaagctttcttgagaaacttccttgagaggattcctagagaagctagagcttagctatacacacctctctaatagctaagctcacctccttgagatgagaagctagagcttagctacacaccccctataatagctaagcacacccctgtgccaaaaatacatgaaaatacaaaaaaggtccctactacaaagactactcaaaatgccctgaaatacaaggctaaaaccctatactactagaatggccaaaatacaaggcccaaaagaagaaaaaacctattctaatatttacaaagataagcgggctcatacttagctcatgggcccaaaatctaccctaaggttcacgagaaccctaggggccttcccttggatctctggcccaatctacttggagtcttctatccaatgcccttgtgggggaggantgtatcactatct

SEQ ID NO: 233241 - DNA, 446 bp, Glycine max
  unsure (1)..(446): unsure at all n locations
ntatgttgaactcaaggttntcaaatatggtggatttattccaatggtcaaaattaacaaaaactgagcctttatatgcagttcgtgcaaaacaaagttgtatttactaaaataggacaaaacttgaagttgtggttccataagctataactcanatggggtatattttatgtccaaccctaggttttaagacctagtgagttcatttttgaggtccaaaaatacaaattccagcccccacattaaatatttcgaaaacaaagtgttactcacacataatatgacctaaacttaaaatttcaattccaaatggtatacagccccaaatgagacaaattatatatgtgtccctaggtacccataattcacaaataatgcacgagtctattgcagtgccatttcacagagttacgagtttcatcaaaatataaggaaatgcacaaaac

SEQ ID NO: 233242 - DNA, 431 bp, Glycine max
  unsure (1)..(431): unsure at all n locations
agcttctctatattgtgcgccagttgtataatttcatatggaaatacattcgacccaatatgaaagcacagagtaagaacttgtaacttgtgtaagaagtttctctgaaattctgcacgcttgatcatctccagtcctttttcaccgagtgacaggcactgtaagttggatgtaggctaccaagagaaaccgataaccaagcaaaagcaggttagggaggttgtaaaagagatgaacctggctagctagctattaataaggtggaagggattttgatacggtttgtgcctaaacaaatttatttatttgtagtttaaaattttagatggaaaaggtgataaaggagaccttaagggaggtagtagtggttccaacggagaagagaatgatgaanaattcgatcctttatatggtagggagactgtttataa

SEQ ID NO: 233243 - DNA, 443 bp, Glycine max
  unsure (1)..(443): unsure at all n locations
tataacgttttcctgaagtcattatgatctcttcttgtggttagattgttccataaagaacatcctttgtcttcttcaacccaagccatatagaattacttttggcgggacatgggagaacagtaagaattgtctttggaaaattaaattctgaaaaaaagggagtactgtaaataaattcgggaatatattttctagacagagggtatgatttaaaagaaaaagtgaaaggggagtgtattagcaagatgggaaagggggtaaatagcaactgcctcccaagatacatcttgttagaattcatatattttgctacggaccaaaatatacattcaaacttggtatctttatcatgtttttntcanatttaacattcatttattaattttaacacatgatttcttggataacatttagtaaatgcactttgattgagctattgg

SEQ ID NO: 233244 - DNA, 432 bp, Glycine max
  unsure (1)..(432): unsure at all n locations
agctngctctaaattacattgatgtttgtatttattataggagggtatatgccatttttgctttaagaatagtgtcccactggtaaaattaactttccaaatgtttgccttcgcaggaatggccccgaggaagcttgcctcaaagaggtccaggaaggacaaggcggccgaaggaactagttccgctccggagtacgacagtcaccactttaggagcgctgtacaccagcagcgcttcgaagccatcaagggatggtcgtttctccgggagcgacgcgtccagctcagggacgatgagtatactgattttcaggaggaaatagggcgccgacggtgggcaccactggttactcctatggccaagtttgatccagaaatagtccttgagttttatgccaatgcttggccaacagaggagggcgtgcgtgacat

SEQ ID NO: 233245 - DNA, 302 bp, Glycine max
  unsure (1)..(302): unsure at all n locations
gaaaattaaaaactctagcctgggatgaactattagggattctaagagttcatgaagttcatattcagaatagaggtcatctttcanaaagaaacttcgctgcccctcaaaccagagaaactagctccagacgtgaagaaagaaagagctcatctagggctttgaaggtacaaatggcttagtctgacacctcagctaacagctctgaaggatccatagatgatgaagtggccttatgtcaagaaaattcaaacaaataatgaagaagaaaggaaatttcaacactcctctataccaaaaga

SEQ ID NO: 233246 - DNA, 390 bp, Glycine max
  unsure (1)..(390): unsure at all n locations
agcttggacgttaacaaactgaaaatatttatgtgctntatagataatccgcactgcctgaagatcccaatcagtttccatggtaggatgataaacctgacacctcaagtaagtctcacaagtagcagtacccaacaaccaaagcctcccagcgccatgttagtcgatgaatacgactaacttttgtgtataaaacttgtgtatattgtatcaaactttcccaatttatggttgttttgtaatactataagtactttctgttaaatataggtaatagataatttatacttttgttttgtgcctttaataatcaatttctctcaatttctggttaaataggcaactttggcaaagagttgtttttcactctttcgctaagccaagctgctg

SEQ ID NO: 233247 - DNA, 427 bp, Glycine max
  unsure (1)..(427): unsure at all n locations
actaagctgtaggttaagtctacgattgtcacgggggatgtctctttgtacccgnggctatacgagacatctggccaaacaaagtcaggttagccataactcgtctgtgctttttcttccatgccatatgtagcaaagtcattgatcctgtcaagtttgatgagctgcaaaatgaggccgcaattatactgtgctagttggagatgtattttctccctgctttctttgacatcatgattcacttgattgtgcatctggtcagagaaatcaaatgttgtggtcctgtttatttgcgtgggatgtaccaagttgagcgatacatgaagatcttaaaagggtatacaaagaatctatatcatctagaagcatctattattgagaggtacattgcagaagaagccattgaattttgttcagaatacattga

SEQ ID NO: 233248 - DNA, 420 bp, Glycine max
  unsure (1)..(420): unsure at all n locations
agctntcttttttgctctctgtaagacgaatagcctgatagcacgcagagagtaacgttctcttctgcgcccttcgtcaatcgcggccgacaagcctgttgacacgcggagatttacgtcatcttccgcgctcacaagatctgtcatactgacatttgagtcacgctgacgggcggaaatacccgagtggttatccgtataaacattcttttttgctgtctgtttgacgaaaatcctgatagcacgcagagagtaacgtcatcttctacgcccttcgtcaatcgcggccgacaagcccgttgacacgcggagatttacgtcatcttgcacgctcacaagatctgtcatactcacatttgagtcacgctaacgggcggaaatacccgagtgggtatccgtataagcattcttttttgaact

SEQ ID NO: 233249 - DNA, 387 bp, Glycine max
tgttgaagaagctaaactgtgatgcaagctgaaccactctttttgaaattcttgacaggagatatcttcatgtaaagtggttgggtaggaagaatttattgtatgggttgagaccatgtaatttcagtcaatctctacatgacacattattaactctttctcctaaattgaaaaatgtagttaagtgtcacgtggagattgactgaaatcacatagtcccggatcatataataatttatcccaggcaagttgtcttcaaaggccaatggacacaaaccgtcttagaagaacatctggttatgtcacacaagatcaacaagactattcccatcacttacagttaaaaaaaaataaaataaaagaaatagacagtaagatagatagtgc

SEQ ID NO: 233250 - DNA, 460 bp, Glycine max
  unsure (1)..(460): unsure at all n locations
agcttcttcacatagtccgcctttgcttgtatctttttatgcttaanaacagaaacattaggcataggcaaaagatcaagaggagttagtggattaaaaccataaacaacttcaaaaggagaacaattagtggtgctatgaacagctctattgtaagcaaattcaacatggggtaaacaagcttcccaagtttttaagttcttcctcaaaactgtcctaagcaaagttcccaaagtcctattaacaacttccgtttgcccatcggtttgtgggtgacaagtggttgaaaataacaatttagtgcccaacttgctccacaaagtcctccaaaaatgacttaggaacttagagtccctatcactaacaatgctccttggcaaaccatggagtctcacaatctccttgaaaaacaaatcagccacatgggaagcatcatcaacttttttacatggaataaaat

SEQ ID NO: 233251 - DNA, 346 bp, Glycine max
  unsure (1)..(346): unsure at all n locations
caagaaactcagctaggaccatncgaaacncgagagaagacgagggcatatttttgcgtgcanacgagttatgaccccgaatcggacatctgcgcgaacagctacgaccatgcgatcttcgcgagagctgccgctgttcaatttcaagcgtctcgatagaccaagaccccgaatcggacatccgcgagaaaacgtatgaccattcgacgctctcgagagcctccggtgaacaatttcgagcggctagatgaatcatagccccgaatcgaacattcgagtgaaaacgcatgaccactccaatatcctgagagccgccgctgatcaatgtcgaggcgcccgaaatata

SEQ ID NO: 233252 - DNA, 433 bp, Glycine max
  unsure (1)..(433): unsure at all n locations
gatgccactctactctatattnttgaaggatatgttgacaaggaagcacatgtacattcatcaggaaaacatcatagtggaaggaaattgtagtgctgtaatccaaaagatccttccacctacgtgcaaagatcctgggagtgtaaccattccttgttcaataggagaagtcaatgtgggaaaggctctgattgatctgggagccagcattaatttgatgccactctctatgtgcagaagactgggagagttggagattatgcccactcgaatgactttgcaattagctgaccgctccattaccaggccctacggagtgattgaagatgtgttggtcagggtaaagcattttatcttcccagcagactttgtggtcatggatatctctgaagatatngacatccntgtaatcttgggaacgccgtttatgttg

SEQ ID NO: 233253 - DNA, 437 bp, Glycine max
  unsure (1)..(437): unsure at all n locations
nttatgtganaggatgtgactcttcactgttgatattttatttcaacgctcaaaggcactggtaatcgattaccaaaacattgtaatcgattgcagctctttgaaattaattggaacgttgtaaattcaatttgaaaactatttcaaaacaattttgctactggtaatcgattacaacaatccgataatcgattaccagagagtaaaaactcttgggtaaacatgttttgagaaaaatcatgtgctacttaatttttgagaaaaactnttcatacttatcttgattaagccttctcttgattcttgaatcttgagtcttgaatcttgatcttgattcttgagatcttgaaccttgaatcttgattcttgactcttaactttcctcttgagtcttgaattcttcttgattctatcttgaactctcgaaatgntcttaa

SEQ ID NO: 233254 - DNA, 473 bp, Glycine max
gatcttcagtcacctgaggcatgcaagcttgagagaatttaagattatagttttatcttcaaagggtaatagtttctataattttgaaaagtataatgtacattaacattagtgacaaaatagtaaatggagtagttatacccgatccaagaaatatttagcaacattgggaagattatgtaattccttttttgtcttgtatgtttcttgaacagcaggatctttccagatttcatctaccataggagcatactcacgcgttgcagcagggaagaaggcctccaaatctccgatggccataatatccagtaatcagtcagaaaagtgcttgaatctttgattatagagtaaacactcaccttgttttcgtcagctgctgtctctggctaaattattatacaattagattcattcacataactctagccttcgctttgtatatacaattagagccaaaattaaggcacaatata

SEQ ID NO: 233255 - DNA, 427 bp, Glycine max
  unsure (1)..(427): unsure at all n locations
tcattctacacctannaaagaagataagatagttgctctttagaggaggcttcctgatcagggagctaacaaaaattttcatgcaggtggaccttcttgatgcaatcctaccccgcaagggcattggatagaagaatccaagtagattgagccagagatccaagggaaggccctatggttctcatgagccttagggtagatttcgagcccatgggctaagtatgagcccgcttatctttgtaaatattagaataggtttttccttcttttaggccttgtattttggccattctagtagtataaggttttagccttgtatttcgaggcattttgaatagtctttgtaaaacggatcttttttttgtattttcatgtattttgtcatgggggtgaagctagctattatatggggtgtgtaactaaactc

SEQ ID NO: 233256 - DNA, 456 bp, Glycine max
agcttcgttcacgtagaccatatgcaattaatggcatcacatctatttcctttcacatggttcttttattactaaagagtttcctttcaataaataaggacttgcaaaaatattgtagaagaagcatatttgcttcagaagttatttgttcagggctctttgtgtatgcaattatgctttaaaataacatttgtggtacttgcgcaattttactcctttcaattgtttatcattcttttctccttgaactccgcatcatgcctaagtgacaactcaatgcaattttggggcacaaagagtaaacaagggtgtgaaaagggatgtatttaatgaattataatggataagcaaaataaaataatctattaatttatttatttttaatttgtcaaaattctctaggattagaaaattaattaatcatgagttggtttacttaatcgatcacatggatga

SEQ ID NO: 233257 - DNA, 410 bp, Glycine max
  unsure (1)..(410): unsure at all n locations
ntagtttaacttgtctaaacctaggaggggtgtttattttgagcctagnccaacaagaggaatttgaggatgaagcttggattgatntagtctaactagggatcgaggtttagtaatttaggctacaacatagaacacaaaagcatgattgattagagaaacatctttatatacatcagctggtttgttagaaagacccaacatctttacctactgctgtcaattttacttacttgcatttttactgcttttagcctagatttagtttaactatgttccaaatcatccattatcgatgtttatttcaacaatgccttatttctgaatttaaccctatctaagactagttccctaagttggatacttagattcatccgttttaattntaaatacttgacgatccggtgcgc

SEQ ID NO: 233258 - DNA, 451 bp, Glycine max
  unsure (1)..(451): unsure at all n locations
agcttttttaaaagagagtattaacattttatacattatttntnnnctctgggaaccacttttatacaacttacataattggattgaagatttatattggaatcaacatgatataaattatctacgcatggatgatgcaatggtgtgtaaaagtttagtcttaggttatgctcaattgttctgtattggtgttagttttgacatattattatcattgtccaggtacaccatggtttttataccacgtgccacaatacaacaatacatcctgcaattttagatgttaaaagagcaacaaataagttttatggagatattgaaattatagcaacaagacattcaatgggaggggcaatgacttcattttgtggacttgacttaacgcgaattataattntagttgtcttggcatgattaggcattatacaacaaggtttgatggtctcaatct

SEQ ID NO: 233259 - DNA, 351 bp, Glycine max
tgaagctgatgtgtgcctgtggtcgcaaagaagtattttgttcctagtgtccacttacgatagcgcgagattccaaacgctacctgatggtgactgttattatggtagcacatgttttgactgaattgatggacatgatatgtaatgtcgggacgtaccttgatgacataatatgatgctgccactatgcttcgataataagactatatatcgatgatggagcgaatcctgatggaccttgtaactttgtggattaatacataggagtgtaatgtgtacgagaaccaagcatgcctgagtcatacagaatatccagggtatatttgcgttgacatagatgaataccttgtg

SEQ ID NO: 233260 - DNA, 463 bp, Glycine max
  unsure (1)..(463): unsure at all n locations
acactataaaactcagcttatgatgatgaaccacgcaatggtgatgatgcctatttccttagtgattgattcaagattgattcatgacttcaagatcaagcatcaagaatccaatccaagattcaagattcaagagaagaaatcaagaagcaacaagtcaagacttcatataggataagtattaaaagaatttttcaaaaaccaaataacacatttttgttttacaaaagaattttttcaaattttctaagttaacagagtgattactctctggtaatcgattaccagttagcagtaatcgattaccagtgaccaaattggttttcaaaatattttcaaatgatttgtaatgttccaaaatgattttcaaatagtggaatcaattacactatattagtaatcgaatacaagtgaatctgaatgttggaattcanatccaattgtgaagagtccaacttttcat

SEQ ID NO: 233261 - DNA, 427 bp, Glycine max
  unsure (1)..(427): unsure at all n locations
agcttgggtgaaattgtatgcataacactccttgttgttagagtatatatggtagagattagctacagttgactcagcagctggaccttcctagtgtattgtagacaacattgcatgagtataggcatactccaatactctcaagtatcaatcactataatccctcaaaagcattatttcacaaaaattttgtctactcattccttagattattggagtacatgcataatccaatactctcacattaggaactacccttattatgttgacaacacctttcgtacagacatctttttcttttttccattaaggcattaaattaaatcccatataactttgattcttttactgtttcagntattctcattntagcaatctattatgaggaataaacaagcaagtgattaggtgcaataagttctatctg

SEQ ID NO: 233262 - DNA, 354 bp, Glycine max
ttacaaaaaagaataaaagagaatgtgtgcatatatgatttgtgtcttgtttcttcaaagcttcttctatatataaccttcatattcaagtattcattgtctcacaatggttggatttttcactatgctctttgttagaagtcttgatcccgttgaagcatttaatgcttacattaatacatgtcccttcttcatgcaaagtccatactaataggttagtgtgtcttgtactttagtagggaagtcacttatttcatcattaggttcgcaacaacagagcatgccttttgatgaggatcaacgtcttccacattctggactttatttattcttcataagactttgacatatcct

SEQ ID NO: 233263 - DNA, 406 bp, Glycine max
  unsure (1)..(406): unsure at all n locations
agctntgatttcctttgttccanatacctttcttttctcatgtgcacccaaacccaatctccgggttcaaaaacaacattctttctccctttatttgcttgtttagcatagattttatttctcctctcaatttgatctttgactctctcatgaagctccatcacacagttcgcctttgcttgaccttctttatgcttaaaaacaaaaacattaggcataggcaaaagatcaagaggagttagtgggttaaaaccataaacaacttcaaaaagagaacaattagtagtgctgtgaacaactctattgtaagcaaactcaacatggggtaaacaagcttcccaagtttttaagttcttcctcaaaactgtcttaagcaaagttcccaatgtcctattaacaacttctg

SEQ ID NO: 233264 - DNA, 447 bp, Glycine max
tataaataatggttgtcattgaggaatgataaagactgtctaagtgtgaactccgtcaaattatatttgtggcatgcaaatttacattcaattatatatgtatattgctattctatttgcacgcgttgtgttacatatatgtacttgccaaccaataacaacccaaattttcctttttttttccaattattactattaccaagtccattaaaaaatgactacgatccccaaaatacataaaatgtcaaagaaacattttcctcactttatgtaacgacccgtcttatcgctacgatattactatctctaaaacgcgacatttcagtttttaagtgaaaactctattaatttgattattaaaaacaagggtaaattctttttttcgtgacatatatttagcaaacacacaaataattaaataaatacatacgcacacacaaacacaca

SEQ ID NO: 233265 - DNA, 414 bp, Glycine max
  unsure (1)..(414): unsure at all n locations
agctttgagccanaatcctgactcaccatataccttgtcccattgtgagaatgccaatccttaccctcggaagcaaaaaaagaagagaaggaaaatttccaatcaaaggaaaggaaattcccaatcaaagagtgggagaaagcaaaaagaaaagaaagaaaattcccaatcaaagaatgggagaaagaaaaaaagagaagtaaaaaagaagaaagctcctggtcaaagaaaccagaagaaatgtgccgagaggtccttggaccagacgatatctgaacaatacagaattgtcaccaaatgaacaaaagaaagaaaaggaaaccacgacctanaatggtcttccccctttaattgccaaccaaaaacttgtgcgctagcgactttntcgccccgcactaaacaaaaacagaaaag

SEQ ID NO: 233266 - DNA, 361 bp, Glycine max
agatattgacaaaaagcccaaagaatgatttcaagattaaatcaagaacaaattcaagaatcaagagaagtttgatttcaagattcgagaaaagatgaagacttcacaagggaagtattgaaaagatttttcaaaaaacaaacatagcacagttttgtttttcaaaagagttttcacaaaattttctaagttaccagagtttttactctatggtaatcgattaccagtttcgtgtaatcgattaccagtggcaaagtttgatttccaaagtttctaactgaatttacaacgttccaattgatttcaaaatggtgtaatcgattacaagatattggtaatcgattactagtgtatctgaacg

SEQ ID NO: 233267 - DNA, 402 bp, Glycine max
cgacagatgtcaaggtttgtcaagttatggtactcaagtatgaaactaggcaatccgccagtgaagacattgagatctaaagcaagatgagttaaggcaaggcattccagaaacatattcttacatgcgaatccaactacgaattagttcagccaggttttgttgatattaggcatagaggtaaatgtaaatataggaaaaatataactatatggtgtggtccacgtccgctgtggtatgtaatgattataattgaattccttgttttttaaaccaccataatgaaggtctttggttctctgacggcacaatgactccaatttccatgcatgaagatcaatgcactagtagggtcatggcactaaaatacacaaaaaaaaacaaagagtctatcattttact

SEQ ID NO: 233268 - DNA, 455 bp, Glycine max
  unsure (1)..(455): unsure at all n locations
ctaagctcaaacaattgtgaatcaatacacaactctatattttataaaattgagagntttttcctctgaagaaatatttctaacttagaaaattntcttcacacacactatgatgatgcctaatgcaagacaaatatcaaatgtacttgtagacaaaggatcaagctgaatgttttgatgatgccaaaggatcacatgtttctcaaagctttattcaagacaaagaaatcaaagatattcaagatggatgatcaagacagtctctagagtcttaggaagagtatattaaataggaagggaattccaattgaagtagcaaaagggttggccaagatatttaagttaaaaagtgtttttcaagagatttactctctggtaatcgattaccagaggatgtaatcgattaccagtggccaaaaatgatttacaatagctattataattcgaattcaaaa

SEQ ID NO: 233269 - DNA, 73 bp, Glycine max
  unsure (1)..(73): unsure at all n locations
agctnnttgcggaacgtggccatgatttgttgcgctttgtcanttcctacttccagggactcggggacggtca

SEQ ID NO: 233270 - DNA, 381 bp, Glycine max
  unsure (1)..(381): unsure at all n locations
ttaattcattctatgtacccgtagtggtccacattgtcttttttgcanttttattctcgntttgcttactttntataccccctgttgacgtgcttaagccattttacttaagtcatttctcgcttaacttaaaaataaaataaaattccaccgaacgtttgaattgtattatccattaacttcggttaaaataaattccgaccgttcggtcgtgccgtaaccacgttggaaatcaaaaagaggtaaaaaataatataataatcaaaaagacatcttttagtaaaataaagcggaaaatcaatcggacgttntctctttgggatttctcattcttaatcgaattgattaataactaaagtgaaactaaaggctaaaatcaat

SEQ ID NO: 233271 - DNA, 431 bp, Glycine max
  unsure (1)..(431): unsure at all n locations
agcttggccaanaacaacctatatactattatatatattcctttngcaaatctataccaataactaaaagggatacctcttttgataaccatcttttggtctccatttttaaaatgattattttactcttcaaaacttacatttttttattcatgtaaccacccatgttatataaattgttcattgaagtacttactttatgtaaattgtttgctttcttcaagacacaataactacctatattttcatttttttatgaatgaagccacaacaaatgttctacactgtaatttgtagtaagttttggcacaacaaggtagaatggcagcggcaaaggcaaactgtgacagtgcggagatggacaacgcatagtcctattgtaggagccccaaggagaattacganaatatgtgaataaatattgtctttac

SEQ ID NO: 233272 - DNA, 444 bp, Glycine max
  unsure (1)..(444): unsure at all n locations
gtangctaaattagtctaaactctcttaagctatttattctaagtctagtccaacaagagggatctgaggacgaagcttantttaagttagtctaaacctaggagggctgtctaaattaagcctagtccaacaagagggagctgaggaggaagctcggattgattcagtctaactagggatcgaggtttagtaatttaggctacagcatagaacacaaaagcatgattgattagagaaacatctttatatacatcaactagtttgttagaaataccaacatctttacctactgctgtcaatattacttacttgcatttttactatttttagcctagacttaagttaattttgntctaaatcatcaattatcaatgtttctttcaacaatgtcttatttctgaatttaaccctgtctaagactagtttcttgagttcgatacttg

SEQ ID NO: 233273 - DNA, 359 bp, Glycine max
  unsure (1)..(359): unsure at all n locations
atataagcncgaaggagaagtaagtttgagtcctttgttcatgtaaccttttacgtgaatgcattgtttctattattcttcttaaattaattgttccactttcacttggatatggtttaaagagggaggattcttgaagtactaaggaattggcctgaaaagaacattcaattcattgttgtaattgatggagagcgaattttggcttttggggatctacgctgtcaggtgattttattatacttgttctcataaatttttttacgatgtttatatcttatgatctaatattgtagcctctccttctctattgtattatcaagggatgggaataccagtaggaaaactttctttatatt

SEQ ID NO: 233274 - DNA, 377 bp, Glycine max
tctataagaagattcctaaagaagctagagcttatctctcttacctctctaatagctaagctcacctccttgagatgagaagctagagcttagctacacaccctctataatagctaagctcacccccatgacaaaaaaaatatgaaaatacaaaaaaaaagtccttactacaaagactactcaaaatgccccgaaatacaaggctaaaaccctatactattagaatggccaaaatacaaggcccaaacgaagaaaaaacctattctaatatttacaaagataagcgggtcatgcttagcccatgggctcgaaatctaccctaaggctcatgagaaccttagggccttcccttggatctctagcccaatctacttgga

SEQ ID NO: 233275 - DNA, 377 bp, Glycine max
  unsure (1)..(377): unsure at all n locations
agcttgtagaatggctagacatgttacatgtcagggtttggntnggttcaaggataaaagggatgccccacattatttccatgacacaaatgcaaaaatgatgatttggaaattttatgcaaaactggtcatgcatgcacctatgtggacgctcaagtgtcaaatttttatggtcatgtgatgctagggctcaggattcatttcctctattttaaatcaacccaatgtttccaaaatatgttcttttatcaatttgtgcattcatccgagtccatttcgggcgtctgggaaaatttcacagcgttcacccttcgggtgtacacacacanttttttcaaaaactagctatgatcagcgaatttttcttaaagaaaagt

SEQ ID NO: 233276 - DNA, 419 bp, Glycine max
  unsure (1)..(419): unsure at all n locations
tgcttctacaccttggtattcatatttcacttattattattgaggagaagaagaaagaaggagaaaatcaaggccgaggcgcttctgtaatgcatctgtggtgttttcatgaccaattccgtgaatgttcttcgccattcttcgtctgttcttcattgtttgttgatcttcaaccagttagttttcaatttcgaaactttgaattcattcgatgcacccttaggggtccattcttgctttgtatgttttcatcttcatctcgtctactttcagttntctttttcttcattttaagcaaatttcgactgatcatttaagccataatctcacttaatcaatgttaaaattaatgtcgaccaattgtttgtgttggaatctcattttatcacctttaaaataaaattcaatcgattggttat

SEQ ID NO: 233277 - DNA, 410 bp, Glycine max
agctcggagagagaactttgttctactgttatctattaccccaaatttgtaattgattactttgttctgttgagaccatgttttttttcttaggtctttgctttaatcaattacgaagatataggaatccattacatggttcttgaaagtgttcccagaagtgatcaagaatactttaatcgattaaatcaagaatctaattgatcacattgttattgaaagttttccaagtgttgggaagaacactctaatcgattaaaatgagaatataatcaattacatctttgagataatcgattacaagttgttctaactattttctctatatatagccaccttgtgttctcactttcaagcattcaaaaaatacgttgttgaatgaacttttaactcaagactctaatgttctt

SEQ ID NO: 233278 - DNA, 426 bp, Glycine max
tatgctgcaaacatttataagagacctgctcatttgcttatccatcttcagcagaacaattatgatctttcatgcaacaaatacaatccaggttgggggaatcatccaaatctgagatggacaagtcctccacaacaacaacagcttgtccctccctaccagaatgttgttggtccaagcaagccatatgttcctcctctaatacagcaacaacaacaacagtagtcacaacaaagacaacaagcaactaaggctcctcctcaaccttccttagacgagttagtaaggcaaattgaccttcagaactatgcaattcagcaagagacaagagcctccattcagagtctgacaaatcagatggggcagatggctactcagttgaaccaagctcagtcccaacattctgacaaattgccttcacaaact

SEQ ID NO: 233279 - DNA, 448 bp, Glycine max
agcttatgcagatgtaattttgacaatgtattgaaaaataatcggatattgcatacaaaataaataaataaacaaaataatgcatatgaattatgaaagaccatgggcaaagagcattttatatgcaccttgatgccaagtggattagcaactcctctcaagaattcaacatgagcaccatcaagttggcgggtacgttccccaacccatagcatgtgagctgagcaatcataatgaagcccagtagtagaatcctccctagtaagtgcttgctcataagggagaagcaaacactcatgggaggtccaaaagtctgttgtactcatgatgggatggtcggctgtgagcccagcaacattcatgaagccaagagcctcatccactctatgggctaattcacggtacctgttggccattaccaaaaaagaaaactgatgtataaaagtga

SEQ ID NO: 233280 - DNA, 445 bp, Glycine max
  unsure (1)..(445): unsure at all n locations
tctcaattttaagaagctaatgtattccatttctttcttattcttagctgtgtgtttattctgacgtgatgaattctataattgtgggcacacctcttgaaccataaaagaaatgtcacatcttattggttgaatttcatggatatagctgttttatcctattccatgattctttaatatttctgttatcatttgtaggcttatagaacatgcatttgtcgactgccgctcatcagcacatgagcatgtttggtattggatattggcatgcatgtcggacatattagtagtagtacaatctaattattcaaattntgtcacttttctggttgtaaatacataacaaaattgattttcttgtatttacaattttgttattctcgctaatttatgtgatggatatgtgatatgtcatgtgtttcaacgggatggtggatgaagaaat

SEQ ID NO: 233281 - DNA, 452 bp, Glycine max
  unsure (1)..(452): unsure at all n locations
agctcgtttcagaagaggagggtcttattctccccatcattctgcgcgctgaaatgttgcgaccatgtgcttagggtgtgttttgttgttctaggggctgaaagcctctttctctttctcttgctccttgctttccctggcacagcaaaattctgcaaaggacagtgatgacttaattgttggggtctttgcaatatagtgcctgaagaaggcttggtgcttgcgctagtgcttgtggtttgaacaccaccacgtgccaagaggcagcttggcctactatagaaacagtcttccacaaacactgataaccattccaggccaaaatccacttcctgctgacattntttggtaccaaatttagttggaacaatccacacaaggcagcatataaaacacttatatatacacacaccaataaatactgaaactctataaagtactttgcaaagttt

SEQ ID NO: 233282 - DNA, 443 bp, Glycine max
  unsure (1)..(443): unsure at all n locations
nttctntgatcctatgcagattaatgtgttctttcaagatatgagcctttggtaaataccctttagtattttcaagcactctcctttcttcagtgtgtgttcttttcttttaggtaattaatctcttctactcaatgtattcatgaaaaaaaaaattatataatatccatgcttttactcaaaacgtctctatttggcattttttcttaactgcattagagtgttaattatttatcacttatcaacaaatgcgaaacagctaacatggcaaattggcaataggtcaaaaacaaaatgaacaaggggacaaagaaatccctgcaaaaaatgaaaggaaagatatgtaacggtctttgatgtaatcagcataagaataagacagtgtttcagtgtactaatactaatttgattaacacaactacagtacacaagtgtatgacaaa

SEQ ID NO: 233283 - DNA, 435 bp, Glycine max
  unsure (1)..(435): unsure at all n locations
agcttatntctttacctgcgatgaagtctgtgtgtgttatctttttatagatatgttggacatatctntcggttggtccaaagcttccaaatggtaacttaactgatcaaagcttgagatcatgttgcttaacaaccatgcatgtatgaattccaagttatataaccttctttttttaactggtttgtagtaagaaggcgatcaaacgagcccggtgccggctcaggctactcaagaacaagaggcaggcaatagcaaggcaactgagaaaggacttggctgagctaatacaaagtggccatgaagaaactgcatttaaccgggtgtgttaatgcatcatagctcatactgagttttaatcactggcataatatattcctctatgncacgtcttgttctaaaagaggaagttttcttttcttccctaagatgagg

SEQ ID NO: 233284 - DNA, 458 bp, Glycine max
  unsure (1)..(458): unsure at all n locations
caagctgggacacatgagagatatgcctgattttgatatttagcactggcagatgcgccttatctattatggggacaattgcccccaccttatttgcggatgcaccttatccatgggaggcaatcctacttgattcagataaaattattgtggacagcaaaacaattccctccaagtatatttttagtattagttatgtatgcaacaagcttggtacatatgatttatatgcctcaacttgatagaaagcattggcggatacaccttatctacagtgtggacaattgcccccaccttatatgcgaatgcaccttaccacatgtggcaatcctacttgattcaaataaaattattgtggacaacaaaaacattcccttcaaatatatgtntagtattagttatgtatgcaacaagtctgttacatatgaattatatgcctcaacttgatcggaagcact

SEQ ID NO: 233285 - DNA, 379 bp, Glycine max
ccagctgattgctggagttaacaatgttggttgtaatctcgctgggaagcaccttttctctaacaaagtgacagttgatctttctatgcctttgatctttcatgtgtttgtttcccaattttagttgttggagtagttgcctaagttccataagctcacatgtgactattgccatataacaaaatccaacttttgcactggatctagtaattatgttttccttattgctcttccatgatattaggtttcctcagcaagaacacagtatccttaagtggattttgtgtctaatggtgaccttttccagtctacatagaggtaataatgatcttttcattgccttttcctcagtaataatcctttccctttgtcttcttat

SEQ ID NO: 233286 - DNA, 450 bp, Glycine max
agcttgggcatccaataccctgatgaggatgtcccatatgttcttaaaactggacggattcatctgcttccaaagtttcatggccttgcaggtgaagacccgcacaaacatttgaaagaatttcacattatctgctccaccatgaaacccccagatgtccaagaggatcacatatttctgaaggcttttcctcattcattaaagggagtggcaaaggactggctgtattaccttgctccaaggtccatcacgagctgggatgaccttaagagagtattcttagaaaaaaatttccctgcttccaggaccacagccatcaggaaggatatctcaggtattatacaactcactggagagagcctgtatgagtactgtgagagaattaagaaactatgtgccacgtgcccccaccatcagaattcagaacagcttcttctccactattttatg

SEQ ID NO: 233287 - DNA, 440 bp, Glycine max
  unsure (1)..(440): unsure at all n locations
cgacgattcagatccaacaggatgtgtcttaagataactcaattnttttagtatcattccactcctgatcaagagcggttaaccattgcttccttttacatggaagggccagcccttgcatgctttcaatggatgcagtgcaaagcgcagctctcttcatggcccacatttcttcacgctatccattctcattttgcttcttctacatatgaagatcctacaagtttgctttgcaaattacatcaacgatcatcagtaagcgcttatttgtctgagtttgaatccctggcaaaccgtatcgtgggattgccgacaccatttatgctgagttgtttcatctcggggttaagtccggttattcggcgagaggtacaagttcttcaacctatntcattggctcaagcagcatcatatgtgcacttataggaagaaaagctcat

SEQ ID NO: 233288 - DNA, 433 bp, Glycine max
  unsure (1)..(433): unsure at all n locations
agagncacctgangcatgcaagcttgnnnggntaaagactcacgattgttacgttcttatgcaacaanngnnagncgcggctacacgagacatcttgccaaacaaagtcaggttaacgataacttgcctatgctttatctttcatgctatatgtagcaaagtcattgatccagtcatgtttgatgagttggaaaatgaggccgcaattatactatgccagttagagatgtattttccccttactttctttgacatcatgattcacttgattgtgcatctggtcagagaaatcacatgctgcggtcctgtttatctacggtggatgaacccggttgagcgatacatgaagatcttaaagggttacaaagaattatatatccagaagatctattgttagaggtcattgaaaagagccatgaatttgctcaaaact

SEQ ID NO: 233289 - DNA, 196 bp, Glycine max
aaaacaacaagggcggcccagaagcaggggaatgaaagcaaaagccccccaggaaaccggaaagactcaacaaaaggccgaagaaccaaaagaaccaggcaaaaaaaagaagaaaaggggcagaaagagagaaaaaaaaaacgacaaagggccacaaccaacacaacaaacaggacacaggcaaaagccagagacc

SEQ ID NO: 233290 - DNA, 456 bp, Glycine max
  unsure (1)..(456): unsure at all n locations
ggacctaagcacctgagctgcagcnagcgcatatggcgtctaatgttcntttgcacaagacatcctattaaccgagaaaatgcacccatttacaatcaacgcagctctcgtacctagattatttacacgtatttccaaggtgtttttgttacttacatcacacacatctccttggctaaattcacatacatgcatacccaaagtattttgtggtaccaaaaattgcacatgtacaccttttggtatttctaatacctatacatacacaaactctatgatgaatcttgactatctacacaataaggtgctacatttcatgctcttttcaagattttgctacctaaagccgcatgcaaattccagtttaattttctttgctgactaaaattgtattcataataaaagcgatacattttctgatgatgtatcttctgatcataaccatgcacacattta

SEQ ID NO: 233291 - DNA, 350 bp, Glycine max
  unsure (1)..(350): unsure at all n locations
tctaaactttatacaagaatgaagcgtgtgattctattttttatacaagcggccncagatatcttaagatagggggcattagaattatatatatcacacatctttctctaaattaaaaattctattttgattttaacccaaatcccaagatctctttcataaatgaactcctaaatatatatgcaaattaatcttactgaatagaaacaataagcaattaacaataaacaataaaagagtctaagggaagaaagattgcaaactcagatttatacttggttggccacacccttgagcctacgttcagtccccaaacttcccgcttgagagttctcactttcttgcataag

SEQ ID NO: 233292 - DNA, 434 bp, Glycine max
agaggatgctgttatgtgaaatattaatgagagaaggggggagcaccaaattgaaggaataaaagagggagagaagtggaaccttgaagcgtgtctcataagactttcattcatcaaagttcaacaatgttacacatgctctattatgactggtagcttcttgagaagctttcttgagaaaacttccttgagaagcatctttgagaaaacttccttgagaatctagagcttagctacacacacccctctaataactaagctcacctccttgagaagattcctaaagaaacttccttgagaagattcctagaaaagctatagcttagctacacatacctctctaatagctaagctcacctccttgagatgagaagctagagcttagctacacaccttctattatagctaagctcacgcccacgacaagatacatg

SEQ ID NO: 233293 - DNA, 397 bp, Glycine max
  unsure (1)..(397): unsure at all n locations
ggacctatgaaactaagctttatgtgaaggatgtgactcttacatngaatttgtattcaacgttcaaaggcactggtaatcgattaccaaaacattgtaatcgattacagctttttgaaatcaatttgaatgttgtaaattcatttcaaaactttttaaatccatttcgctactggtaatcgattacaacaatctggtaatcgattaccagagagcaaaaactctttggttaacatgtgttgagaaaaatccatgtgctactcaattntggagaaaaccttttcatacttaccttgattaagccttcttttgattcttgaatctatcttgagtcttgaatcttgatctcttgaatcttgattcttgaatcttgaaatcaactttccttttgaaactt

SEQ ID NO: 233294 - DNA, 409 bp, Glycine max
agcttgcttctacagaaacatgtgcaatttcttatgagctgctacagggaatgataaacaggggttgaattgaaatctgtagtgcgaagaaaggggaaagagatgtatgcatgcagtcaggtgacaaaaacacgagtaagcctaagcctttggtgatccatttcaccagggacattaccaatcagaggcctcgaggcttccatccatttacaacaaagacacctacacccttcccttacaagagtgataaggcagtaccatggaaatatagtgtacagggcccgacggaaggtaggacatatccgtcatatgtgttgggaatgacatgctatctgctaagattacaaatatttctggtacgagtggcatgactcgtagtggacgtattttcattgcttccaaactacct

SEQ ID NO: 233295 - DNA, 438 bp, Glycine max
  unsure (1)..(438): unsure at all n locations
ntgattntatatgtatacagggaaataataaatatatttatatgtattctatatgtttacagggaaaactttctatttaattaaatatatttagttgctttgccctgttggagctagttgttttctcttttgggctttatccaatagttataataattggagtgctgctaggtgcacttaacagttttgctggtgcacccagcaattgttgggaaaagaccttttagtccttagcatttttttaaaaaaaataactttcgccactctctctcccacgccgcgtgcttcttcattcttctacttcttcttgagtttctgcatcttcttcattcttgcgtgattgttgccgtgaacctcctcagacctgccaagtgaacttcgcatttcgcctcccaagccattgtcgccattgttgccgttctacttcttcttcgcgtg

SEQ ID NO: 233296 - DNA, 432 bp, Glycine max
agcttgtaccatattcattcgacaataattttttactcggatgtccgactgagtcctgtaatatatcgagatgctcgaaattgagaaaagaagctttgagcaaattcaaacgatattaactttttactcggatgtccgattgagtcccgtaatatattgagacgctccaaattgaaaacggagctcgtagcaaattcaaacgataataatttttaactcggatgtccgattgagtcccgtaatatattgagacgctcgaaattgaaaatggaagctcgtacgaaattcaaacgacaataactttttactcgaatgtccgatggagtcctgtaatatatcgagacgctcgaagttgaaaacagaagctctgagcacattcaaacgacaattactctttactcggatgtccgatggagtcctgaatagattgag

SEQ ID NO: 233297 - DNA, 344 bp, Glycine max
taccatcctgcataattggggcaaaagatgaatcgagtacatcactgcttcgactactgccaaacatatttaggattatagatgtccatgtttctcccagtttcaccttgacaaagatgtcatggaccatgttgaaaatctaaattgattcaaccccatatcctgcgtaaaaattcgcaatacttcgactgttcatcattcgcatgcatccatgcttttcattggtagcattgctcattgcattcctcccttgtaaaataaaataaaatagaatgaacttatcataaagaaaaggaaacgcttcactgcgaccttaccgtactcttgctatatctagagtatgg

SEQ ID NO: 233298 - DNA, 421 bp, Glycine max
  unsure (1)..(421): unsure at all n locations
agcttcacaaatttatgaccaagttcacattctcctcatataatttctttgaattaacttgaacttagagatgaattaaaggaatctataccactgcaattgattctaatagcaatgtataaaggaaagaaaaataaaccttctggtttaataactagaattgtgtcttgagagaatcacaatgacaggatttgacttctactaatcaattgaattatatttggtgtgatttatatatgcatttgttatatatgcatttttatgtcaattatttggataaattatgttgaactaactatataatctgtggatttggataaattatgtggattagttaggattcgaaagctttgttacacaaattatntgagtgtttaatttgacgaataaaagtaaatgttcttcatgatttcagatcatg

SEQ ID NO: 233299 - DNA, 401 bp, Glycine max
  unsure (1)..(401): unsure at all n locations
nnnacactctgattgcaagctcatttatttattgnttattganggcagtggtatatgattaattaataaaaaaaattagattttggctttcattcctccatagtcattgtttgatctcaacagtatatgtattataatttagcttagctcaaatataatttctctgtagttttcatgtcttgctaaaagaagatatagttttaaaggaatatcaaacgttggacaatggtaactagttaaagtaatctactttctcatattggctattttaattattataaaagcatgcctaataattacattggaatatacttttactagtctaatttgagtgtcatgcaatgtaaaatgactaatgtctggggctagttggctttaaataagcatcatgtttggcgaat

SEQ ID NO: 233300 - DNA, 413 bp, Glycine max
  unsure (1)..(413): unsure at all n locations
agctngaggcgagagttaaacaagagcactttttgcccaatatggaactccttcctaagaatcctagagtcatgaaacatcttcactctctccttgtaaatcttggagttctcataggcctttaagtagatctcctcaagttgttacaactgaagctttctttccatacccgcttcatcaaatgccaagttacaactcttcatggcccaataagcacggtgctcattctccaccaggaggtggcatgccttacaaaaaaccaccctatggggagacatccccaaaagtgtttagtaagcggtattgtgagcccatgttagactattggcaagcgtaccaatgtcgtcgtaggttacatatttataaaaaaaacaagattgtcttcacaaggaccngagttactcaattcctct

SEQ ID NO: 233301 - DNA, 435 bp, Glycine max
  unsure (1)..(435): unsure at all n locations
ggtagccaagaacaagaaggagctgaatccatgagttatatgaggaccttntattgctacatanaaataatgtgataattggagctaattatatttaacatgttagtgttcggcttccggcaagtgcactagatcgcacaagtagtataaaacggtaagaaccgagtatcgaactcttggggaacttgtgttatttggtaagctatttcagcaaataggtgtctggtgtgtaaagataagtgtgaatatgaacaggtgtataaactatctgtgcaaaaagatagaaaatcacgcgagagaaatgatgtgtaaaaaaaagtagaaaacacgttggccttcctaataggtgcttgatgctaaaaagatattctctatctcacaatgctcatgagttcctatggtgtctcctgagatactataccccgattcctcatg

SEQ ID NO: 233302 - DNA, 454 bp, Glycine max
  unsure (1)..(454): unsure at all n locations
agcttgtgagattctttgaagcagattattattattcagnngagaaatcataaacagaaaacaactaaattatctctaattttttattctaatttctaaattagtttgttattttgtgttatctccacccttcttcctctataaatacaagttaagagagaaacacttgaaatcgtacagacagaatgcaaacaagcatgtcccttcctattaagatttgtcttctttacttgacctgcctcacagtttcctgctttgcagagcaaacttcaaccttaattgtagatgctaaaggatctgtgagaaaaattccagatactttctttggagcattttttgaggtataatttaattaattactttttgtttggtatatttttacgtatatgattctttagagtccacgaagactttagagtgcgatctaggatgtttgcttgaataaactaattgt

SEQ ID NO: 233303 - DNA, 430 bp, Glycine max
  unsure (1)..(430): unsure at all n locations
tactaagcttagcagcacggcagctgctgctgccttcttggtatcatctttagtangttggaaaggagcatatgatacagaagattgaacagaagaggctgagatggatctgtggcttctgctgcttggttaagctgcttcctgataccaacaactttttcgatctggcctcgtgcaaccttcacaacattaaaaccatcaatttgtataaatcaaatacatgtggaatcagttgaaacagatgcaaaactttacgcatttaatcatccaatatacgcaaaatctggggagatatcacatataaactcataaactaaaatacacccttttgagaggaatttaatctcctagtgtgctctatcttagagaatgacatgtcgntattaacttcttttaaaatttagatacagattcttacgaagtaataatg

SEQ ID NO: 233304 - DNA, 476 bp, Glycine max
ctgaggcatgcaagctttggctgcgcaacagctcggatttcgtgagtatttatagaagatgacgcattgtaatcgattacaggtattggtaatcgattacaggcccaataagccttctggtaatcaattacaggatgttgtaatcgattacaggctgcctgttcatgtgtaatcgattacactggatggtaatcgattaccagagcctatcctaggctagtttctaagagaatatctatatttatgctcaaatacatcctatatgactaattttcactactaatacactaaattcaatcattcaattactatatacacaagaagtcataaattctatcataaagacaagaattcaaacaagatcaaacaaaataatctacaatcaaaaggtaaaaagtaaatcaaccaatcaatcaaccaatcaatcaaccaatcaattcctatttttctaaatctcttacatctaagagacctaa

SEQ ID NO: 233305 - DNA, 434 bp, Glycine max
  unsure (1)..(434): unsure at all n locations
actcaagcttcgcttgattggtcttcaccgacgaaaggatcaaagtgtgttcttaaaagatgcaaatctgatcatcatactttgataaatgccaaaaaaactagggcaaatgaagagggtgagaatgagggagaagcccatgccgtgactgccattcctatacagccaagtttcccacctatccaacaatatcattactcagacaataaccaaccttttccttacccaccgcccagttatccacaaaggccatccctaaatcaaagtctgtctaccgcacttccaatgacgaacatcagctttagcacaatccaaaaacaccaaccaagaaatgaattntgcagcgagaaagcctgtagaattcaccccaattccagtgtcctatgttgacttgcttccatatctacttgataattcaatggtagccataaccc

SEQ ID NO: 233306 - DNA, 447 bp, Glycine max
ctgcggcatgcaagcttaacattcaattgcgagcgtcttgatatattacgagcctcaatcagacatccgagtaaaaagttatggtcctttgtattggatcacagcttcaacattcaatttcgagcgtctcgatatgttacaggactcaatcagacatcagagaaaaaagttatcgtcgcttgagttggctcagagattcaacattcaatttcgagcgtctcgatatgttacgggactcaatcagacatccgagaaaaaagttattgtcgtttgaattggctcagagcttcaacattcaatttcgagcgtctcgatatgttacgggactcaatcagacatccgagtaaaaagttattgtcgtttgaattggctcacagcttcacaattcaatttcgagcgtctcgatatgttacgggactcaatcagacatccgagtaaaaagttatt

SEQ ID NO: 233307 - DNA, 451 bp, Glycine max
  unsure (1)..(451): unsure at all n locations
tgccttgccccttgatatatttgagggacgcatggtcactattaatgacaaactccttgggataaaggtagtgttgccatgctttcaaagcccgtactaaggcatacaactccttatcataagttgaataggtaagggtaggaccacttaacttttcactaaaataagcaattggatggccttcttgcatcaacacagccccaatcccaacatttgaagcatcacactcaatttcaaaagatttttgaaagtttggcaacgcaagtatgggggcattagttagctnttgcttaagaacattgaaagcttcttcttggttctctccccatttgaaaccaacatttttcttgagcacttcattgagaggtgctgccaatgtgctaaaatccttcacaaatcgtctatataaacttgctaagccatgaaaactcctcacctcggtcacagactt

SEQ ID NO: 233308 - DNA, 405 bp, Glycine max
agcttgagaggccatctccaagataagcttctcttcaggctgaaaggatgagccctatgatcagcactggtaccatggcacaaggtagaggctcaccatttgggtgagtcagaatatcatagtttttaattaattagatcatttggttatgttatgtgtaattgatgacttgatcatgtgaaactctcttaatagtagtaccatatctagggtttttgaatttggtcttggaaattagcagttcttacgagggttatttcccccctcctcaagtactgttatgtggtataatgcctttgcatggcaaattaaaccaaagtcttaattctgacaaatataattaaagcacgtattaatgtgcttgaatgtgagcattctcacttgtacgctttacatttagcaatg

SEQ ID NO: 233309 - DNA, 413 bp, Glycine max
  unsure (1)..(413): unsure at all n locations
tatatgtgatgctagtgatacaactgtggtagcagttttggggcanaggtaggataaggtgctttatgccatttattatgctagtagaaaccttgatgatgtcgaaaagaactacaccacaacaaaaaagagcttttggaatttttttacatttgataaatttagggattacttggctttgtctagagttatttgttatatttaccactctgcaattaagtatcttatgtctaagcaggatgctagacccaggctgattagatggatcctcttactgcaagagtttgacttggaaatcagagataaaaaaggttctaaaaatttggtagctgaccattgttcgctgaaaacttgttccgctggtcagcgatgctaatcggcaagtgcaccgagtctcacaagtaatataaaac

SEQ ID NO: 233310 - DNA, 296 bp, Glycine max
gagcacagacacgaatagctcaagtcattagctggacaaccatacgcggggcaagcgactaaagctgacaaaacactaattcctgagatgaccacagaccatggcgaagccaagaaacataacgccaacactgacagaacacaacgccaatagtcgttcgaccattaaacagatatacacagcaaaaagtgcaatccgttcttccacaaaagaaagcgactctgaaaagcaacatccgaagaaacctcgcgaacctgaacacgctaaccactggcacagcatcaacgaggaacacc

SEQ ID NO: 233311 - DNA, 300 bp, Glycine max
ggatcttttctttcgagcatataacctctgctatatgcttgatatgcaaagtatctgaacttagttaaaataaccccagtaaaagctgccttagaatgcaaatgacgaagaaatttttcactcgtaataggattaattgagaaaatagtccccatatttttcccaactcactaaattggtccccatatttttaatttattaatagagacctcttttttccaaattgactatctgaatctccaaaacataaattaaaagttgattgctatcggaaacattgactaccacatgtcattatgg

SEQ ID NO: 233312 - DNA, 342 bp, Glycine max
gaccggacttaagcactgagctgcgctaattgcaaaattcttttgatttaaataatccgttctaagatatatactgttttttttttaaagaaacgtagcagtatactaatatgcttaaaaacaccaataattacctaattttaattaatatataataaggatatatattatattatatatattattatatattaccaaactccatttttaaaaaagcaagccttgacaataaaagtcctttttataaagatttttgagctacttttgataattggaaaaaaaaatttatattatgaactgaaaacttttatttgaaacaaatgcatgttgtaaaaccaaaaa

SEQ ID NO: 233313 - DNA, 442 bp, Glycine max
  unsure (1)..(442): unsure at all n locations
tgttgattaggatgttttgactgacttctactcatattttcattccagtgctcatggtgatcctcctcatcattaccttctgaagagaaagaagtgatcatcaagtcttaaaagtggattgaaagagtatcaaagatatctttgaggatataacagtgacaaggcgtagtctagaagaacaaatcatatagaaaaatcttcagctaatcatgtaaagacattgtgagtgcattaatagaacaataaatggatgaccatttcacttgcagtgtatcatcaaatactatagtgtatctatattagtctaactcacaccaaggtttaaaatactttgtagtatctacaaactattttcatgccggaagaaaactttccatttgaaaaagcagattntgttgcctcatcatatngaaaccttttgcaaaacattccgaggaaacat

SEQ ID NO: 233314 - DNA, 380 bp, Glycine max
agctttcgaaattgaatgtgatgcttctgtgtgtggaatacgggttgtactgatgcaggactattaaaccattacatactttagtgaaaagcttccaggagattgggtctattcatatgaggaaggaaaggtttcctgctaaaagaaaatctaaaagttgcaaccaataggagatgggccttttaagttctagaaaagataaatgacaatgtgtcataccctaatttcgtctggggaccatccattgttgggatgcgaccctcgtttgaccacttcgaggtacttggcccccatcgttaggcaatttgtgaagttccgagacatgctggaagtcaaaagaaagcattgtaccacaattccgtgaagtttcgtgacatgcc

SEQ ID NO: 233315 - DNA, 420 bp, Glycine max
tgaagaagagcttaaataagttgtgtctttgacatgcttgtcatactcctaatttcgccagggacctttgcttgatgacatgcgacctttgtttggtccttggaaggtgcttggcacccatcattaggctatttgtgaaattccaggacatgccggaaaacaaaaaaatattgatgcacaacccgtaagtttccgtgacaccccggaaatcaaatggaagaatcgttgcataattagtgaggttccgtaacattccgtaggtcaaaaaggggatgattatgtaatccgcaaggttccgtaacattacggaaagaaaacaagtatcgttatgaaattcgtaagtttccgtaactttacgaaaaaagaatcaccaaaaaagggcagggggtgtacttagtaaaaatggtgtgcaaatagcaa

SEQ ID NO: 233316 - DNA, 194 bp, Glycine max
ttctactctttatggctagggcctaaaatacacactacggctgaccactatttggcttacagacgcatgcctaccggatttgccaacgcccttgattcttccctaacttgccctaacaagatggatgaacacctggcctacgatgccttaatttttaaacttttttcctagatcattttcaacctgaattctct

SEQ ID NO: 233317 - DNA, 394 bp, Glycine max
  unsure (1)..(394): unsure at all n locations
tgaagactacatccttgtttagcatgttgcatatnggtttggctatcacggagaagtccttgatgaatcttctacagaaacctgcttgttcaagaaaacttctgatacccttggcatttactagaagtggtaacttcttgataacatcaatctttgttttgtccacctcaatgccttgggctgaaaatttgtggcccaacattatccctgcttgaaccatgaagtgacatttctcccaattcaacactatattggtctcaacacatcttcgcaacacaaacttctagattcgtcaagcagcaatcaaaggagggcctaaaaactaagatatcgtccatgaagacttatatacacttatctaccatgtcaacaaagatggctagcatgcacccct

SEQ ID NO: 233318 - DNA, 436 bp, Glycine max
agcttgggtgaaattgtatgcataacacctcttgttgttagagtatatatggtagagattagctacagttgactcagcagctggaccttcctagtgtattgtagacaacattgcatgagtataggcatactccaatactctcaagtatcaatcactataatccctcaaaagcattatttcacaaaaattttgtctactcattccttagattattggagtacatgcataatccaatactctcacattaggaactacccttattatgttgacaacacctttcgtacagacatctttttcttttttccattaaggcattaaattaaatcccatataactttgattcttttactgtttcagttattctcattttagcaatctattatgaggaataaacaagcaagtgattaggtgcaataagttctatctgaatgaaaac

SEQ ID NO: 233319 - DNA, 434 bp, Glycine max
  unsure (1)..(434): unsure at all n locations
nntacaaaaagaataaaagagaatgttngcatatatgatttgtgtcttggttcttcaaagcttcttctatatataaccttcatattcaagtattcattgtctcacaatggttggatttttcactttgctctttgttagaagtcttgatcccgttgaagcatttaatgcttacattaatacatgtcccttcttcatgcaaagtccatactaataggttagtgtgtcttgtactttagtagggaagtcacttatttcatcattaggttcgcaacaacagagcatgccttttgatgaggatcaacgtcttccacattctggactttatttattcttcataggactttgacatatcctaggagaatgttntctgcatgaaagaatcccaagcacaaagtattaaatgaagatcttaaatgcactacttaaatgctata

SEQ ID NO: 233320 - DNA, 392 bp, Glycine max
agcatttatccacacagttcaaaccacttggtcacaaaccaatatagcatccggtttgcgccccactaagtctcactttttactctatataagcaccaaactcacactcacttgtagtcatagtagcaagttcaactactaatatcatatcacaaaacaatggaggattattagggaagtttgtttagtttgaagttgcaccaatttattggaaaataaaaaacaagcttgcaaagacccagtgacataaaaacatttattgaaaaaaaaacaagcttgcaaaatctcacaaaaatgagaaaagaaacaaatatgtaccttgcgttgatgttagactccaacggaggatgctcaacctcgcggcaggacaaatccctacgacagtcacgaac

SEQ ID NO: 233321 - DNA, 410 bp, Glycine max
tgaacgaatgtaagacacatcttcttcaaccttggtgattcatgactccatctcattgaagtgcatatccacttgtaattccaaagtgtcaaaccttttaccaacaaaggtttgaagaccatcaaacctgtccaaaatctttgaaagaagagatgaatcttctccatcatgtccgtcttcaccaacatgtcgagcaccctttttcacccaagagccatcatgctctttttgataaccaaaggatgctatgactgaagcgcctataaggaaggatctcttgattggaacatagggttcagaatcaagagggatgttaaagtgttgaaggaaaagggtgactagatgaagatatggtaatggagcattcaatcgcaatgccttatgcatgcgatatctaacaagatgtgccc

SEQ ID NO: 233322 - DNA, 394 bp, Glycine max
attgatccctgcatataaataggggcaaattaaatcttcacgaatggtctctctaaatatgtcactccctaacttgatgtactctaatatatgccattttcctaaattgcattgaaatgtattcttttactctcaccggattctcaccagcattccatatctcccaacatatcacattcatcttaaaatatgatggtaagattttcgtagagctattacaggaaaaaaaaaatggcttcaagtctctaactatgttcctgtctgttatattttaatgagaaaaaggacacaggaagtttggacggtcaccatgattgcattgaataatttcagttagattagataactaattattattattttttaaaaaacactagtattctactacaatatg

SEQ ID NO: 233323 - DNA, 383 bp, Glycine max
aaacttgtgtttttgtggtaatggttttctttcagtatataaaaatattcacacagagaggatcaagacaaataccatgacctttggattcaattcattggcatttttttccttctaaacattggtgagaatgatgccactatctctaaacccaactggttggcttgagtcagactctcagtgagagcgtgtgatttgtcctacttctctccaccactcacccccaaaatatataaagtacactaataaaaataataaaagtaaaagagcatagagagaaagagagtgaataaggacataacaataagcataccccagcttttggcttctgaatgagcacatcatcaagggaaaacccagcagaatctaaaaacacaggaaat

SEQ ID NO: 233324 - DNA, 439 bp, Glycine max
  unsure (1)..(439): unsure at all n locations
agcttccacaatatccaaacatcatgttctttcctaaaccaagaaaaaagggccgaggcagaaaactctgcccaaaacacattccaataccacagctctccctactcaaataccccagtaacattctcttcgttccgattcgttaaccggtggatcgactcgaaaattttactggaggtccataatacataattctacattttgaccgttgggattagctagaaatgtccaaaacccaatatgtactacctttcccataaccagcaatgcacaaacattnttctgcacatttggaaaattctgctgcacaaatttgatagctntttgctgcacgaattggcagatttcaaaatccatcttacccacattgaattttgctcaaattggatcctacaagtcctanatcatgtataaatcacatttaaaccagaaacaaact

SEQ ID NO: 233325 - DNA, 465 bp, Glycine max
  unsure (1)..(465): unsure at all n locations
accttaaatactaagcttaatgaatngcttgtgttattgaaaaagctgcttccttaatataacatgttgccgaagaatcactacaaggcaaagaagatnttatggccagtgggaatagagtaccagaaaatccatgcatgtccaaatgattacgtcttgtacaaaaatcaatttgtagaattgaataagtgccccacatgtggtgtatcatggtacaaagtcaacactctatgaatgcagtgatgatgcaaccacaaacaacagtcgtccaacaaaggtgtgttggtatcttccaataatatcaaggtttaagcgattgtttgctaatggacatgatgcaaaaatccttacatggcatgtagacgacaaaaaaagtgatggattgctctgacattcgattgataacctgcaatggaagataatcgattgtttgtatcctgattatggggacgagccaagaaatct

SEQ ID NO: 233326 - DNA, 393 bp, Glycine max
  unsure (1)..(393): unsure at all n locations
agcttancctgcagaatataatgcatatatatttaacatgctagttccacacaccaaataccagcccaaacccaatgcttaggcattcactttaagactatatagtgtaattagagagacataaaatataaaagatatttacggaactataagagcataaaagagttaccttattgcaagctgaagaaaaaacaagaacaactttatcaatatattccaaagattttgagaagttgcctgaatcataaagggactgagctgtttctagagcactttgagcctgcaatagttgagagagctccttttctgcagctgaatctccaggttttaactccagaaaacttttgtagctcctctcagattgctcatatctacattagccaaaaagcacct

SEQ ID NO: 233327 - DNA, 460 bp, Glycine max
  unsure (1)..(460): unsure at all n locations
ttgaagcggagacggcacgctataaccagagacatgaatgttgtgttgctttctgaatattgcgtcccgctgaaaacagatcaaaatatgaagccattgcataaacactgagaattacgcgtattgcacaaaacagaaaaggaacctcgagttgcttattttgttccttcttattattattatacagctcaacggactcctcaatgactcggacttcatcattcgactgcgccacagacgtcgaacttctgaacacattgaatccttcgaccgtttcttttgtgcgtttacgaaaatgaagcaaaagtgagatgcatcacgttgaatgcaagagatagcatagtgtagtaagagaatgtgaattaccggaagaggttcccttgcgcttcctcttctttcgtcgtgacgccgcgactatctcttcttccagaggttctattgttntctcgccttcgtcttc

SEQ ID NO: 233328 - DNA, 413 bp, Glycine max
  unsure (1)..(413): unsure at all n locations
attaggtgtacatntaatatataaatggataaatgggtaaatggaattattattagtatgaagtctacctccagcttttctacttttgctttatggtcttcaggaagcagccggacctcatcaatcaactggatacactcggagacattctcaggggacacaaattccaattccacatgtacacaacactgcagatcaataatcaaataattgtcatgcaccaaaaaatttaagaaaaaaagtgcaacataaatcattgctgagataataatatcctctatcagcaatgtggaaagaccattaatagtgcgaccatctttntgttntcttttaatatgggtacaatgtaaacatcgataacttgatatttcttagacacaacttcaaatttgacattgtcagtaaatttcaaa

SEQ ID NO: 233329 - DNA, 470 bp, Glycine max
tgtcaccatagaactcaacaattacacatacttgtttgatctatatttcgattctgcccttttagaagaactggccattttgatcctttgggacaacatgatgaatttagtagatctttataggaggctcttgggatcaatatcggcaatgcaattcatccaacgataagcctaacttgaattatagagttagatacaattaaacccaaataaacaacatgttaaatattggggttattactcatttctgtaggttttattctcaaattatttcttcaattaatataagaaatagcaataataaataatatatataaagaattcttttatcccattcggaaggatatcatctcatttcataattatctatgactatcatctttgatcttgctttcctttcttttgttctctctttaacatttactaaaaaattctgtatacttagtggaagggccactgaacattctact

SEQ ID NO: 233330 - DNA, 406 bp, Glycine max
  unsure (1)..(406): unsure at all n locations
agctntataagtgcgggttcgggagacaaaggtatgcgttcgcgatatgcgaagatgatattctgagtactttggatttggtacgaccatgctctcctgaattccagctgggaaattggcgagtggaggaacgccccggcatttacgcaacaagcataatgtaaacctgtacggctctaaaagctctatagttgggcctatgctttacagttcttcctttgtgtaaggcatcgcgtcttttgattttgcatttataacacaaagatctttcttgatctggtcctggtctctacccattctcattcattggcatgggtacttctttttctgaaacggcagatccgatcacatttccccgaagcactaattcggggcccggctattgctttggcataaatgattcacg

SEQ ID NO: 233331 - DNA, 461 bp, Glycine max
  unsure (1)..(461): unsure at all n locations
tgtgattcctttccttgttaaccctttacaagtgaatgtatctccacctctgttgaaggtgtggatgcatctaagtcaaatattattcttgtactattgaagcacttgtgtgaagttggactaaggaagcataaaattcaccttggacgttaaagaaaatttcatgcttccctttctttactattgttaacggtttgataagtgtatcaaatgtccaagtagtaaagactcggaagtccgagtgtcgatttccacaaggactttgttntgtacttgcattggataattttcaatttataagaggataagataagatgaagtaaaagatgagtaaagagaacaataactaaataatagatattagaagacaaaggaaataatagaacataagaattaatagggaattcaatgagatgagaatgttagaacctaacatgtcttatctgcctaaaatgtattat

SEQ ID NO: 233332 - DNA, 326 bp, Glycine max
gaaatatctcaagcccaaactgggatttctaacaaaatctttatcactggtgctttcaccccaaaatgaaaaaatttctctaggaaaaacttgttactttttccatatttacttgctttcaattctaattcctttgtcataaatattaatccctcctatttcgggtattgtttcaacaaagcttccaacactaaaagtccttaacttttcataagcattcaagaaaaaaatgaactttctggccatcaatgttgaaggttgacacttatcatccttacgcaagaacaacggtttttccctaaaccccctttccaaaagttcatttg

SEQ ID NO: 233333 - DNA, 444 bp, Glycine max
  unsure (1)..(444): unsure at all n locations
cagcttatcaaggcaacttctaataaaaaagctttttagctctgacagtaagcgttattttggtcctttataatattcatttgtaatgatattaggagtttctttttttgtttggtatgttgattaaggcaatgtgattagttactgtgttaagaagagagttcttcacttgtgtttctccctctctcgctgcttcatcatcctctgtgttacctatattgtcatcaattttctctctggtagtaggcttatattcaatatttggttgtatataaatacagttgtgcccaacaaaaatgggcaagaacaaccacgagggttgaggcggcagtactgtgaagagaatgctgattgcgagaaactttacagtaatccatcaaatatgatggaagtcagtcctggatataacgaggagaacgaggatgcgactactgactantatat

SEQ ID NO: 233334 - DNA, 438 bp, Glycine max
  unsure (1)..(438): unsure at all n locations
agcttatgagattagtaggtttttatattctttatctttaatctttatttttatgtgaaaggtaaaaattcacaaatacataatttaagataattcacaaaaagtcataggatttataatatattcaattgttaaggataaataaaatatcagaatccataattgatttctgatttcttatctaaagtatttttttatatttgttgtaagatttttacgattatcaatcacaattataaataatgatattataattctttctcaaccaaaatatctttattctttaatgagactttcgtaattattcttatacgaaaaagaaaaattatgntactcgtcataacatagaatggaatcatgttaatttacaaaccacttgcacttatgtgtattggcggatatacctaatattgatccaaatcaatatttcattgatct

SEQ ID NO: 233335 - DNA, 489 bp, Glycine max
  unsure (1)..(489): unsure at all n locations
ggacctataaaactcagcttgaacanatccaattgccatactaatggtaaaattcactgtttttaaagcaatttntcatcttcaagaagtttaacaattggctcctgtgcaggcttcccatcgatacacaatttcttcagtggcggtccacaaagatatagattatcttcataacatgaggcattgaaactctgtaattgtgtaccagttggaatttctccagatagattgttatgtgacaaatctaacatagagagtcgatcaatttgagtaagacttgaaggaattgaaccaactagctggtttcttgacaaatcaagaaagtcaagtgatgttaacttcccaatatttgaaggaattnttccagtcaaattggttcttgataaatttaatgaaaccaattcaaataaactctctatttctattggaatttctccagaaaagtgattgcttgaaagatcaatgccttttataagtgataacacattc

SEQ ID NO: 233336 - DNA, 421 bp, Glycine max
agcttcattcttctgcttcattggattgtttcaccttgcgatctgaatttctgctattggtacattgtttagaccagccctggttgctatcataattgtttttcttgcaaatagagcattgaggagtggtcctgtcattgttccttggccttacttggtttgaccttcctctctcacattctctactagatcttcatcctttgctttgtggctgatttctgttgtaccttttttctctctgcatctttctttttataaaaaaaaaaaaagtgtgattgtaaaggttgctccaagggctgatctaaaaaagcctgtccgttctttctccaggtttgctcaaaagaaatttgcaattctttatactgcgttgtatattgcttcaagagattgtgaataaaagtttgcttgtgtataacaatct

SEQ ID NO: 233337 - DNA, 470 bp, Glycine max
  unsure (1)..(470): unsure at all n locations
gacctatanatactcagcttatgtcctcgccttgcactgctacacgctgaatttctttggcatttaattattctttaattaatagcaataaaagctttactaatcggtaggattaaggaagattagttcttcttattgggtgctcttaattctttaaaaacaacgaattaatgttatacagtaaatatttttattgtaatagtagtaataattttatgataatagttgtggttttatttgtttatttgtgacgttagaagttagagaagtatatatattcaaagttgggtatcactggctcctgaaagagtggatccagctcattcatagaaggaactaacccctcatcttaaatcttacacttccgacacagctcacctataatggtttggattttactgtacctatgctagtatgtttatgttgaccaaatattaaaaaaaggttgattttcaattggtttattataa

SEQ ID NO: 233338 - DNA, 356 bp, Glycine max
agcatggataatgtcatacatcattcgctaaatgaattgttcatatgaaaggagagaggcttgagtagtcattgttggacaagtggcctcatatatcttaagaggggggtgtgcgctctcttcttcccctactttcccactctctctcccaccccccctcgctacctttacgccttcaatttactctccccccctatctcttcatctcactcttctcctctctatccttccctcctcccaacacctccctcctccctctcccccctctccgttcccatccatctcctcccctcttaccccttctccctcttctcacccctctcctcactcttacactctctcttcctccccctatt

SEQ ID NO: 233339 - DNA, 408 bp, Glycine max
  unsure (1)..(408): unsure at all n locations
agcttatagccaagctggaacaacctagtattctttgtcctaccaagctagtgctagctataatacaaataagaatatttgttgtttggttggctcattgattagttcttaatcgtcttattgatgaatatgcaatctaaacacgtagtcttttctctcaagatgttcaaggtgttttgagagcttttgaactttgcaaagaatttacagaaagctttacaagaagaattcaaaataatagtgcatgggttcgtaacttcatctcttcaaagcttatggtatttataggcattattcttcaagtgtttgttgtctctaaacaaatagatntctttactttgactcacgtctgaagatgcaactggtgggtcattaaatgcacactatcttcatgccggaaaaccattt

SEQ ID NO: 233340 - DNA, 424 bp, Glycine max
  unsure (1)..(424): unsure at all n locations
agcttgtacttagaatatttttttgtttacttattgaaacagaaagttttctaagctacatcaataaaaaaaatgtcatatactaacagaaaaataatgttaaacattaggattaggattgcctctatattagttaacaacatgatatacatacagtgtaaatctattttctatacttatggaatagtccattaacatgagatgatgcatgatgcttttaacatagacctacattctactttgttggaattgaaagtaattccaagaattgaaaaaaaaagggctttttttcattgccttaaatttatttttatttattaaattttggtgattaaacattatttgttattagatntaaaacatgctacaaattgctttggctatcaaggatgagggttangatctttgaaaagctgatattact

SEQ ID NO: 233341 - DNA, 428 bp, Glycine max
tctaacaatagctttttgttattatgtaaagatggtagctgcagtaatctaagtaattagtgcagggtaaatgtattatgtttcttcgggaccagcttggttcttattatatgtatgttggcattcagaaccagttgctaatccactcccattatgtatctaccaatttttgaggagaaaaatttcattatcccaaactgctcccatgttaatatgttatcctttctatttcacaaaccacttgatcctacttttgtcgaatgctaagcatcttggttgtggttctattctcaatcttgtttataaagtaaagtaagcttctctgccaaagaaatacactcatgcaagcttttgagtcagatttagaaacacataatggcaagacactgaatctatcatgtgaaacctattatgagctaatttatttc

SEQ ID NO: 233342 - DNA, 327 bp, Glycine max
  unsure (1)..(327): unsure at all n locations
agctaagctatgaggtgatttccatatggacagctcgtatactgttttaacatctttaataaagagatcaaagatcgttaaacctcaatacttgtggaatggtataatctccagtatattctatatcttatatttcacatctatgtaatctgaaaccatatgcttccaaagcttttctccatagttttagttcaccattaatccccccctcccctccccttcaatgactcttccactaggaatacatcatcctccaaaagtatgcataaaggcactctatgatatgctaagngagcacgttaaaaacttaagtttaataacctataa

SEQ ID NO: 233343 - DNA, 428 bp, Glycine max
  unsure (1)..(428): unsure at all n locations
tatgctgcaaacatctacaatagaactcctcaacctcattatctaaatcagccacaacagaacaactatgacctctccagcaacaggtacaatcccgggtggaggaatcatcccaaccttagatggtcgagtccttcacaacagcagcaacaacaacaaccttattttcaaaatgctgctggcccaagtagaccatacgttcctccaccaatccagcaccagcaacaacagcaacaaccccaaatgactatgaggaaaaaactatgcaaaacatgcagtttcaacaagagaccagaacctccattcagagcttaactaatcagatgggacaactggctacacagttaaatcaacaacagtcccaaaattntgacagattaccttctcaatctgtctagaatcccacaaatgagggtgtcattacattg

SEQ ID NO: 233344 - DNA, 427 bp, Glycine max
  unsure (1)..(427): unsure at all n locations
agcttccaaattagtgtaccacactactctgttctccggccaagctatcctgaaagaagtgtatcaacagcttttcatctttagagtgggcgcccatcttacggcagtacattttgagatggtttttgggacaagttgtccctttatacttgtcgaagtccggcactttgaacttcgggggaataacaacatcgggtactaagcaaagatccgtcatgtctgcaaacggatagtccccaaatccttccacggccctcaatctttcctcaaggagatcgagcttcctcctttcttcagttgccgggggcggcccttccatggacaaaactattggcgaagctgcgatgttgggttgaggcaacgtgcctggtgccgacccttcggggatcggnggataaaactcgacatccctccgagcataatcttg

SEQ ID NO: 233345 - DNA, 470 bp, Glycine max
  unsure (1)..(470): unsure at all n locations
tgtagaatggccagacatgatacatgtcagggtttggtttggttcaagggtaaaagggatgccccacattatttccatgacacaaatgcaaaaatgatgatttggaaactttatgcaaaactggtcatgcatgcacctatgtggacactcaagtgtcaaatttttatgctcatgtgatgctagggctcaggattcattccctctattttagtcaacccaatgtttccaaaatatgttcttttatccatttgtgcattcatccgagtccattttgggcgttcggggaaatttcactgcgttcacccttcgggtgtacacacattnttttcaaaaaccagctatgatcggcgaatttcccanagaagagttggtagtcatctcttttcaaaagcatgtcggtttttcagctaaacaacttattttgggtttctttttcctctnttttttcttacttgctctctttttccctt

SEQ ID NO: 233346 - DNA, 405 bp, Glycine max
  unsure (1)..(405): unsure at all n locations
agcttaataaatgttgtgatggatattctatttgatgnngaggnnattgtctatgcaagttatttcacattaactattgncaaaactatgtattctaccgatacttatttgttttgcatgggttgtgttgccatcaatgtatgtcttattcagacatcttcaaaaatcaatatcccagcctttgattccaatcattctaccgaacatgaatctacgagttttaatcatgaccctcatcttttaatatgatctttcttgcaactcttccattttgacacttcatcactttcaacttagtattcaacttattcatttctatttgttttatccagcaatccatgtctgtgacagcagaccatgatccactgcttgtgctcccattgacacctacaaagcggcagacat

SEQ ID NO: 233347 - DNA, 463 bp, Glycine max
  unsure (1)..(463): unsure at all n locations
tgtaaaantaactgagtccctttggtcaggaaattgttttactgtggatgtgcagatcctgatacacaatattatgcaanatggagcatcaacagatcctgaatataagctagcacatgcattntctatttacttagctcagcccttgctagctacctctttggctttactttcttacaactggtattcactgatgtatcattatcatttcatttgaaaccgcgtttcacatgatagagtagttttaccaacagtatggtcttcttgttctaggtatccctcttcagttnttgttggtgatacatatacatactttgctgggatgactatggctgtgattggtattttaggccattttaggtacatccttacttttatctgtcaatactcttcatttggctatcctatcntgtgttttggtgcanactacgcatagaatcatagatatacaggggattctaaa

SEQ ID NO: 233348 - DNA, 319 bp, Glycine max
agcttcataaaagatgaatatgagttcttatataaacactcaactttaattagtatatttaagttagaatttattatttattaattctcccatactcttaaaagatagcatgttccttaagcatgtgattatgaatctgatttctgactcatatatataaaaatatatttatttaggaaaatcaatctcttaattaaatttcaatatcttaaatataatcattaattttggttgaaaatcctttaattataaaaaaaaatattattatatttgagtacgttcgtaacaaatttacaccattttattcgtataaaaaatt

SEQ ID NO: 233349 - DNA, 468 bp, Glycine max
  unsure (1)..(468): unsure at all n locations
ggttgggtggcactatgattganactaagcaagtggatttcttattgtttaaagcaaagaccactcttccctcgggttatatatggttgcttggctatgtccttttttccttgtcctgagcatagacaataatatgagtaatagagaacaaaatatctgtcgccgctcaaaaaagcgatagaaagggaaacggcgaaggggtaggcaatattntgtggttaggataaggtgggtggttgtagaagctttggtgaacaacagctgtggtgtgctgaggaataattaattactcataaaacacacaattgatttccgtcgaacaaatttattgtagatttgtgacacaaaaattggaagctcaatcttcatttatgggcaatatttgtttgttacagctgagtttgtgacaggatcaacagcatggcttggcagaggtctgtcctgtgtctgtgcacagagaagagaaag

SEQ ID NO: 233350 - DNA, 433 bp, Glycine max
agcttatattatgagtcttataattgtgcatttttctaagttaaaagttgtaagttactaagtcaaagttgtgagttatgaagtcttgtagtttttcattagcatttagtatcttggaataaggtattaagcatttatgtgattagtcaaatggtcactctattctagtataaataggggatcatactcttgtatttggtgtggcaaagaaataaaatcttttatttccaacatatgcatatatttccggtcactgctaacttgctaacaaaatgcttggctacttttatgatacctgttattactattatgggaacattatacttttcctcaaatttcttaattttatgtcagcgataatgatacactattttcactctaaaaactgttgtgacctttttatcatacaatctctctttcaattcttatattg

SEQ ID NO: 233351 - DNA, 477 bp, Glycine max
  unsure (1)..(477): unsure at all n locations
tctcaaggtcctcnaaaaagcatcgggatttttcttccacatctcttccaccttatttatttgctgttcacttatttggcgagcccttaactgcttcttaaggtataagacttgtatattctctatgtgataacctaaaaggcactttcttgaagcatcatatgatatgccaaaatcatcacattctaataagcattatgtaaatttaaatactatttcttgaagtttcaattacttttaagaaactttaaagagtgcgaaatgaattattcaaaagtagctgacaaatgataaagagcctagacaaaaattggtccctaacttagaattatctcatagtacagaaagaacctgaagcagtccattgccaatctaatttgagttgaacatccttcaagaatgggataaaaatacaagaaaggatattgatngngaacttgccnncctgcaacaaaattataaaaacattaacaatat

SEQ ID NO: 233352 - DNA, 429 bp, Glycine max
agcttgtaggattatggggtacccgttacatgtggtactaggtgacgatcgggcgatggtgcaaaacaactctccacatccacaaatcacgcataaacccaccatccccaattgcccaccttcaactgagctcacgtactcccacgtagcccttatcctcattcctcttaacaccgggtccccatcaatctctccaagcttccacaacacccaagcaatacaacatccaaacatcatgaactatcaaaaccaagaaaacagggcaaaggcagaaaactctgcccaaaaacacaaaccaataccgcagctttccttactcaaataccccagtaacattctcttcgttccaattcgttaactggtggatcgactcgaaaattttactggaggtccctagtacataaatctacattgtgaccgttgggatct

SEQ ID NO: 233353 - DNA, 438 bp, Glycine max
  unsure (1)..(438): unsure at all n locations
gggttcgaggtacttacccgntgaagatcgaagaacgatgaatatcgaatgaagaacgttgaagaacagtcgaaaccttcgcgaaattccttacggaaacgtttcggaagcgcctcggcttagattttcttcacggaaacaatttttccaagcaaattcgaaagagagagaagtgcctaaggggttgaacccttttcttcttcacttcttcccctatttatagcaaaataggggagaagcttgccgcccagcttgcccaggcgagcagggttgcttcctccagaagcagcagccttctggaggaatcttctggagggcccaagtgtgccagattgctatttgcacccccatttttactagatgcaccccctttctatgtttatgtaattctttattcgtaacgttacgaaaccttacgaatttcgtaacgatacctat

SEQ ID NO: 233354 - DNA, 281 bp, Glycine max
actctcctattcgcgcaccatttccggcgaaatagcatgaacttcaattcgctgcctaaaacgtggcacggtaattcagcatacccctgaggatagcactccactccgaggaaaatgcgaaacacaccctggctaaaatacatatcagggattcagcgccacagacactctgaagcatatcaagttcatatcaaacctgaaaaggcggagcaagactgcatgtcaaaaggttccgcacgacaacaaaatctgccagtattagagaaggctattcactccag

SEQ ID NO: 233355 - DNA, 440 bp, Glycine max
  unsure (1)..(440): unsure at all n locations
agcttcattctacacctaaaaaatgatgacgagatagctgcacaaaagagaaagcttcctaacaaaaattttcatgcaggtggaccttcttcttgtaattctaacttacagcagccttttatccctcttccattcccacctagagcaattccaaacaaaaaaatggaagaagtggaaaaggagatcttggagaccttcaggaaagtagaggtgaacatacctctgctagatgccatcaagcaaattccaagatatgccaagtttctaaaggagctgtgcacccacaaaaggaatctcaaaggcaatcaaagctcgggttggtgaacttatttttcctgtngatttttatgttcttaatatggaagaagggatttcccatggttcagttccaattattntaggcaagccatttatgaaaacagcccgaaccatgatagatg

SEQ ID NO: 233356 - DNA, 439 bp, Glycine max
  unsure (1)..(439): unsure at all n locations
cgcttggaggatggtatntcttctagaggaattcgacagtgagttatgctttctacttacatttttgtattgtgcattgagaggctnttccttcttatttctatagctatggaccaaggagtgtagcgtcatattcatcttagtagacatggccctcctataacatatttagcctttgcatatgatgttattctatttgtgaaggctatcctagagcatgtccatgtgatgaagaatattctaaatctattttgcaagagctccaggtagaaattaagcttagagaaatctcgcatgttatttttaaatattgtgggaagaaatctcaagcaacatttgagtgatgctatanggatgtagtggacagaggacctangcaattaccttgtgtcccaacatttcataaaaggccctcatgaattaccttctagtttattat

SEQ ID NO: 233357 - DNA, 343 bp, Glycine max
  unsure (1)..(343): unsure at all n locations
agcttgaatggatttacttctctgatcatctnggaataaagccaatttggaaaatttcttgggactcactatctcaagtttctcagtaatttccttgaatgctggaacaaggccacgccttatgaagcacccttctataagccgcatcgaatttaactcggggagactaggagcatcttttaactccagatccaagcaaaatggggagtcttttagccacatcctgagagagtgagccttggccacaaggatgccttgtcgtgtcttacaaggaagaaaaggcgatcccatttcccaaaggcatgccttcaatgtgctgtcaagagataccatgttatactct

SEQ ID NO: 233358 - DNA, 468 bp, Glycine max
  unsure (1)..(468): unsure at all n locations
taccattgtgatcattgtgaggtcaatagagccattatgttaatgtttagaatggaaaaagacaactgtcttcctgatcgccatacctataacatggtgctcaaattgctgattangataggaaggtttgataaggtaactaaagtttgggggaacatgggggacaaaaagttttatccttctgtctcaacatattctgtcatgatccatggtttttgtaagaagaagggaaagctagaggaggcatgtaagtattttgaaatgatgattgatgaaggaataccaccatatgttactactgttgagatgctgaggaatcagctcttgngtttagggtttttagatcacattgaaatactggctgctaaaatgaggcanagcacttcctatgcaattcaagaattggcaaatattatgattggcaatagaacaactcataatactttgagacgcgatgagatggacata

SEQ ID NO: 233359 - DNA, 389 bp, Glycine max
ctcgaccgggatcttaagcactgggctgcaactatataccatagaatttcattttttcaacttgaagagctatattagaagaaatttcatttgttgaaactgatacgttcggtggtcatctagcgacagcataactaagttcacgagtccttgtccttagttgaagaacatatagcggcatcgtatgtttgctggacacatatcttcaggttatatacctggaggagttccacaacacatatttgcggtctcaatatgctcaacttctataccaatgaaccatgcaccaaacgaaaatcttgattagcatattatccaaatcgcctgcattataattacactccatgaaattctatagttaagaatattcttgaaaacacggctgtccc

SEQ ID NO: 233360 - DNA, 402 bp, Glycine max
  unsure (1)..(402): unsure at all n locations
aaccataaagaaangtgagagaggtgtgtgttttgtanaccacacctcangctgaaaatattatggaaaagagaatcaatatcgataacaagaacaattaattactgattaataagagacagaatattctagcaataacaaccatatgaggaataataccagaacataatctcacaaatgttaatcagtctctattaaatttaagaaatgcaatcgtagtctcaactccaacatccaaactaaagctgattgactgtgttctctcttacaccaatcttccctaagcccggtttggcgatgcaggtgatatcataaaacacttgctagagcgacatggagaaagcagaagtccatcaccgggactttcggagaggattagatcgaaatcactctcaaacgaac

SEQ ID NO: 233361 - DNA, 437 bp, Glycine max
agcttcagacaacttattgtaatcgattatgaaaactctgtaatcgattaaaacaaagagtttttgcctctaaagaaatttttaaaacttaggaacttttcttaactcacactatgatgatgcacaatgcaaaatagatatcaaatgtactaagatgcaacaatcaagttaacaaccaatacaaatgtcactcaaaagagttagccttgagctgcaagctttagccttaggttgttccatgttgctgctcccttatctctaacataacaacctcattctttatcaatattatcatcaataacaatatcatcctttatcaatattatcatcaataacaacatcaccttatatcaacattattatcgataacaacatcattagtaatcacattccatatatatacatttatatttcatgtctgggattcacactctcca

SEQ ID NO: 233362 - DNA, 454 bp, Glycine max
  unsure (1)..(454): unsure at all n locations
tgacaggttcaggtgcaggtgttgctactggtggatgttcttgaatttggttgccaaacctcaaggtgatagcactcacattntttggattctacacagtctgtgaaggcaatttgtcagaattttgggactgagcttggttcaactgagtagccatctgccccatttgatttgtcagactctgaatggaggctcttgtctcttgctgaaattgcatattctggatggtcatttgcctcactaactcttctaaggaagnttgaggaggagcctcagttgcttgttgtctttgttgttgctgcattggaggaggaacatatggcttgcttggaccagcagcattctggaagggagggacaggctgttgttgttgtggaggacttgtccatctcagaattgggatgatcctccaacctggattgtattctttgcttgaaagatcataattattctg

SEQ ID NO: 233363 - DNA, 408 bp, Glycine max
  unsure (1)..(408): unsure at all n locations
agcttttcacattgaattcaacacctattgtcatatnagatgggaattgggtatcttaacataagagatttcagatggactttaatcctaatcccacagccgaccttttcacgagatctctacttaaccctttggttaaatgatcggccaaattatgttgagttctcacaaactccactgatatcacaccatgcatgattaactcccgaaccatgttgtgtctaacacccaagtgtttagacttcccattatacacttgactatatgccttagccaaagaagcctgactatcgcacctgataaacatgggaggtataggtttgggccacaatggaatctcatagatcagatttcttatccactcaacttctttaccagctgctgctaaagctactaaatcagattcct

SEQ ID NO: 233364 - DNA, 447 bp, Glycine max
  unsure (1)..(447): unsure at all n locations
tagatngtacatgtcataagattttttaaatagcttattgtctaacctttttggtaaatagacttttataggcctagtttattatttgaaaaaaatttaacctagcttgagctgatataggctaggccatatgaccctattaaacaactttttatgtagctctgccgtggaaattctagcaacatggttgtactctaatcaaacacaacctcgaaccttgaccaggaactttggagacaaagattatctcttgtctattcttttccttagaaaaactaaaattaaattaggctctttctgtcatacctttatatatatatatatatatatatatatatatatatatatatatatatttcttttggtttttagcaattgctccttctgtaattntcatttttattgggctcatttaattattcaatacaaaaaatcatttgcattcat

SEQ ID NO: 233365 - DNA, 380 bp, Glycine max
agctttcaactgaatttacaatgttcttattgatttcaaaatggtgtaatccattacaatgatttggtaatcgattaccagtgtgtttgaacgttgaaattcaaattcaaatgtgaagagtcacatcctttcacaaaaatgctttgtgtaatcaattacaatgatttggtaatcgattaccagtgataagttttgaataaaaatcaaaagatgtaactcttctaatggttttcttgaccagacatgaaaagtctttaaaagcaagaccttaacttgcattttacaacacattgaatacattgatttcaatcctttacaacccttgagtctctttgaacatcttcttgaatttcttattcttcttccttttgctaaagctt

SEQ ID NO: 233366 - DNA, 474 bp, Glycine max
  unsure (1)..(474): unsure at all n locations
ntcacaatatccaataaattcaattccatttgtcatgaaactaccctaaactaagaaaaacagagtggaggtagaaaactcaacacaaaactcattcaaatcccacagtttttcctactcgcatacctcagtaacattctcttcgttccgattcgttaaccattggatcgccttgaaactttaattgagggttcctgatatagaaatctaagtttgaccgttgggatcagctataaaatatctataacacgagatgtactacgtttcctgtgactagcactgcacaaccatttttctgcataattggtaaaatttgctgcacaatttgacagcttttgctgcataatttggcagatttcgaattctagcttgcttgtatccaatttcactcaaattggatcctacaagtcctaaaccatgtctaaatcatgtntaaaccanaaaanaacttcanaccaaggtaaatcaaaatat

SEQ ID NO: 233367 - DNA, 385 bp, Glycine max
  unsure (1)..(385): unsure at all n locations
acggcccccccacactgaaaactttaacaaccccccccaccgaggaatatgctcgagccgcacnaaagcacgagcagcaccgaaagaagcgggaggataccacccgccccccaaagagccaaggggacacccccagacccgagcaacgggaaggagccaacaccaaaacaacgcaacacacaaaaaaggagaacaccaccaaanccaccaagatatgagcaacaggtaaggccgacaaagcgcggaaccccaagaacaagatagcacaaaacaacccgaaagaaagagcgctgagagggatccacccctgtgccgcctgggggaacaataacatcaagaggcgcgactaaacctacacgagcaggagcggccacccgcagaaaac

SEQ ID NO: 233368 - DNA, 446 bp, Glycine max
actaagcttatatatacccctccattcttgaaacacagatcttgtatgttttgtgctgaccggaggtgaacttcatgcttgattctctccctctcactactcccttccaggagtccccacagtgaatattcataatctaccaacaacacaaaatcagaaccagctttactagcttcattttcacataattaagcagttaacaatatgtttgctagcatacaaacacaaatcataattgagtaaactaccattttggtccctggaagtgtaacaccttgtcacattagttcttgaaattaaggaaattctaaacaagtttctataatttccaattggttcatcaatatcctaaattaaccatttggggcctgctggtgtagcttctctaaagtacttttagagaagaaataagaaagagttttccatagctaaatgagccttattag

SEQ ID NO: 233369 - DNA, 371 bp, Glycine max
agctgtagtcaaacagaatagtccattttttgttatataattgggtgttgaaaaagcataacatgactttatgtgattggtttaaagatacaatctttgcagatgagaatgcttcaaaaacattaataaagctagcagatgggcctaaaagaaatgttataacttggcaaggatacgacattaacaagtatttattttacacataagctcaacacgacaaaagtacaatgcagaatagcggggtcaccctaagggctgaatctcacactttgctattgtgatgatgccatccctgtgtagcttcattccttactttcgggtcaatgtgaaatttggagcttaacttgtgaaattactgtttgtgtttcaaa

SEQ ID NO: 233370 - DNA, 466 bp, Glycine max
  unsure (1)..(466): unsure at all n locations
tctagggtacattctgcttatcggtaactagtagtttttatatatatatagagnaataatatagtatctatagcgataccttatattcccaaaattgctttacataaattntcttgaaacaatttggcgtagagagagtttagttacttttcatatatattgctttcagtttatctgaaactgatgaacaccaacacataggatagagatataacgttaaggagaagaaaattatttaaatagcgtaacaaatatgctacatgcttcacttagcttaattatatttccatcatagcatcattgttaatgctctgcaaatatgtgaagatgtgtagatgcctcttattagtcacttcccccctggaattagtttatcatcagaaggaccttgntgatactctntaagtgattatttctataggagaatctgaatattcggtttatatacattattctcgttcatttg

SEQ ID NO: 233371 - DNA, 397 bp, Glycine max
  unsure (1)..(397): unsure at all n locations
agctngcaatgtatgtaaatatctgctttatatatatgtacaattgggtcacatccgtaattattatgttagcatgatatcatatcggtatagtaactaatttggtatgcttacttatccttagttgacatgtgtgattttttttttggaagcctaacatgtacaattttaagctcttaaatttcataattttaatttgcaatttaagtttttcaaatattaaatttataattttttttctttcatttatgtttacaacataagatgacatataatgaaataaagtcacgtcaagaaagtatgattgataaagaaactaaaattatacattggtgatatctaaaagacttatttaacacaattgaaattacaaaaattaaaaacgtataattacata

SEQ ID NO: 233372 - DNA, 471 bp, Glycine max
  unsure (1)..(471): unsure at all n locations
gggttcgaggtacttacccgttgaagatcgaagaacgatgattaacgaatgaagaacgtcgaagaacggttgaaacctttgcgaaattcttcacggaaaatgttacggaaacgtttcggaagcgcctcggcttagattttcttcacggaaacgatttttccaagcaaattcgaaagagagagaagtgccaaaggggctgaacccttttcttcttcacttcctcccctatttatagcaaaataggggaggtggttgccgcccagctcgcccaggcgagccaggttgcttcctccagaagcaaccgccttctggaggaatattctggagggcccaagtgggcctgggtgctatttgcacccccatttttactaagtacatccccttctgctgttttttggtgattcttttttcgtaaagttacgganacttacgaatntcgtaacgatacttgttttctttccgtaatgttac

SEQ ID NO: 233373 - DNA, 395 bp, Glycine max
  unsure (1)..(395): unsure at all n locations
agcttaaacattcaatttcgagttgttttatatatnacgggactcaatcagacatccgagtaaaaatctattgtcgtttgaattggctcataggatcaacattcaattttgagcggctcgatatattacgggactcaataagacatccgagtaaaaagttattggcgtttgaattagctcagagctttatcattcaatttcgagcgtctcgatatattacgggactcaatcagacattcgagtaaaaagatattgtcttttgaattggctcagaggttaacattcaatgtcgagcgtgtcgatatattatgggactcaattagacattccgagaaaaagttattgccgtttgaatggctcaaaggttaaaattgaattacagcgttcgtatatac

SEQ ID NO: 233374 - DNA, 472 bp, Glycine max
  unsure (1)..(472): unsure at all n locations
cttgagcaaattcaaacgacaataactntttactctgatgtctgattgagtccagtaatatatcgagacgctcgaacatgaatgttgaaactctgagccaattcaaacgacaataactttatactcggatgtccgattcagtgacgtaatatatcgggacgctcgaaattgaatgttgaacctctgagccaattcaaacgacaataactttttactcggatgactgatagagtgccgtaatatatcgagacgctcgaaattgaatgttgaacctctgagcacattcaaacgacaataacttgttacccggatgtctgattgagttccgtcatatatcgagacgctcaaaattgaatgttgaagctctgagccaattcaaacgacaataacgttttactcggatgtctgattgagtcccgtaatatatcgagacgctcgaaattgaatgtngaacctatgagccaattcaaac

SEQ ID NO: 233375 - DNA, 445 bp, Glycine max
  unsure (1)..(445): unsure at all n locations
agctttgttccaacggccagaattattcttatgttaatcaatcgntagtctaaactgaattacacacacgcaattggcattnggccgtgaagatataaatctgctcaccactagtggaagaaaagacacccaaaaagcagcatgccatcctgaaaacaagttagcaattactaagaatttgactgcaatataaggaaaccaattgacacttaggtgaaagacaaaccatggacattcacaagcaagaataacaccactgatccccaaagtagtggactatcaaaagcacaaatgtaccctcattagaagaaaccaaagattaagggattaaggaatgaagtaccttttaacaacatgactccatgaagcttaattactataacacataaaacccaagtcatgacgaacttgccanaattacctgattcctacaactaccttaaag

SEQ ID NO: 233376 - DNA, 464 bp, Glycine max
  unsure (1)..(464): unsure at all n locations
tgaacacctattagtatttatattgttaaaaaaaatatgtatgacatcaactcgtcattggctcccaggttagtggattaggcaaaatagaccaatacaaactcacgggttaagtcacctaacccattgatccaaagtttacattgtcacctctacattagtgactttntgttgcctttgtttcctttaagcttnttgtgtataaaaatatattttttcttgtgtgaaatatttgtttgtaattcagctttaactatataataaaattgatggttaagtctaatatatatttaaacagtcttgatcatttgattatgaggacttggataaaatttatattcttcaaagttttgttaatataacttgttaaataataattctattttataaactatgaaaaaatacaaaatntagatgaattcagctcacacaataaaacaagtccaacaaatactatatacatt

SEQ ID NO: 233377 - DNA, 388 bp, Glycine max
agcttgcagttatcatcatttgatattatttaatcaaaacaggatgattaaacaatgtagttagataaatgtttcaactagggtttttaaaatcagactagaccggctggttcaactagttagatgacctgtccggagactctaaaaaactagagcatttcagaactggtcaagaaccgatcaaaacagtataaaactggccaaaaccggtgttgaaccggcataaaaaaccggggttgaaccggtctttaaatttttttctggtttttaaattttatttatttaatcaaaaaatttttaagataaataagattacattaaatatttcacataagtatccactattaatatgttgtatcttataaaacatataattaagcatgtgact

SEQ ID NO: 233378 - DNA, 398 bp, Glycine max
tgccccttgagtctattctgtactgagtaagtcattaattatgacctcaaactattaccctttcttttgaatgatggctatgtaaaaaaaaatattatactctagttgtgccaccagtattggatatcatgctaagcaatcctcccaacattacaaaaattgttcaaaatgatccctaaatttttctcaaatacataaacttaaggaccaaactgataaatattcaatactacggcgattagctaaatacttttattacttttgggacaatttatgataaagaaagggccatacttcaatgaaaaattgatggtttattcattttggaatcttcaaataaatggtacacaaagatatgagcaatgaaatgtttgcatgtgaaagaatgcatatgacat

SEQ ID NO: 233379 - DNA, 319 bp, Glycine max
  unsure (1)..(319): unsure at all n locations
agctngagatgaggaagncgagtttgtttatacttnctgctatcattcgccgaccacagagtggatcctgcagatttgtcccgggggtcaggagaccttggggacctcacgtggggtgctattgcacaaaaccatatttgaccagtaccgatccaacccgggcatatatcaccagtgagaacctgtgatgcacctaaccatgcgagcttctggcctcaacagcataaaggatcctatacccctattcttggacgcttgtatggcggcttgccaactgtgaaacctgattgaaatatgtgatatggccccttgtaatcca

SEQ ID NO: 233380 - DNA, 466 bp, Glycine max
  unsure (1)..(466): unsure at all n locations
ccttgatactcagctacctttggagaattgagccatcatcatctaattttttttgtgttttgccccattgattgcttgcacaatagccttggcttgattcttgttgatgcttcctaattcacatgcatanttggaaatgattggggcaattttgttcttataagaccttggccccattacaaccttaaaagaccttttgatcctcatgtgcttgtgtttatgggttgattgtcaattttagaatcttgccaagtttatgtggtattggttttcatgggtgctttgagggtaaatagtagcctatacacttgagagatagagtgcatatcctgtgaggctttatcacttttcattcttgagctgattaactatttttccatgattgggttgcttggatgatattcacaaatgtcttgactccttggatctcttcatgtaagatgttacccattcctttcattccttg

SEQ ID NO: 233381 - DNA, 460 bp, Glycine max
  unsure (1)..(460): unsure at all n locations
tgccacccagctcgcccaggcgagctcagctcgctccattcgagcaggttgcttcctccagaagcaacagccttctggaggaatcttctggagggcccaagtgggcctggttgctttttgcatccccatttttactaagtatacctccccctgcctttttttggtgattctttnttcgtaaagttacggaaacttacgaatttcgtaacgatacttgttttctttccgtaatgttacggaaccttgcggattacataatcatcccctttttgacttacggaatgttacggaacctcactaattgtgcaacgatgcttccatttgatttccggtgtgtcacggaaccttacggattgtgcatcaatattttcttttgttttccggcatgtcccggaatttcacaaattgcctaatgatgggtgccaagcacctcacaagggaccaaacaaagtcgcatgtc

SEQ ID NO: 233382 - DNA, 411 bp, Glycine max
  unsure (1)..(411): unsure at all n locations
gaaagcaaatgagaaacttatttatttggaacaacctctgagccggatacagccacctcaagcataggatccatacaccgcactggcacaaggtgtacatgtcacaaacacaagctcaaagacacacacctacttgtctataagaaataacattaaccacatttctcacagcaggcacatgcacccctctgagctgtatatttatcagctgaacgaaacaatacatataaggggtaataagctatcctcccagacacttgaaccacgttacaagcataaacccgtagatgccggcaaacctnactgcccactattgaaaaggagtcccgtgcctttcctcaaagaccactaccacacccgctgacgaaagttggcgaccacaaactcgatgaccgatcataacatggacca

SEQ ID NO: 233383 - DNA, 366 bp, Glycine max
agcttatagtttaaatcataataaatattcttataatgctgactttctgtctagagatttgagttcttctttttcaacttagcaagtaattattagtaagggtgcattcttattgaagtaaaagtttgtttaagcatttccttgcgctcttcttctgagtcttctccttaagaagagtatttcatccaaggttatcaaacttgagggtttacttagactcgtgagagttccatagactcgactcgtggactcaacttgtagactcgtaagagtccacttcatataaaaataattagaacatatctttaataacatacttattaaatattttcacaatatataaaggcaaatatgtaatcattaatt

SEQ ID NO: 233384 - DNA, 470 bp, Glycine max
  unsure (1)..(470): unsure at all n locations
cttaatttgtatttgtccacgatggggaaaagatgcgtctttctaaggatgcctttgaaaatcaggacaccgagacaaaggaaaggtagagatctccttgatgtgccttagcttgcgtgcaagggaaaaacccaaccaacttgccattgaccataaaagagagttttgctgaatgaagaatcaccttaatccacttacagaatgtttcatcaaaaccaaatgtctgaagaaccatgaagtcccaatccacagtgtcaaaagccttttttatatccaacttaagcgcaatattacttccaaaagttttatggtccaacatattgacaacttccaagatgatggtgataatctcaaaatatttccatcttttacaaatccacgttgctcanaggagatgaggcagggcacaatcatatgaagcctatcaacaatgattttggatataattttgaagtggaaagttgtaagtc

SEQ ID NO: 233385 - DNA, 381 bp, Glycine max
ggcatgctgaccatattgttccagtatatgacggaggaggtagaattcattttaaagtttaatcctacttgctttttaggaagagatataatatcaatttctaattatagtgacctgattttcctagaaatgaccaatagattgtgtttcagacttaaacttcatttgataatatgattttggaagcaatcatagtcttaaataaatactctggtacacttttgataaaggatttagttggctcaatggaagtgtcaatatagaatattgatgcatgtgaaaaatccatgtaatctgcttatacctatgatttagggattaggatttaagcctctaaatagtaagagagcggtatgtatccatagtagtcaatagcatgct

SEQ ID NO: 233386 - DNA, 495 bp, Glycine max
  unsure (1)..(495): unsure at all n locations
tcgtgacctatgaatctaagctacttgtagggtcaagtttttgtgtgggatgcctagtgtgttataagtttctgtacccttaaggaaaggttaaccactacaccagttttagtgttacctgacccgagtgaaccttttgtggtgtattgtgatgtgtccaagatgggtttgggtggagtgcttatgcaacggggacaggtagtggcctatgcttctcgacagcttaagatacatgaaagaaattatcccacacacgatcttgagttagtagccgtagtttttgctcttaagctttggaggcattacctttatggatctaaatttgaggtgtttagtgaccataagagccttagatatttgtttgatcaaaaagagcttaacatgaggcagaggagatggttacagttccttaaggattacgattntgagcttagctatcacccaagtaaagccaatgtagtagcagatgccttaagtaggaaatcccttcanatg

SEQ ID NO: 233387 - DNA, 363 bp, Glycine max
  unsure (1)..(363): unsure at all n locations
agcttaaggatggaacacttacttgtttgttatgaacaaaagcgcanaacggaatcgaagaatgcgaaaagtagagaccctaggggtgcaaactcgtaaattccgggggtatggcttttgaaaggggggaaaagaagtttttgaatgcaaaaacgtcccccctttcatcactcttatattttggtgcaggggttgctcgcccaagcgagctaacctgcattntttttttgagaggaacattaaccatgtccctccttccttatgggttagcgttttgcctaacttgaacttacttaagttagaatntaggcgttgattacttatttttaaaacaaacaaatatcaaaagaaaattgcaaatac

SEQ ID NO: 233388 - DNA, 471 bp, Glycine max
  unsure (1)..(471): unsure at all n locations
tgtatgaactagttcagcagagaccaatcattagtatttattatttcgttgagaacgtggtctggccaggagcccgaaccttttttgtgggggataatgaaagttntacagcccaagcacctcaacagcatgagtcaaaaccagaaaacaatcacccatctgaagccaccatctctagagctgttgattgtaaaaaaagaagattagagacgagatccaatgagcctgctcatcatggaccagtgccagcatctgctaatgcaccatttccaggagtggatccatcttcacctcagcacatagcagactcttccattcctgtctcagagatacataagggccagactataccagttctacctttggacacttctcctacagctactccagtatggcatctacctgatgagaagaatgttcagatacaggacaatcaagaccagtcacaggaattntaattcctgatgacac

SEQ ID NO: 233389 - DNA, 324 bp, Glycine max
  unsure (1)..(324): unsure at all n locations
agctntggcaaggattggaaaaaacatatcttatataaaaaacaagatatgtaaaaaaaacacaagtggcatacaaggagccatctttcagaaaccagtactctatcaacaaataaagtccctattccctacgagctataggtaactcttctttgggcaatatgagctaagctggatatggtgntctataacaacaaaatgcgagcagaactttatgctacgagaaaggattgattntagcttaaaattcagttaaccaagttcataatcattgtgctctacctaagtatcgaggggtatctccctatttgaactttgaaatga

SEQ ID NO: 233390 - DNA, 452 bp, Glycine max
  unsure (1)..(452): unsure at all n locations
ngagattngaactaactatggctgcgaaacagctntgacgctcttcataaactaggtttggatgttgagattctgtacatgaaattgattttctctttcttgaaaaattgactggttcattgcaatccctatcttcagaactactactgatatcatccatttcttcggaattctcagcaaagtgaggtgcgagaagattttgtatgctgtttttatttactgatttcctccctattaaagacctaagttgttcatcacaaagtatctttcgctttttcttagggtcaaaaagattgttttctctgcagtactctataatgattgaggtaacatcatgttcagaaaattctttgcttgtatctttaccgatatatttaaggaattctattagcattcttgaaccccatccaataaactccttcttatctttcacctttcctttcattgatttc

SEQ ID NO: 233391 - DNA, 373 bp, Glycine max
agcccctttgagcccatggttccctttctttgttttgaagctcattacaagccttaagagaaaaaccatgatctcaccttaaccttaaggaattttggagctttggaattggtttgagaataagtgtggggagggttttggaggaaaacatgttttgttggtaagcttcgagatgatctttgggccataatgataaacattgtatatgggttaaatgttggacatgctgctgaatgatatgctagttctcaaatgctacttcaaagaaaaaagtcaagttgaatcaatcagaataagaaaaagaaaagctttaaagatgagtgaaaagatcttattaataataaaaaaaagatgatgagactctgggcctact

SEQ ID NO: 233392 - DNA, 421 bp, Glycine max
  unsure (1)..(421): unsure at all n locations
tcttctgtaatggctggtttatcacttctatnggggatctctaatgaacaactgatgtaaatacttaatatctaattgattatgttttttgtgttcaatgcttccttcaatgcttaatgtttgtatgcttttggtctgatcatccatttgtgtgcatagttaggttactttaacatcgggaaatgtattgttgccttagaacttgattgaagcacgattgaaacttactcttacaagagggatctgcggattaagtttcggttttaattatgttgntacaataatgctgtttagtctaggcctagtcttacaagagggatctgcggacgaagcttangctaaattaggctaaactttcataagctgctcgagctgagtctagtcttacaagagggatatgcggatgaaactcagtttaagt

SEQ ID NO: 233393 - DNA, 278 bp, Glycine max
  unsure (1)..(278): unsure at all n locations
ttcgntgaccacaaagtggtacctggagatatgtcgcaagggtcaggagaccttggggacgtcaggtggggtgctattgcccaaaaccaagcttgaccaatcccgacccaacccgggcatantcggactgtgagaacctgtgatgtacctaagcaggcgaactcctgncagtcaacagataaatggaacatagaccacaaagcacggaggcttgtggcggctggccagctgtgaattttgcgtgatatgtggattatggcctctggtaatcgattacc

SEQ ID NO: 233394 - DNA, 463 bp, Glycine max
  unsure (1)..(463): unsure at all n locations
ttgcanaggcacaccaagaagaatggagtagcattatatttgtgtctcctcctttaagtgctcatgtttttaggctgagctaggggaggagaatggtggttcttttgtctcgggtgtgctgaatatggagagagaagagagaattgtgggttgttctctaagtcaccaaatgagagaaagaaaatgaagtgttgtgatgtggtcgtggggtttacgggagtggggagtgaggttgagtgttgttttggttaatgagtgattggtgaagggttttgctcagccctttctcctattggtgggtgggtattttttttgtcatgatggcaaaatggggtttgcattattgtaattattttacagtgtaatcacattgtgaattttctttgacaacatatattaattctctatatgcttacgaatanatttacaaatacaatttatatacttatagtcggatattttt

SEQ ID NO: 233395 - DNA, 401 bp, Glycine max
aaggataagaagggacctttatggctttgacattctcaacaagtgggggtgaggaaagttggtctgcttcaacatcatcaagggatgctctggaccttgttctttctctgggaaattcaaccctgttgttgatgtagagttttgttcctccgagaggaatggcattcagaggcttaaattgcggtgatgaatttgggaaacacaaacggaaggaagaagcgtcaacgtatgaattgagctcattgccatttacaaatgaagctgtaataataataatatatcccacactcttgcgccttttttattatttatattagctcggagcatattttcgtggccatatgcatatattggctttattctcgtgttccttatgaatgtgggccttaacattctatggt

SEQ ID NO: 233396 - DNA, 424 bp, Glycine max
  unsure (1)..(424): unsure at all n locations
aagctcacccaaggggagcaaccgaccagcaaattatctcttttctccncggaaacacttccaccctgccagatagcaaataaataaaaatacgcttcgatatcacataacttcctcaatccaatgcagcaaataaacaaaatgtaatcaagaatgcgttcaaaacccgcgtccagaacactgaagccatcctctgcacaacacgccgggaacctgcaaacgaacataatatcacatcgtagctgcatcatacttctggaacacgaaagcatagaaatagataaaaatctatttattcaccaacaacaatcatctcaacaaaaaaaaacttatcctaccgacgcttgttctcaacacgtggaagagaacagaacaagaagcagagcagctattccacaaccatcgcacgacttgatattcaaca

SEQ ID NO: 233397 - DNA, 335 bp, Glycine max
  unsure (1)..(335): unsure at all n locations
agcttctccttccatggcttatttcctattggatgacgcctcctctcacctattttcctttatctttcgttgcatctccatggtggaaaatcaccattgaaggacctcattgaagcttaaagatccaacctccatagaagcttctcaagcaagcttccatcaataggcaattaggcaatttgacctcctaaaccctaaatctcaaattcatctagcaagcaaaattgtccctaaacagaatntgaaacaaaattttgaaacaaaattggaacagaattgaaacagaatttaaacaaaatggaaacaaaattttgaaataaaatgaagccagaaca

SEQ ID NO: 233398 - DNA, 471 bp, Glycine max
  unsure (1)..(471): unsure at all n locations
tctttgaganaacttccttgagaagctagagcttatctactcacacccctctcataactaagctcacctccttgagaagcttctttaagaagattcctaaagaagctagagcttagctacacatacctctctaatagctaagctcacctccttgagatgagaagctagagcttagctacacacccctataatagctaagctcacccccatgacaaaaaaaacatgaaaatacaaaaaaaagtccttactacaaagactactcaaaatgccccgaaatacaaggctaaaaccctatactattagaatggccaaaatacaaggcccaaacgaagaataaacctattctaatatttacaaagataagcgggtcatgcttagcccatgggctcgaaatctaccctaaggctcatgagaaccttatggccttcccttggatctcttacccaatctactgggagtcttctacccaat

SEQ ID NO: 233399 - DNA, 403 bp, Glycine max
agctttataaaatctatctgggttaatattttatggggaaaaaattacaccatttttgtacaaaagtcaccaatgtgttttgtatagtcattacccacgtcatcacatacatattcttccacggttcgattccaccggaaccaaacagcgtaagagttaagaattcaaatagtactagaacaaatttagttcacgttctcctaaagctgtataatatttttttataaaatttaagatatcaattatacttcttaatgtttatactttatatgaaatgaaacagacggatacttataaaagttaaaaaaaaaaaaacaaccaatttaagaacagaaattcatggaaggtaaaatgatttctctttagaaataaccgataaattgttgaaaatacaaaataaaaa

SEQ ID NO: 233400 - DNA, 474 bp, Glycine max
  unsure (1)..(474): unsure at all n locations
nntaacaattttccttgtctttcagatactgattcattgttatgcttccaagaaacaaatggttgagttggtctttaatatcaaacaatccatatttaatatactcagaagcatgtataccaagaacatcttgcaacttctcaatgaagttcccatatgctggcaacaagatgtgttggagtgacattattattttttcacttagctgcttatcaaaggcaagccatctagattgagtgctacatatatccttgaagtgcatgttgaacaaattgaggctgcctttcagtgactctgcgttcgcattatgctccactagctcgttgttctctagcttcaaaaagtttagcaccatattccaagaactactttgataaagttcgaggttntgttgcacttctgttgtgtctntatggaaacaaccaaggtttaatctcaacttaattgcctctagctctacacacctncaattat

SEQ ID NO: 233401 - DNA, 356 bp, Glycine max
  unsure (1)..(356): unsure at all n locations
agctctcttttatgtgagagcattactatgccatccccttttaaaacaaccttgtcctcaaggttgaagttaagaaagttagcttgtaattcagcaacattttgccacgcatcttttgactaatcagctgcctcccacaacgattgcaaatgcggtgcacatgagtatgtacacatatcccttggacattgtccctttatggactaaaacttgagtttnttcatcaaggcacaaattcctaatgtgtgtgataccacataattatcttaacaggggaaaaaaggaccaaaatgattcttgaatctcataagtatgttgtacttaccagatgagcaatctaggacctattcctggca

SEQ ID NO: 233402 - DNA, 466 bp, Glycine max
  unsure (1)..(466): unsure at all n locations
ntgtatggtagagatccacctactttggtgagatatcttccttaaatcactgatgttccaactgtgcaagagcaattgactgctatagatgaacttttgagacaattgaaggataatttgatgaaggctcagacatatatgaagaatcaggctgataagaaaagaaaagatgtcaatctacaggtgggagacttggttctagttaaagtacaaccatacaaacaacattcagctgctcttagaaagaatcataagctgggaatgcgcttctttggcccctttaaaattttggccaaagtaggagcagtggcctacaagttagagttacctgcagaagctagaatacacaatgtcttccaagtctctcagctgaacgtgttaaaggaacaccaggagaacaatacttgcctttacctttacctttaaccacaatagaaagtggaccaattatcatgcctagtaagtt

SEQ ID NO: 233403 - DNA, 422 bp, Glycine max
agcttgctgattacgttttcattccctgaatcttcagggggaatttactccaaaactctccctcaaatggtccaggatacataggcacctcagtgttgcaaacttctctccatgattttattgaggttattttccagaacaacgaaaacaccatgcaatcttggcatcttgatggttatgatttttgggtcattgggtatgtcagcttccttgaattataagttttgtttctattatcaaaacaattcagaattagcttacgaaagttttaatgattgatcattgccacaattgcagtcatggtttcggccagtggacagatgccagcaggaaaacatataatctaatggatgccctgactagacacactacacatgtaaacttaacatgaaagttcctaatccttatttagagtgttcttt

SEQ ID NO: 233404 - DNA, 456 bp, Glycine max
  unsure (1)..(456): unsure at all n locations
tgttgagtcattcaccaaggactcaggtgtgtgcccctttggtgtcatggatatgatcctagaatcactacccgaatccctgagaaagagtgttaagaaatgtcagcttgcaaaatcccgcaagagcatagaatggattccacacaacttttcttttcgatacctcatatctaaggatatggtcaaatgattactttgcagcgttacttcttactgtggcaagaaaagagcatttgtttgatctatgtataattctnttttgtacaaagtagaaacggtacagcgaaatacaatattgcagtgtgacaacactgtaaataatctttgttgctactctaaatctgatgttaacgtgccttgaattggacgattaacaaaaggacaaagggatttatttcaaacatgccttgctttctgtaagaagatatagtggacaactccatcncacaacagaac

SEQ ID NO: 233405 - DNA, 432 bp, Glycine max
  unsure (1)..(432): unsure at all n locations
agcttatcacctatcgcttgaagtattaagaaatactttnttttttgttgagtcagtgaagtagcaacagacaagacacttgaataaagggatgaccaaaaaaaaaaactatacttgcaagtaaaacttgctacaaattaaaaatgaataatttaatggttagctgtgagtaaaataaataaatattttctctaccatattaaattactttaatatccttattatatacaaagtaagttgcttaaattatttttagcataaatatgcatttcaaagctttgatcatgacacaaatatttttgccatttatacatctttatcacaccgactacctcatggatctccaataattntcttatattttatttgaaagatgagaacttttgtctgaattaaaaagaacaagctcaaggtcatttgaattggtaaaaa

SEQ ID NO: 233406 - DNA, 451 bp, Glycine max
  unsure (1)..(451): unsure at all n locations
tttggaataactgactntataaatccgggtgattctttattatctgcttcagaattggtcaaggaactaagtggtggaatgggtgccgactattcttttgagtgtactggagtttccactttactctctgaatccttggaagccacaaaaattgtaagtttcaccttatcaaaaacagttcggttctttggtttggtccaataattgttgatttattccattaatacatgcacattagttttctttctcgtccaataattaccatttttttttggtatatactacagggaacaggtaaagcaatagtaataggtgtaggaattgaaattactttgccattgngtctttttgccattctgcttggtagaactttgaaaggttctggttttggaggactcanggccatntcagacctttccattttagctgacanagggccacaaaagggtat

SEQ ID NO: 233407 - DNA, 439 bp, Glycine max
agcttgtaatcaattacacacatactgtattctattaccagagaagtttttcagaaaatattctcaacagtcacatctttttacttgattcttgaatggctgtcaaagacctatatatgtgtgacttgggacacgaatttgctaagagattttcagaacaaaaaggtcttatcctcttaaaaagaaaaatcgttttatcctcttacaaattccttggctaaaacacttgtgattcaataaggaattatttgagtgctcaaattgttcaatctatctctgtcaagagagatttcttcttttcttcttcttcattctgaaaagggattaagagacctagggtctcttggtgtgaaagaattctaaacacaaaggaagggttgtccttgtgtgtttagaacttgtaaaaggaatgtacaagatagtggaactctcaagcggg

SEQ ID NO: 233408 - DNA, 475 bp, Glycine max
  unsure (1)..(475): unsure at all n locations
gggagaggatgcttcaatggagganaagaaagagggagagaattatagaggggggagcacgaaattgaaggaagaaaaagggagagaagttgaactttgagttgtgtctcacaagactctcattcatcaaagttacaacaagtgttacacatgcttctatttatagactaggtagcttccttgagaagctttcttgagaaaactttcatgagaagctttcttgagaaaactttcatgagaagcttctttgagaaaacttccttgagaagctagagcttagctacacacacccctctcataactaagctcacctcctggagaagcttccttaagaagattcctaaagaagctagagcttagctacacatacctctctaatagctaagctcacctccttatgatgagaagctagagcttagctacacacccnctataataactaagctcacccctatggcanaatacatganaatag

SEQ ID NO: 233409 - DNA, 426 bp, Glycine max
  unsure (1)..(426): unsure at all n locations
agcntttgagttttgtacatgcagaatattttttgaactcanggacaatactcaagccccactaaaacttgtgtcaatactcaatagcatgaacacattgagttcatcattagaatatattcaatggttgtaaactcttttataataacatttgtttacaaagagaagagattataacatttgctttatatgcaaactatgatttgcttacttctttttaggtccttacctcaattggtaacttttgcatttgctttatagctatagggatgattcttgacatattgaatatgtacataaaggaaaacaaatctattactaaggcttaccaggaggtatgtgtgtatgcctatgttatgagttatcatgctataattggccattattctatttctttcctctatatctttaacaataatatttctc

SEQ ID NO: 233410 - DNA, 473 bp, Glycine max
  unsure (1)..(473): unsure at all n locations
ntgagaactgcccanactccccctccatttctggatttttgtttataaggcggccttgttggggcttgcgtgcttagcgcaactccggcttgcttagcacgcataagtgaattttggcttggcgctcgtcttctcacttagcggatgcatgcaagtagtgcgcttagtgggatgagccctcacttagtgcgtgtgtccaacgcatccttctttcaaattcttccatacgctcagccgcaagagtggtgtgctcagcggatgacttgctaagccgacagattggcttagtgagcagatcaaaatcagcacttcacaaactagcctaattaacttgaaattgaaaggaaatgattattaaatatacaaaatgaatagcgcatcgaaatgggcttagcggcgatgtctcgcgcttagccagtgaatacgatgtgcttagcgagcaggccatcgcttagccagattaagatcgaata

SEQ ID NO: 233411 - DNA, 351 bp, Glycine max
  unsure (1)..(351): unsure at all n locations
agcactgacaccacaagaatataaatattgttatttcaccatagtacancatataaagttcaatgccataaggtacatctgaatgaaactcaccctttcttcctcttcggcaagcttcaaggaggtactggcccatgaagccacagagccttatgctaacatgaccattgacttgctatgacaatggaggagactatacaaaactgccaaagcctcccatctgatgatctgaatcttgttcctgtacaaaaaaaactgtaaaaaagtctctattataaacacccaaaacctttgaaggaatatatacattacttttctgcgtaaaaaatatgaaggtacatctctttattt

SEQ ID NO: 233412 - DNA, 356 bp, Glycine max
aacaatctacattacaagggacatctagtaacacacactgctatcaatggcatatagtagcagccagaaaaaaactgctatataaatatagcagcaggcatcgcagcacaaggcagaaagaatatgtgtaaaaaaagagtccaaaaaatacaaaacacaaacaaaaatataacaggatttaaacaaaaaacagcatcaaaaataagacgtacaacataatcaagacatgaataaaataatagctctgtaaaaaaagaaacataaaaagaaataaaaaataagaacaaaacagtactttaataaataaaaataataaataatcagaactaaaaaataaaataaaacacacgatcaaa

SEQ ID NO: 233413 - DNA, 399 bp, Glycine max
  unsure (1)..(399): unsure at all n locations
agcttngttgcgcaacaatggcggatgtttattacaagaccatcgctgcgtgagagagagggagaccttctgaatctttctgctatgctgagtcgatgacagaaaatagcttttcttttggttcttaaataaagggttttctctttttctattgctttatttaagctatgccacatgtctccatttgagtggagcaaaaagggtccactttcccttttgattgtgacccatactcagccacaaaagtgagaaaaacctgacctttgaaacgctaaaaccccgcctcggtttgcgtgcccgttctctggttccagttcctcgcgtttctctgcgtccgacggggccacttttggaaagtcagcatttatatatcaaacactcaaatataaccccgagcgt

SEQ ID NO: 233414 - DNA, 417 bp, Glycine max
  unsure (1)..(417): unsure at all n locations
ttgctaatgagaatctgtccctagacaaactctgcaacttantatctgaagtctgggagctttgagcagatggggttgttgatactggcgaagagggaacaccaactgctctggacctggttttccttgcccttggaaaattaactatttggtcattcacattccaacatttccttttaatataggccaagataatgaccagcctcaggctcttgtaagcagtaagagcatcagatccaactccccttgacctacacaagactttgattaaagctgggaagcctacgcaagaagagttgaactgggccataatggttatccctgtgactaagccataaactaacctagctctgtcaatattcaagctctaggtgtgggagggaggagctaggttggagtaagagaagacactccatg

SEQ ID NO: 233415 - DNA, 403 bp, Glycine max
agctttagccccgaggtaacattaacatttcctctctccttcttttcttagggtttgcttcacaacttatgaatgcatataattatgatatttagtttaatcttaatgtttggtttgaattctgtatctaaatttcagtattctttgcatgagacctatgtatttactgggtgggtggtggcggctttgattagcaaattagtatctggaaattcgataatgttcctgaaaatttcaatgacatcgtgtagtccttgtagctgacttcacttagtgaaataaagattcatttggtggtagtatttggaaatccattttcatgcttttaatttgcagctagacattgggggaggtggaggagacattggaaagaaaatcaatcatggtggtggtgatggaagtg

SEQ ID NO: 233416 - DNA, 467 bp, Glycine max
  unsure (1)..(467): unsure at all n locations
tcacgttggcccttaacaggattagcatctcccccgtactatcaaatacgattccacttattatgtatcaaaacctgcatccctttaaaatattcgctaatttcagctttgttcctaattgcaatacataatttatttgaatagcaccctaccctgcttttttattttattttttatcatatttgccacaaacgcgaactcgtgacactataaataaaaaaattaaaatctttcagagattaacattagaaaaacacaaacttacataattaaaaataaataaaatatcttaacaaaaataaaattaaaaaaaaagaacttataagaactaaaattaaaaaaaaatgaactcacagaaattaaaaaaaaaacactaacttacaacaacaagaagatatttaaacctaaatattacaccaaactttctattcttacttaggccctaattaattntctattttaataaa

SEQ ID NO: 233417 - DNA, 385 bp, Glycine max
agcttacatagccctcatcttattacttgtttaacagaacctaaaaaccctaaaaatctaaagctacagttaaagtcttctaccctagagttaagacaagaaaaagagaaaaaggatcaaggaacttacttggacggtgtatgatagatgcttcaaagtaaaaaatgcacaaagagagtacaaatgcaaaatgtacaaaattttggagagagagaatgcagaggcaagggttttgtaatctggcaaatgtgagtgtaactgttgttacactcacttaagcagtttcaatactttctcttagcggaccgttgcgctaagcgagccaaagagacgtttggtttctaaaccaggaatgcttatcgaacgtgcgcttagccaacgtttc

SEQ ID NO: 233418 - DNA, 446 bp, Glycine max
  unsure (1)..(446): unsure at all n locations
tacaaatntggtntaagtccaagcccgataatatttattttatctagatcagataagacaaaatctagatgaaataatatctagatgacataaaatctagataagataagatctagatgaaatagtatctagatgagataaaatctagatatgataatataaaatctagattaaataatatctagatgagataaaatctagataagataagatttggtagaataaaattgtctgctctcttcaagtccaagcccaattccggattcaagtccaattgcttataattctcctgaaattaaattaaaaatacaaaattaatccagtatgcccaaatgataaaactgcataattaatttgacaattaaggctaatcagtaattaaaatggtgacaaaaaggggtaagaaatatgagataatgatgacacatcaaatcccctcacactta

SEQ ID NO: 233419 - DNA, 423 bp, Glycine max
  unsure (1)..(423): unsure at all n locations
agcttcttcgaagggcatcgttatttctagtttcctgaaaatatctaaaaatctcgccagatgatgatctttttccttcttggaaggtaccacaggatatggtacttccacaccttcgtccacagctttttcacttctactcttctttgcattcttatttttttttctttttcatttttttcattttctatttctttttctacttctttttctttttcttggtccttcaattctttatcctggaccattatttgtttccctttttcctgattgccttcacctctcacatcatttttcttaacttcagtacctttcttttcagccgctttctccttgtgcactacactttcctcatcctcagcttttcccacaatgacttctccaattgaacaagaaantagtacanctccaggatctttatgc

SEQ ID NO: 233420 - DNA, 471 bp, Glycine max
  unsure (1)..(471): unsure at all n locations
tggactgtgcntagagaaaaaacagatgaccaatgtgatctcttatccatttctagggcaaaattgggtgttgaagagtcaaattttgatttggtggaattttaggtgtaaatccagtttgaacaagtctaaattgatgttatagacttgtgtgaggtgagagtttgcttcaaatttgccccattctcaatttcacttctaaagcctagaaaatccattaaattgaggggttttagacacctagattttgtgttgctgtggtttgaagcttgactttggtttagacatgattgatacatgatttgggacttggaggatttgatttgggcaagattggatgaggggaagtgtgattttcgaaatctgcacttatgcaaaattttgctgtcaaaataggtgcaggaggattntggctttgtgcacgaaaatgcttgtgtgtgattggctgtggacagagtagtgcagaatgag

SEQ ID NO: 233421 - DNA, 358 bp, Glycine max
agcttgcttctacagacaatgtattcttaaggtgacaatgcctttattttcattttgaagacgacaatgtcttcaaaaggtgacaacgccttcatttacatttcgaagacaacaatgtcttcagtcatttcatgctttcaaaaggtgacaatgccttcatttacatttcaaagatgacaatgtcttcagtcatttcatgttttcaaaaagcaacaatgtctttgcttacattacgaagacgacaatgtcttcattcatttcatgctttcaaaaggcgataatacctttcattacatttcgaaaataacaatgtcttcagtcatttcatgctttcaaaaggcgacagtgccttcattta

SEQ ID NO: 233422 - DNA, 459 bp, Glycine max
  unsure (1)..(459): unsure at all n locations
ggccacccagctcgcccaggagagcagggggtgctttccttcttaagcaacggccttctggaggaatcttctgcccaagtgggtctggttgctatttgcacccctcttctatttttttgtaattctttntccgtaacgttacgaaactttatgaatttcgtaacgatacttattttccttccacaaggttacgaatccttatggattaggtatttactctttttttagctttcaaaggagttacggaaactcacggattgcgcaaaaacacctcttttcgatttccgccacattacaaaatttcacggatcgcgcaagcctgcttccttttgatttctgagacgtctcgggacttcatttattgcgtgtcatcaagtaataatccccggatgaaattagggtatgacaatcacgtacccattgcagacatatgtacagtccgtgacactggactgtctc

SEQ ID NO: 233423 - DNA, 397 bp, Glycine max
  unsure (1)..(397): unsure at all n locations
agctntgagaatattgggacgactttttctttttactcggatgtctgattgagtcccgaaatatatctagacgctcgaaattgaataccgaagcgctaagctaattcatacgacaaaaactttctactcggatgtctgattgagtcccgtaatatatccaaaagctcgaatgtgaatgtagaagctctgagcaaattcaaacaacaataactttttactcggatgtctgattgagtcccgaatatatcgagatgctcgaaatggaattccgaagctcggagcaaattcaaacaataataactttttacttggatgtcgattgagtcccgtaatatatcggaacgccttgaatttgattgtaaaactctgagcaaattcaaacgacaataccttttac

SEQ ID NO: 233424 - DNA, 455 bp, Glycine max
  unsure (1)..(455): unsure at all n locations
tctacattcaatttcgagctgttcgatatatattgtttctatcggacatccgagtaaaaagttatggtagtttgaatttgctcanggcttcggtattccatttcgagcgtctcgatatattacgggactcaatcggacatcagagtaaaaagttattgttgtttgaatttgctcaaagcttcggtattccatttcgagcatctcgatatattacgggactcaatcagacatccgagtaaaaagttattgtagtttcaatttgctcagggcttcggtattccatttcgagcgtctcgatgtattacgggactcaatcagacatccgagtaaaaagttattgtcgtttgaatctgctcagagcttctacattcaatntcgagcttttcgattattacgggactcaatcagacatccgagtaaaagttattgtcgttgaatttgtcagagctttacat

SEQ ID NO: 233425 - DNA, 435 bp, Glycine max
  unsure (1)..(435): unsure at all n locations
agcttaatacaaaagagggtcactttattagagactgnncgattaagctgagaatctagaaggggggttgaatagattctttgaaaatctttacctattcgttcttaacaccgattaaaaacatccccttaaatcaatcaaagtttcttcaaaaattctttaaaaataagaaactattatttgggcccttaagatcaattccacaaccaatatgattacaaaactcagagtaatagagaatatgagaaatacataagactttatactggttcagtccaatctggatctacatctagttgttctaaatcctcttagaacttccactatacagaaaacataagtacaaacattnttcacacacaattctttaatacaaaacaaatctttctcttgaatcctacgagaaaagatttagcattgaaaccctatcaattc

SEQ ID NO: 233426 - DNA, 462 bp, Glycine max
ctcagcttttcagagacctactattggtgactgtgttcaagagttgctcttcttggttgaaacactgaacacaagggaccaacgttccttgggttcattgcaagaagcaggatttgcttcttggttgatcactagacacaagggaccaacattccttggggttcattgcaagaagtggaataacttcttggttgtaatcactgaacacaaaggagggaagtcctttgtggttcatggcttgtaaaggattttacaaggatagtggaaatctcaagcgggttgcttggggactggacgtagacacgggttatggtcgaaccaatataaatccggttttgcattctttctttccgtaatctcttttactttctattgtgtttatatttctttaagtttacttctccttatttgttattcaagtaacttacaattaaagaaataattgaatctagggaatatcta

SEQ ID NO: 233427 - DNA, 375 bp, Glycine max
agcttgaggcattgaaatgttaactttttggctgagaatttgagagagcagatacagagcttgcttgattctgctcacaataccccttgcaatgtcaatgtgggatttggtcttacttatgaaagcattaatagattgccctcttcagcttcgtgctttaatagacttttgtggggcctactcacatattccacgggccaaacagatgctaaagatagtgatgaaaaagaaaaagtgttgatgtggaaaattgagcatgcctctgaactggacagttgtatattttctcttgtggaacataccactgtttcttgtaacaaattgcttatcgagagtaatccatctctccaaagtgtacaccatacacaacatttt

SEQ ID NO: 233428 - DNA, 463 bp, Glycine max
  unsure (1)..(463): unsure at all n locations
ntagtcatgttaaagtaatgctgatgaagttttttaaattantaccatgttnagnaaaattaagttaaaggatgaagtcatagaataggtgcataatcatctgcgattataatttcaggaattcttatactggaagtggtaaaaggatctttcaattatggttatcataggacaaccatttgattaggatcaccagagctttctatggcaggagctgattgcttattaggaatcatgaaaatatgcattgaactatgaactattcaatactgcagaagcgaaaaaccatcagttaagctagttgatcaaagagattaacgcacctgttctagtatgtctactctcacgtaccctgactctcagcaaatngcaaatntaaatgaaaattttgtggacctaatgtcttctaaaaatacacatacatgtaggcttcagtaagttttgtcatacgagaggagtattt

SEQ ID NO: 233429 - DNA, 441 bp, Glycine max
accttaagtcacctgcggcatgcagctttcaggaagttttaagatgcttttaaggaagctacctagtctataaatagaagcatgtgtaacacttgttgtaactttgatgaatgagagtcttgtgagacacaactcaaagttcaacttctctccatttttcttccttcaatttcgtgctccccctctctctttctctacctctttcttttcctccattgaagcatcctctccaagcttcttatccaaggctcatcttggtggtgaagctccttcttccatggcttattccctagtggatgacgtctcctctcacctcttctcttttgtcttccgctgcatctccatggtggcaaatcaccattaaagaacctcattgaagctcaaagatccaacctccatagaagccccacaagcaagctttcatcactgacattctaagac

SEQ ID NO: 233430 - DNA, 476 bp, Glycine max
  unsure (1)..(476): unsure at all n locations
tcttcttcctggctgtaacattgcagaacttccttcatattttatctagacctcctttgatgtcgatcctgctaaaaatgccgccagatgagacttttggttcaagaacacagaagtttctggatcagctggtttgaggaattctggatgggattggaaccagagttttacttgttctggatccgctttagatgagtcaaattgtgtccaccattttacaaatgcgtgtctttgtagtgatggatattggtttgtcttttcagtcttgctggaacgatattgccatgagaatatccatgacagtgcaaagcttgaaaagtatttaagatctgctggaattcgcgattcctgcgaattgtattgcttcttatattgngcaaatccttgttggaccgtttctgggaatatctctgggattggtccanagaagtcccaccattgcanaaaccaattgngaaaattgtaaatcgtattgg

SEQ ID NO: 233431 - DNA, 252 bp, Glycine max
caaacactgaccggaatctccataaccatcccgctaacggaaaggcatcaccctctgtaccccaattccggccctgcatcttggggggtactccaatccaccgaaaagcaccctgaaacactcagctcacatttacaagccaattgaaaaaccacgacaaaaacaaaagcatatctccaacaacaccaaaaagatgaaccccttgcctcctcccaaagtccacaatatcacagaactgacatgcaattacaa

SEQ ID NO: 233432 - DNA, 304 bp, Glycine max
  unsure (1)..(304): unsure at all n locations
ccttaatagcttattattactgcacactgtatttatattttttnttgnctgaatgctagctgtgagaaactgttattctatcttgtcccagaggtgtctatgctcctcgttatacaacttttaattatcccttgcagataaacacatttgaacagattcttatttatacccatgctgcatttttaaggtattttttgcccaagacaatatacactgacgggtcttctggcacggactttttgtgctttatatttaacattcaaatctcaatgcgtatggctaggtggctacatgactttaaaaa

SEQ ID NO: 233433 - DNA, 333 bp, Glycine max
agcccccacctcatatacgtgtgggttactaaactcagcttaaacagcttatgaaagattaggccagttttagactgacgatgcctccttgttccctcattttcattttccctcttttgctttccaaaaccctttctttttctcgcagcctacaaaacctgtcttaaaaaacaatgatctcggactcattcaccgttgcatcatcctgaaatttgagtaccacatttgcaacccaattttgaaaattctcaccgttggaaatcgcaaaaacatgtcagaactaagagaaatacccttcgaaccgtaactttctcttttccataaaaccccaaa

SEQ ID NO: 233434 - DNA, 446 bp, Glycine max
  unsure (1)..(446): unsure at all n locations
tggattgtaagaatgaaatcaatgaagaccaacaaagtattgtcttttatntgaagcttcaaaggatataagaccagtatggactaagctcgccttgttgccaagggatatcgtcaaaaggaaggtatggattatgaaaaaaatttctccagtggcaatgctaaaatcaattcagattcttcttgctatagtagcattctatgatcatgaaatatgacaaatggttgtggaaaacggcttaacttaatggtgagctaaaagaggatgtgtatatgacacaacccgagggattcacacccttatctaatcataataaagtctacaagtttcaacgattcatttatggattgaaataagtttgtagaagttggagcattcatttttnttaacaagataattgaacggctcaatcttgttagctatgaagaagaactntgtgagtacaa

SEQ ID NO: 233435 - DNA, 345 bp, Glycine max
  unsure (1)..(345): unsure at all n locations
agcttctatcatattagtggtgtgtatttattccatngnatacatgtcatgagtgagaagttagaactagttagaaagagatttaacctcaatgccaattaagtaatctagttgaccaagtcgtttaagagaaaattttgagttgagacgagtggtaaggtgttgaatcaactaagaagagctacaattaatgatgatatcatctacatagattaagagattagtagtttgaaaagcagtcttgttaatgaaaagagagggataacactttcttgtgacaaaatcaaacttgcgatagtagattgcggtctttcaaccattgtttgggggcccggtttaagccgt

SEQ ID NO: 233436 - DNA, 428 bp, Glycine max
  unsure (1)..(428): unsure at all n locations
aaaattcactaacaactaactaacagaatagagtcaataaatggtattttatttctccattctctctcaattctcttagtcgagaaactctatgatggtatgtatagcttagttgatcatcaatggtgacaaactgtatcgcatcttctttcgcttccgctntatcaaattcaatctcaaagaagcttgataaactaaattttcttctttggcgacaataaattgaacctgtcatcaagtcatacaaacttcaaaggtttgtcgcgaatccacaaattcccttacaattccttactgaagcaaatcacgatgtatgaattgagaatcctgcatccgaggcatgggaacaacaagactaggttcttcttgctagttgcaatcgactatgtcaacatcgatcttatcacgaatcaatggatgcttcattc

SEQ ID NO: 233437 - DNA, 414 bp, Glycine max
  unsure (1)..(414): unsure at all n locations
agctttagtaaaataataattcctatttttataatnggcgggaaaatcagtaggaaaatcaaaaaccacatcaaatacctgcagatatttttgccgcataaaaaaccgcagcaaatacctgcggattaattttcacaaataaatccgcagcaaactaacaaatttctagtagtgtaatgaacaataaaaaaagtttcgatagtattttttgcaaaaataaccttgattatattaataagttatttttcaatattaatctttctgccaaaacaattataaggctatgttccattttatttattatattaataagttatttttaattttaattctattttggtatatttaatatgctccattttatttgtcttttggaaataatatccttaacagctcttttacttcacgactaat

SEQ ID NO: 233438 - DNA, 456 bp, Glycine max
cgcttgtcctcagatccctcttattggactagacttagacctttttacattattgtaacaacatatttaaaaccaaaacttaatccacagatccctcatttaagactaagtttcaatcctgcttcattcaagttctaaggcaacagtacatttcccaatgctaaagtcacctaaccatgcacaaaaatggttgattagaccaagagcatacaaaatttaagcattgaaagaagcattgaacacaagaaacacaatcaattagatattaaagtaattacatcagctgttttttagaaatccccaacaagggtgtttagccagccattacagaaaaaccctataactaatgagattaagagtagagaataatttctccttacacaagaagggggatccctcctcctcttctcagcatttcacaatcactctgcaactcattaatctctctctaattac

SEQ ID NO: 233439 - DNA, 428 bp, Glycine max
  unsure (1)..(428): unsure at all n locations
agcttccaatcttggtgtaattttgtaacatgcttngaatcttcttaggctgatggatttattatcttatcaaaattgtaggaacaatgtctcctataattaatctatataaaggagcatttgctgtgtactctaacacatggtttacacacaaatatccattagtttatcttattttacaattntaatttaggatatgctagccagataagacttctctatcagtttgcaaaagtaaaatgtggaatatatgtttgaactctgaagtaatttttattttatgtgctaaactattaaagtattaataaaggaaactattactattagggatgggaataggccaggccggcctacaggggcctacataaagtctggcctgaactggcctatataatataaagggtatgctcagactcttttaaagccta

SEQ ID NO: 233440 - DNA, 470 bp, Glycine max
  unsure (1)..(470): unsure at all n locations
tataaaactacgcttattgactaaactttttggtgacacgctgaacttatttttgaaantgccaaaaccagtaaaatcttatataatatccagcaagatgcttcaggtttagaatcttggtctggcaagaattctgatgaatctaatcacaaggaatgatataattcacttttcaaaataaaacattgtgcaatgcagtgcaacaaattaagatcaaaatatgaaatttgcataaaatgaaaaatctcttccttttttattataccagttgaagcaattattcactattaccaaattacctttctacatcggttaaaagtgcctttctacatcgattatcacgcgtcattgtagtcggcatcgttgaaacatgcgcgtctttctacatcnggtgctcgactgtcttaaaatgtcgcggntcacagacgagtctcaagggatacccgtcttagaattatgaccattctaca

SEQ ID NO: 233441 - DNA, 403 bp, Glycine max
  unsure (1)..(403): unsure at all n locations
gatcttaagcactgggctgcagcttagctattaactcgcacttatgatgattctaatctttttcctcagtactcaatgcacgcatcccatccaatttgtgtatggaatattagaataatgaactgtgcaactgctaatcctcattgattatatataattttagttctatttgccaatggttgatttctatgttaggccttgttcgaatctacaaaatagtatctatctaatctctcatgctaccaattgcatggtaccaactacgaatgctgggacagatcgatttgtttaaacttatgcatttcattagcatctatttatcaacaaagtttgcagactatttgcaattataaccaacacttattnntttacagaattataatcatcactttagtctaataac

SEQ ID NO: 233442 - DNA, 469 bp, Glycine max
  unsure (1)..(469): unsure at all n locations
ntaagaaatcaattnttgatattgcatcaatctcttcgtcatcaatgaccacctcctctttcattcgtagtcgtagaatgaaatgatgcaaaccattttttcaagggtgcacccttctgttgctccaagcatgacagaaaagcactatccagaaagcacttcacaggaacacacctaaaattaaaaaccagcacaactggccacacgccaccttctaaaatcagggggacataatttctcttcaagtcttccttcacttgccagcacataatcccatgtaagtaaagaagacaagcaaatggaaaggaccaaaaattatgccattcattgccactttagtggccacggatcgcacggactttgacattagttgaagcttgaactttatatgttngtccaagccttcattcctacaaacaagacatgaaagttggtccaagtgttagcagcaagaatataacttggctat

SEQ ID NO: 233443 - DNA, 395 bp, Glycine max
  unsure (1)..(395): unsure at all n locations
catagaaactcagcttcaaaggacagaacgaggagagagagatggcatttgtttgcnagaanacacccctcaatgcacgaatnttctcttgcaggtccttattgccgctctatacgcagcaaactaagcttatatgatccgcggctatggactgacgtgtccacagtaacaagctatatctcggcgttgagatcatcttgagaaacatacgaatctggcctcacataatccccttgaccttgagataataaccacaaatacgacgtctcactatatatcacccgtaacatcattttctgtatccgatgaattttattatgagctacaaaaaaaatcatcggtatactttatcaactacctataaaacaagtgaaactcggatcatgcatgttatg

SEQ ID NO: 233444 - DNA, 438 bp, Glycine max
agcttgaagaggatgctttatttattaaaagaaagagagaaggggggagcacgaaattgaaggaataaaagagggagagaagtggaactttgaagtgtatctcataagactttcattcatcaaagttacaacaagtgttacacatgcttctatttatagactaggtagcttccttgagaagctttcttaagaaaacttccttgagaagcttctttgagaaaacttccttgagaagctagagcttagctacacacacccatctaaaaactaagctcacctccttgagaaaatacatgaaaatacaaaaaaaaagtccctactacaaagactacccaaaatgccctcaaatacaaggctaaaaccctatactacaagaatggccaaaatacaaagcccaaaagaaggaagaacctattctaatatttacatagataagca

SEQ ID NO: 233445 - DNA, 466 bp, Glycine max
  unsure (1)..(466): unsure at all n locations
tgctntagttatgtgagataaatggtagttgtgtatgtccaccaatattgtgttaattaaacatgtatttcattgcaaatgtcaatcatcttggttgagcttttgcaagttcgtggttcaatcccactcctttggcaacaaattgttgacttgacttataaaccaaagttaagttattgaaacttgaggaagctgcaagtggatgttgatggttgtattttttagatctatgtataacgttctatgtctatttcatttatatttgcttgcttaagatgtagccacgagtcctagagaggcatttcttaaatttaagaaaaaatatggggtagtattagttgttgatcttgttaacaaagtaaatattcttcattgcatgagttgagaatactcatacgatggttcatagtcttacctgatgatgtatgtaatngcattataaatactgggatgcataccaatattc

SEQ ID NO: 233446 - DNA, 394 bp, Glycine max
agcttattgcggatcaacttgatccgttaatgtgtattttaattataaaaaatgtataacattctttgatatttgagcatatgtttccttctattttactgcacaacccgttgccttctattttactgcacatctttgatatttgagcattcccatatgttgtacattcttttcactgtggtactttatttcccatgcatgaataacatgcctataatctggttaaataatgattggaacgtatgtcctctcttaaggaacttatgttaaacctatttattgtgaaagacattctcttcgattttacatgtgttttacattgtatatacccattaccttagacaatgaaaatacctcattttgtgtagctttttactccataacaaatttatca

SEQ ID NO: 233447 - DNA, 460 bp, Glycine max
  unsure (1)..(460): unsure at all n locations
ctcaatttcagatgaggaagggggaaggattatttcttctccagggacactagtgttacattnggatgatgaggagcaggatcgagatgaatgacatgatttgattacctgtccttattattattataattatatcgctcttagtacattttaattattatgtttatgcagtatagtggttgtatggttttagtatgtatgaactatttttgtttgtggcatgtgaatatggtttacaacatacttttntgtttgaaaacattttgaaagtcctgatgcataaagaacaatttaacttgactctttgaaaacgtattgttgatatgattttgaaatggtgattatggattgaatgcatgcatgaaatgaatattggtgtttatcatgagttgagcaagtgtgtatgttagatgagaaagaacaagaaagtatgctcacagttagaaatattactcagtag

SEQ ID NO: 233448 - DNA, 189 bp, Glycine max
taaacactcatcacaactaaaaaaaatttatattttacccaacccccaatacacttccaaccccacaacccccacaatatcaaaattcacaaaaaaatcaaaactaaaaccacatacactataactatcacaaaccaaaaaccacaacctccccattcataactcccaatatatctacataaaacaaac

SEQ ID NO: 233449 - DNA, 432 bp, Glycine max
  unsure (1)..(432): unsure at all n locations
agcttatgcttntaagacaatgaagcatttgatactattgcaacttgagcatgtacaactcactggagattatgggtatcttcctaagcatctgagatggatctattggaaaggatttcctttaaaatacatgcctaaaaacttttatctgggaggcgtaattgcgattgatttaaaagacagcaatcttagactagtctggaaagacccccaggtatatattacatgacaatttcttttaaaactcagctaaactacaatagtaattgttgccacttaccactgtttcattttttattttcttatctaattttttgtcaaaaaaaaatctcattgtaggttttgccgtggctgaaaatcctcaatcttagtcattctaagacttgacagaaacccctgacttttcaaaactaccaagtcttgaaaagctta

SEQ ID NO: 233450 - DNA, 476 bp, Glycine max
  unsure (1)..(476): unsure at all n locations
cgaagagtataagtccatgattcttaataacttctactcttgctatntttatatataatataattttattatttcattccactttctgcactacttattttcttaacagcactatgcattactgtgtataaagagatactcacagccatggatcatcaccaacaagcatgatatccccttcattatcaatgaagacaatttcccacttattcctaagttgaagttgtccctttatgtcaaacatcttctctaattagtgtgttttaaatctaacatgagaaatactggcgctcaagaagtagtatgtagtggtagacatggaatgcagtttagactatacattgtgttgcttcatgttcttcatataccactttttagaaatgggcagggtggaaactctaaatcatctatctttcttcatttaccactattatcacattgtggatattctagaagctcagtccatatgtcaatca

SEQ ID NO: 233451 - DNA, 84 bp, Glycine max
cacaaaaacgagggaacacaagagagagatttagccacgacgcgccgggcaacacagcccgaccgacaccccgggcccacgaaa

SEQ ID NO: 233452 - DNA, 398 bp, Glycine max
agctccacctagtgccactagtgctgttgtgcgctgtcactgctgttgccagttattgcacctgttacccaacgtcccagactcccagcatatttcttctcattatctctagttcagcctttgttacacagcatttggtagcatctctgccaccgactatttgtttgtgcctctactacccagctcaggtctctctgactcagtgactcaatcactttcatcttatctcactttgttccatcttttaattctattttttggcttctctcacagagactggactgccaaattttattttctttaatcgggcaattactttcagatttttctaacattatcttcgacttattatcagatctatttctatcaatcattttgctatgatcatccattaatct

SEQ ID NO: 233453 - DNA, 493 bp, Glycine max
  unsure (1)..(493): unsure at all n locations
tacggacctatgatactaagctatgtcttgccttgttaatgagaatatgaagcctgtctcttcatctgagagaaactttggattgtttaaggctgatggaagcattgcatatgatattggcttcactggacttgtaccttcttcagcaacttcatctttcctttccttcaaagtatatggactatggatactcctctactttcactattaattaagttntctaatttctaggaaatttgtgctgaaaatattccaaaattaaaatgaagtaggatctgtctttccccactttttatgtaactgacttactgagcctgagttctatggattagtagtgacattacatctatattgcacacaacttggctgtttcaataatttaacatcattaaacttcaattatggttagcttttctaacgcacagactacaaatattcaagtgtgaagtatntaatgttaatgacatatgcatatcatatctgaaatttctat

SEQ ID NO: 233454 - DNA, 394 bp, Glycine max
  unsure (1)..(394): unsure at all n locations
agcttccataaaagccaaactaagcaataaagtacctcgtatttntccctctgcctccggttgtcgtgcaatcccttctacagcttgccctgcagcagtgccttgaccaaccccaggtccaatagaagcaagccctacggtcaacccagcagcaataacagaagcagcagaaataattggattcatgataatttcctcgtaacctaaatataaaataaagaaatagttaatgatataatcaaccaataaattatgacttaattcttcaattatcaagatttattcggtttaaaagaattaataagaaatccgaattgaaaataataatagttattgaactctaacaattacttcgagaattattttttcgtcttacctaaaacataattttttt

SEQ ID NO: 233455 - DNA, 474 bp, Glycine max
  unsure (1)..(474): unsure at all n locations
tcttacaaagcatacggctttctggatgtagatgatgatattatacagatggatcttatatatctatatatctatagatagatatatagatatagatatatagatatagatcatacaatgaagtaccgcacgagtgggtatataggaatccaaatctgccgaatcactcatgttatgatcttctacatcctaggtcttcccgttccttcatctggcttatgttcttcatgtagcattcagactgaatgactctatgaaattacgtcgctacttccacatggtacgggtaacgtaggagacatctctatttttcccggngggaatccttagaattaccacagcttagctttcaattcgcctctgaccatcaaatgatatgtgaataacccgtcctcccctctttgaaactttgaaacaaagggtgcttccggttctgtcggtgcttgaaacaatattgtcttctccatattacta

SEQ ID NO: 233456 - DNA, 301 bp, Glycine max
  unsure (1)..(301): unsure at all n locations
cccaaanaaaaaaaacgaccncgaaggcaacccaacaacccaagagnccntngaaacaagaacnccnagaaaacaaggcaaagcaaccggactaaagagaaccaaaaaccaacaagcaagaaaggaggcnaaaggaagagaaaacgcaaacccagagngagaacggnncagccacacccttgtgcctacgtccagtccccaagcaacctgcttgagagttccactatcttgatatatcactctactagttctgaaccacacaaggacaaccctttctttgtgttcagatttctttacaaca

SEQ ID NO: 233457 - DNA, 461 bp, Glycine max
tttggaggacgtaaagacccccagaaggtttatctactatgtcttgcaagaggtgggcatgattccctccggcgagcgcagagaagactcttgcttaatgcatccgggtgtactgcatgacatggaaacatgttcggcagtaagagatctattgcaatggatgatagaccaaggccggcttgaggttggcagtgagagggaggaggaacaacatgtatgcatgcagtcggcagatgaagaaggacctaaaaagcctaaacccttggtaatacacttcactaggaacacggctacccaaagacctcaacacccctcggcagtgttgggaggaagatctatttcgtttccttacaagaatagtcacgcagttccatggaggtatgcccctccgggcggtaggaaggaagaagctaccgatatcagctcactatcggccatagtgaccaatatcaccgagctga

SEQ ID NO: 233458 - DNA, 411 bp, Glycine max
  unsure (1)..(411): unsure at all n locations
agctnttctccatgactgcggattatggagcctatccatgggggcctaagatcaaagcaactactcaatattctggggttggcagcaactccgattctaaatggctgaagggcgagggtaactatgcagaccctattcacgtgacaagcaagggtaagatcgtaaaggaggccaataataataacgtaactaatatggcactggcactaacggaggaaatcccaagaattgcgatgcaatcattgctgatgagaaaaaaatggaatgatttgtttctttccaagtttaagaatccgcatttaatgtttccaatcaccaatatcttatcaaataacgaatacattaacaaggaccaatcatttgaagtgaacacacatgatatggacgttattgtgacaaacaaaaaatgcc

SEQ ID NO: 233459 - DNA, 463 bp, Glycine max
  unsure (1)..(463): unsure at all n locations
gatcacagtgaggaggagggagggattattttatagagtgagagtgttgctaccgcaatgagctaaggtgaacacgaatgaaagttgctttaaaaattaaaaggtttaaacgataatagagaagcagtagtcaaagtgaatagttggaagagtcaagttttaatattaagatcttttagtaacattttatataataaatgttacaaaattttattttattatgatttggtaacattttagtaaatgttactaagtccactaaatgtagaattttttttccgctnccaactagctntttagttagttttactgaacataaccaattgttttcctctttttagaaacagaactagagtggaaacattcacacactaatacaaatggagtcttctacgacgcgtgctcaacgacggttgttncacaactgttgtcatttgaacatgtggcaatttataatattgcc

SEQ ID NO: 233460 - DNA, 413 bp, Glycine max
agctatatcagagagtggatgttatgatcgctccctcttatggaagaacagaacgcacttcttgcattgtatatccgtataatatccggacagctatcggcattgtgttcctttcaagatagcaaaatgtttcttggcttcaccatagacttcatcatattagcaataagttgtttctcagctttagccaatcgctctgcatatggatgtccaactaatgacttgaccaattcatgactatgcactccacaaatcatacttaccatccaccctttttctcccaccactggcttgctataaagcttgaagggaccacccacacttcctagtcacagtggcttttttgataaatacttattctacacttatactcgccactcctttcacaacccattaacacaaacgtactcctt

SEQ ID NO: 233461 - DNA, 462 bp, Glycine max
tcattcaagacaaagaaattaaagatattcaagatgtgattatcaagacagtctctagagttttagaaagggtatattaaatacgaagggaattcctaactgaagtagcacaaggtttggccaacacatataagttaaaaagtctttttcaagatatatactctttggtaatcgattaccagaggatgtaatcaattaccagtggccaaaaatgatttacaacaactattacaatttgaattcaaaatttgcactgtgtaatcgattacacatatatggtaatcgattaccagcagttattgaacgttttaattcaaattttaaagcttgtaatcaattacacacatactgtaatcgattaccagaggagattttcagagaatattctcaacagtcacatctgttcatatagttcttgaatggccatcaaaggcctatatatatgtggcttgagacacgaat

SEQ ID NO: 233462 - DNA, 356 bp, Glycine max
agcttgacctagcacttcaaccatgtatgttttgtgatttatcaatggctcgaccttatacttacccatcatcatgcaataaatccctaacttctccttactgctcccatatattcacaagcagttaaaacaccaatgaaacttaaatggtctacctttaaatctgaagcttcaagctttgagaaatactcgagtgctttcctctcataaccattcatggcaagtgatattataatggcactttaacatgataatcatgttgttgcgggggatgcctgaaacactagaataccctttacaatagctccacacttgcaatacatgtgaataaagctgaacaaacctatgacatcaaa

SEQ ID NO: 233463 - DNA, 441 bp, Glycine max
  unsure (1)..(441): unsure at all n locations
tctaagaccacgacacagcagattgtggggtaccttattttattacaggtaaatcttgcgttgttaatatgttacattggattatgatgtaaacatgtttttatgttatgttaacctaatttctcttgtagtactggatctatgagcattttccgagtgtgcatcagtgtgtcaccgatgatgcgtatgaggagatgtccccttgtgcctcccggtggctgacgatgaaggctcatatgaagggaattacaggagcttcgtaccgggcacgttgtgatgctttgacggtcacagacgtgtgctggttgccttacagtgaccatcgaggggttagggggtttgagctgatttaatcgttctagggtcagctgagatgngtgcctatggtggtcacagttcgatcggagagggtgctacgccagcttgtgtacattctgagca

SEQ ID NO: 233464 - DNA, 390 bp, Glycine max
  unsure (1)..(390): unsure at all n locations
agcttcttagtctcagctgatgaagatgaattcgnggctacttcatgcactcctctaatgacaatagcatcatttctggcactaaattgctgggagtttgaagccatcttctcaattaaatttctggcttcaacaggggtcatgtctccaagggctccaccattggcagcatctatcatacttctctccatgttactaagtccttcataaaaatattggaggagaagctgcccataaatctggtggtgagggcaacaggcacataatttcttaaatctttcccagtattcatataagctctctccagtgagttgtctaatgcctganatatcctttctaatggtcatggtcctggaagcagggaaattnttttctaagaatactctcttg

SEQ ID NO: 233465 - DNA, 405 bp, Glycine max
  unsure (1)..(405): unsure at all n locations
ctaactacagtgcctctcacagtctttatatatgggagccaatccaatccttgtgtccggattctaangcacttattatagcctccgatgatcccatcactgattcccctaagctttctgacctttcttcacgccgcctcccatgccttgcgaactgcttggagtaccctctcgttgtggtcactgacacctcgtgcgaggaaaggcctgatgctatcgtctgatggcactcctctcatgggacaaccttcgcatgaagacagaatcctgattcttccttccttgtagcgagggaaccatataacagacacccctccgtgctagccaagaggtggacccaattcttctttactttatcgacgcacgagcggtaaccttgtatcggatagacgatcctaccttctt

SEQ ID NO: 233466 - DNA, 399 bp, Glycine max
agcttgtgactcttggcaatttctttaatactaatcacttaaaaaagttgtgactttcgaaagaatcttcagaaacaagtcacctgaagaattgtgacttttagaaatgtattttttgaaatcagtcacaggtaattgattaacattaaggtgtaatccattacacatcaacagatgtgactcttcattttgaattttgaaaattgaaacgtttagaaacactggtaatcgattacaagtattgtgtaatcgattacacacgttgaaaatgtttaaacacaagttgtaattcttgaaatttgaaatcttaacgctttataacactggtaaacaattacctaccttctggtgatcgattaccaaagattaaaactctttggtaatgattttgtgaaaact

SEQ ID NO: 233467 - DNA, 465 bp, Glycine max
  unsure (1)..(465): unsure at all n locations
tcctcgggccattcctgcgaaggcaaacatttgtttttttagtctacaagaaatataacaatcattacaaacaagggccaaacaacacttctcatggcacgagtgtcaacatgcactctataaaataatcatattggggtcgggctattttatgacacatacgtatttgcacacataaaaattttgtgtgaagcattttacgacacctatccatgtacatattttttgacaaaccttttcatgctacatcctatatatatacacacattttttggaaggcttcttttgttacctactcacaaatacacatattttgagaaacacttttacgctacccatccaacactttgtaaggcacttcatgctatatatattcatattatgcaaggcattttcatgctatatatattcatatnttgcaagggcatttattcaacattntgcaaggcatttccatgctatata

SEQ ID NO: 233468 - DNA, 300 bp, Glycine max
agctttcgacgaaattggcgcacgctctttaagctatagtgatcccaatcaggttgaattctatacttcgggccgcacttccaatgaagctgcctttctttatcagctttttgcccgtgaatacgggagcaataactttcccgactgctccaacatgtgccatgaaccgacaagcgtgggtttggcagcgagtatcggtgtaggtaaagggaccgtgttgctggaatactttgagaagtgcgatttagtcatttgcattgggcataaccctggtacaaaccaccctcgcatgctgacttc

SEQ ID NO: 233469 - DNA, 467 bp, Glycine max
tagtggctacgtgtaccgccaaatctaattgttttatctgtacagcgctcgcttcccgatctggcattgccagcgcaaaattgccccccatgcagatcaatgctcgagcctgccccgtacatattgcttgcatgctggcaattgcagcatgtccaggtgcatgaggtggggtgaagccatagcgctcacccagacgagccagaaactctgcagacggtttctcggtgataccgacggttcggtcgccctgtacattatagtgtccacgtagtgggcagatacccgcaccaggcttgccaatgttacctttcatcaacagcagattgaccagttgctgtacgttctgggtaccatgttcgtgctgagtgatccccattccgtaacagataatggtgcgttcggcagcggcatatgcgtcagccagttcggcgatttgtgtctgacttagtccagaaatacgttcgata

SEQ ID NO: 233470 - DNA, 390 bp, Glycine max
agcttcctttacaacgatgagaagagattatgtatgatcgaagaactacacgttgtagggatgtatcctccacctctagaaacctcataatttctcaaaatctcatccaatgttccgcaagacgacttcttcttcaagctcagctctctctcagttgctccacagccaaaaactcccaaaaaaactaaacaaaaccctcagaaatcgtgattttaggttaaataggcacttctatcggcggacgtgcgcttagcggaagatgagctcgcttagtgcacgtaagtgacttttgtcttagcgccagtcacactctctcagcctgaaggagaagacagtgggcttagtgagttgcacttcactgtatgcctctatacaactcatcctttcttc

SEQ ID NO: 233471 - DNA, 487 bp, Glycine max
  unsure (1)..(487): unsure at all n locations
acctataaaactacgctttatttacaatcatctgtctactgactacaatttttttgcaggttcacattcttgttctttctttgtctaacatacacacttgctcaaactcataaaaggaaacacaaactccatcatactcatgcacttaattcaaaatgaaaacatacatccatttttcacagaaagataaaagtgtttcacggtcatgtcatcaaaaataagttaaactattccggatgcttcaggatgagcaactacactactcatgcacaaaactaataaaaagtaaataatgtactaacaccataaatatactaataaatcaaaaagcgcaaaaagaagcataaacttttcagaaatatccacattcttgtcaagatgaaccacaactttctcaattgtccatccagtcagaaaagtccgaaccatcctctatgtagtangctggtgagtcangaggagcagcagcttcagcatctgagtcatc

SEQ ID NO: 233472 - DNA, 424 bp, Glycine max
  unsure (1)..(424): unsure at all n locations
agctttggtattaatagttcttcaactttgttgttcgcngnctctaaacgaatagatttcttcacttgagcttgcgtctaaagattgtggccattggagcatttaatacttccattaaatgcacgtactccttaatactagaaaatcactctagttagctttcgtgtagaagacttgcaggaatcatcttctttttcatcagagcatgcctttcatagtagagcatgtcttttgatgtcatttggcaacttttacaccttaaacttcatttattcttcataggattcaacaaaaaagaaacacatttttcaaggacttaaacgaaaaaaaaaattgtagggacaaaaatgataaaaatgctaaattgaagggacgaacaatgtatttaaatctatctaaaaagaataatttttatctatttttt

SEQ ID NO: 233473 - DNA, 480 bp, Glycine max
  unsure (1)..(480): unsure at all n locations
ntccaagtttattttggtgatgccaaagactctagtatttattcaagaatcaagcaagtttcaagaataaaagagtcgttcaatcaagaatcaagtttcaagatatgcaagaacttaaagaaaaatatcaagataagtataaaaaaaaattttctaaagaaaagattgaatagcacaatttgtccaaaagaatttttcaaagaaaaatattttatcagagtttttactctctggtaatcgattaccagaagcccaaacagtttaataactattttacaaagtagtaatcgattaccatgggtgtaacatcccatttttttcataaataaatttaaaaagttttctagtaaaaataataaaaataaataaatagagtaaataataggtcgtaaatgtccctagctataaataacaacatgctaggtttttcagactgactcctcagcctcctctgcctctcatttttcgtttccccttcac

SEQ ID NO: 233474 - DNA, 312 bp, Glycine max
agctttgataccatactgaaatatgactgttgattaaaatgactttataaaatattatttgatgattccccaaagatacaagctctaacatgaatatatatgataatcctaacaaataaaaatcaagtcacacaaaccatgtttaacaaaacatgtcaattcttacaattttgtctttaagaacttcactcttggtaatatgaaaatcaaccgcagaagctccatatccaagctgcattgcaggtaaaataatattaaatatgttctcagcaagaaataagaaccaaatcgacaaatcacaaggaaccacct

SEQ ID NO: 233475 - DNA, 474 bp, Glycine max
  unsure (1)..(474): unsure at all n locations
taattaacattataattaataatnnttaataattaattttattaaatatgttngaattctcttaaaatntaaaaatattaattttgtactcatcaaatttttcatattaataaaataaaaaaaatattttgttgataatctgttagatgattttctaaattgacaaagacttaattatttttttctttttaccatcaaaagcatatttaaaaaacctcagaattgcttaattacctgtacaaaattacaacttttttaaatttttaatcgttataaattgtttaattggggtttaatttttacagaattatttaatttaattataatcaaattataagtgttaagtntattaatcacgttgtattattccctaatgagattacaattaagaactaacaaaaattatattntagttntagagganaccaaattagtatgaannattttatgaggaggaaatngatactntttaaa

SEQ ID NO: 233476 - DNA, 405 bp, Glycine max
  unsure (1)..(405): unsure at all n locations
agcttctaatagagctagaagactatttttctaaatctattntagaggctattctaacatatactatgcaaaatgttcggattcctaaaggggtgtgtctgatagtattgatgttaatattcgttcctttatttggggaaaacctcatacgcactgggtggattggaattcagtaactcaaccaaaatctctatggggtntaagtttgaggaagacacatgatattaaaggcaccctcctcgggaaacaaatctggtctctattgcatgatgatgataagctttgaccaaatttcttagtgataaatatcttcatggagccaatattcttcaattgcaaaattcaaaagggtcatgaattcatggaccttatttttaggtgaaaaatgtctttatacgggttatt

SEQ ID NO: 233477 - DNA, 475 bp, Glycine max
  unsure (1)..(475): unsure at all n locations
tcaagaaaaggccaaactcacctccaaaatctgatntcatgcttaaataggtggtttgtttgtgctcgtgcgcttagcgcaattctgaatcgcttagcgcgcattagtgaattttggcttagcgcgggcttttcatgctcagcgaatggattgaagcggtgcgcttagcgggacggccatttgctcagcaaaaatgcacagctcatccttcttccagattcttcctcgcgctcagccgaggagtgttgcgctcagtggatggctcgctaagccgacaggttggcttagtgagagggtgaaaatcagcactttacagacttgcctaattaacctgaaattgagagaaaatgattattaaacgcacaaaatggaagtactaagtatttattacctatctttagccaaaagtaatggcaacactacaaaataaccataaattgcaagagttngatacaatttacacaggttntataca

SEQ ID NO: 233478 - DNA, 407 bp, Glycine max
  unsure (1)..(407): unsure at all n locations
agcttgtggcataaagattatataagatgttcaaagagatttagggcttgtaaaaaattgattgaataagcgttcaagattgattgaatgaatgaattaaaaaaacaaaacaaagccttgcttttatagactcttcatatctggccaagaggaccatttaaaagagttataacttttagaaaaacttaaaaccaatttgaaaaagtcaaaaaaccatttgaagagttacatcttttgatttattcagaaacaatcactggtaatcgattaccaaatcaatgtaatcgattacacaaagcttttatgtgaaaggatgtgactcttcactctctgaattgaatttcaacgtgctactcaattnttgagaaaaccttttcatacttatcttgattcttgaaatcttgatc

SEQ ID NO: 233479 - DNA, 433 bp, Glycine max
taactaatcaaatgggacaattggctacactttttaatcaacagcagccccagaattctgacagattaccttctcaatctgtctagaatcccaaaaatgggagttccattacattgagatcgggaaagcaatgtcaaggacctcaaccagcaacatcttcctcatctgcaaatgaacctgcccaacctcactctactccagaaaaagatgatgacaaaaatttaaagagtaagttacctaacaatttctatgaaggtgaatcttccactggtaattctgatttacaaaagcagcatatccctcttccattccctccaagagcaatttccaacaaaaaaatggaagaggcggagaaggagatcttggaaacatttagaatagtagaggtaaacatacctctgctggatgcaataaagcaaattccaagatatgc

SEQ ID NO: 233480 - DNA, 395 bp, Glycine max
agcttctaactatatttacatgtggcttatatatataacacatcactatatatacatatatagaataaaaataatacacaagcaagatattcaaactcatgaatttcctaattagttcctaaagtatacttaagcaaatacatatattgtatatatgaaattgaaatctaaaacaaaatcactacagatgtatcattatatatatatatatataacacattagaatcttatatacatataattctatatatggaaaacaaatatacatatatcactaaacatattccaaggcaaccataagaatctagccacgagaagttagtcaatagaagactatgatcaatcttaattggtgaagcttcgcattctaattcacaaaaacatgggttcatgct

SEQ ID NO: 233481 - DNA, 275 bp, Glycine max
  unsure (1)..(275): unsure at all n locations
tgaataacaccaaaatgagcggcttataataccatgtcacaatttggcccattataagaacaaaggataacaaggatacgctctaccccacataatcatagaaatcataataccatgtcacaacatagctctacaatcgtgtaatggcccactatggnttttatatcaaacacccaccactggctttccgatcacactatatacgttacagacttcaagattaatggaaaagcatcaatccgacaatcatattaaaccctcttaagacgacacac

SEQ ID NO: 233482 - DNA, 390 bp, Glycine max
agcttctagagaaagctacatgtatctgtctcggtaaaaacgatgcccagtgttcgttaaccgctggatcttttccaaatttggtctgcaacttcacaagatatctttccatgatctgaccgttgggatctttgagaagatgtctggagtgttctagaagcctcttaatgaagcttctggaggaagcctcttaatgaagcttctagagaaaactacatgaagctgtctcggtaaaaacgctgcccagcctttgttaactgttggatcttctcgaaatttggtctgcaactttaaaagacacttgtcaatgatctgaccgttgggatctttttcaagatctctgaagtgtgctagaagcttccgttccccagagcatcttctattttagca

SEQ ID NO: 233483 - DNA, 436 bp, Glycine max
  unsure (1)..(436): unsure at all n locations
tccattcatagtaggagggaatgtgcctcttcctaatggcactcttaagatcattccaatactctattcaaggatccccatgaatacttcattccctaacaagggaagtccaccaatagagggcatactcttgaaagcttatggtatgtcataccctaatttcgtccggggacctttgcttgatgacatgcgacctttgtttggtccttgtaaggtgcttggcacccatcattaggcaatttgtgaaattccgggacatgccgaaaaacaaaagataatattgatgcacaatccgtaaaggttccgtgacacaccggaaatcaaatggaagcatcgttgcataattagtgaggttccgtaacattccgtaagtcaaataggggatgattctgtaatccgcaaggttccgtanacattacggaaagaacacaagtat

SEQ ID NO: 233484 - DNA, 432 bp, Glycine max
agcttgataaaagaattatatttaatatcaacagaagtaggagtatataacaggaaagaatgataatttaaaagagtaatgttatgaattatgatttaattaccattatgacatttgattcgttgcagtcaagaacttgttgtataacaggataaaacgaaagtaacagctatttgctcaccttttttttttccgggtcaacagtacagtaggaggcccaaaagcaaaagcaaagaccccgtggcccagtaataaacacaaatggcaattactttcttggggtccataattatttcatgcacctttttaaacttctgccctgaaataatcatttagaaaatggtaagactaaaatgggcaacatgattcatttattaaatagaatatttatctttttttctttcgcggtaatttaactactctgatattgat

SEQ ID NO: 233485 - DNA, 462 bp, Glycine max
  unsure (1)..(462): unsure at all n locations
ntgaagaatattanaagtatactttctaacatatttttattatttattaaaaattataaatactagtataattcattaaatataaaacgaggttaaattttcttataatttctaataaattctataaagaaatatcataaatttgtgatgaaaaaatgcgttagaaaaaaatgtttcgctaagatttgtgtaagctttataacgttgtcttgactgtgaaaaataaataagaaaaggaaaaggaaaaacaaccctggcactacgattctatctctgcgatgatcgggttcattattgttggcgatgatgactcataaatcacaatcatgatgagtagttgaaatcgaaaagagaaaaaaagttcaaaagaagaagaatgagaagaagcgctataccagcagcagcattttcttttccatttccaacatcaacagcgagagaaaggatcatcgatcatcatgt

SEQ ID NO: 233486 - DNA, 390 bp, Glycine max
agctagtacgaacaatacaagtttgtttttttattattattactcaccacactgacccttattgcatctcgaggccatgtgctggtcaaactcacatgccatttaccagtgcatgtgactgcacaatgaagatctgcatgcaaccaacaaattctataaataccactacaaagtgaagacattcatataactttcaaatattcatctaaacccttaccactatgtgtcacccaactgcatatgtttgtgtttactataacggccaaatatgcaacactaatgagggcaccaccttcattagtaacaacttataaactttcatgggcaacaaggcccctttcacaattggttgaacttgttcaacaatagataaacattgaccacaccaca

SEQ ID NO: 233487 - DNA, 478 bp, Glycine max
  unsure (1)..(478): unsure at all n locations
ctataaaactcagctataatacccaaccactccttagcggtaaaattttaaaaaagctactaattcatccaaagctaccttttaaactatgacattaaatgactttcacgcaaactctaccaatgccccaaccaaaatcatgcaagctcttaaaatgggtaaaaaaagatgctctcactacttcatccaaagctaccttttcaaatcctatttgaccaaaaaaaaaactgaactcaaaacttttttaagaaaagatggttggtgacatgttcaacaaaaccaaaaccaataaaaaaaaataaaatgataaaaggaaagagacaaagagaaataaaatgaacaatgacatgaatattttccctanaaacaagtacattctaagaaacaaagcaagtcaaactaaaacccaactatcatagcaaanacaaactcaaaaaacataaaagcaagaattaaaaaanaacataattcttcttct

SEQ ID NO: 233488 - DNA, 419 bp, Glycine max
  unsure (1)..(419): unsure at all n locations
tctccanatggcatagttatttccaatttcctgattattctaggaatctcgccaggtggcgttccttatctttcttggaaggtaccaaagggtatggcacttcctttccctcatctgaagttgtttctttactcttttctcttgctttttcactcttactcttttcttctttatttttttaaactttttctttttctttttgttttcctccctctatttctttttcattgtctttcatttcttcctttcgaacaattattggcttttctctccactgactcctcttatttgttaccctattcttctttttaacagtagtgtccttcaaagaaacttgctccttcaaagcaacaacatccttatcctcagccgccacaagcttcatgcttcttgtcataacagctttacactcttctttg

SEQ ID NO: 233489 - DNA, 383 bp, Glycine max
agcttctccctcttttccctttaaataggggaaggagggaagaacaaaaatgttcaaccccaatggtatctgagaatcactgaaaattagtgagaaaaaatttttccatgaagaaaatccaagtcgaggcgcttccgtaacgcttccgagacgtttccgtgggtgatttcgcgaagattttccaccgctcttcgtcgttcttcggtcttcaaccggtaagttcccaaaatcgaacttttcaatgcattctatgtacccttagtggtcctcatttgtttcgcgtacttttatttttatttcatttactttctgtaccccgttttgacgtgctataatcatatatttaagtcattttctggctaataaaaaataaattaaattcc

SEQ ID NO: 233490 - DNA, 472 bp, Glycine max
  unsure (1)..(472): unsure at all n locations
tcttatccaaggctcatcttggtggtgaagctccttcttccatggcttattccctagtggatggcaccgcctcttacctcttctcctttgtcttccgctgcatcttcatggtggaaaatcaccattaaaggacctcattgaagcccaaagatccagccttcatagaagctccacaagcaagcttcctcagcctgtacctcataaagcaagtcagaagtatatgtacttcctgcaacatggttagtgcattctgactctaaaaaatcaacatcaagaggtacaacacccagaaaatcagaaccagactcagattcaaattcactctcagcataaaaattatatataggatcaaattcaaactcagattcagattcaatgcataaggaatgacaagtatgcagatcagatatnaatggatgtntcctaccatgaagaatagaatcanaatcaaacatataatcatcaacaatct

SEQ ID NO: 233491 - DNA, 310 bp, Glycine max
  unsure (1)..(310): unsure at all n locations
agcttctatataagctgaaccatnttatcaataaacacaagttgaattttattcagaaaattaaagtttatctcttttatcttagtgagagtgattctcctaaattcttgagtgattcaagaacaccctggctgtatcaaaggactttcacaacctttgtgtgttgccctcgctggaaagagtgattctttccttcctatcatctccacccttgttctttcaaaccacaattccagaaaatccacctcttgccaaaattatctcgtgaccataactcccattttacacacttcaaattagtgattcttga

SEQ ID NO: 233492 - DNA, 453 bp, Glycine max
  unsure (1)..(453): unsure at all n locations
tgctctaaatntacattgatgtttgtatttatgagaagatgttgcatgccatttttgttataagagtagtgtcccactggtaaaactttccaaatgtttgccttcgcaggaaatggccccgaggaagcttgcctcacagaggtccaggaaggacaaggcagccgaaggaactagttccgctccggagtatgacagtcaccgcttcaggagcgctgtacaccagcagcgcttctaggccatcaagggatggtcgtttctccgggagcgacgcgtccagctcatggacgacgagtatactgatttccaggaggaaatatggcgccggcggtgggcatcactggttactcccatggccaagtttgatccagaaatagtccttgagttttatgccaatgcttggccaacagaggagggcgtgcgtgacatgagatcctgggtaaggtgtcagtggat

SEQ ID NO: 233493 - DNA, 271 bp, Glycine max
  unsure (1)..(271): unsure at all n locations
aatgactatggcagtattactggcgctaaactgctgggagttggaggccatctactcaattaaaattctggcttcagcaagagtcatgtctccaaaggctctcccactggcacaatctaatcatacctcccttcatataactgagtccctcataaaaatattggagaaaaagccgttctgaaatntatggtgggggcaaatggcaacatagttctttaatctctcccagtactcatacaggctctctccaccagagatgactaataccctg

SEQ ID NO: 233494 - DNA, 390 bp, Glycine max
  unsure (1)..(390): unsure at all n locations
tagccctagaggggatggaccttataagtctnggaccttttaggcccaagatgggagagtatagagtcagtaccactnttaacatttcttatttaattccttttgcaggtgaagttgataataaggaggaggaaccaacaaatttgaggtcaaatcctcttcaagggggagaggatgatgcaatcctccctaggaagggactagttaccaaagccatgagcaagaggctctaagaggattgggttagagctgctgaataaggccctagggttctcatgaacctcagggcagatgtctgagcccttggaccaaggttgggtccacttatctttgtacatattacattaagatttcattatttttgttccttgtatttaaggctccataatg

SEQ ID NO: 233495 - DNA, 350 bp, Glycine max
tgtcacgctaagcgcaattatctctctgtttttctatttgttggaattgggcttagcgagcttgctcgctaagctagtgttgtccaatagagtagtcgcacttggcgccccttgccgcactaagcgcaaatccttatctgtttgaaaatttatggaattgggcttagcgagcctgctcactaagccaattctacagaaaaaaaattggatttgtgttcactcgctaaaggtgtggctatcgcgcttaacgcatgagtcgaattttctaaggcgcgctaagcgagtcacttgcactaagcagaaaaataaatgaactcctgcttcactcctcctgagttgttgttgggtcg

SEQ ID NO: 233496 - DNA, 432 bp, Glycine max
  unsure (1)..(432): unsure at all n locations
gctgcanaanncctttntgttggtgtgagtttggtttgtgctaaaggtggtcttcgtcattggaagtgcggtatacaggctttgtggttgatttanggatggcctttgtggataattgggtggtggggtaaggaagaggtttgttattggctgagtaatgacattgttgggttggtgggaaacttggccgtataggaatgatagtcacaacatgggtttctccctctttctcaccctcttcatttgccccagttttctcagtcgtcctagtaggatgatcaaatttgcctcttttcggatccacttcgantcttttgctggcgaagaccaaatctgtaaaacttgaaggtgtgttacccaccatttttttcatagtagaacaccggtcacgtgtctactatcattgtgataatctctttctctgttttgggg

SEQ ID NO: 233497 - DNA, 358 bp, Glycine max
  unsure (1)..(358): unsure at all n locations
agctncattctgcacctgataaagatgtttatatcgttgcacaaaagagaaagcttcctgatcataagggagctaacaaaaactttcatgtaggtggaccttcttatagtaattttgacttgtagcaaactcctattcctcttacattcccacctaaagcaattcctaacaaaaagatggaagaagtggaaaatgagatcttggagaccttcatgaaagtagaggttaacatacctcttcttgatgccatcaagcggataccgagattgcccagattctaaaagagctgtttacccacaaatagaagctcaaaggcattgaaaggattatcactggtagaaatgtgtcagcattgata

SEQ ID NO: 233498 - DNA, 428 bp, Glycine max
  unsure (1)..(428): unsure at all n locations
ccctactttagttatggtgtgataattntgtaatgccaaacatgttttatagatatgacaattgtattgaatgtttttcgattaggcatgagtgtgatatagtctaagtctttttcatgcttagtgttgatcaaatatgaagtaaatgaagtattctaattctctaagtttcccaagtaaaagcaattggacttacttctacttgaaatttggctagaagcatcgaattaaccgatttccttacttggtaattgagtgcccaagccaagttcaaaagaaggaagggattgtagcttaggataatcgattgactcatttgataatcgattgcccaacttctagaaacaaagaaaagcgttgtgtgattctattatcgattaccatatgtggcaatcgattacccggatagcgcaaagaaatatagatcc

SEQ ID NO: 233499 - DNA, 314 bp, Glycine max
agctagaagcagaagagacacttcatttgatatctaaggcgaaatcgctggagcgggcgacataaacatacgtacctgtaaaaataactgggaactgtcactgtgaattttgagctgaaattcttactgaattttctagacactctggaaaacaactataaaaaaagaaaaaagctactcggataaaattaaaaaatactcaaaaatacacaagttggcaggaaaatcagtgtccacgaaaaaaaagtgaaagggaagtgagcttgtcgttttggctcgaaaattcgcccataatttgcgcccatttcatacca

SEQ ID NO: 233500 - DNA, 401 bp, Glycine max
tagatatggatattaagttgatagtaaaggttagtttgtatagaacatcttttaatatgatgagtgcagaaagttggactgtgcccgagtgagttgcatatacaaattggccatttggtaatctaactgtgatggggttaatctggtgatatgagtgacaagtttgttaaggaaaaagacacatgatcagtagctcctgaatctaatatccaggaggtggaatttgctttttcttaagatagaatggtacctgttgtatcgtgatttgaacaaaatgaaatggaagcaacctcgtgacttatttgatgctgacgattcatcacatggttgttgtattacagcttactacgccttgtactgttcaagtgagaaacaaccaattcttggattttggtgctggt

SEQ ID NO: 233501 - DNA, 422 bp, Glycine max
  unsure (1)..(422): unsure at all n locations
agctttattcaagacaaagaatatctttatattctagatggatgatcaagacagtctctagagtcttatgaagagtatattaaataggaagggaattccaattgaagtagcaaaaggtttggccaagaaatttaagttaaaaagtgtttttcaagagatttactctctggtaatcgattaccagaggatgtaatcgattaccagtggccaaaaatgatttacaatagctattaaaatttgaattcaaaatttgcactgtgtaatcgattacacatatatggtaatcgattaccagcagttattgaacgttttaattcaaatnttaaaagcttgtaatcgattacacacatactgtaatcaattaccagaggagattttcagaaaatattctcaatagtcacatctttttatttggttcttga

SEQ ID NO: 233502 - DNA, 316 bp, Glycine max
  unsure (1)..(316): unsure at all n locations
aactccgcttaaccgnnattaagtcattgttcactatattgataaatgaattcaccgacattgtgttgaatctcgtaatattgtaaacaaaactaacgatcgtcacgctatatcccggtaaacccaaaagaaaataataataaaaaatcacatatcttgaaaaatataaaaaatatcaagaaaatcatcaacgtttttttgaagttccttgatgaatgctataccaagtgaactaagctaataactacaaataagcttgtcgcaaatactaagacatttaagccatgctaacgacgcttgtttatggtacatggac

SEQ ID NO: 233503 - DNA, 395 bp, Glycine max
  unsure (1)..(395): unsure at all n locations
aaactccgcttctcacccctcataagaatgagaggtctgttattatgnccgnctttaatgaaagctgtttgcctttcgtcaattaagacaggtataacatgtctcaacctgtttgctagaagtttagctatcactttatacatgcagcctatcaaggatattggtctataatcatttagggactaaggatgattaactttagggataagagccaagaaagaggcattgctgcctctacggaaactgccattgatatggaactcatccacaaatcttctgaactctggtttcagcacaccccagaattccttaataaaattgagattaaaaccgtccggcccatggcacttatttccaccacaactccacactgcttccttgagctcctgcgctga

SEQ ID NO: 233504 - DNA, 263 bp, Glycine max
ccaaaaagagatcgtccaggactaaccgcttgaattcttatagggtctctcatccccctttaccaaaagaacaaacgactcaccgcctgaaccccattgagactcccttctaccttgtcaaagaattgcaaatgacacactctgaaaatactcttgatacttaccttacccaaaacaaaagtgccaaaggactaaccggctgagaatcttttgtatcccaatccaaaatatcaaggataacagtctggatctttgtctaacac

SEQ ID NO: 233505 - DNA, 336 bp, Glycine max
tgagaccaaaccggcgagagtgtgattctacactgcgattgaacatcgagctgtaagaaccgatctttgcctgcaacttcgattattttaacgaaacgcattgaagaggtcatgtgggcagccgtgaccgctcttataccttccatccgagcatacatctcacctcgcctgatcttcgagaaccttgcaccctttatgaactgcatgagcctgtcatttattttgacactgacactcaaatcttattatctagattcctcgcttagattctaagagagcatatggttcaaggcgaattaagctcaattgtgccggactcatctttgtgggcatgtt

SEQ ID NO: 233506 - DNA, 402 bp, Glycine max
agcttgcccagagaaggagtttcctgttgaaatgcttaccacctcaaaagactggaaaacggtttctaatgactcctctgcggcctctacataaggcatagaggatgggcagctcaccaagatgtcttcctcgcctgatacgatgaccagatgcccttccactacgaatttcaactcttggtggagtgtagagggaacaactcccactgagtggatccacggccgccccaacagacagttgtagggggggttaatatccattatttggaaggtaacttgacaggtgtgagggcctatctgtaccaggagatcgatctcccccctaacctctctgctggtgccagtccaggcacgaaccaccattgaacttggctttatgtgggaagcattgaatgggaattt

SEQ ID NO: 233507 - DNA, 370 bp, Glycine max
  unsure (1)..(370): unsure at all n locations
tgtgaatcaaaatcactactgcatgttatctctatcatgcattctntctttctttacccactcctcacgtatggttttttacggaaaaacaccataactaaacgcgccacaaggcatccctatcgcaccagatccaaatctagaacgatgggtgatcaagaggagacacaggaatagatgaaagccgacatgtcggctctgaaagaacagatggcctccatgatggaggccatgttaagaatgaggcagcttatggagaagaatgcggccaccgctgccgctgtcagttcggcttccgaagcaaacccaacttctcttgcaactgcgcaccattcttccttaaatatactaagaccgggaaaggacacac

SEQ ID NO: 233508 - DNA, 343 bp, Glycine max
  unsure (1)..(343): unsure at all n locations
tacaatgttttcaaaacnccataaagncttcaagaacaacctgtccttgtaatttatttcataaagactatctaccaaatcagaaaatacatagttttcataattactctcatacaccacctaacgatagaagctctctcatattagttatcttcaaaaaatattttaaactatcggcttactaactcaacctatagataagtttatataattctattgttattattttccttttcaactgctcttctaaagacatttattctaatagaccctatttttaatattatccacactacttaattcatatgagtccctaatcatactcttaatattaatttaataa

SEQ ID NO: 233509 - DNA, 363 bp, Glycine max
aacttcaagaccgccaacatatagattagctattttatagttcatcgaaatagatgttagtaattttttaatttgttcaattcacatgttatgttggaatgaaattatttgcaaagaagcatcgggctgtaaacaaggttgcatttcagtttgcaatatttttgtttgtactgacccatgatgttatgactgcttcttcatcttgcttagcagtaaacgatacataatatagcatgacttaaaaagaaaggcacaaataatgagatttgatgtttgcttgcagaatgcagattgatttatgcttgaaggcttgcaccttgccattttaatctctatattggattttaacatgatattctaatg

SEQ ID NO: 233510 - DNA, 362 bp, Glycine max
caaccctcatagcaaatagaaagacagagttctacaatataccaagatgagttctattagggactaatgatataaatagtacatctgtgaatgcctgtctttccaaaacttttgtctaagttcaccttacagaggacagtatctaaaaaaaagaatcagtctattataatcatccagcctcaatgagaccaataattattgagtaattacttttatgtgtttgatgtctctacattattataagaattgtgatacatgacctaatactctcttttccacacaagggatagatgtgagctagaccaccgattttctggtcacatcattttcaatgtgcaaacagcatttacatttctgttcac

SEQ ID NO: 233511 - DNA, 335 bp, Glycine max
ccatcaaggaaacgccccggaagacaaacgaaaagaggggagaggacgcgccatccatcaaggaataagccatggaacacagagcctcacccccacaaagacccctggataagaaactcggagatcacgcttcactggaggacaacaatgacagagagaaagatacaccacgcaccctgaaatcgaacgaagaaaaacaaagagaagttgaactccgagttgtgcctcacaacactctcactcatcaaagtaccacaagcgcccacatgcctctataaagaccacgagctccctgaaaccctctaataaaccccctcaaactcctaagaaactcc

SEQ ID NO: 233512 - DNA, 440 bp, Glycine max
  unsure (1)..(440): unsure at all n locations
cttaattctagctctactgattgcacgcaccagaggggctaattggttttatcgantacaanatatcggcaatcgattaccaatgtatctgaaagttggaatatcaaattccattgtgaagagtcacatcctttcataaaaagctttctgtaattgattaccaggatttggtaatcgattaccagtgacaagttttgaacaaaaatcaaaagatgtaactcttccaatggttttcaggtttttctaaaggttataactcttccaatgattttcttgaccaaacttgaagagtctataaaagcaagaccttgatttgcatatgaacaacactcactacctttacaaacaacttttccacatattcctttacaacctttgaatctctttgaacatcttcttgaacctcttcttcttcttctcctttgaaaaactctctaaag

SEQ ID NO: 233513 - DNA, 364 bp, Glycine max
ctgagctgcagctgctaatatatgtagagagaagtcttgtacacatcagaacaacattaaatagatagtaaagaatatttacatcatgactcaacagaaattcccaacaaaagctttagccttccatgacaaggtaccacctttaagctacaatagggggttttggaagcaaaatacagattacacagtgataggaatgtcttctccacctttaggaacctacaagttactctaaaacctaagatcctcttgaaatttggggtttttggtgttcccctaccctgttgggtctttcacgtaatgcacaacttgttctctgagacttaaagctttccaaaacctccttctttttttcgcaacttca

SEQ ID NO: 233514 - DNA, 406 bp, Glycine max
  unsure (1)..(406): unsure at all n locations
tgtggtggtcattctctacgccattatcatcgctgtttgtatgtaaangacggncaaggctcttaagacagcaatgtaaagatgtatggtatgataatagcaaggcaaattgaaataaaatatgtatattgttatttcattgatcctttgcatgatatatataatacatgtacaagaatgttctataccaattctaaggcatgacagacgtgatccataatcagtggcatctgatttattctatgcattataaggtaaataaatatagaatcaaggtaacataggaaagtaaatatatacacagcatatttgcaatcatgtagaagatatttcctaatactccccctcaagttggtgagtgaatatcgtgaagtcccaacttgttgcgcaatgtcacaaattgatc

SEQ ID NO: 233515 - DNA, 393 bp, Glycine max
agcttgaacaagcctgagcggtcaagttaatttcaagtcaacggccatcaaagttcaaaaagaataggataaactaaaggatatcaatatggccaccgccaaagccttggaatgagaaatcaagagggcccgaaaagaagaacacaaccgaaacaagttccgaggagctttgtggggaaacaacagtgagcttaagctctgaagagatgaaagggatcagtcgcgggtcgaaggcatgatcttgaaagacgagttaaaggcttttcttaggtcgaaaagaggcttgtcccaacagttaagcaagaatgaaggaaatatgtgagccatcatcgatgagtaccaggaaaagctaaacctagcggtaactcacgagaaaaaagcttgaggatgagt

SEQ ID NO: 233516 - DNA, 429 bp, Glycine max
  unsure (1)..(429): unsure at all n locations
gggatttcctttagtagggaatctatccttcctaatatggagccaaacccagncaccctcattaagaattagctcttttcttcctctattgcctttagttgaatacacctttgtttggttctctatttggttcttaaccctctcatgcaacttctttacaaactctaacctagattccccttctttatgtataaaagaagtgtccagtggaaggggaatgaggtctaacggtgttaggggattgaacccatagacaacctcaaaaggggatttcttggtggttctatgaacccccctattgtaggaaaattctacatgaggaagatactcatcccaagacttatggttgcctttcagaagagcccttaaaagggtggataaagacctattcactacctctgtttgcccattagtttgtggatgacaagt

SEQ ID NO: 233517 - DNA, 337 bp, Glycine max
  unsure (1)..(337): unsure at all n locations
ccacgagaatcttggnttagttttttacatgttgattctcctatttttcactgacttattatatagagattagaagattgtcatcgagtttgtgaaatagatcatgaatgtcgatatagaatattctcaaactcattttgttgtgtttgaggaggggagggggggattaaatcacaagaattctgaatcatttgaaatactcttctaccactaaaaatacgggtaaggggtgtacctgttgctttaaaccatctaaataactagaagcctgacccaaattgagaatataacctaccaatattaaccccacctaaacttggacctgctcccatgattt

SEQ ID NO: 233518 - DNA, 396 bp, Glycine max
  unsure (1)..(396): unsure at all n locations
tcaagctttcctttttctctccttttctctcgattgtgcttcattcttcttcatctcttcacttccgctcttccattttcttgcacaaaatttcatgtcttttcattggtgatgatcatggagggctaaacaattaatcaatccaaggatccactccaagcaaggctgaattttgagttctggtttagtatctttactctttgtgaatgttcatctttctcttcaatcctattttcatttttcattattgtgattatgtttaggattgaaaatgaattaagttatggattcatttcctaatttcagaatttaatcacagattgtttggatgatgttccattcgattgaactttctctaatgcanttgactgaactttcagactgaacatcattcat

SEQ ID NO: 233519 - DNA, 410 bp, Glycine max
agctagatgaagcagaggcagtttgttttattatgcaacgcgggtgttatctgaaaactatgtgcttgcgaatgatttgaattgattgattgcatgaattgagtgaattgcgatgattatatcaaatgctttgaatgagtatgctataattagaagagaaataacatgaattaagggcatgactgaaaatgttagttggtttgacagataaattgtgaaggtaagcattagccacaacccggtgagttgtgtgaactttaactgtgagagaacaacttgcattgagtactgactttagcatgaatctctgattactgaatgaatgcatgagttcgaagatgatgaagaccatgattgattgagacaacctatttaccaaaaagctcaccctgttcatgaatgaattatcc

SEQ ID NO: 233520 - DNA, 438 bp, Glycine max
  unsure (1)..(438): unsure at all n locations
tacttatcctgnanaatgtaataatgctaataaacttatttggctgncnattggggaccaggatttaggaatccaacttttagttgattgtttacggctttcaaatatagctctagttttgaagccccggatatatatttcatcaaagctctgccctttatattttccctattgaccctttaattccttattttccagttgacaagattctaccatcattccttgttatctgtttctgttgtttagtttgaatatgatatatttgtacaaattattgacttgtataaattgctataggtggactntataatggngattctttctcgccttgtgacgaagcaggngaatatattatcgntatctggctttgtaatttattcaattcttgagtgtacttgtatatcacatgaactgctacagatatggaaataccctaag

SEQ ID NO: 233521 - DNA, 369 bp, Glycine max
  unsure (1)..(369): unsure at all n locations
agctgggcgaaaacattgtgattntctttaagatgcttcaacacattttaatctattgaagttccctttttatgaaactgattgggattctctatcaaaaaaaaatttggttgtgttgtggatgtttcaattgagcttttgcaaattgaagtattgcatgtaggatttggttatgtggttattgtaaggcttgatattttgatggaggacaagtagatttttttgtgttctctttttgaagggtctggccacactagaatgaggttgaatagtgtgaaggataaaaattgtctttcaaaaactattaaaaaaaattctcaaatagatatcaatggacaaaaagtttcgtttaaggagttggaaatactt

SEQ ID NO: 233522 - DNA, 427 bp, Glycine max
ggagaaggttctcagatctagtccttctgtttgatctgtctatgtatggtgtttcatgctttcacgtacatattctttgctaccttgtaaatattgacttctgttggaaaataaaataaaaatgaaggaaaataaatacgaagaagatgcacagacttaaattaaataacaaaataacagtagcaaaataaatttaattgacaacatatgaataatgcattataacatacactaagcacaaggaaaaaaataaattaggggaagaaagatatagcatgggttgaagcgcgtaaacgctatacttagagagaaaacgcccaccctgcacgggtaagaaattatgattgcgctcctcttccaagatatgacaacccgttggtttcgatcgtgtgcagcgaaaggaatcccgaaccttatgaacaccaat

SEQ ID NO: 233523 - DNA, 369 bp, Glycine max
agcttgaggtgtgaacccattctttttcataatagaacactagtaatatgtctactatcattgctattatttctttcttcggcattgagggaaacacttaagctgccagatccctccacctttgggcgtattctttgaaagattcatgcccctttttgcacatgttctgtagttgcatcctatctggagccatatcaaaattgtactgacactgcctaatgaaggcaaccattaggtcctttccagaatggactcgggaaggttccaagttagtataccaggtgacagctgccccagtaagactttcttggaagaaatgtatcagcagtttcccatcttttgcgtatgcccccatcttccgacaatata

SEQ ID NO: 233524 - DNA, 422 bp, Glycine max
  unsure (1)..(422): unsure at all n locations
tcagaccaaagcaactcagaatctatgtatccaaaatccctcaatttaatggattttcaaggtttgagaagtgaaattgagaatgaggtaaatttggagcaaactctcacctcacacaagtctataacatcaatttaaacttgctcaaactggatttacacctaaaattccaccgaatcaaaatttgactcctcaacacccaattttaccctagaaatggctctttgttcactttggtcatttgtttttctctctagcacagcccaaactttctcataagtcctaaatgacatttcaagctaggattaactcactttaacctccaaatgccactaaatccagatttggccttccaactctcanaactcactctttttccactcataacaccatattctcactttctaaccctagggtaactc

SEQ ID NO: 233525 - DNA, 396 bp, Glycine max
ccgggatcttaagtcaccgcggctgcagctagtgaatatatagagttgatctatgtcttttgaagaatcaattcatgtttcatttgatgagtctaatgctatttctccaagaaaggatattttagatgatattgcagaattttagaacaaatgcacattcatggacaagattctacaggaaaaagagaaggatgcaatgaaaatccaccagttgaagtcaaagcaaataatgattttccaagaaagtgaaaaacttcaagagatcatccccttgacaacatcattggtgacatctcaaaaggggtaactactatacactctctcaagatttattgcataacatggcttttgtatttatgattgaacctaaaaatttaaatgaagccatataaatga

SEQ ID NO: 233526 - DNA, 410 bp, Glycine max
  unsure (1)..(410): unsure at all n locations
ttatcccanacttgacttaacccagtattccttgtcttaccaggccactattggttggaaacaaatcaacaagatttgttggaagtttgcacaatggctaatatgaaattgtcttacagacagatatatctctcaatactttagtattttctcccaaggtttacaaggtgttttgagagcttagtgtctatacgaagattaacagaaagctttacaagaaataataaaaaaaatgttttgtgcaagttgattcatatcttgtttcttcaaagcttcttctatttatagctttcatattaaagtattcgttgtctctcaatgggtggattcttcattatgttcttcatctgaagccttgagaccattggaacatttaatacctcccttctactgaaaagtcatgctgatgt

SEQ ID NO: 233527 - DNA, 395 bp, Glycine max
agcttgtagcaaattcaaacttgtatttactttttactcggatgtccgattgtgtcccgtagtatgtcgagacgctcgtaattgaaaattgaaactcgacattgaaaacataagctctgattgagtgttctaatatatcgagacgctcgtaattgaaaattgaaactcgacattgaaaacataagctctgattgagtgttctaatatatcgagacgctcgacattgaaaacaaaagctctgagcaaattgaaatgacaataaattatatctcggatgtcgaattgagtcccgtaatatactgaggccctcaaatatgaaaaaagatgctctgagcaaattcaaacgacaataacttttactcggatgtccgattgtgtcccgaatatattcagac

SEQ ID NO: 233528 - DNA, 396 bp, Glycine max
  unsure (1)..(396): unsure at all n locations
tctgttntcaatttcgagtgtctcgatatattacatgactcaatcagacatccgagttaaaagttattgtcgtttgaaattgctacgagcttccgttttcaattgcgagcgtctagatatactaagggacacaatcgtacatccgagaaaaaagataatgtcgtctgaatttgctcagagcttctgttntatatttcgagcgtctcgatatactacgggactcaatcggacatccgagtaaaatgttattatggtttgaattttctaggagcttctattttcaatttggagcatatcgatatattacgggactcaatcggacattcgagtaataagttatttgtcgtttgaatttgatcagaccttatgttttcaatttcgagcgtgacgatatac

SEQ ID NO: 233529 - DNA, 344 bp, Glycine max
cttgagaaaatatccttgagaagctagagcttagctacacacacccatctaaaaactaagctcacctccttgagaagcttccttgagaagctagagcttatctacacacacccctttaataactaagctcacctccttaggaagagaagctagagcttagctacacacccctataatagctaagctcacccccatgacaaaatacctgagaatacaaaaaaaaaagtccctactacaaagactactcaaaatgccctgtaatacaaggataaaaccctatactactagaatggccaaaatacaaggcccaaaagacggaaaaaacctattctaatatttacaaa

SEQ ID NO: 233530 - DNA, 417 bp, Glycine max
  unsure (1)..(417): unsure at all n locations
gggnttgatcatagatatggcttattgtggngcccatggagcttcatgtctctccttagtggccctccaaacttagacttcgcttgcttgcctttggcactggtctcatagatgtgacatttgaatactaacgttggcagatcagtgagctggaacacgctcactacagtgtagatatcaaccctcaacccattctcgaactaggcacaaatttcctctccattctcactatttctgtaatatggccagtacttcatcaaagacagacttgacttcatggagatttataccacatgagtgattaacccaagttcatcccttaacatagtcgcttccttgaccatttgaggagacctaganttaatctacaaagaanatgtggttntataaaaaatggagagtgtgagtagtggttta

SEQ ID NO: 233531 - DNA, 413 bp, Glycine max
  unsure (1)..(413): unsure at all n locations
agcttggaggaagaatgagatgaatgtttgttnaggaanagaanaacacgaaatttattgctctaaaagagctttgaaatctgaagtttaattttcaaatgatcaaagttgaaaaaaatgcacacacatgacctttatttatagcctaagtgtcacacaaaattggagaaaaatttgaatttctattcaaatttcacttggatttgaaattgaatttgtggagccaaaacttcactaattatgattagtgaattttagttatggttcagcccactaatccaagatcaagtccaagattctccactaagtgtgcttaggtgtcatgaggcatgtgaagcatgaaggacatggtcaaagtgtgactatatgatgtggaatggggtgaacaagcaatgctcaccacctttaaaatt

SEQ ID NO: 233532 - DNA, 415 bp, Glycine max
gaccttagaaactcagcttgaggcaaactggatgcgttggtcaacttggtaactcagctggccttgaatcagaaatctgtacctgtcgcaagggtttgtggtttgtgctcctctgctgaccaccatacagacctttgcccttccatgcagcaacctggagcaattgagcagcctgaagcttatgctgcaaatatttacaatagacctcctcaacctcagcagcaaaatcaaccacagcagaacaattatgacctttccagcaacagatacaaccctggatggaggaatcaccctaacctcagatggtctagccctcaacaacaacagcagcctgctccttccttccaaaatgctgctggcccaagcagaccatacattccttcaccaatccaacaacagcaacaaccccagaaac

SEQ ID NO: 233533 - DNA, 383 bp, Glycine max
cacgacaatcatgccttcaatctctcaaaagcataagcacactcccacaaacattgtttatcttgaaaccactaattacacataataggagaaacaattcctaaaaagaaaaatcccaaaaaaaacaagactatgcctaaatctataaataacgcatataaagaagagctaaacactacgctattcaaatataatgtaaaacacaatacaccaatggcctacctaagtggcggataagtgcatgtttgatacaccatccaacccccaacagctaaaaaagattactcatgagacttttcatgcaaaaaccattggcccaaactattgtataaaaaataaaaccttctatggcaaacacatctaaaaaagacaaaacaatatgt

SEQ ID NO: 233534 - DNA, 393 bp, Glycine max
actcagctgaaaatgtctaacacactcgttgatggtccaactatattgagtttccatgaaattgctctagaaaagtacattagcaacttggccagcagctgcagagaaaaacaattaactgtagcagataatcaagttattttgttgactagccaaatttaaataatagtagaattttctgtgtgacgtaacgcgaaaatcttccaataaattattttcacgtacaatacaaaagagatcaagatcagatgaatacagaacagtatattttagttttaataattggtattttaattaccttttaattcttattagaaaaaggtgtttctagttttataggttatattctaactctttttaatgtttatagtttgcatcttgtattataaggac

SEQ ID NO: 233535 - DNA, 428 bp, Glycine max
  unsure (1)..(428): unsure at all n locations
agcttagagccaatgcaaacgacaatatctttttactcggatgnctgatggagtcccgtcatatatcgagacgctcgaaatttaatgttgaagctcttagccaattcaaacgacaataactttttactcgaatgtctgattgagtcctgtaatataacgagacgctcgaaattgaatgttgaagctctgagccaattcaaacgacaataactttttacacggatgtctgattgagtcccgtcatatattgagacgctcgaaattgaatgttgaatctctgagccaactcaaacgacagtaactttttactcggatgtctgatcgagtcccgtatatatccagacgctccaaattgaatgttgaagctctgagccaattcaaacgacaataacttcttactgcgatgtctgattgagcccgtatatatc

SEQ ID NO: 233536 - DNA, 432 bp, Glycine max
  unsure (1)..(432): unsure at all n locations
tcaacattcaattntgagcgtctcgatatatgacatgtactcatccagacatccgagtaaaaagttattgtcgtttgaattggctcagagcttcaacattcaattttgagcgtctcgatatatgacgggactcaattagacatctgagtaaaaagttattgtcgtttgaattagctcagagcttcaacattcaatttcgagcgtctcgatatatcacgagactatatcagacatccgagtaaaaagttattgtcgtttgaattcgctcagaggttcaacattcaatttcgagcgtctcgatatattacgggcctcaatcagacatccgagtaaaaagatattgtcgtttgaattggctcagaacttcaacattcaatttcgagcgtctcgatatatgaaaggactcaatcagacatccgagtaaaaagttat

SEQ ID NO: 233537 - DNA, 375 bp, Glycine max
agctttaagcaaccagctcgcctgagcgagcttcccttgcaccaaatggcttttttcctataaatagccatgcaggggaagggtttaagggtttgaagaactaaggaaagagaggaaaaatgcagaatggagaaacagaagatgaagaaaaaaaagaaaagccaaggcgctgcctaatcgaaccatggatcgttttctacatcatttctcttgcaagtcttgtaccctttgtaacagtcggttagtttttcttaagattttgatgtaatctttgtacccttatgtatccttcttgatattatatgtaatcttttctactcaaatatcacttgagatcgttttaaggtccaacaccttaacaactctcttcgcttt

SEQ ID NO: 233538 - DNA, 422 bp, Glycine max
  unsure (1)..(422): unsure at all n locations
tgagatgaggaagtgtanaagggtgagacttcctgcttttattcgttgaccacagagtggtacctggagatatgtcgcgggggtcaggagaccttggggacgtcaggtggggtgctattgcccaaaaccaagcttgaccaatcccgacccaacccgagcatagtcagtcagtgagaacctgtgatgtacctaaacaggcgagctcctagcagtcaacagataaaaggaacaaggaccacaaagcaaggagacttgtgtggtggctggccagctgtgaacttaattgatatatgggatatggcctctagtaatcgattaccaagggtgggtaatcgattacaaggcttaaaaatgaagacaggaggctaagatggtctctggtaatcgattaccaaggggtgtaatcgattaccangcttgaa

SEQ ID NO: 233539 - DNA, 402 bp, Glycine max
agcttctatggattgaaagcaaaaatgtgttttatttatacaagcaaagaaacctagaaaggggtttactacatgtattgaaatagaaactaacttacttgaattggttcatagttgtatgtgatagtaatgatgtattaacacgtggtggtaagagatactttattaatttcattgatgatttctccaaatattgatatgtgtatttagtcaatcacaaaagtgagtttgttgattagttcaaagtatataaaacaagaatgattaatatccattagaaagaaaaataaaaattctacgttcttatagaggtggggaatcacatctttaaatttgagaaattttgtgacatgatgaatttattcatgaaggacaccctcgttgctcttaatctaatggttt

SEQ ID NO: 233540 - DNA, 432 bp, Glycine max
tgtttaatatgtaacaactgattagaatattatcttttagttgaaaagactctctttaaacttagaaattcgtccaaacacatttgttgaccataaaaacaccctttcaacccaaattaacataattaagcttaaactcaaccaacccatgtatagttgatagcccaagctccgtaatctaaatgtttttggcccaaatctctttttatagctccatctttagcctaagttagttgaaaaacatgattaattaggctcaaattcaggttggacataataatgcttagcccaaatgtctagaacaagttcatttaattgtttctcgaattataaaaatggatgatccattcgtgtgcttttgttttgataataacactaatataaatttatgattacttatgaattacatgtcagagtacatgacacatcaca

SEQ ID NO: 233541 - DNA, 392 bp, Glycine max
  unsure (1)..(392): unsure at all n locations
agcttctagatatattatgcgccggattcttcttccttttcaaaagttatggccatatgaatttctcgagagcattcgttgctcaatttcgagcgtctcgatatagtctgcgcgttaatcggacttccgtgtgacaagttatgaccatttgaatttctcgagggcttccgtatttcaatttcaagcttctcgatatattatgcgcctgaatcatacttccgttacaaaagttatgaccatatgaatttctccagagccttcgttgatcaattncgagcgtcttgatatagtatgcgcctgaatcggacttccctgtgattaattatgaccatctgaatntgtcgagagcctccgattttcaatttacagcctctcgtgttattatgcacctg

SEQ ID NO: 233542 - DNA, 394 bp, Glycine max
  unsure (1)..(394): unsure at all n locations
gcttctcgatatattatgcgcctgaatcggacatccgttgataagtatgaccttttgaatttctcgagagctttcgttgttcaatttcgagcgtctcgatatattatgcaccggaatcggacttccgtgtgacaagttatgactaattgaatttctcgagagcattcgttgttgaatttcaagcgtctcgatatattttgcgcctgaaacggacttccatgtgacaagttatgaccattggaatttctcgagagcttccgatgttcattatcgagcttctcgatatataatgcgcctgaatcggacattcgtgngacaagttataaccatttgaatttctcgagagctttcggtgttcaattctaagcatttcgattaaggatgcgcctaaatc

SEQ ID NO: 233543 - DNA, 353 bp, Glycine max
tatcaaactatgcatgggatacagaaatttcaatatagtccacaaaatatggttaatgatacaaaatcatataaaaagttgaaactgggagaaagacaagacacagcataactcctattattcctttttttctatgatgcgataaaaagtctttcttaattttgataaataataactaaatatgtaaagtgtttttttatcattcgtagtaattgatcgaagccataatattttatatttattattcacaaaatctgagaccttcttttaattataccaaggtcagcttcattcccataaataacaggttggtctgaaaacaatgttgacatggtttaaattatatcatattc

SEQ ID NO: 233544 - DNA, 439 bp, Glycine max
  unsure (1)..(439): unsure at all n locations
tgttaaactgcttctccacctgagccgattctgcgtctccatcggncttgctgataaacttgagccctgtgagagcatgacccactgcagacttggtcctttcaaagtgtttgggcgctggttttgaaaatgatgccaaacgcttcagctgcttcatgcgattggcagcactctgaaccacagaggcaccacaggttgttttcttctcaagcctcttgcccatcaaacccaatttatcaccttcttcttccaccatgtcaacaccggctgcaacagtattaacactgtgtaatgccacatagtcacgatgaatgtccatggtcacctccacgtagtgttgtccttcagcttcagcctgtgatttggtgccactgtcaagtccaacatcattgccagcttttgatcagaagcccctaacttcgtgttagccttcagcatc

SEQ ID NO: 233545 - DNA, 447 bp, Glycine max
  unsure (1)..(447): unsure at all n locations
gaccttaagtcacctgaggcatgcaagctnacaagtgagtaaaactcactttctcagactctggaagatggacatgatcgctgtcctcaccgaacttgagcgccaagaacaagtttctctcgctctcatggtttcactctcctaatccttttacattattaattcgtatgttatttgtccgtaacctgtttgtcataatgcttcttagttagaaccttctttaatagtcattattatgactacttgttgtatcgagcttacaagtaacttacttaatggattttcagatgtttaaggtgatgcaaaagcaagattggtacaagccggatgcatacctctataaggacttgatcattgcattggccagggctaagaaaatggatgaagtattgcaattgtgggaaagcatgagagaggaatatctgttcccgattcccagacttatac

SEQ ID NO: 233546 - DNA, 416 bp, Glycine max
  unsure (1)..(416): unsure at all n locations
tatcaaagaannctgtctcgcgtgatctttatatttaataaagtgcgtgtaaaacaaaatgaatcaagtttagtattgtttcccttttgttcccttgtatgatataatatagaattggaaacagtccagatgggaattaacttaaaaactccgtgtattattgatgctttgaagttataacttgcgttctccctgctaatttattgatctgacttgtcttcttgtttagatgtgtgatttgccagatggaatataaaagaggggacaagcgcatcaccttgccatgtgaacatgtttatcatgctagttgtgggaacaaatggcttagcatcaataagggcagatatttactactaacttaccaagttatcatgagctcaataagtgctgttagtgctaatattcacgtctgctga

SEQ ID NO: 233547 - DNA, 383 bp, Glycine max
aaaaacaacatccaagtagattttgtagcaattaaatcgaaggatcaacttgaatttaaagatcacaaccaataaaggtcctaagtactaatacttacctcctctccataatgacaaacactaaaagccctgcctttttccccttttaaacaaagattatcgagcagctgctgtataagtttagtttgcaagtgttggatttactggccttgtggaaatatcattcctagttcatcaaatggagtagccccaaatgtctctgcatgtttacatcagagtacataatgaaaatactcatcacctagaataaactgaactccaacaattctatcttgacaaaaaataatctgaaaataataatgtctactgtacaaacactaaaa

SEQ ID NO: 233548 - DNA, 438 bp, Glycine max
tggtgtggaattgatagggggaatgccatgtgggtttgtgtatttatagacaaagaaatggaaatggctttggattttggatttggcttatttttcaactacataagggtttacgttatggaagctaggatatgagagattgagacgaaaggatctctaaggtacgtacacactgacttttgctccatacaggcttgtacccaaaaggtttacgaatgtacatgtcatttattatgtgagtacgtgtattgaatatgctagctcttacatagtagtaataataatatgtaaagatgattaatagttatattttttttttcgataactgattaatacgtatatatgtttctagctcaacattatatgttatatcaattagccaaagaacacgtatacgtataaacgattgaaacacgtatatatgtttctagatcaaca

SEQ ID NO: 233549 - DNA, 386 bp, Glycine max
  unsure (1)..(386): unsure at all n locations
agcttggagacaagaccaagttttcttcttgatgaattctttggtgccattcaatccttatgattcagaagattttgcaaaatctgacgtttagacatgtgcaaaaccttttgcagggctatctttcatgctgcaagcactggattgttctggctatgtttgctcggaactgtgatagccgcattacttcctcgattggttgtaaaatatatgaatcagtattattttcccagcgacattcagatttctagagaagctgagaagtttgggaatccaagagacaatggagttggacagatagaaatgctttctgtntcagatggttcaccaagataacagaaggtagcttattccctttatgccttattatttngtaaagttacata

SEQ ID NO: 233550 - DNA, 440 bp, Glycine max
  unsure (1)..(440): unsure at all n locations
cttgaagttcaacttgagaatatatggaactttatatttactttntgatttccaacttgagacttagttccccataagtttgaaggtacaaacccttttccatatgtgcgaacatagccatgtccatctttttccaagactttgaaaaatacatcatctgtagttgggctttgctttagcgcttctggatgggaagcaacttctttcttaagcttaacataagatcaaaagtttaattatatttttgagttaaagaaaaatattgagtagatagagaaaacaattgagatgatcatacaataattttactggtgttcttcttctcaggcttatgtggcagcattaacattttttacatagatgactctctttcattaagattcttaatggctattatttaaagaataagatagttaaatactatttgaacaaccaacctt

SEQ ID NO: 233551 - DNA, 335 bp, Glycine max
ctgctgacacatattattttattttaaatttaattctctctttctctaaattaacttatgcaactattttattgcaacatgggtgttgctaccattttaaatgagcaaaccttgcttttgtagtatgaagcagcagtcacaaaaaggaaaagatgaacctgattttggtcataggttgagtgacaacataatccttacgcatcaaagtttgaggtttgtctgctttcactcgtctttatttcctcgtggaagtattgggtccacacatgccttcatgtatcattggaatatatatccaagactcaagaagccttttgaatttaagtttcttgccc

SEQ ID NO: 233552 - DNA, 375 bp, Glycine max
tccgagataacaagctcccatagcttctaacactgtccaaaattgatttgctatatcaattactattagtgactatggtggcagtcttaggaaaaacatcaccgaattctaatgtgcattacctgacaagagtagtctccacctgatacataatttgccaatggctccggatgctgtagttgtactctactatgaggtaaacatatacgaccacatggtcgttgtccttcctctgactgaatggcataagaaaccttgtaaaatagaagtagataatcggaggtgttgtgctaacgatctacaggcggtacaacattcttaagaggaatgatatgtttctgccgctcctcccatgtttgatctcaaagatgatac

SEQ ID NO: 233553 - DNA, 388 bp, Glycine max
  unsure (1)..(388): unsure at all n locations
cttagagncacctgcggctgcaagcttttcaattaatgaggttgaattacatacctgctngaaaccaaaagcgagcaatatgttgatgcaccttcaatacttcattcttatccattgactctctaatgttcatttgcctcaacatctccatttttctccgattgattgcattttctagattcttacaaaatttgcccattgggccttttttagttccatactttgtctttgcacttgcagcaacattacaagagtccgcaaactcatcttcttcacttccattacatccaattggttcaccaaattcaaaaactcttatatttgtcataattactactgccagaaatactggaagtggtcccactttttttgggaaccatatatttct

SEQ ID NO: 233554 - DNA, 332 bp, Glycine max
cctgtccgatgcagcaggtatgatggcccgagttatgttggggaacggcacgaacccgggatgggttttggcaaagacaacagcgtgttaactagcctgattaatgccaaaggaaatcgtgggaagtatgggttatgctactatcccattcatgcagatataaagaaaatcatcgcgggaatgattagctgtacgcaaaactcgcggttgagacatgaaagtgaatgtaacccaccttgccacataagtagaagcattataagcgcgggtctgggggacgaaagttaagtggtctcaaatatgaagattgtgtcctgagatcattggatctg

SEQ ID NO: 233555 - DNA, 297 bp, Glycine max
  unsure (1)..(297): unsure at all n locations
cctgcagctgcagcttatattgcatatgccattattgtataaganaacggaaaagatgatacctcgccttgagactcttttccactatatgaaatccactttaatgtgttctgcctatttaaagaagactgaattcgcaactatttgccggggagattatctattacagaaaaggaaagaatgtatttttaaagcaaccgtgaaatcctaaagaagataggttccgttagcatttgaatactacatcttacaattgtcattgcttggtactttactttccagatgccaatcacctat

SEQ ID NO: 233556 - DNA, 341 bp, Glycine max
  unsure (1)..(341): unsure at all n locations
tggcccanataataaagaaagaacactgtgtcgtagtatttatttattattctgggtggggatctagttagataaaacttttgttcatccccattaccacccaagaaataatgaatttgtctagtctcttatctaagcacacacttgaaataatgtccagaattttccttcaaatactcttatttcttttttacttattatatattaactgagtaatatcaaccaacttagattgacacaaataataacaaattatgtttgttaattaaataatctcaaatttaaattttaatcgacctgtactatagaatacatcatattaagatattcattctatatat

SEQ ID NO: 233557 - DNA, 425 bp, Glycine max
  unsure (1)..(425): unsure at all n locations
agcttaacatattcagagtgtatatattattgatctgggtttttagctcaatatttctcacttattttcttttgatgaaaatatttctcacttaattaagaaaagggaaaagagaccgaagcataaaataccaaaacgcaaactcaatataaaaatagcacaataaataaactcatgatctatcacaattggaagttttccatgtattatatacggctatctntaaaattaagtaaaacttaaatataaaaaaaataaaattataagaaataaaaaaattatcaatattgactaatggtaaaaaattatatttaagaaagaaaaatataatgagatatntttattcttaataacgagaaatctattttattaaatatggataaataaaagataacctttttaaagttgaaaaaaatttaaaacaa

SEQ ID NO: 233558 - DNA, 446 bp, Glycine max
  unsure (1)..(446): unsure at all n locations
tgccacaatttagaaacattgcccaatgatatttcatctatgtaacgtctcacacgtctcattctatcccaatgttacttgttagacgacatgccaaaggggattgagacactcactaatctccgagtgctcaagggatttgtaataggtaaccccaaaaagactccctgcacaatatcagatcttgcaaatttgaaagaactaaggcgactcagcatacatataggaattgaggctgtcatcaaagatggagagtttgaaagcttggaagagttgtcagcacttaagcatctcaaaatatcatggggtatgtcaaggtacagtgatattaagatcattntgccttcaagcttgaaaaagttgcatcttgaaggttttccttgacaaaacattccagaatggctcatgccttgacagctagccaggggattcaaacagctaaaaat

SEQ ID NO: 233559 - DNA, 433 bp, Glycine max
agcttcatgttcgattaattgcctctgttcctaacttgcgttcatgcttaatggacgaagggctaactggtgtatgtggtgcctaatcacgtattgacaaccctaagttgattttcgcttattaaattgaaatagggttggattaagtggttaactgttagggacgaattctccataacccaagataagagaatggcttctgaatcagagggaacaacccgtttttaatattagtagtttcgtattccagtttacttgttctgtcctttaattcacaaaacaaacaacccccccccccaatcgttactgttacttgaagtatattatagaacatttggttatcattgctcgttgggaaacgacctaagatcacttcctaggtactgtattttcatgtttatttgattcgggtacgggctcgatcacccccctt

SEQ ID NO: 233560 - DNA, 406 bp, Glycine max
  unsure (1)..(406): unsure at all n locations
gcttgtatgacttgcagcctttctatagagggatgacccttacaaaaatgccataaatctatagggatgacattacattntgggtggataatggtggagcatatggttcgcgagtgtgatggttttaaaatgaactggtaaagcccatgactcacttcaactgtaccaatcttcgctttggtgttggtatcctgcaaaacacaagtattaaaggagaagattaattcatagctgtttgtggaaataagtttgaatatggatatgagattaaagctaaaggaaggtatgtatagaacatcgttcaatataatggaatgggtgaggtgtactgttcctaagtgagtagcatgaacttcgtgtccatttggtaacttaaccataatgggattaacttgatgatatgagt

SEQ ID NO: 233561 - DNA, 422 bp, Glycine max
agcttcatgatgaagtaaatattgtatttttaggtgttttgatgataacaatgatgacaacaaaagatgatgacaaaggcgatgaacaaaaagctcaaagatcaaagaacaactcaagtgaatcaagaacagtcaagagttcaagaatcaagaaggattcaagatctcaagaatcaagatcaagattcaagactcaagattcaagaatgaagaaaagactcaatcaagataagtattaaaaagttttttcaaaactttgaatagcacatgagtttttgacaaaacctttacgaaagagtttttactctctggtaatcgattaccatattgttttaactgattaccagcagcaaaatgagtttgaaaaacttttcaaactgagtttaccacattccaaatattttcaaaaggctgtaatcgat

SEQ ID NO: 233562 - DNA, 406 bp, Glycine max
  unsure (1)..(406): unsure at all n locations
ntaactntggaaagtgaacacaagtaataagcaactatgttttcattaatatttatggcttaacgacacttacatgaacaaatgttaaaaacaaaaagtagatgattcacaagccgataccgatgatcctaacacttagcaaagtaaaaacaaaagaagacagcaaaaaacattgatccttagcatttcggtctgttacctccactatctccccattcaccacttccttgaagggccgatagctccaaaggcaacatcgttggccacaactttcacttgctccatcatggcattaaaatccggcacttcctcctaggtcttcaaccatatagtattgtgcttaaatattcacttttgcatgagcacccctaacactgctcctgaaagcagtttgtaaagatcacat

SEQ ID NO: 233563 - DNA, 422 bp, Glycine max
gatcttaagcacctgagctgcagcttgaggatagtaacgaattattttggcagaaatgtctccgcactggatggtaaatctgttccccaaattcctgaaaaatgtaaagatccaggtacattcagcataacttgtattatagggaatagtatgtttgacaatgccatgctagattaggagcttctgttagtgttatgcctctgtctatttttaattctctatctctaggtcccttgcagtcaactgatgtggtaattcatttatctaatagaagtgttgcctaccctgttggtttcataaaagatgtcttagttagagttggtgaactgaatttccctattgatttttatattctgaatatggaagatggattttttcaaagatcagttcccattattctaggcagaccctttatgataact

SEQ ID NO: 233564 - DNA, 368 bp, Glycine max
  unsure (1)..(368): unsure at all n locations
tgttaaaaagggaagatagtcaaaaactctttttttttaaaaatgttgnttctacttcaaaaccccttgaactacttcacatggatttatttggtccctctagaactatgagtttgggtggtaattactatagcttacttatagtagatgattactcaatgttcacatggactttgtttttgaaaacaaaaaacgaagcttttgatgcttttcgcaaattgccaagatgattcaaaatgaaaaaggtctcaacattgtttcacttagaagtgatcatggaggcaatttcaaaatgagtcttttgaaagcttttgtcaagaaaatggaattcaccataattttctgccccaagaacacctcaacataat

SEQ ID NO: 233565 - DNA, 415 bp, Glycine max
  unsure (1)..(415): unsure at all n locations
atccttaagcacctgagctgcagctnggacataagggaatccaagattctgtttgacacaagtcgttcaattctgttattaaaaatgtgacctaagcgcttatgccataatgctcctgagtttgtattatcaattctatgcttagtaccacacaattctgcattaaaggattcaccatagcaagctacaatatcaagtaaacatagattatcattagccaagagtgaaccagttccaacaatatctgaattgaaagacaacctaaacacattgtttccaaatgaacacaaataacccaatttgtccaaataagaaactgaaaccaaatttcatctaaatgacggtacaacaaaagtgtgtntcatatccaaataaaaaccagtacataataataatctaaaatgccctatagctt

SEQ ID NO: 233566 - DNA, 439 bp, Glycine max
  unsure (1)..(439): unsure at all n locations
tgcatcacttttaccttttcattgccatcgtactctttgtttaaaaactgcccaatcttgttggtgtttttagtgtcattattctaatcaacatagtggatgatattgctccaaacaagattgctcttgcctttgactttctctatctcctctcgtgattttttttatttgagcaaccgttgattatccggtaggggtggaacttcgtatatgtctttaatatcttcccatagatcacaagcatcaagataggtttccgttctaatagcctagaggtggtaatgttttccattgaatagtgaaagcctatgaagcacggacaccctagtcccttaccgtgttcggtgtccgacacgcgtccgtgtcagtgttcgataccgacaccacacccgtactacgttntatattttggacattacaggtgtgcacgtgtccgtgt

SEQ ID NO: 233567 - DNA, 414 bp, Glycine max
agcttcagggcgcgcattgactccatattgctgcaaagaaggacatagatctgtatgatgatctacagaagaacatacaccacagactcttgcaacaggtgtagatttctgattcatggcaagctgggttactaggttgaccaaagcatcaagttttccttcaagctaaaatatgaacaaggttcaaaaataaatataaaatgctaaaataaccaaatttcatgaatgaagggaataaaaagataaaaaaatagtaatataaataatatatgttaacttttaattattggtatcataaataatatatgttaacttttaacagtattttcaccttaatagtctatcttcacgtttaatagaaattctgattataaataatatatgttaagtgatgatgattatcttcttcttttt

SEQ ID NO: 233568 - DNA, 325 bp, Glycine max
  unsure (1)..(325): unsure at all n locations
ntagccttccatggcaaggaaccacctttcagctacttattggattttaaagagaanaatacaaattacacaagcgtggggatgtctcctccacctctatgaacctacaaattaccctataacctaagatcctcccaaaagttgggggttttggtgcgcccttgcctcttttacgtatgcacaatgggttactgtcccagatttcttgcttctcttccaaaacgctctcttttttttcgctaacttcagtctttaagggctttctaacctcgaaggctctcttaacagcatttttgcactaaccgcgagaaaaagacttttggct

SEQ ID NO: 233569 - DNA, 383 bp, Glycine max
  unsure (1)..(383): unsure at all n locations
caagcttatctcgaggtttgttnatatattatcctcacccgaccttcgcggtttcttcgaggtaactgtgattctaagctttgtccttggtagtttaagcttatctttgcatcttttctgactttggaaccatcattggacatttttatgcttcctttgaaaaaccctagagaaagagatattacaaaagttatctctttatgaaatggatgttatttttgggacctccacttgaccccgggcacattggtgtgatcagaattttaaaaatgatgttccttttgtagtgacatgggtatttgactcaaagcattgctgttaactttatttttgaatccatagtaattttctttcgtttggcataatagagactcgagttggac

SEQ ID NO: 233570 - DNA, 406 bp, Glycine max
  unsure (1)..(406): unsure at all n locations
tgccacccagctcgcccaggcgagctatgttgcttcctccanaaacaaccgccatctggaggaatattctggaaggcccaagtgggcctggttgctatttgaacccccatttttactaagtacacccccctgcctttttttggtgattcttttttcgtaacgctacgaaactttatgaatttcgtaacgatgcttgttttctttccgtaatgtccggaaaccttacggactacgtaatcaacccctttttggttttcgggatgtcacggaactttactgattgcctaacgatgggtgccaaataccttcaagtggtcaaacgaaagttgcattccaaccaaggatggttcccggacgaaactacggtatgacagctgcccctttttacttgcctttattggagata

SEQ ID NO: 233571 - DNA, 390 bp, Glycine max
  unsure (1)..(390): unsure at all n locations
agcttaagttagcttttggggaccatttggggatngattagaacggctgttaactttacagaggattacagagcaaatttttataacattgtctcttttgtggttattaacttaggctctgtttggataaacttttgaatagatacttataggagaaatgagtaagaatggaaaatgaatgaaactttttccaagttaaaaatagcttgtgcataagttaaagttaccttttggagaaatcaaatgaaagagcctttataaattaacttatgcatatataagcaagagcttaattcatttcacatatgttcttcacatataagagttatggagaaatttattccagcccaggcctaaacttggaacaatgtgttttataagctaaacact

SEQ ID NO: 233572 - DNA, 417 bp, Glycine max
  unsure (1)..(417): unsure at all n locations
tctagttagttaggtgccagctgtcgttgacagctgtataactaacttacatactctgaaccgagtacaatactcatatcttctgactaaatatcaaattgttgttctattttaggagctgtgtctctgtatatctctctctcacgagaaatggttaagcaagaaataattaattngtctcattcacaatataactactgaaggaagagatgctttttcggttgtccccctcaaataattagagaatatatctcacgatntaattgcaaatcataatgtgaactgggtgacttatcttctgattacaatgtggaatgtacaaagactaagtccctgaatatgagctatgctgaatcgctgatgcttgtaatataagcttttgttgattcaatttcagcttatttaatctagaatata

SEQ ID NO: 233573 - DNA, 323 bp, Glycine max
aataaaacaagtttagacgctacttgtggtggtgtcctcatgtcaaaactggcaataagattgattcgcacattatttgccactatttgtgcagaattattgcgcctttaaaccaacatatcttgtatgattgtatagctcgaattgtgtattatatccttaattactaagcccaatcgtaggttaccatatatatgttttgttagcaaactttaaagctagaaatcaaactcgatccaattacttaaatgagaacattccaacagagaggacccagtttacatcctatattctttgagtttaacaatggctcaaacaaaact

SEQ ID NO: 233574 - DNA, 406 bp, Glycine max
  unsure (1)..(406): unsure at all n locations
tctanactntatacaagaatgaagctctgataccacttgttgaacaagtggcctcagatatcttaagaagagggggggggggttgaattaagatattacaacttatttccccaattaaaaattctatttaactttttattcaagttataaattcccttaataatgaatttcttaaatattgattcaaatagaataatttgaatatgaatataaagcaataataaataaaggagtttaagggaagagaaaatgcaaactcatatttatactggttcggccacacccttgtgcctacgtccagtccccaagcaacccgcttgagagttccactatcttgtaaattccttttacaaggtataaacacacaaggacaaccccttctttgtgtttagaattctttcacaac

SEQ ID NO: 233575 - DNA, 419 bp, Glycine max
  unsure (1)..(419): unsure at all n locations
agcttgagaaatacgtgttgggttttaaatctgctaattngagaacactcctatatgaaacatgacaaggttgagttgatgggaccttgtacgcatgttgtgacatgtgtggattggatactttggggaagggcataatggaagattggaggtttttttattattatttgggaaattggaggttatgtaaatgattcttttaatttactaacatagcaagcttttttattattattttcatgcattgacaatataaattgtgttaatctgcaattaaagataatcttaattattttcatggatggaaaaacttggaaattgctctcattttttttataaatgatatggcttttctaagtaaattatttgaattataaaataaaatattgtattttaatctataacaagttgaacaaacg

SEQ ID NO: 233576 - DNA, 444 bp, Glycine max
  unsure (1)..(444): unsure at all n locations
tggagaggatgcttcaatggaggataagaaagagggttagatttatagaggggggagcacgaaattgaaggaagacaaagggagagaagttgaactttgagttgtgtctcacaagactctcattcatcaaagttaccacaagtattacacatgcttctatttatagactaggtagcttccttgagaagctttcttgagaaaacttcctttagaagcttctttgagaaaacttccttgagaagctagaacttagctacatacacctctctaataactaagctcacatccttgagaagcttccttgagaagattcctaaagaagctagagcttagctacacacacctctctaatagctaagctcacctncttgagttgagaagctagagcttaactacacacccctataatagctaagctcacccctattccaaaatacatgaaaa

SEQ ID NO: 233577 - DNA, 393 bp, Glycine max
  unsure (1)..(393): unsure at all n locations
agcctngaatgcttgccacatggaatttttctattccacaacctttaggcctaatcaaggagaggtatgatgaaagggacaatgatactagaccctgctatttcaaactagaagattagtttattacctaaggaatgtattatcttgaaattaaagaggaagaataacgaagaggaaatgaaatagagaggatattacttactattacaaaaatgacctgaaagatggcacaagttttgtatcttccccaataagaatcacttacgaaagcacccactagagagaagatgtaaactgtgccagtccatttgctcacactgtttgcagctgcagcattattttgccccatcactcttgtcaggacaacactaggttaacccctacttcaaaaat

SEQ ID NO: 233578 - DNA, 444 bp, Glycine max
  unsure (1)..(444): unsure at all n locations
tctaggtaagcctccattntgacggcccagagatcatagttttccccattgaaaactggaagtgctgcttgggaaaaacttgcttcagagtccattctataagtcccgtaagaaaagggctttaaataccaattgttggaaatttatcaagaggaaataagaaaacaatacttgcttaacagagaacaaaagcatatattgaaggagaagacggaaaaacttatcttttaaaatagaaacagtacaatttatagagcttgaagaataactacccactaacagcatgttcctaaaaataagccatgaacgcaaacagagataacaaagaacctaaaacttcctaactgacaccttaagactaggaaaacaataacaaattanaataacataatcagaatgtggacatgtntcagtcctaaagcatgttcttaacaggatcaagtc

SEQ ID NO: 233579 - DNA, 412 bp, Glycine max
  unsure (1)..(412): unsure at all n locations
agcttactntntctctagctatacttgttttcatggttttgtatgctagttttttatttcttcgaaagtcagatggttgcgttatgtgaatttaaaagtactgatagttgtgcactttttcttctgcagttcacagcatagacaatgaacttgaggactcctcacagatgcaaggggttgtacaaaccgcccttgttctatgctcttcagtgtatgtaatgataagcttctttgggttcctcctatttggcgaaggaactcttgatgatgtactggccaatttcgataccgatcttggaattcctttcggttctgtgctcaatgatgctgttcgtataagctatgctgcgcacctgatgcttgatttccagttgtctctttcgttgcgtttacatagaggctcctctctcaa

SEQ ID NO: 233580 - DNA, 435 bp, Glycine max
tgaagtgaggaagtgtggaagggtgagacttcctacttttattcgttgaccacagagaggtacctggagatatgtcgcgggggttaggagaccttggggacgtcaggtggggtgctattgcccaaaaccaatcttgaccaatcccgacccaactcggacatagtcagtcagtgagaacctgtgatgtacctaaataggcgagctcctggcagtcaaccgataaaagaacaaagaccacaaagcaaggaggcttgtgtggtggctggccagctatggatcttgagtgatatttgggatatggcctctggtaattgattaccaagggtgggtaatcgattacaaggcttaaaagtgaagacaggaagttaagatggtctctggtaatcgattacaccacaaaggaggtgtaatcgaataccaggcctataaatggga

SEQ ID NO: 233581 - DNA, 301 bp, Glycine max
catgcaagcaagcctgagagagagctattgattgtttatgcggccgaaggaaccagttccgctcccgaatatgacagccaccgttttaggagcgctgagcaccaacaacgcttttaggccatcaagggatggtcattgctccgggagcgacgtgtctatctcatggacgactagtataccgacttctgggaggagatagttcaccgtcgttgggcatcactggttacccccatggccaagttcgacccacacatactcctctaattgttgctaatgcttggcctacaaaggagggcgtgct

SEQ ID NO: 233582 - DNA, 417 bp, Glycine max
  unsure (1)..(417): unsure at all n locations
ntgtgaagctcctgttgtagctgtacgcgattttactcaaccattggaagntgaatgtgatgctagtgaagttggcattggggctgttttgatacaaaacaaaaggcctatagcttatttctcggagaaattgggaggagccagattgaactattgcacctatgacaaagagttctatgccattgtgagagctcttgatcattggaatcattatttgcgttctaatcactctatattgcattcagatcatgagtcattgaagtatatcaatgggcagcagaagttgagtccaaggcatgctaaatgggttgaatttcttcaatcttttaatctctcttcaaaatacaaggatggtaagagtaatgtggcggctgatgcactcttaaggaggtatgctttaatttcaattcttgaaac

SEQ ID NO: 233583 - DNA, 324 bp, Glycine max
  unsure (1)..(324): unsure at all n locations
agcngaggggactagtgagaggttacttttctactngaaccncacatatattatccgaaatactacttatgagaaattactactgttgttccacctaattgttataacacttaatttaattattagtggtgtcactcggaaattaaaaaacccaacttcatgttatatagagataaataagaactattaagacttgctaatacatgctatctaatccttttttctaacaatgacattttgaactcgagcatataatataatgtttcataagaggctacatattagcaatatgatccttcactatatgggcatgacatgcaatac

SEQ ID NO: 233584 - DNA, 435 bp, Glycine max
  unsure (1)..(435): unsure at all n locations
tagancaagaaataataattataataatagttgtgttatatttgttgaacgtgtgtgttagcagttgcttattaatttgttttttgctagctatttgaccgagtctttaggattatttattctattttttttgttgcttagtagctgttatgttagtggctattgtttaagaagtcagttattgtttttatgatttcttttagttacaaaaatctctatttaaataggttattattcaataaaaagtgtgcattcatctcccttcattctgtgagttacgtttattatcctacaaatnggtatcaagagccttcttcttaagagggacctgtgagtgaaccgagtgaaacccaccacataaagccaaaacaccttgcttcaattcatcaaaatgatggattctaataaattgtacacagcactagcacacctgtg

SEQ ID NO: 233585 - DNA, 269 bp, Glycine max
tatataggcgtattggcattagaatatatttcatgttcttgtatgttgacatgggaaataggatactttttacacatgcgcgtgtgcataaatggattacatgagtctggtctaaatcagatgggctagcacgacatttttgcgttaatataagcaatatcttgtaaaactaacttctaaatgtttgttctcgcatgaaatggtccccaggaaacttgcctctaaaagatccagtaatgattaatcggtcgaaagaactatttctgctc

SEQ ID NO: 233586 - DNA, 412 bp, Glycine max
tcttatccaaggctcatcttggtggtgaagcttcttcttcatggcttattccctagtggatggcgcctcctctcacctattctcctttgtcttccgctgcatctccatggtggaaaatcaccattaaaggacctcattgaagctcaaagatccagcctccatagaaggcccacaagcaagcttccatcaagtggtaatcagagcacaagagcttcaagtaggtgctccttaaacctccattaattttttttctttaccttctcttccatttatgattcttcatttttctccatgtatctcctcacatgtcttgttctaaatgtttttaacatgattctttacagattccaccgaataaacttgctatagaagttagatttgatttctatggttcaatttcttgttctggtct

SEQ ID NO: 233587 - DNA, 321 bp, Glycine max
  unsure (1)..(321): unsure at all n locations
agcnggccgagcgaggcagaagaatctgaaattgttaggagcctccacaacactaaagtgggcgatacaaagaaagaggagtcacaaaatagaccaagagaagaatctagaacgattgagcctccgccaccagaagagttcaggccacaggaacgaatctaaggttctaaaagtgggaggaaacaccctcaaccatttgcagccctaatctttcctccaaatctatcattcgcaccgaaaggtgctaactcgtaatggaaggctaaatcccttgttggggagttccgctgaacctacgatgtaacactcccctaccattca

SEQ ID NO: 233588 - DNA, 427 bp, Glycine max
  unsure (1)..(427): unsure at all n locations
ngaagtcttgggtncctgagtgtgtgagaaggaacttctcctaatcccatgcatcgcactctcccagagtgctctaaccctaacactctaccaacaacatcaagaggagaaacttcagattcatcaactatgctttgagtcaatcctacttcaatttgttcctccaaacatgtaataaaatgaaatataaaagctttaagattaagcacaatccttgaaaacaatgttactaaagaaaaacataccgctatagtctttgctgcttcatttacaaatgatccatctttccttttatgagtttcaatatactaatgttcatgacttggtagcttcccagtttctaacaactaagataaataagagttagtatacaatgaacttcctttattacgtaaagttaacatttagtggcattaccaactcattt

SEQ ID NO: 233589 - DNA, 427 bp, Glycine max
  unsure (1)..(427): unsure at all n locations
agcnttttggagtagaaacatgggactcaacttcttttatttcaaaaaaggaagtcgtatctagtcaaggtctgagagaccatacaagtttcctaacgatttctaattatgtgggccattaagtctatcatatgctgacaatagccgagaagcccatgaatctcttcgggggcggagtaggtgtctgctatcgccttggccttggctaacaatcggggaagttcttgactcccgttcaaggtaagagcaaaccgatccatccacatggttgcctcttggtgtaaagagtcgatcacccttcctctagcctctntttccgcgtatacctgggcatattcgtccgcaatcctatgctcgtgggccgcggctagacctaactcttcttggtactcggcgatgatagctagcatggtggtcttcgtctcgc

SEQ ID NO: 233590 - DNA, 382 bp, Glycine max
  unsure (1)..(382): unsure at all n locations
tcaatttgggtganaagtacaatgttagcttcaaattgcccaagttcatgtactagaccaaaatataaagaaaggagttataatataaggaatatggagcaaaacgtttggataaacttatccacattccaaaagtacttctatgataaaaaaaataggaagaaaaaatgaaatgaacttttgcataagttaaaagtgtttttgaagaaatttatccaaacatgccctagaaggatccctcctggcatttccaccacagttctcaagtagttatgatcacaaaatgggaatgcaaaatcagataaagagaatctaaatgtatgaaactaataagtattgactccactatagctatcatgggcctactcttaagagagaaaca

SEQ ID NO: 233591 - DNA, 380 bp, Glycine max
gacctctaagccactgcagctgcaagctgtacaaaaggttatttttttatgtgaatatggaagtaaccgtcctgcaagattggggcacaagatgaatcgaagcacatcactgcttcatctactgccaaacatatttaggattgttgatgtccttgatacttccagcttcaccttgacaaagatgtcatggaccatgttgaaaacctaaattgattcaaccccatatcctgcgtaaaaattcgcaatacttcgactgtacatcattcgcatgcatccatgcttttcattggttgcattgctcattggattctttccttggaaactaaataaaacaatataaaatgaactttcaaaaaaaaaggcacgcttacgggccctta

SEQ ID NO: 233592 - DNA, 423 bp, Glycine max
  unsure (1)..(423): unsure at all n locations
ngagctgcagatgtccagtgctatgtttgacatccttgcacttagccgacgtttcaaattcaaatcagtttttttttaacatagacttggattagcatgaggacaagtccacttagcgaggtctgcagatcagaaaagctgcaactctcgctgggatctgggctggcttatctaaaatgatgcatcttaagtacagaggagcatgcgcttagctgataaggactcacttatcactcacattgccgcaaggaattcagcttagctgccatgattggcgcttagcttcatgaacctcagttatagccgtaaagaattgagcttggcggcaatgcctaatgcttagccaaggataagttgtcgcttagcgatccggctgaagcttanctgaattcagatcgaatagaaagtggcttagctcatcct

SEQ ID NO: 233593 - DNA, 382 bp, Glycine max
agcttgtaacctggtccagttaccctatcaatgccaaaacctgctcgacccctattaatctgccataatgatggagacattacccccacaaagctgtgcgtgcaacctatgtaactgagccactagaggcctcttagctactgacaccataccaccttatatagaggctactctccaggcaaatgcactttcaattctacacactcatacaccagattctgaaactcagatgcgggagtgtcatttcaggcacacccccttctcactctgccagttacactaccataaatggtgacccttgtctaccaacaccttgatataagattccagccattggatgtacatctcagatttaggtaaaagatttaatgttggaatcttt

SEQ ID NO: 233594 - DNA, 401 bp, Glycine max
  unsure (1)..(401): unsure at all n locations
ntatcactattgacataaacctattaagaaagntgttatacattgaaacaacatataaaaaaatggttattaaaacccaattccttgaatgtgtcaacaatgatggaacaatcaccctaattttgaaaccaataaacaaatttttcatatatcaatgtaaataagttaaaaataatattaggtaattttttaaggcataattattaattattgtaaaaagtcaaacttagtatatgttactaatatatacttaaatgacaatatagtatagatattntctcattnttaatcataaatccttctataattaaaaatccctaactttttttttttgaaataaatccctaactttataatagctatttaaaaaagtcatctttaggtaattataatgataatta

SEQ ID NO: 233595 - DNA, 413 bp, Glycine max
  unsure (1)..(413): unsure at all n locations
gcttnttgcataggaagaacaagattatgtttattggaaanaaattctcagaagttctcaaaaatcggtaaagagttgtaaaagtttntttgaatgccagtcaaggtcttacttttatagactcttcatgtctagtcaagaaaaccattggaagagttataaccttgagaaaatcatgtcaagagttacaacttttgaccttttatacaaaagttatcactggtaattgattaccataatcatgtaatcgattacacaacgcactttatgataagttgggacccttcacaattggatttgaattccaacgtttagatatactggtaatcgatcaccaatatagtataatcgattacacctttgaaaaatattgtggaacgtttgcaaatcagtaaaaatatattgaaatccaa

SEQ ID NO: 233596 - DNA, 418 bp, Glycine max
  unsure (1)..(418): unsure at all n locations
ttgtgaagttgaaaacgtttatgtaagaagttggctttttgttacnagtgtaaccgaaaccagccttttcaatagcatatttttgttgagcaagtagtgcctctaagttatcttctcccattgtcaattntgattaacttttcagcaaatactcaacctttgtttccaatgctttacaattctcacaagaggaagtgacacttgtggtattagcataattacaagaagagttgtgacgccttggaattttgctaattgtgtttctgacacactaattctgttatttcctttatttatattattttaattaaaccaatgagatttcgattaaatttgttgtacataactattgaactgtntacttntatttggagaaatagagtaattcaaatccctgcgagatgattntttttttata

SEQ ID NO: 233597 - DNA, 398 bp, Glycine max
agcttaccacccagcatcgcccaggcgatcttgtttgcttcctccaaaagcaacagccttctggaggaatcttctggagggcccaagcgggctggttgctatatgcacccccatttttactaagtacaccccctgccttttttggcgattctttttttcgtaaagttacggaaacttacgaaatttcgtaacgatacttgttacctttccgtaatgttacggaaccttgcagattacataatcatccccttttttgacttacggaatgttaccgaacctcactaattgtgcaacgatgcttccatttgatttccggggtgtcacggaaccttacggattgcgcactaataatttcttttggttcccgctagtcccggaatatcacaaattgcctaatg

SEQ ID NO: 233598 - DNA, 446 bp, Glycine max
  unsure (1)..(446): unsure at all n locations
tatggcatctgtagcattagagtagatggaaatgatgctcttgctgnttatagngcagtacacactgctagagaaatcgctataagagaaaaatcgtcagttttaattgaggtgcattgagctactgtaaaatcaaagtaatgtgtgactatgatgtgagtgtggtgcacagggaaaaaaggggcaaaacagatttggagggaaaaaaagagaagaggagatgctggtggcgaggcaagagacgtgcgatggaagagtgaatgctcagtgtagacatggattgcttctacgttcaaggtaacataacccttccattctgctttaatttgagaagtgaatntagtgatatattattatacgatgttgtttgtgtttgtgtagtggaacagagaaagcaaccaaatttaagaggcttgccctctgcaatcatacagtacaacttctac

SEQ ID NO: 233599 - DNA, 421 bp, Glycine max
agcttcaagaaaaagatggcctcagctttttctttatttttataagggaattctatcaatagacctccaatctttaatggagagggttaccactactggaaaacccgaatgcaaatttttatcgaggcaatagatctaaatatctgggaagccatataaatagggccttatatacccaccacagtagaaagagtttcaatagatggtatttcatcaagtgaaagcataaccatagaaaaacctatagatagatggtctgaagaggatagataatgagtacaatacaacctaaaagccaaaaacataataacatctgccctaggaatggatgaatatttcagagtttcaaattgtaagagtgctaacgaaatgtgggacactcttcgattacacatgattgaacttcagatgttaaaagatc

SEQ ID NO: 233600 - DNA, 352 bp, Glycine max
actcacgcttaattggtggaacttctaaagagtatgttgacaactttcttttcaagacacgtgaggagatacatggagagaaacgaagaaacaactatggaggagaaagttaagctgaaaaatattggaggtttaaggagcacctacttgaagctcttgtgctctgataccacttggtggaagcttgcttatgaagcttctatggaggctggatctttgaacttcaataaggtccttcaatggtgatttttagccatggaattgcagcgaaagattaatgagaagacgtttgaggagacgtcatccactatagaataactcatggaaggagaagcttcaccaccaatagagt

SEQ ID NO: 233601 - DNA, 329 bp, Glycine max
  unsure (1)..(329): unsure at all n locations
agctncaaaggctcaaagagcaagggtttatttattgttaatcaacaagtaaagatacccttttctatagaagactaccatgatgaagttttatgtgaaataatccctatggaagcaccaaacattttggtggataggccatggaaatttgacaagaaagcaatccacaatggtctcaccaatgaaataaacttcacccatggaagcaaaaagttcaaactcgttcccttgacaccttcacaagtggctggggtgatcaagtacaaataaaactcaaatgggattaggaaaagaattaaaaaagacacgaagaacaccctttaatgggt

SEQ ID NO: 233602 - DNA, 345 bp, Glycine max
  unsure (1)..(345): unsure at all n locations
tcgacctggtagaggatagnggtcgtaccagcagcattttgtattatgcctgggaaacgtaagccatactaagaaagcaatggtttaatcactcaatatatttcgttaaatgtaaagaaaattagattaacttatactcatacaatgcgtatgaaacataagctcgataagtcgagcatattaataacttctaaaatatgagagataattatataccattttcagttattggaatcacacttacacctttgtcaatctctgagagataaaaagtccatttgtctgaatctacatagcccttatacataactgcttgtagatcaacattggcatgaatggctgcca

SEQ ID NO: 233603 - DNA, 390 bp, Glycine max
agcttctcgatgtgacctggaggtattgttttggccttccttaggcagtatcagtacaactctaacatggctcccgactgaactcaactgcaaaacataggtaagcaggaacaccagtcttttaaagaatacgctcagcgttggagggacctagcagcgcaagtagcccctcccatggttgagagagaaatggttactatgatgtgtcataccctaatttcggccggggattattacttgatgacatgcaacctttggttagccgctttcagatacttggcgtcctttgttgcacaataaacgaagtcccgagacgtctcagaaatcaaaaggaaacaggcttgccgatccctgaaatatcgaatgtggcaaagtcaaaagagtgttttg

SEQ ID NO: 233604 - DNA, 337 bp, Glycine max
  unsure (1)..(337): unsure at all n locations
cgcttgtggggcttctattgaagctggatcttgatctttttgatgncctttaatggcgagtatccaccatggagatgcagtggatgacaaaggagaagaggtgaggggaggcgccatccactaaggaataagccatggaagaaggagcttcaccaccaaaatgagccttggataagaagcttggaaggatgcttcaatggaggaaaagaaagatggagagaaagagagacgggggagcaccaaattgaatgaagaaaaagagagagacgttgaactttgagttatgtctcacaagactctcattcatcaaagttacaacatgtgttacacatgcttc

SEQ ID NO: 233605 - DNA, 378 bp, Glycine max
  unsure (1)..(378): unsure at all n locations
agcnnggatgggcggagaggtttatttttattctattaccgactgaccgcttttagattcgttttcatctaaatcagtgagctcttaaaatgcaatctgtctcggatgaacacggcatagttattatttataatgttggtggcgtcatctattctcttcagaaatgtcgtaaatcgctggtgctgatggatgattgatcggcagaaagtaacgggcggaggagcactatgactggaacaccggcagcggtagcaacgcctctgtctaatatacataggaattcgtccagtaccttgggtggcaaaaagttcgggaggagaaatcccagtcacggttcgaatgaggcctctcatatgacatgaacaacctttgttttgt

SEQ ID NO: 233606 - DNA, 434 bp, Glycine max
  unsure (1)..(434): unsure at all n locations
tgttgacaatagntattacaatatggctcgtatacgtatggnatatattttatcaacttacaagtgcatatttttccttgatcattttgacatttcatgtcttataaattgcatttggtagggttttctgcttactttatcttttgagctattggacttatattattattaatttttgttttcaatgtcttggctcaaatgtattgttttcctagtggaaaagccttttacatttattaattggatatagtttctgcaatatataatgttgggaaaaacccaattcttggctagagatggtgtcaagatagagtatataagtggggacaaccctcaccctattagctagctntcggggttgagttagatccgaactcacattctaagataaaatgagtgcacaatgcacatatatgtacatgtgtatgaatttt

SEQ ID NO: 233607 - DNA, 414 bp, Glycine max
  unsure (1)..(414): unsure at all n locations
agcttatagcaggggtggttttattttcacaagctggntacttatagagaaaacagtcattacctgcctatgatcgattaaatctacaaggtaatcgantaattcaatgaactaatcaattagattatctttttaatcgattaagatgcatgatgcacaaaatatatgttatggactaagatgcaacattcaatataacaaccaacacaaatgccactcaagggagttgggcatgtaaaagacaaaacattcttaagcttttcttcaagcttcaagctttagtcttcatgttggtcatgttgcttgatgggtcatcattttctcatatttcttaaacccttttgtctacattttaattactgattagccttattgcaaaataattatcaatattatctttgggctactggataa

SEQ ID NO: 233608 - DNA, 309 bp, Glycine max
tcgaagggaagagagagaccgatcatgagcatttagtatggtcttaaaagaggagttagctgcttgctcaaggtccaagagaagcttgtctaaacatttatgcgagacagagaccaacatgttagccattgtcaggaagtaccaagaagaattaaatctagccacgacccacgagcacaaagtggcgggcgagtatgcccgagtgtatgcggaaaaggaggcttgaggaaaggtgatcgactcgttacatcaagaggcaacaatatggatggaccgatttgctcttactttgaacgggagtcaagaact

SEQ ID NO: 233609 - DNA, 397 bp, Glycine max
  unsure (1)..(397): unsure at all n locations
agcntgcgtaataaagaaggactcaatatacatgaatcntatcaatataaatatagatacacatgcacggtaaaaaaattaaattataataagaggtgacaagatcattattcaatatattaaattaacataaaaacatatatgtttaattaaagaaaaaatttatatttaataaattactattattattagttattgctgctttcatatgtgtttaattatttgtattactttctttctattcaaacttaacctgttcataatgcaataaaaattttaaagggtcagtcacagatttctgcaatctctgtttcttacgtatttgaaagtgtgtatatatatatttgaaataaacttctccccatttttcatgttttaaatactcttgccttattaa

SEQ ID NO: 233610 - DNA, 339 bp, Glycine max
aacactcacgctgggaaagcttcttagagctagaagtgtagttatatacttgaactttgtgaaaggcttgtggaaattttgaaaatcacaattcaactctcattcttatgatatttgcctttacaaagattatcttgtgaaacttgtcaaactcctgaaactcttttattgtacatagtaattaatggatttgatagttcaccttttgaatcaatcatgtttggataccaccgtggtaaaatctatcttattaaaactacgatcccggactcgttaaccgtgggaccattgtgaaatttggacaccacctttaaaacccattttttgcacatcactggc

SEQ ID NO: 233611 - DNA, 440 bp, Glycine max
aagtcacctgggctgcaacttgtagaggccatcggttttatttttcagcggctcgaacttatgcagcgcgccagtgatgggaacgtgtatgagtgacaccacgtcatccagcgtgatcgtcaactcgacgaaggcggatatgagtctaggatcagtggtgataacagaacacctgatcagtggactcaatccggtggcagcaatcatgccttcgatctcaggcgctggtctcccaattttatctacttttctaccatgggagactaacttgagatcgggtcgttcctaaattgaataacaatttataataacgtgtatattaaaaacaatccaactaccaaataattttatgtaattactcaacattaagaagtgcgtacctagccactccaaatgctgtgtgcgacatgctaagctaaaactggtcaaaactgatgggt

SEQ ID NO: 233612 - DNA, 384 bp, Glycine max
  unsure (1)..(384): unsure at all n locations
nntagctagttatttggttgatttgcatgatgttatttgtttantctcttattgggttaattaaataggaatgaaattgttcttacctatatatgatttgttacttgaaaaaggataaaaaatagatcatgacaatagataatagtacagctagcagctggtttctatttttctttttattgaatggatatcaaatcctactttatgtctagatacttggcatacgacaagtaaattgttacatgaggcagagttttatttttatttttttaaccgcgacatttgtattgaatattcagtaattctatttgatgaataacttttataaaaaaatttaactcgtcagttttagtagctcttttcttaaatatgtttttttctttt

SEQ ID NO: 233613 - DNA, 360 bp, Glycine max
tctggaatctattcgacacgcgatctgatttttgcacaggccctaccggcatacacccaaattgtgccaggaaaccaggggattggatcttccctaccttttcctctttaccattggaaaacttatcactcaattttcattgtcgaattccccgtttattaaggaaacaccccaatactggggggtgtatatatatctttcaaaggtattcatttgggccctcttccatctcaaaatattggctataaagttgccactttttcctggacataaatttcaaactttgcggcatgccttggagcttattttttaacagaaacccttgttattattaactctgccaaaacctgttaagctttc

SEQ ID NO: 233614 - DNA, 420 bp, Glycine max
cagcttgttgcaaggacatcaactatatcattattcgatctttgcatggaagctgtgaaatggaagatgattaggttgtgatggataagttgcaatttcctctattattttaatttgaagaacaaattactttcttaacctgtttcttttttggaatttctgttgtgacaatattatgttttgtaacatcccaattttctcaggttgtgaagtttgatgtagaaattgtctatgtttgttgatatgcaatgtagtagtattattcttagtgtaatcatacatataagacatagaaccatcatcattagataatcatgtgacctagatttaagtcttgagtctaaggagtagtggtttagatacatagagcccttagtcaaattgtaacgacttgcctcgtaccataattttttctcatga

SEQ ID NO: 233615 - DNA, 420 bp, Glycine max
  unsure (1)..(420): unsure at all n locations
gctgcagcggtgggagggaagcatgggactcttctcattncatttcaagaagcggtttctactcaaggtctgagagaccatacaagtttcggagctgattctaattatgtgggccattaagtctatcatatgctgacaatagccgaaaagcccatgaatttcttcgggggcggagtaggtgtttgccatcgccttggccttggctaacaatcggggaagttcctgactccctgtcaaggtaagagcgaaccgatccatccacatggttgcctcttggtgtaaagagtcgatcacccttcctctaaccttttggttaaacctcttgcccgttggatttgtccccatgcctactaaagggagactaaaagcttgtgccaatcaaaactccgatttctcatgggtgtgaaggattaaagcatt

SEQ ID NO: 233616 - DNA, 394 bp, Glycine max
  unsure (1)..(394): unsure at all n locations
tgaatntgtgttagacatgattgatacatgatttgttacttgtaggaattgatttgggcaagattggatgataggaagtgtgattttcgaaatatgcacttatgcagaatatttgctgcgaaattgtgcagcagaattttgcacaagtgcagaaaaatgctcgtgggtggttggctgtggaaagtctagtgcacaatgagttctggatgtttgctagtagatcccaacggtcaaaatgtaggcttatgcactatagaactccagtaaaattttggagtctatccaacggttaacgaattggatcgaaggaattgttactgtggtctttaagtgaaaaaaactgtgactttggctgatgtgtggagcagaaatatctgccttgctctgtttgctt

SEQ ID NO: 233617 - DNA, 323 bp, Glycine max
  unsure (1)..(323): unsure at all n locations
agcttggatntcctttgtgtaaggaatctatccttcctaagatggacccctacccagccaccctgaataagaactagcttttttcttcatcctttgcctatagcagaatacacctctggatacctctctatttggttcttaaccctctcatgcaacttcttttcaaacattgaaccagataccccttctttatgtataaaagaagtgtccgatgggacgggaatgaagtctaatggtgttaggggattaaacccatatgcaacctcaaaaggggactgtttggtggttctatgaacccccctattgtatgcaaattctacatg

SEQ ID NO: 233618 - DNA, 437 bp, Glycine max
  unsure (1)..(437): unsure at all n locations
taaaactaagctacatatccctaatcttaaactaatcctaacaaaacatattatccctaattatctaaagctacagttaaagtcttctatcctaaagttaagacaagaaaaagagaaaaaggatcaaggaacttacttggacggtgtatgattgatgcttcaaagtcgaaaatgcacaaatagagtacaaatgcaaaatgtgaaaatcttcttggagagagagagtgatgcaatcctaccccgcaagggcattggctagaagactccaagtagattgggctagagatccaaggaaaggccctaaggttctcatgagccttatggtagatttcgagcccatgggctaagtatgagcccgcttatctntgtaaatattagaataggttttttcttcgtcaaggcctngtattctggccattctagtaatataagggttt

SEQ ID NO: 233619 - DNA, 383 bp, Glycine max
agcttaagctccttcaactgcacaaggttcttattatttgaagagtatccttgtggaaccttcacccgatgaagacactgacaaaaacttatcttctccttcttggacaaagtatggcaggctgggggcaagtaaattttcttcccatcagaccgtggatgcaaaccatcaatcttcttccactgggagcaatcaaccggatgacgaaccattccatcagaaatccttccatttgcatgccatgtaaggtcttttgcatcgtcctcgttagcaaaaagacgcgtaaaccttggaattgatggaagataccacaaaacctttgctggggggccctagttggaatttttatcaaaactactttttcttcatccttactttgtacc

SEQ ID NO: 233620 - DNA, 399 bp, Glycine max
cgcagaatggctagacatgatacatgtcagggtttgttttgtttcaaggataaaagggatgccccacattattttcatgacacaaatgcaaaaatgatgatttggaaattttatgcaaaactggtcatgcatgcacctatgtggacgctcaagtgtcaaatttttatggtcatgtgatgctagggctcaggattcatttcctctattttaaatcaacccaatgtttccaaaatatgttcttttatcaatttgtgcattcatcctagtccatttcgggcgttcggggaaatttcacagcattcacccttcaggtgtagacacatttttcaaaaattggttatgatcacatgaattttttcaaagaaaagttggaaatcatcttttttcaaaagcatgtcg

SEQ ID NO: 233621 - DNA, 383 bp, Glycine max
  unsure (1)..(383): unsure at all n locations
gcttgaagctagcgcacatggaattgtttcattccacaacctntatgcctaatcaacgagaggtttgatgaaagggacaatgatactagaccctgttatttcaaactagaagaatagtctattacctaaggaatgtattagcttgaaactaaagaggataaataatgataaggaaatgaaatagagaggatattacttactatnacaaagatgacctgaaagatggcacaagctttgtatcttccccaataagaatcactcttgaaagcacccacttaagagaagatgttaactgtgccaatccatttgctcacactgtttgcagctgcagcattattttgccccatcacccttgtcatgaacaacactatgttaacccctac

SEQ ID NO: 233622 - DNA, 345 bp, Glycine max
  unsure (1)..(345): unsure at all n locations
gatcatatgtttcccattgtaaactggaagagctgcttgggaaaaacttgcttcaaagtccattctatangtcccgtaagaaaagggctttaaataccaattgttggaaatttatcaagaggaaataagaaaacaatacttgcttaacagagaacaaaagcatatattgaaggagaagacggaaaaacttatcttttaaaatagaaacagtacaatttatagagcttgaagaataactacccactaacagcatgttcctaaaaataagccatgaacgcaaacagagataacaaagaacctannaacttctaactgacacctttagactaggaaaacacatacaaa

SEQ ID NO: 233623 - DNA, 372 bp, Glycine max
agcttttcgattcattctatgtacccgtagtggtccacattgggtttcgtgcatttttattctcgttttgtttactttttataccccctcttgacgtgcttaagccattttacttaagtcatttctcgcttaacttaaaaataaaataaattttcaccgaacgtttgaattgtattatccgttaacttcggttaaaatgaattccgaccgttcggtcgtgccgtaaccacgttggaaatcaaaaaagaggtaaaaaaaatataataataaaaaaaaacatcttttagtaaaataaagcggaaaatcaatcggacgttttctctttgggatttctcattcttaatcgaatggattaataactaaagtgaaact

SEQ ID NO: 233624 - DNA, 358 bp, Glycine max
  unsure (1)..(358): unsure at all n locations
ctgatttcctttgttccggaaacctttcttttctcatgtgcacccaaacccaatctccgggttcgaagacaaccttctttctccctttgttggcttgtttagcataacttttatttttcctctcaatttgatctttgactctctcatgaagcttcttcacatagtccgcctttgcttgaccttctttatgcttaaaaacagaaacattangcataggcaaaagatcaagaggagttagtggattaaaaccataaacaacttcaaaaggagaacaattagtggtgctatgaacagctctattgtagcaaattcaacatggggtaaaccaagcttccaagttttaagtctttctcaaact

SEQ ID NO: 233625 - DNA, 423 bp, Glycine max
  unsure (1)..(423): unsure at all n locations
agctngnngctctagagagttggcacttattattttaatatagcaaaaggtaagatcatggattaatttataatttaacaaaagtcatatcacacataactttataattccatagtacttgcctactaaagttagtctagtggtggtggtggaatttagataaatacatgaaattatacatatttaagtttcattgttacctttatattattattagttaaaataataataataattcagtaatgctttaaccaaacttaaccatgaggtgtaaaaatgtcaatgcttataggggtgaaatgtccactaaatagatcagaattttatttttacgaaatagatcagatatagatattgagcgggtaataatttattttattttagactataacaataattatgatgccacatatattcacataa

SEQ ID NO: 233626 - DNA, 419 bp, Glycine max
cacgagaacacaatcttggaactgaatagtgattctcattatatcaaaaaacacgggtataaattcttctcatgactcaacaaccctccccatccaaactctcccctctttccctcattgtctattcaaaaaaccttcatcgttaccaccactagcggatgcaccttctatgttgtgggagcaattaccccaccagaattttttttatttgtcaatggatataaaaaaaattccctcataaataattatatattgccccattgaatttttttaactcacaaacaaacataagacatttcatacaaaaattacatgctcaacccaaatcattaatccaatttcttattgtatagaacacaaaaaaaaacccaccactacacgagacactgttcatgtacattaaaaataatcatattatt

SEQ ID NO: 233627 - DNA, 332 bp, Glycine max
agcttgtaatcgaggacacacatacttgttatccgatactacaggagattttcaaaaaatattctcaacagtcacatcttttcatttggttcttgaatggactcaaaggcttatatatatgtgacttgagacacgaatttgctaagagtttttcacaacaacaagtgtttattttctcagaaagcaaaatccgtttatcctcttaagaattccttggccaattcaattgcaattcattaaggaatcatctgagtgcctaaattgttaaatctatctctttcaagagagaatcattcctcttctctttctaaatcactaaggaattaagagac

SEQ ID NO: 233628 - DNA, 436 bp, Glycine max
  unsure (1)..(436): unsure at all n locations
cagcttgagtcgcatgtgatctttgggcagatctaatatttctnganccttgggctacaatctccccctttctgatgatgacaatccctgaaatcaagacaaactatatacaagatgatagcacgttcacacaacccttactccccctatcttttggcatgtatgcctaattttacttaatgaaaaatttctaattctaattgatttctaacccaagctctctcaagttctctccccctttggcaacatcaaaaagaactaagcaatacaaacaaaatccagacatagccaaacatgaaatcaaaataaatccacacattgttataaccaaccaaagcaaagtcctgaaatataataatagtgcaagagtacgataactatagcaaaaaaagccaaatacaccgcgataaaacaagtactaagaatacttaattac

SEQ ID NO: 233629 - DNA, 409 bp, Glycine max
agcttatcaaaatagagaatgatggtttctaatctcaagaatcttagagtcttagattgtgagtcttgccaactaggaaaacatgttaggtcatcatttcctcaaactgtacaaagatgaaactctgctttctctaccattcactctgatatttggggaccaagtagggttacatcttttgattttcggtattttgtaaccttcattgatgaatttttcagatgtacttgggtttatttaatgaaagacagatctgaacttttgcctatattcatgttgttctttaatgagattgagaatcaatttggcaaatcaattaagattttcaaaagtgataatgctaaagagtaattctctcatgaactctcttcccttttatcttcaaaagggattttgcatcaatctacat

SEQ ID NO: 233630 - DNA, 422 bp, Glycine max
taacagaattcaaatagaatcctaataagctctaattcactaaactaaatactctaacatggattttgtgtgttgtgtttctgtttttaaataatactaaatggaaaaacttgctaataagaggtgacacccatgcgaattattagcatagatgtattggaatggtagttgtcaagtccatattataatggtgatgctgaaaattggagaaaaggttttgtaagataattagagattctgagtaagacaaactatgcaaaaattgcccccagctagatgcttgagaaatattgataacatattttgtcactgtcataattataaggtttaaactttaaatgcatttttcatccttattttattttattttttatgttgaggagggctaagccccaagaaataaaggctagacaggaacaaat

SEQ ID NO: 233631 - DNA, 327 bp, Glycine max
agctatgcaagggaatgcttttctattactgaagcaataacaaaattcaggcattatctgcttgggcacaaatttgtcatctagacagatcagaagaacctcaggtcactcactgatcaaggttgttcacacacttgagtaagaaaactggttgcacaagttgattggttatgatctcaccattgagtataagtcaagaaaagagaatgtagccactgattctttttctagatcctttatgatggctatatctcaacctaagttgtagctgattctagaattgagggaagcccttgcacaggacaaacaattgagtctaatattgca

SEQ ID NO: 233632 - DNA, 350 bp, Glycine max
actcagctgcttggggcttctatggaggctggactttgttcccaatgaggccctttaatggcgatgttccaccatggagatgcagcggaagacaaatgagaagaggtgagaggaggcgctatccactaaggaataagccatggaagaaagagcttcaccaccaagatgagccttggataagaagctcgaaaggatgcttcaatgcaggaaaagaaagagggagagaaagagagaggggggagcatgaaattgaaggaataaaagagggagagaagtggaactttgaagtatgtctcacaagactctcattcatcaaaagtacaacaagtgttacacattgctctatttat

SEQ ID NO: 233633 - DNA, 432 bp, Glycine max
  unsure (1)..(432): unsure at all n locations
ggatccttaagtcacctgcggcatgcagcttagaaacatgaataggatagcttgtttctggccctccccaacaaggtcttggacattctttcagctacttcatttagctttggagaataacgtacaatatgctatcttgccatgccttcatctctacaaaattcattgaattcaatagaacaaaattttaagccattgttagtcctaaaacactatattgtctttcctgtctaattcttcataagaattatccaatgcttgaaaacttttgatagctttagatttttgctntatcatgaatacccatgtgttgctaaagtaatcatctataatggagaggaaatacctttcccctcctagtgttggaactcctcaaggccctcagcagttataatggacatagtctaccatggcctttattatgtcacaacc

SEQ ID NO: 233634 - DNA, 381 bp, Glycine max
  unsure (1)..(381): unsure at all n locations
ntctacggcatgttgtgttctataggtagtttatcttatatttctcaaagatcgccaaaccactgagtaattttctcaataaggatgctctgttcttatttggtgaagagtgtttgaaggcattcgacgccttaaagaccagcttagtgtctgctcccgtcattacaacaccaaattggagccaagagtttgagctcatgtgtgacgcaagtgactatgtcgttggtgctatgttgggtcagaggaaaggtagatcttttcatgccatctactatgcgagcaaggtcttaaatgatgctcaattgaattatgccaccacagaaaaagatatgcttggcattgtatgcacccctgaaaaattcacatcatacctagtgggat

SEQ ID NO: 233635 - DNA, 375 bp, Glycine max
  unsure (1)..(375): unsure at all n locations
agctggaagagtggttttctttggtttattnccagatttggagatactnctaactacagccgaaaaaaaaacatataacgcattaaaagcagttaatcaaaattaaaaaaaaagaaaaaaaagaatccaacttaaccaaaacaagcatccaacaccaccaacaacattctgagacaacctacgaccccagattaaaaagaacaaagaattttccttaagtatcgataaaaactaacttgttccatgtgcccctgagggaaatagaagaccctttggccagtacgaggaacttccacatggggtactgcacacgctttccatagttgctcatagagttcattctcttctcctcctccaccacggttcaacgacatt

SEQ ID NO: 233636 - DNA, 384 bp, Glycine max
  unsure (1)..(384): unsure at all n locations
tanaccgttgggcatgntatcattatgttatcgttttctaaacccagattggctgtctttcggtcttcatttttgtttggcttggctcggaatgcttggctttttcacttctttatcggagcatgtgtttatgtatgagttttcgcaggccaacaagacgaaagattggacctttgttgatgttgcatgtgcatgtttcaatacctctttttttgctggtgtcattcattttgacaaccctcatttattccgtcaatcctctttaatttggctgtctattggcggagaataaccaagaagccgaagactatacctacaggcttgatcttcaattgccttatatttgcttaagaagtatcgataatgtgttcgacatatattaat

SEQ ID NO: 233637 - DNA, 410 bp, Glycine max
  unsure (1)..(410): unsure at all n locations
ntatcaaagaataaatatacttctgaacttttcactttaatgtaaaatagaatcagatgaaacaagggatataaagaaaaggaaaataagactttatttccttgcgttaaaatctaatggaagtataaggaatgaaagagcagaggtgaaaacatttctcttgaatggttgtattgtaaaaaaagaaagcaaaatttaacatttgaataacattaatatcacattcttgacatattttctaatcacttgctaaaataggtgatttgatttacattaaacgcaactttatctccatacatttcagaattagctttctctgaatgttttccacaaaatttcagaagactaatattacaacctgacgatgaacttctgccgctcgacgaactgaattatataatggcttctgc

SEQ ID NO: 233638 - DNA, 304 bp, Glycine max
agcttgaaccaattctgatatttattttattgggatgacataaaatgtggccgaccttagttctgaaaagcttcaatgcaatcgatagtttctgcttaaaagaattccatagcaataaacttgaggtccctccggcctgagatgataaaagattggagcacacgttgtgctgttcatcaagaacaaaccactgtggaagaggacaatgatggtggaattggtgctcaggatgctcttttgcctacggaacgacaagctcttgaaaccgaatcagaggccgaagaaccctctaccttctttgacg

SEQ ID NO: 233639 - DNA, 229 bp, Glycine max
  unsure (1)..(229): unsure at all n locations
actcagcttgcctagagagatccatgaatgataaatcngatgtatgaaccagtaccggggccgcatatgactgacatgcgtataagagcgctgagcaccacttgcgctttgaggtcatcagaggatggtcatttattcatgaacgacgcgtccaactcctggatgacgagtattccgactctcactaggagatagctctccagcaaggggcatcgatagtcaccctcat

SEQ ID NO: 233640 - DNA, 71 bp, Glycine max
gaggacctttgcggagagaggtttctgttataatcggattacccatcactagcgagtcgcttattacattt

SEQ ID NO: 233641 - DNA, 403 bp, Glycine max
agctggctctaaatgtacattgatgttgtgatttattggaggagggtgtatgccatttttgttttaagggtagcatttcttggtaaaactaactttccaaatgtttgccttcgcaggaaatggccccgaggaagcttgcctcaaagaggtccaggaagcacaaggcggccgaaggaactagttccgctcctaagtatgacagtcaccgctttaggagcgctgtacaccagcagcgcttcaaggccatcaagggatggtcgtttctcttggagcaacgcgtccagctcagggacgacgagtatacttgatttcaagaggaaatatggcgccggcggtggacatcactggttacctccatggccacagtctattcagaaatagtccttgagttttatgcccatgc

SEQ ID NO: 233642 - DNA, 356 bp, Glycine max
  unsure (1)..(356): unsure at all n locations
agcttgagatgaggacgcgtanaagggtgaaacttcctgcttttattgttgaccacagagtggtacctggagatatgtcgcgggggtcaagagaccttggggacgtcaggtggggtgctattgcccaaaaccaaccttgaccaatcccgacccaacccgggcatagtcggtcagtgaaaacctgtgatgtacctaaacaggcgagctcctggcagttaacagataaaaggaacaaagaccacaaagcaagggggcttgtggtggctggccacctgtgaaacttgattaatatgtgagatatggtctctggaaatcgaataccaacggtgggtaatcgattacaaggcttaaaaatg

SEQ ID NO: 233643 - DNA, 417 bp, Glycine max
  unsure (1)..(417): unsure at all n locations
agcttcagacctaagcaacacagaatctangtatccaaaatccctcaatttaatggatnttcaaggtttgagaagtgaaattgagaatgaagtaaatttggagcaaactctcacctcacacaagtctataacatcaatttaaacttgctcaaactggatttacacctaaaattccaccgaatcaaaatttgactcatcaacacccaattttaccctagaaatggctctttgttcactttggtcatttgtttttctctcttgcacagcccaagctttctcataagtcctaaatgacatttcaaactaggattaactcactttaacctccaaataccactaaatccagaattgacctttcaactctcaaaaactcactctctttccactcataacaccatattctcactttctaaccct

SEQ ID NO: 233644 - DNA, 111 bp, Glycine max
tccttgagaagctagagcttagctacacacacccatcttatatctaagctcacctccttgacaaaatacatgagattacaaaaaaaaaagtccctactacaaagactactc

SEQ ID NO: 233645 - DNA, 381 bp, Glycine max
  unsure (1)..(381): unsure at all n locations
agctgtggaggcaatgtgattttctgttggntcncaaagccttcaagtctcccaatgctaattccttggacacttaaaattaggtagctaaactatataaagcactcgtaatatgtccttttgtgtttctcacatatagtgtgagggtgttttttttttttttgtgtgtgtgtgcaaataaacttacctcttatgtgagttccacaaacggttttgttaggtgggatttcgtttccactttttattcaaaaagagttttataggaataaatatgatctttcttgctataggttgaaatgattgtacatgaattttgattcttttgccccccatgagtttgatcttctcttatggatataatataatggagtgttgtatttt

SEQ ID NO: 233646 - DNA, 314 bp, Glycine max
  unsure (1)..(314): unsure at all n locations
tcancaaaagcagctggacccgtctctgtctaaagtttctttaaccagagaaacttcagcacagttgaccacaaataatttgtcagctgcacctgtcaagagtggagtcatccccaagaaatcaattacctgtgatccggatccaaggaagcatccatctcagactggggttcagcctactcagtctggtagacctaccacattagatcctctgcataatgactcatctacactgccaaaaaacactcaaggaaaggctggacaaccaccacaaatgctttctactcaaccacccgcttcctctaacattagca

SEQ ID NO: 233647 - DNA, 363 bp, Glycine max
agcttttatcatttatgcacaagggattactcctattccaacacttatccctaactccatgtaatcaaccgctcatatccagcatcctcatgctggcgaagcgcacatgaaaaataaaactgagactaaaattatgtaaattaagaacctattttgcatttccattttttgtttcaacattattttgagtccatttcttgtttccaaggatctatataagacacaattaaaataataatacttttacagtaatttgtaaaaacaaaacttcaacctaagcaggtcctaatattcaaaacaaacgaaatttgagtgacataataaaggggcgagaacccagaaaaaaaataaaaaaaagactta

SEQ ID NO: 233648 - DNA, 416 bp, Glycine max
  unsure (1)..(416): unsure at all n locations
tgaatgaatagtacccctattgagtaccattatactcctatttcccttctagctcttgctcaaaaaccgttccagcttcaccatgtaattatatcggatgtccccgaggggaccaccatgaaatttaatccataggctatctattataaattaccaattgtaaaagaaatcatcaattataagaatttattagatacagcatatgaaatcaaacaccatgcgctacaatataaatacatacaagtttacaggatttatatgaatactaattccaatagtattatataaaccaaaatgaagtacaggaagcaataaaagcaaagataagacaacaggtaaacatgaaagaaatttcaaaaactcatttaacattatcttaccctcanaaagaggctntatactattaactcgagcct

SEQ ID NO: 233649 - DNA, 435 bp, Glycine max
  unsure (1)..(435): unsure at all n locations
tatgctgcanacatttacaatagacctcctcaacctcaacagcaaaatcatccacaatagaacaattacgacctctccagcaacagatacaaccctggatggaggaatcaccctaatctcagatggtctagccctcagcaacaatagcaacatcctactccttccttccaaaatgttgttggcccaagcagaccatacattcctccaacaatccaacaacagcaacagtcccagaaacagccaacagttgaggctcctccacaaccttccctcgaagaacttgtgaggcaaatgactatgcagaacatgcagtttcaacaagagaccagagcctccattcagagcttaaccaatcagataggacacttggctacacaattgaatcaacaacagtcccagaattctgacaagctgccttcccaagctgtccaaaat

SEQ ID NO: 233650 - DNA, 409 bp, Glycine max
  unsure (1)..(409): unsure at all n locations
agcttttattacgtagataactctggtttaacttcaattctggtttgaaaaataacatcaaaggcacttgattggcattgcatcctacgtttgtctcttagaaaatgagattctgaatcttaaaggacgaaaaataaaataaatataattaataagaattaaattaaacaaaaaattacaagaataaaaaaatactaaattatatgactaaaaaataattaaatcatatntatgtaggttttcatgcgaaactaactccccgtcgtaattataaaacaatactgagaacacctgtagagttttctcaaattgtcattttgaaaatttttaatcgctttccgtttggagcatcaaaatggatttggttttcttttctattctgggctctctgcatgttggaacccaaagg

SEQ ID NO: 233651 - DNA, 373 bp, Glycine max
tgacctataaaactccgcttatagtaggccttgacaggacaaaccattcatattgccccctcataagagcagagacgtcccttgagtaatactatgctcctttttttgcctatatagcatgagtgggcctcctatttcaattgcatactcttttacattggttatatcacaactgatgtaaaaaaatatacaaccaattgttaaaaagctaataagtataaaatgacaaaatatgcatgtttatatggattatataattcaatgtatttattaataaaaatatattaggacatttatagtgagtattattaatttaaaatttgaattatattatagataaatatgtattattttatacattaatatctaactt

SEQ ID NO: 233652 - DNA, 408 bp, Glycine max
  unsure (1)..(408): unsure at all n locations
agcttttgaaggacgtaacgacccccataaagtttatctacaaagccttgcaaaaggcgagcataattccctgcggcgggcataattccctgcggcgggcacagagaagattcttgcttaatgcatccaggtgtactccatgacatggaaacatgttcgacagtaagagatctattacaatggatgatagaccaaggccgacttgaggtcagcagtgagagggaagaggaacaacatgtatacatgcagtcggcagatgaagaaggacctaaaaagcctaaacccttggtaatacatttcaccagggacacggctccccaaagacctcaacaccccttgacagtgtcnggcggtagatctattccgtttccttacaagaacaactgcgcagttccgtggaggtatgct

SEQ ID NO: 233653 - DNA, 327 bp, Glycine max
  unsure (1)..(327): unsure at all n locations
ntgccaatttagttnttgtcggcgaaaggatcgaagtgggtctgaaaagaggcacaattgattatcctgctttgatgaatgagaagcctgggaaaatggagagaatagaaagaaggaggaacccatgctattattggccgtcccacatggccaaattttcaaccagctctacaatgtcaatactcagcccatatcaacctttcttattacccacatccgatcagccaagaacgcccaatcatccacaaaggccacccctaaatcagctatcaaacccgcttgctgcacattcgatattagacaccacccttaacatgaattaaaaca

SEQ ID NO: 233654 - DNA, 387 bp, Glycine max
agcttgcgaactttatttggaatctcgacatttcttccatctgaatgtagcccttggctcgctcccgtaactcgtccatgctgctggaaagcttcttgcacaatctgttagcaagtttgccaagttgtagggctagcaacatagaatgcaacgccacctcaggattaaggttcctaatttggacaacaagctgaccaaatctgcccaaaatttgtagagtggctcttcgtctacctggcttaaactagcaagggcggcagaagtcacatggtgcgatcagcttgtcgcatattgagagctgaaatgaccgacaaaggtatcaaaactatcaaaaggtcggggaaggagtgctctataccacgtcaatgcagctcccttaagggacgt

SEQ ID NO: 233655 - DNA, 303 bp, Glycine max
  unsure (1)..(303): unsure at all n locations
ntctttggacctgtgaacaagcaatcatcttctcttttttaaccatgctatgtgctcgcgactggaccctttcttcccttcgcaacttgagttcactattgctaccccatagagctccgcgaattttgttccggccatactcttccttgcgagccctcttggtctcttgttcaagggctcttgcagtaattgcattctcttcccgtaacccggcacactccttccgaacgtgtgtagcggccaacttgaacttctccctggcaagttctggctttcctaactcgctttcgagagtttggactt

SEQ ID NO: 233656 - DNA, 341 bp, Glycine max
gaaacatgttgtttttggctatgatacaagctcaaaaagcttcaaattgttcaatccaaacaaaggaaagacaattgtgaaccgaaatgttaagttctaataaaaaggcccatggaattgggaagagaaagaaaacacttatgatttttttcccgcactttgaaaaaatggaagaagaaaccctgactccaaatgatttaaatccaacacttttaccaacctctttaaacaaagaagcatctttatttttcgaagggagttcaagtgaaaggcccagaagaatgagaaatattcctgaattatttgatgaaactgaagttataatgatttgtttggctttt

SEQ ID NO: 233657 - DNA, 428 bp, Glycine max
  unsure (1)..(428): unsure at all n locations
tgtgccttttcacgtctggaatgtgaatgtancatatatatccaaagacccttaggtgctttgttgatggcttcttcccgttccaagcttcaattggagtcttgtcttttacagacttagttagacatctgttgagtatgtaaacagcagtgtagactgcttcagcccagaatgtgttaggtagtcccttatccttgagcatcgatctagccatttctataactgtgcgattctttctcttggacactccattntgttgaggagaatatgcgactgtaagttgtcgctcaataccttcatcctcacaaaatctttcaaactagcgagaggtgtactctttgccgcgatcacatcttagtacttttatccattntccactttgattttcagcaagggcccttgactttttgaatactccaaagacttct

SEQ ID NO: 233658 - DNA, 341 bp, Glycine max
agcttcttagtttcagatgatgcggctgagtttgtagctacctcatgcactcctctaatgactatagcatcatttttggcgctaaactgctgggagttggaagccatcttctcaattaaatttctggcttcagcaggagtcatgtctccaagggctccaccactggtagcatctatcatacttctctccatattactgagtccttcataaaaatattggagaagcagctgctctgaaatctgatggtgagggcaactggcacatagttttttaaatctctcccagtattcatataggctctctgcactgagttgtctaatacctgagatatccttcctgat

SEQ ID NO: 233659 - DNA, 419 bp, Glycine max
  unsure (1)..(419): unsure at all n locations
ntggaaaatgatttctatacaaaagttagtcgtattaagtgactaacacttatctatgaaagttttttagagagttttttagaatcttattgtcttattctctcaaaagcaaatcattggccaaacacttgcaagtcaattaacgattcttctaagaacttcaacttgtatcattcttctctaaaagagagaaaaacttttgtacttctaaaacaaaattgttgtgatcaagaggctgtgtgtctcttgaattgtgagtttcctgaacacaagggaatggatccctcagttgttcaaaagttgtaaatggattttacaaagctagtggaaaatctcaagtgggttgcttgaggattagacgtacgcacaagagtggtcgaccacgataaaaatgagcttatattctctcttcctgcttg

SEQ ID NO: 233660 - DNA, 445 bp, Glycine max
  unsure (1)..(445): unsure at all n locations
ctgcagctcttcaatagtccgctttgcttgttctttatgcttaaaaatagaaacattaggcatagacaaaagatcaagatgagttagtaggttaaaaccataaacaacttcaaaaggagaacaattagtagtgctatgaacaactctattgtaagcaaactcaacatgtggtaaacaagcttcccaagtctttaagttcttcctcaaaactgtcctaagcaaagttcccaatgtcctattaacaacttctgtntgcctatcagtttgtgggtgacaagtggttgaaaataacaatttagtgcccaacttgccccacaaagtcctgcaaaaatggcttaagaacttagagtccctatcactaacaatggctcttggcanaccatggagtctcacaatctcctttgaaaacaaatcagccacattgggaagcatcatcatacttttt

SEQ ID NO: 233661 - DNA, 360 bp, Glycine max
  unsure (1)..(360): unsure at all n locations
tctanactntatacaagaatgaagctctgataccacttgttatacaagtggccttagatatcttaagaaggggggggggtgaattaagatattccaaactacctccccaattaagaatctatttcactttttattcaagttatgaattcccttaatgacaatcttcttaaatattgattcaaataaaacaatttgaatatgaatataaagcaataataaataaaggagattaagggaagagaaagtgcaaacttagatttatactggttcgggcacacccttgtgcctacgtccagtccccaagcaacccgcttgagaggtccactatcttgtaaatccctttacaagttctaacacaca

SEQ ID NO: 233662 - DNA, 380 bp, Glycine max
aggcaagaatgccctagcatctggtcctcagttatcaaggtcacggtgcaacgcaagtgttaacaacccacagttgatgcctttaggcagcacatattcccccaacttcatctcattggccaacacttaccttgtggccatagttgaaagcccataaagtcgtacactctcttgaattaccattgttagctgcacaggtgcacattacgagcaattgttgagattattaattaggatagcaaactgtagattgttttttttgtaacatattattgatataaaacatcaccggtttattgatgattaataccatccagaatcaattactcacttgaggggattcttttttcaatatatattattatccacaaacttaattg

SEQ ID NO: 233663 - DNA, 282 bp, Glycine max
gaaaaacaaagggcataccagtcattacatattcaggggcagcataaccatatgtacccatcactcgggtggatacatgggttacatcaacttgcggacctgctttagctagtccaaaatcagaaagtatggctgtatagacctatacagtcatttgggaacacagtgaacaaaataattagtaactattttataacagccacaaaatacaacacagattaattaacttcaaaataccagaaacttacggagtccaataatatattagacgttttgaagtca

SEQ ID NO: 233664 - DNA, 437 bp, Glycine max
  unsure (1)..(437): unsure at all n locations
tgcaagcttgccatgaatggtttcatgtgtactattaaataggctggtttaatcctgtcataaaacacaaccataaactaaaataagcatatgtgatcagtgtcaaaataaaatgcatccatttacaaaaccaatcaagaaaataagaatagattattacagctaaccaatcaacaagcctttcaggtagccatgcttgagaatgcttgtccacataaaatatttcaattaactcccacgcagctttcaaagatgtaggctcttcacctctctatattatgtgtaatgtgttaaaaagcaagtgattaacttctcggtatcataattcccacaaagcagatctcatctcagctaaacacggtaaaacaatntagaacctataacagtaccttagcaattacattngggtcctcaattataggactagcaggcaactt

SEQ ID NO: 233665 - DNA, 436 bp, Glycine max
taacctcacctcttgtttatccgttgatgacgccattgctacttcccctaaactccttatctttcctttccactgtattccatgctgtatggattctctgaaggatcctcacattggcttcattgaaacctcgtgcgacgaaaggcgcgatgatctcctccaatggtgcacctctcatatggtagcctcattgtcttatggccagcatgggattataattaatacaaccccttgttcctatcaaggggatgtttgggaatccttcacacgagcacaacactcctgtcccttctttttttcatcgtgggaactagctaatggacgctcctaccatacctgccaagagtttttcttaattacctttttccttttcggcgcacatgcgatgaccttgtatatgacagacaggctatcttcatgacagaaaatgttggat

SEQ ID NO: 233666 - DNA, 424 bp, Glycine max
  unsure (1)..(424): unsure at all n locations
agcttgtgaaanggcattgattgatatgtgatatcttaattacacatttgttccacaactcatagacaaatggactagacaaattaaagtgatctaaatgtcctaaccaagttgcacaaaaagtaacattcaccttgaggaggcagatttaaaattgctgtaggatgtgttcagcgagagaatcactaagctagcaacaagcagttgcatacccagttgtttagacacctcttgcaatccaatatcctatcacaaaattcaaaaaaagaaagtaacaatttaggcaataacacggaaaagaagcataaacacataagggtttaaaagggttaacataactaacctaccttgactgtaacatagaacaaggtgaaggacaagaaagctgaaagtaaacagtatgagcaagacgagtcagagaatc

SEQ ID NO: 233667 - DNA, 363 bp, Glycine max
  unsure (1)..(363): unsure at all n locations
aatgccctagaagaacactaagcctaaccaagatttaaacataatgtcatctcatcacgctaaagtcacattcaaacaatgaaatacacctttgaacattgtgctaagcataatccaggcaaggaaagcacagaaaattgcaatgatatcataactttcaaaatacataaagatagtgaaagaaagtcaagtcataatcaagaactataaggagttaaaacaccatgaacttctgtctcaagatgaaatcttagtactaaacagggtattntcattcttctcacgcacaatctccttaaatcttaccctagttttactcgatccttaacataagatccagcgatatcaccaaacacctcatac

SEQ ID NO: 233668 - DNA, 416 bp, Glycine max
  unsure (1)..(416): unsure at all n locations
agcctaggagcatcaggactactctncaatgtctgcggatatatatcatacaaaatcaacggcaccaacaccaacgacgccaagccaggaacaattgcggctntagcccaatccaaccacccaatagtttgattaatggaattcagagtaagagtcgcgcacagcggattcgccgccatcgccgtcaagaacatcgccgacgtaatgacggaggtctgaaagcacgtgagcatgagccacgcccccaacctgtgctccgtcccgtcgccggcgttgctcccgcaagccacgcacagcgccttcaccagcggcaggaaaattccccccgccctcgccgacaccgagggaatcgccggcgcaagaagcgcctcgctgaagaccaagctgtaacctaaccctaacgaggagctgccgaa

SEQ ID NO: 233669 - DNA, 428 bp, Glycine max
  unsure (1)..(428): unsure at all n locations
tgaaggtgcgacatcgaggcctaaggtttagcgtgtggagatnttggcatgtgaagggagttagtggcagagaagccattggcctccaaatcgagttccatcgcagcgccaccctcagcatcacttccaccactcagacacctcatccgtttcccaagaaaacgtttcaggataggaaacacactttcccggatttctgtatttttatttatttgaagattttacctctatttctaaattaattttactcttataaaaaataaattagactaatttctaagaattattaataaattttaataataatttaaatttttattatcaaattcaaaacataactaatattntaatttgcatattacataatataaanatactaattctatatattaaaattaaaattcgctataaataaatatttatgatat

SEQ ID NO: 233670 - DNA, 339 bp, Glycine max
  unsure (1)..(339): unsure at all n locations
gatgtggtggagaagatggaacttcactaacattttgggttaagggtccttaaagacatggagagggaatcggaagaacattttggatggaagaaaaatactccgtatatgatggacataaagtgtgttttcaagaaggttaccattgcagacatatantattccctggtacgtggagagtagcatttgtaaccccttttgagacgagaataactaaaaagaacacttgattgctcggcagaaagtttatctaacccgtggagagattatggacaaacaagttcaaccaaacactttgggtggacatgtaattagtgaacatgaggaaaatgattgagt

SEQ ID NO: 233671 - DNA, 339 bp, Glycine max
  unsure (1)..(339): unsure at all n locations
gatacaaacttacattctaatcatggggtaaggaagtgtacaactgatggagatatattacacttaattagggatgcttttgtaaatgagaatgagatacatgtttattttcatcatgaagtatatccaatnttaaaagaaatcccacagatgtttgacttggaatgtgatccaattcgaaaagctgttgagaatgaggatgatttagatgatgtacctgttgctggccatgaggaaggtaaagtttaattcatctgtactcgtgccgacatggttaccatacattaataaaatgaataaattttactttatcaccattgatgcagatgtttgtgctgg

SEQ ID NO: 233672 - DNA, 434 bp, Glycine max
  unsure (1)..(434): unsure at all n locations
agcttttggagtagaaacatgggaccaacttattttatttcanaaaaagaaatcatatctagtcaaggtctgagagaccatacaagtttcctaacgatttctaattatgtgggccattaagtctatcatatgctgacaatagccgagaagcccatgaatctcttcgggggcggagtaggtgtctgccatcgccttggccttggctaacaatcggggaagttcttgactcccgttcaaggtaagagcaaaccgatccatccacatggttgcctcttggtgtaaagagtcgatcacccttcctctagacctctttttcgcatatacttgggcatactcatccgcgattctatgctcgtgggcccgggctagacccaactcttcttgtacttggcgatgatagctaacatgttgggttctgtctcgcatagatgctg

SEQ ID NO: 233673 - DNA, 357 bp, Glycine max
  unsure (1)..(357): unsure at all n locations
ntattagacantgggaaaacaatgttattaatagatcttatnatagatataagatctaagaataaatgtgaaccctttggcagtcaacacanagaaaagtagttagaataacacataagaagttataatggttcataacatcaagactaaacggacagaatttattaatagataaaaaatagatataagatcaaaaatagatcaaaaaccatgtttatcatctgatgtagatttaactaanaacatatactatgtatttaagaaaagctttattagacaatgggaaaacaattttattaatagatcaaaaatagatataagatctaagaacaaatttgaaccctttggcagtcaaca

SEQ ID NO: 233674 - DNA, 414 bp, Glycine max
  unsure (1)..(414): unsure at all n locations
agctntcaactaaaagaagatcttcaggttgtggatacaagttattaacaactatttcgaaagtgcaaattaggttatgagagccttcttttagggttctcaaagcgtattagaggcttcttttcaatggctactagatgtagttaagtctttacagaactgagtgaatgaactgacaatattagaaaattacaggacacaagaaatacctccattattatcagttaatggtacaagagtcttcaagtgcacatgcagtgcatacaataatcaaaatcaagacaagcacaaaacatgcaaaaagtgcacaaacatatacaatgaaaaaaaaacaatataaaacccaaaataagcctgtaccgtgaataggtgttctcgctctccanacctccaaacagcgattcaagcaagcaa

SEQ ID NO: 233675 - DNA, 435 bp, Glycine max
agcttatgctgcaaacatgtacaatagactcttctaacctcagcagcaaaatcagccacaacagaacaattatgacctctccagcaacaggtacaatcccgggtggaggaatcatcccaaccttagatggtcgaatccttcacaacagtagcaacaacaaccttattttcaaaatgttgctggcccaagcagaccatgcgtttctccaccaatccaacagcaacaacagcaacatccccaaaaacaacaaacagatgagggccctctgcaaccttcccttgaagaacttgtgaggcaaatgactatgcaaaacatgcagtttcaacaaaagaccaaagcctctattcagagcttaactaatcagataggacaattggctacacagttaaatcaacaatagtcctagaaatctgacagattgccttctcaatcttt

SEQ ID NO: 233676 - DNA, 459 bp, Glycine max
ctagtctctgcagaacttcacacaacagaatctctcatttctctctggaacttggacctttctctctctagaatctctagacatgaaaagctctatatcccagtccaaactccctctctaaaatctgatttcaggcttaaataggtggcctagttcgtgctcatgcacttagcgcacttatggaccgcttagcgcacattagtgaatattggcttaacgcgtgcctttcttgcttagtggatgaactgaagtggcgcgcttactaagatgaagtggtgtgcttatcgaacctgtacaactcatctttttctatagtcttcctcgcgcttagcccatgagtgttacgcttagcggaagctcgctaagccagcagattggcttatcgagaaggtgaacaacaatcattttcaaagcttgcctaattaacctagaattagagaaaatgatttttaacacaca

SEQ ID NO: 233677 - DNA, 444 bp, Glycine max
  unsure (1)..(444): unsure at all n locations
agctntaagcaacataaacactacttcttgttttctaggttgaaatcgctggtgctggcaacttaaacatacgtacttgtaaaaattactgggaattggtcactgtgaattttgagctgaaatttttactgaattttctagacatctggaaaacaattataaaaaaagaaaaaagttatttggataaaattaaaaaatactaaaaatcacacaagttggcaggaaaatcagtgtccaggaaaaaaaagtgaaagggaagtgtgcttgttgttttggctcgaaatttgtccataatttgtgtctattttataccaatcatagttctgaaatttcaattgaaaattagtgtgaaaaaagtgtcaaaactagaggtttcttgagtcttatntttttaagtttttttactctactctagagccattctaggtttctctttgagtccta

SEQ ID NO: 233678 - DNA, 340 bp, Glycine max
tagatatggatattaagttgaaagtaaaggatattatgtatataacatcttctaatatgatgagtgcagaatgttggactgtgcccgagtgagttgcatatacaaattggccatttggtaatctaactgtgatggggttaatctggtgatatgagtgaaagtttgttaatgaaaaagacacatgatcagtagctcctgaatctaatatccaggaggtggaatctgctttttcgtaagaaagaatggtacctgttgtatcgtgatttgaacaagatgaaatggaagcaacctgtgacttagttgatgctgagtttccatcacatgggtgttgtattacagc

SEQ ID NO: 233679 - DNA, 380 bp, Glycine max
ttcttaatatttactctcaattagtgccacaacagttggattttcatcaagaaatttgatgagctatgtatgataatagttgtggtatcatggcctgcaaccagcagagttaatatattgttcttgaattggttatcttcttctccatcttgtctgctattttcatatctaatgctaacgattctaagaaatcttgtttaatttcttggcaactctccctctgaaatattatagaatccaacatctagtgcataatatcccggagcatgcacacatggatagcatttaatttgtatccgaggaaaggagaattcagcgatcctcataattgaatcacggaaccttaccttgttagtggcggttcatgtgtggttagttgc

SEQ ID NO: 233680 - DNA, 408 bp, Glycine max
  unsure (1)..(408): unsure at all n locations
ngccanacgctcgctagaaatagaatatnatgtgttaacagtacgtagttatatttcattcgaggagcttacttcacgtacagtaattntaccaaaatgtacttgtcttatttcgtttaaggagcttatttcacagtttcaccttctaatgtggtacacataagatcacaaacaacgctaactaagggaaggaaatgggtatttaaaagaaccacggttccaaacatagatttattctattaatataagaaaaacaacaattngccaatatatttatctattatatttataatatataaaacttgatcaattgcagaatattcaatgccatgtaagccaaatttagctatttcgtttctaactccctcangcacatattgtcttacaatgcaantctatgactggatg

SEQ ID NO: 233681 - DNA, 426 bp, Glycine max
agcttcagaccaaagcatctcaaaatctatgtatctaaaacccctcaatttaatggattttcaaggtttgagaagtgaaaatgagaatggggtaattttggagcaaactctcatctcaaacaaaactatgacattaatctaaactcgctcaaactggttttacgacgaaaactctaccgaatcaaaatttgactcctcaacacccaatttaccctagaaatggctcttgccttcactttggtcactcattttcctcctttgcacagcccaagctttcccacaatcctaaatgacatttcaaactaggattaactcactttaacctcctgtcgcaacgtgcccttcgcgggcgagcgagggcgaggctcacaggtgcgctttccaaaggaggaaagatgcgtggagtcgccaccaaccgttatttgt

SEQ ID NO: 233682 - DNA, 403 bp, Glycine max
  unsure (1)..(403): unsure at all n locations
ntgcacgtatcagtcaagtgtatgtgccatatcgtatctcaagtgctcatcgataattcttccagattaaacgtgatgcctaagagcancttggagaaattaccattcaatgcctcccacttaaagccgagttcaatggtggttcgtgccttcgacggcacccgccgagaggttaggggagagatcgatctcccagtacagataggccctcacacctgtcaagttactttccaaataatggatattaaccccccctacaactgtctgttggggcgcccgtggatccactcagtgggagttgttccctctacactccaccaaaagttgaaattcataatggaagggcatctggtcatcgtattggcgaagaaacatcttgtgagctgccatcttatgcctatgt

SEQ ID NO: 233683 - DNA, 401 bp, Glycine max
gctttaacctcatcatctctcatagtctttatgattgggagccaatccagtccttgtgttcggactctcagccacttatgatagccgccgatgatcccattactgcttcccctaagctctctgtcctttcttcatgccgcatcccatgccttgcgaactccttggagtacctttgcattggggtcactgaaaccccgtgtaatgaaaggcgtgatgcttttgtctaatggcgctcctctcacagggtagccaagctgtcttatggtgagaacgggattataattaatacaaccccttgttcccatcaagggaacatttggacatccttcgcatgaagatagaatcctgattcttccttccttctagcgagggaaccaaataacagacgcccccccatgcta

SEQ ID NO: 233684 - DNA, 315 bp, Glycine max
attgcatttgttagttattgttgttggatcaagtggcctcagaataattaagaaggggggggggggttgaattaatcggtaatgaacctctactaattaaaaatctacccttcttatgcttttactataatggttagaaagtaaagaacagaagttgaaacttaaccaaaagtaaaagcgataattaaagtgcacagcggaaattaaagagtgtagggaagaagaagacaaacacaagagttttatactggttctgcaacaacctgtgcctacatccagtccccaagtgacctgcggtccttgagatatcttttc

SEQ ID NO: 233685 - DNA, 346 bp, Glycine max
  unsure (1)..(346): unsure at all n locations
agcttcatacttaaaacctttgtgtatctattatactaacattnaatcatttccttggaattacaattgaaaaccctaatggaaaaactctgtaaaacattatattccaccaggactcagatatcgaataataattaaataatatccttaaagtataaaatctataaaaataattattagcaaaaagtatttcaagttaatataaataaaacaattataattgaccaatgcgtgttctttgttttcttgtttaccaagaaaaaatgatagggtggattatntttcaggaagcatagtcaaacttacgttatgccagtccctgatatatcaaattccaaatgtatgc

SEQ ID NO: 233686 - DNA, 348 bp, Glycine max
  unsure (1)..(348): unsure at all n locations
tctgatcctaccttatacaggtttattgttggggtcttgcagtatgctaccataacaagaccagagattagtttttccgtaaataaggcgtgtcaattcatgtcgaagccttcggagcagcattggttatctgtaaagcgaattctgaggtatcttaagggtactgtcaatcagaaaaccatgaacaactcgcagaaagtgtttggagcatggtcactgatttggggctgacaacaggtaattcacaaaggaactttgttcaacagctgctggaatnggagaaaagagatggagaagaggcagctagattgtgagctacgagacggatcccatgaatattatttcata

SEQ ID NO: 233687 - DNA, 285 bp, Glycine max
tggtccggtcatggattgcaaacacctgattggaaatcaggatgttaatactcttggttatattcctagaactgtcaatacagctgcaagatactctgcctaggctagcttttgatgctcaggagattcctttcaagattatgtccattgagactgacgacgtaaggcctgtggcccttgttttgcgaacggaaatagttattatcagaaataagactgtctgttcctcctaaatagtcatgagaataagaatccaatatgttcatacaccttatatccttaaaa

SEQ ID NO: 233688 - DNA, 390 bp, Glycine max
cactcaaattaagataaccattatctactacaccaaaactatataaatccttgttcgcatgtatttctgcagtattagaatgttgacatgtgcactaaaaaatataaaatgttattagtaatctcctctatacgatgatagcacgcgaatatatgccttcttctatatcaatcttttagttttagattttaaatcatttttaatcatgattcaattatttctgtcattatttattaataaaatgacattatttaatccgtacttatgttgcctacattcacaatcttaaaactatgtaattgcttaacatcgcgtatatgcaaatagcaataacttattaaatttaactacttaatcacatgttttatctatagaaactattaataacac

SEQ ID NO: 233689 - DNA, 437 bp, Glycine max
  unsure (1)..(437): unsure at all n locations
agcttacaaatctgttttaagtccaagcccatatataaaataaaatctgggcaagataagataagatntgataaaataaaatctagatgaaataaaatctagataagataagataagataaaatctagatgaaataatatctagatgagataaaatctggataagataagatttgataaaattgtctgctctcttcaagtccaacccaattctggattcaagcccaattgcttacaattctcctgaaattaaattaaaaacacaaaattagtccagtaggcccaaatgataaaaatgcataattaatttgacaattaaggctaatcagtaattcaaatggtgacaaaaagggttaagaaataggagaaaatgatgacacatcagcggtacttgcgacaacaactgtagccgcattgacctccatcatccttctcata

SEQ ID NO: 233690 - DNA, 303 bp, Glycine max
atgtgccccaacagtattcaattgcaatagtctatgtttgtctttcgcaaaaaattgcttcatttgagaaaagaggatacaagttacactaggtcaatccacgggttttcacttctgaaatccaaagttttaagtggtggggggtgtagtttaaaatggtccaaatccattgagaagaactcaaagctagctaatgaggttagattggcgttttatagtagagtgctttttcatgaagttttcttttaagttaggcataatttatattaagtaataaaatagatcttagctatgaatcataca

SEQ ID NO: 233691 - DNA, 290 bp, Glycine max
atttttaaatcttttctcaagtttttggtagccttgaaagaacagataagttagacagaagttcatgataagtctttctaagagacttagggtcatcaaaatctttttaatctgattcagattcctcagaagttgtatctgccatcaggcatatgttggcttcttcatcatcttcattaggcgaagtgtcatccagatcttcccaggtactcaaaagacccttcttttctttggtcttataggggttcttcttggcctgacccttctctagttttgggcaatcagaattg

SEQ ID NO: 233692 - DNA, 453 bp, Glycine max
  unsure (1)..(453): unsure at all n locations
gaccttaaaactcagcttaacgccaattaactaatttcttctagatatgcaccattggagatgctagagaggtatttagactagaagatatgccaaggcatgccatttttactatggagttaatgtttgggatgctatgctaatatatggtttcaagggattcccatatgcttttaatctaactagttnttagaacaatgtgatacacaggataaacagagagtttaaatattttttatttgaattctatttttttatttatatgtaaaaatgaacataaatatctatcaaaaaatatgataacttttacttaaattttttttttgtatctaattaatgtcataattttatcttaataatgtatttacttttatttatataatggaatagaacaatcaaacaatatttactaagaaaacatatgaaatatgttaaatcacaatagaaataata

SEQ ID NO: 233693 - DNA, 436 bp, Glycine max
  unsure (1)..(436): unsure at all n locations
ctgcaagcttgtaggagtatgggagaccttttatatgtggnactaagnggcggncgggcgatggtgcacaacaagatttccacatccacaaagtgcgcataaacccaccatcccctggtgcccacctccaactgagctcacgtcctcccacgtagcccatatcctcatttctttcaacaccgggtccccatcaatcctcccaagctttcccaacatcaaagcataacaacattcaaacagcacaagctatcacagccaagcaaaacagagcaaaggcagataactctgccaaaacaccaaccaaatcacagcttttctcacttaaagaccctacgtacaatatcttcgatccaattccgtaaccgttggatcgactccaacattttactggaagtctataatacataagcctacattgtgaccgttgggatctact

SEQ ID NO: 233694 - DNA, 361 bp, Glycine max
caccatatgtcttcaattgcagaggagagtgttcaattagctcatattgcgaatttttccggtttgatcctaccatcctccttggttgtgtttgcagtggttatctagcacctgaatatgcaatccgaaatcaagtgactacaaaatcggatgtatatagttttggagtcctactattagaaattggtagtgggagacctaacacaaacagacgtttacctgttgaagaacagtatcttctcacaagggtaagcattaaggaccttctctttatgcaatattgaaaaataaatgcattatacgtatctgaagatttacgtgatggcgtgtgatggaatatccatatagaagaaatttattt

SEQ ID NO: 233695 - DNA, 424 bp, Glycine max
agcttgtaagccacgatagtcaggtgctatcagtatcacccctactcatttgcaagtccaggcttacatgaaccagtcgaggttagtagaccttgctacgacatggtatcatgccacgaataggggcttggtgaatgtgcttttagagaggcaacaccaggaggtgtcttccttccacctgtccgttaaagaaatgaccatcacactagatgatgtgtcttgtttgtttctctttcttgtcataagcaagcccattgatcatgtcccgttattcttcaacataaaggcagtgaagatcctgttaatgagtcatctgggtattctgatagtaacaaaggcttccacagcggcaaacgcaggtgtcagggtgaggttgacgtggttagaagacctttaccgccgctatgttgagtcaggcttttat

SEQ ID NO: 233696 - DNA, 457 bp, Glycine max
  unsure (1)..(457): unsure at all n locations
ctaagcttacatctttttanaaattggaccagtacttgacctagtcaagatatngnngtgatgagtcgntgatgagtaattgatcaactgatataagtaacataaaatataaatatatgtattaattgtgttgtaagtttaataattaaataaatttgttttttgttcaattttttagtatatcatttntttttgtatttttattaatttttatattaaaaatagttaattttggtccaaccaattcaaccagattgattcactgattcaattggaccgattatcaactcaactattgtcccggttgaatcaaactgagtcacactatgacgattacacgactgatacaataatcaatttgacttgatcagacatctagtttgctgttgggggtatatctgggtttgggttttaaacatggcactaaagttgctatcactttctttgctccacttac

SEQ ID NO: 233697 - DNA, 390 bp, Glycine max
  unsure (1)..(390): unsure at all n locations
tagaagagaatgtgcatgtgattggaattatgactgaaaatgttagttagtttgtcagattgattgtgaaggaatgcattaaccatatgccagtgaaagtgtgatccttaaattttgagagaaatgactatcatttagtactgatttttgcgtgaatctttgaagtatggactgaatgcataaaattgaggatgatgaaggccatgtttgattatgatagctacttatccaaaaagttgaccatgtgcttgaatgaattatcccttgtacccaggttgagctgaatgaattattgagtgattgaaccctgagcctatacagnggtatttcctgctactttgacttagggtgtaggagagcatcatccataagaagcgtcgttcaagcaaa

SEQ ID NO: 233698 - DNA, 463 bp, Glycine max
  unsure (1)..(463): unsure at all n locations
tgaatcccagccanaactacgttcacaaaatcttattttatgcttaaatacatggctttgttcgcgctcatgcgcttagcgcaattctgcaccgcttagcgcacattattgaatttcggcttatcgcgtgcctttctcagttagcggatggactgaagtggtgtgcttattgagatgaagcggtgtgcttattgaacctgtacaactcatcttcttccagattcttccttgcgcttagccaatgggtgttgcgcttagcggacgctcgctaagccagcggattggcttagtgagaaggtgaaaaacaacacttcataactttcctaattaacctanaattgagagaagaagattattatacacacaaaacagaactactaagtatttattacctatctttaactataagaacttttaacacttacaaataaccatcaaatggaatagtttgatacaattacac

SEQ ID NO: 233699 - DNA, 413 bp, Glycine max
  unsure (1)..(413): unsure at all n locations
agcttagcatgatcaacatctaccatgatattctngagggagggtgttgagattataactagttagttgtagtcttgtttagtagtagcttgtatctgagaatataaatactttgtaacacacactttacaaatcaatcataatatttttttcttctttcatcttcattctctatttttctctcctctgtaactgaatcctaaccaactcaacaggattgtttctggttgataggattgagtggattactttgatgcatggctatatacaatagatccttggtactgtcgactgcgttttaaaaggtcatggagctttttgaacttactttctaatgaatgaatgcatgacaagaaggatcaagggtgctaatctgaatatgtaacttcaccaaatatcaattgacatgtatt

SEQ ID NO: 233700 - DNA, 460 bp, Glycine max
  unsure (1)..(460): unsure at all n locations
tgtcacttcanacattgattggatgcataagtacaaatgctctagtatgctattggtacaacctacgaccgctgaccaggttcttntattattattattattattattattattattattattattattattattattattattattaattgttttgcctctggtgaatagaatgaacaattaccctttacgaccttgattcaatgtagcatttggaaattggcctccttccttatgtgtatatcttggtctctctacttttgtttggaatttctattaattgttttgtgaacttagtataatttttgttgagcactgtactgcatttccactgtaaaaaatataatcattatatatttctaaatcaggttatacatacatctgataaacaattgtttataaatgattatttgtattgatggtcattgtgatattagatgtgtgatacacccttgtatat

SEQ ID NO: 233701 - DNA, 412 bp, Glycine max
gcttatgagaagattcggaatcatgtatgtttgatttcaagattcaagagaagaaaacaagaagacttcacaagagaagtattgaaaagatttttcaaaaaaacaaacatagcatagttttgtttttcaaaagagtttttctgaaattttctaagttactagagtttttactctctggtaatcgattactagtttcctgtaatcgattacaagtggcaaagtttgatttcaaaaagtttttaactgaattttcaactttccaattgatttcaaaatggtgtaatcaattacaagatattggtaatcgattaccagtgtatctgaacattgaaattcaaaatcaatggtgaagagtcatatcctttctaacaagctttgtgtaatcgattacatgggtttggtaattgaatac

SEQ ID NO: 233702 - DNA, 428 bp, Glycine max
  unsure (1)..(428): unsure at all n locations
gggttagtattgagaagaagggtttcaagttcttgtgatgagatggacaggaaaaaactcaaaaaaaaatttcagttgtccatccgctaagcacaacccttgcgctaagcgccatgtcttcacacgctaagccgttgttgtttgtactaagtgctatgacccttcaccaattggtgggatggttcagctaagtgcacatcactgcgctaaacccaatttctcctctggaatttaacttcactgacttgggcttagcggagatgatgcgctaagcgcaattcattccctgttgaaaaattattgtagtagcgctaagcgcactgtcctgcgctaagctcattttcctctctggaattaaactttcatgaaatgggcttagcgacaggatgtgctaagcgccaatccttcactggttntgaaactcatgg

SEQ ID NO: 233703 - DNA, 366 bp, Glycine max
attcttgtaagtagagatgtctatgttcatgagaagtaacaccaatggagttgggaggagttaataaagaagcaactaccaagaaattccacaatttattgatgatgatataaacaactttccagttagaggtacaagactcttatctaaatattatgagaagagtaatgtatctatctcagaacctgctgattttaaagaagctgagatggatgataagtggatagaagtaatgagggaagagctaaagatgatcgaaaagaatgacacttaggagctaatggatagacctcaacacaagcaacctataggagtcaaatgggttaatagaactgagctaaatgcatatggttccataaataaata

SEQ ID NO: 233704 - DNA, 368 bp, Glycine max
  unsure (1)..(368): unsure at all n locations
gagtccaacattcattntgtataccttttgtcataccctaannttcgccggggacctttgcttgatgacatgcgacctttctttggtccttgtgaggtgcttggcacccatcattatgcaanttgtgaaattccaggacatgccagaaaaccaaaaaatattgatgcacaatccgtaagtttccgtgacacaccgganatcaaatggaagcatcgttgcataattaagtgagattccgtaacattccgtaagtcaaaaaggggatgattatgtaatccgcaaggttccgtaacattacggaaagaaaacaagtatcgttacgagattcgtaagttttcgtaactttacgaanaaagaaatcaccaaaa

SEQ ID NO: 233705 - DNA, 417 bp, Glycine max
agctttgcggatactgtatattcatgatgtttttgtcaaacttcaatgaccaagtggtctacagcttgatctttgctgtccttatctataatatatataaagggaatacaagcgtcttggtgtatctataactatatataaaaggaatagggtcgtttggtgtacacatttctatacccattgtatccctataactacattcataaattttttattttatccctataactacataaaccatccactaacttctattatcttttcttttatttaataaaaaagtagatagacacagtgtgcttgtttccccctagttattctaataaaaagctaaatttgatgacacagtatgtgggcatgtattacccacacttaagcctatacagctcttgcataacgggatgtgttatagacata

SEQ ID NO: 233706 - DNA, 424 bp, Glycine max
tctggttttctatatttgccacgtcgcgaggatgtcgcctattcatttaattattactccgcggatcttgggatggcgtcaatggttcgaaatttattcttattgttctaattattattatttttcggagttgatacttccgattcatgattggttcatgcttgggattactgctggatctatatccaaagggggaaactgggcaaagaaaaaagcaattaatacttatttgttatatcgagtcgagtttacacatgaataattgcttactggaagacattgtccttgttcttgtggttacgggactggaaaggctgctggttattacatttttggtttggttaactactaaccagatatattttatttgatttggggcgggctcgcagtttctttgattacccagaaaatatatctacactat

SEQ ID NO: 233707 - DNA, 430 bp, Glycine max
  unsure (1)..(430): unsure at all n locations
agcttcatgatgatgatcaagtgtgaatcttgttttttgatgatgacaaaaagcccaaaagaatgatttcaagattgagtcaacaagttcaaaatcaagattaatttcaagattcaagagaagatgaattccagattcaagagaataaatcaagaagacttcacaagggaagtattgaaaaggatttttcaaaaaccaaacatagcacagttttgttttacaaaagagttgtctcaaatttttctaagttaccagagtatntactctctggtaatcgactaccagtttcctgtaatcgattaccagtgataaaatatgatttcaaaaagttttaactaaattntcaatgttccanatgatttttaaatggtgtaatcaatcacaatatatgggcaatcgattaccagtgtatctgaacgttgaaattcaa

SEQ ID NO: 233708 - DNA, 419 bp, Glycine max
  unsure (1)..(419): unsure at all n locations
tgtccttaaggatgacagccttctctacttcttcctttgtcttcttttcatagncttctttgctcttggtcttcttatagcatatgcaagagagcattgcttggccttcgcaatggcagcaacttcgactttgttgagagggggtgaagcaagcttggatgttggttatgaagggctaacaaggtgagggtacatgggtacgtgtttctaagatttccacctcaaatgatggtgtggctggtgtatgtctggaaggctccaggttctgaataggttgaggagatgatggtgtacgttcacgtgttggtctggtttgaaaaagcttgattctatggtaggctatttggtatgggtgcanggactgagtaaagtatgaacccttctcttttggggtagatgaagcacgtcttgtgtttgct

SEQ ID NO: 233709 - DNA, 422 bp, Glycine max
  unsure (1)..(422): unsure at all n locations
agctntggcatatgttggttgataaaattgtatataactgagctagtttcatgacatgcaaatattctcatatggaagagttgatctctgttaggtcatgtgatgctggtgttggtggtatgttttggagtacttactacttaggaaggtcaatgaatccctcttaatgatttttaaatttccttttaattttgttgttttgatttcattacgattctgacactgtagctntataaattaaacgtacacagcctagtcagcaacttctggcatatggttttagcatttatgaagcttatattagcatcatacacaagtaacatatgcaagttcacaatgaaagcaagtttgagaccttaaactaattaggatccatgacctaacgcgtacaagctaactaattgttcattaaatttgacatg

SEQ ID NO: 233710 - DNA, 469 bp, Glycine max
  unsure (1)..(469): unsure at all n locations
ntggctaattcctcctctgtcgtagaaaatgctagacctgcatcattatttacaggttagaagtcataacagcaggacagttntatgtttatggtaaataaaaaatacatctgctacaggtaacacaccaaaagcaccttgggatccaaaacagaagggtggaagaaatcaagaaaatagtcaaagtgcactcaaataaacctctccacaatttaaagtacttcaggacttgggtggcttcatgaatcctattaaagaccacaagtaattcatattgcattgccattacttactgtgtagattaagtaggtatcattcagaagttcttacattaggtattcagactaattgattaagtatatcagaagaaagcattcaaagaaataaaattcatcataggaaacagtaaatgacagcatgagaatcatcanggctgacaaaaaatcataacctgtctctttattatata

SEQ ID NO: 233711 - DNA, 434 bp, Glycine max
  unsure (1)..(434): unsure at all n locations
catgcagctcattagangttgcatttcaatatttcttcttctaatgaaagaacggtatgcacctcttacattatatattcgattgattgtcgtataattattggcattgcgttcctttaacattagcagaatgtttcttggtttcatcattgactttgtcatatcaacaataattattttttcatccttagtcaatcatccaacgtatggatgtccaactaaggactttgtcaattcatgattgtcacccacacatcaacttcaccatccaaccttgtccttcaaccactaatttcccacgaagcttgaagggacactcacatttcctactctcagtatctcttctaacaaaatctttcttcctagacctatactaaccactcctttcacaaccacttaacacaaatgaaatcctttctctactatcagtgttt

SEQ ID NO: 233712 - DNA, 451 bp, Glycine max
cttacgagggatcgaggtttattatttatgctatcacatagaacacaaaagcatgattgattagagaaatatcttcatatacatcagcttgtttgttagaaagacccaacacttttacctacggctgtcaactttaattacttacaaatttactatttttaacatagactttattttaaattctatttttaatcatcaaccatctatgtttgtttcaacaatgccttatttctgaatataactctgtctaacactagctccctgagttcgatacccggattcatctattttaatattaaatacttgacgattcagtgcactttctggcaaatccgatttcccttgaatatatttgttgaagaaaaaatggacaaaaagtaactgccagggaatatccacagttatgcaatagattcactaagactcatcggatgcctaagagtacatgaca

SEQ ID NO: 233713 - DNA, 381 bp, Glycine max
  unsure (1)..(381): unsure at all n locations
cgctcctgagnttgacagccatcgtttcaggagcgcagagcaccagcaacatttcgaggccatcaaaggatggtcgttccaccgagagagacgcgtccagctcagggacgacgagtacacagattttcaggaagagatagctcgccggcgttggacgtcgctggtcactcccatggctaagtttgacccggatatagtcctagagttttacgctaatgcttggcccacggaggagggtgtgcaggatatgcggtaatgggtaaggggccagtgcatttttttttatgcagatgccctcagccagttcctggctgacccactagtgttagaggagggccaggagtgtgagtttattcagagaaggaactgggccgatggatt

SEQ ID NO: 233714 - DNA, 415 bp, Glycine max
  unsure (1)..(415): unsure at all n locations
gcttctgcagaccaagaaaaattatcttttgtcaacatgtcatttattggttnggctatggggttatatctacacacaaaccttctataatagcctaccaaacccaaaaatcctctcaactgtttgggggtttgagaaagaggccaattcctaactgctgccaccttatcagggtcagtagagactccctctccaatgataaaatgtcctaagtactccactcgagtaatcctaaagtagcacttagatttcttggccaaccatgcatttgctctcatggtagacaagactgtttgtaaatgatgcaagtgatcctccatgctcttcctgtaaataagaatgtcataaaaaagaccaacagaaacctcctcaagtattctcggaacaccgaattcattaagccttgaaatgtggc

SEQ ID NO: 233715 - DNA, 383 bp, Glycine max
  unsure (1)..(383): unsure at all n locations
agcttttcgcanagatacggtgaaatctttgtcttatccatgtgttaagtctctacatattgcctcccttgcccagtattatgatcagctgataaggtgcttcacatttgaggacttccagctagtgccgactgtgaaagagtttgaagaaatcctgcgatgcccactgggaggaaggaagccatatcttntctctgggttctatccctccacgacaagagttgccaaggtagtgaaaatctcagcacaagagttgaaccaggtaaagcaaaattggaatggggtagtccgagtatcaaggaagtgtttggaggaaagggcaaaggccttggcaaaatcaaggcgaatgggcttctttattgacatcttggcgcttttgatct

SEQ ID NO: 233716 - DNA, 372 bp, Glycine max
  unsure (1)..(372): unsure at all n locations
taagaaagagtgctantttaatatcaccttcttgttgccaaatgattttccttcttaacaatcttcttggaggaatccttttactcctttgtcttccccttggcctttaaagacaaggccttactatccttccttttcttttgtttttctaggtattcttcctcatctctcttatctttcatcagtaantggatctctggccacctgtgaaggtggttgatgatgcaacacaaatgtagtgccagatgggtgaaggtaatttcattagttacgcctttgtaaatgatcttcctatcaaattgcatggctttcctaaaagaatatgttctgccttcatgggaactattcacaattacttcatcttatatgtcc

SEQ ID NO: 233717 - DNA, 406 bp, Glycine max
  unsure (1)..(406): unsure at all n locations
agcttgtcaaaaaaggaagcaagttttattctcctttctaagaaaaaacgttgtttccacttcaaaactccttgaactacttcacatatttatttggtccctcaagaactatgagtttaggtggaaattactatggcttagtaatagtagatgattactcaaggttcacttggactttgtttttgaaaaccaaaaatgaagcttttgatgcttttcacaaacttgtcaaggtgattcaaaataaaaaaaggttttaacattgtttcaattacaagtgatcatggagatgaattcaaaataagtctctgaaaaactctngtgaagaaaatggaattcatcacattttttctgccccaagaacaccttagtagaatggtgttgtggaggggaaaaatatatcccttga

SEQ ID NO: 233718 - DNA, 236 bp, Glycine max
cacccatggcgttcaacataaataaagagagaggtgagaggaagcatcatccactattgaataagccattcatggaggaacttcgcctccaacagagagcctcgtataaaatactgttagtggaagcttcaatggttgtaaattgatgacagctccattgaatcgtgtaagcttatgatcttcgtcattaacggattctcttgcttctaggaaaatgaatggcctctgattggtta

SEQ ID NO: 233719 - DNA, 287 bp, Glycine max
taaggatttcagtgttcactggactctgcagcttgttaaaatgctctaacataatttattgataacacttaaaatataggtaatattgtagacataaatcttgtgaaatactcctatatatttatattcagacatcatgaattattcaaaatggagataatctggtcagcatgattacatgcaccactgattccgctccgcatcttgatgaaagctcaatgctagccggatggtgtttctaacgaccatattgaaaatatctcatacacaactgccacttatattac

SEQ ID NO: 233720 - DNA, 375 bp, Glycine max
  unsure (1)..(375): unsure at all n locations
ttcagatcgaggctcagacacgagagagatttcttgtttctggaaaagnaatgcctaattcggcacacaacaatgcagaatgaaaatgacgaaaattcaggggcgcgatctagtgagagaagagaagaaacgaaggaaggattttataccatcgaaacgctcttctaagaagacattggcggaagcgatggacaagagagagagaatatagagagagcggaggtcagggcttcacacccgaaacgccattgtcaacgacggaacgacagagctagggatgtgtagaaatgaacgtgagaagttcgaacttgagtgagtgaggctacctgttctatatagcggatcaatttgctttgggttttcagtggagtggac

SEQ ID NO: 233721 - DNA, 414 bp, Glycine max
  unsure (1)..(414): unsure at all n locations
agctntgagccaaaatgctagctcaccatttaccttgacccagggggagaatgtcaatccttaccctcggaagcaaaaaagaagagaaggaaaatttccaatcaatgaaaaaaaagagaaggaaaatttccaatcaaagagaaagcaaaaaaaagagagaaggaaaatttccaatcaaaggaaaaaagagaggaaaggaaattcccaatcaaagagtgggagaaagcgaaaagaaaagaaagaaaattcccaaccaaagagtgggagaaagtaatcagaagaaatgtgcagaaaggtctttggaccggacaatatctgtacaatacagaattgtcaccaaatgaacaaaaaaagggaaaggaaaccacgacctgaaagtggtcttcttcctttgaataccaaccaaaatcctgt

SEQ ID NO: 233722 - DNA, 399 bp, Glycine max
  unsure (1)..(399): unsure at all n locations
tctanactntatacaagaatgaagctctgataccactttttatacaagnggcctcaaatatcttaagaaggcgggttgaattaagatattacaaactatttccccaataaaaattctatttcactttctattcaagttacaaattcccttaacaatgaattccttaaataatgattcaaatagaacaatttgaatataaatataaaaaaataataaataaaagagtttaagggaagagaaagtgaaaactcagatttatactggctcggccacacccttgtgcctacgtccagtccccaagcaacccgcttgagagttccactatctggtaaaatccttttacaagttctgaacacacaaagacaatccttcctttgtgtttcagaattcttttacaac

SEQ ID NO: 233723 - DNA, 411 bp, Glycine max
  unsure (1)..(411): unsure at all n locations
agncttgaagcatgttgtgaacctttttattttactcactctcactccattgggaaaaaaataagcttccactgaaattatcatagtggacttaaaggcaatttaatattgtgattttgcaaaaagtcaccgacaatattcatttttagaaatgcgtttttaatattttctttttgacatattttgttattttagttctagtattaattaaaattcattgaaagctataaaagtataagattcattaaataagtgaaaaacactgaatgtttaattttcaataaattttaataaataatatagagttcaattcattgaggtgataaaacacattctagtgaggttgccactatactacatcatcaaagttatgtatcgatatatgtgcggtgaccatacattcttgcatat

SEQ ID NO: 233724 - DNA, 381 bp, Glycine max
aatagaggcaactttccttactcttgaaagacactgttgattgtagataaatcacgatattatcatcttaaacgaagtttatatggtttactaacattggttatacctcaactgctattattttaatgtactattttcatagtgtgagggtgagcctttatgcaacggtaacggtgctatcttttgtaacttggaggtcataagttcaaatcttgtaagcagtctctctgtttgagtgggttgtgctgaatacatgtactacatttttgtccaacaaaattagtactagagcaaattaaaaataatgtgaagtaatactgttaaattataacacccattacctaattaacctatctatatgaaaattcctaaaaattttta

SEQ ID NO: 233725 - DNA, 423 bp, Glycine max
  unsure (1)..(423): unsure at all n locations
agctggcattcatctctatctgacaggatatttgtaagtaaatatggtaagtaatttgagttagaagacttttgttatcttgaattgaagtgtcattttttttctctaaatttttctttacaataaataaataaattataaagatcaaatcaactttcttttaaggattaaatacaaaatttatcatggtgctttctagccgaccaaacaaaatggtgctttctaattacaaacaccttaaacctattttntattagagaatttctatggtacctttgaaaatctaaggattttgacattgttattgagaaactctccttttttcttagtgtgctcaaactcattcgacggttgaccaaatactaaaactctttgattnttaagggtgtaccatatatagcaactaaattaaccatgacaaca

SEQ ID NO: 233726 - DNA, 356 bp, Glycine max
cgatccatctgctttaagcatgtaccagatcaattaagaagaaagcttgatgataaaggagaaaaaatgattctcatttgttatcaccctacattatgatccaaggaataagcacgtaacaatgaatagatatgtggtgattgatgaaacaataggttgggattggaaacccgaagctaggagtggatcaacatgatgatagttgatactaccaatcctatttaatatgaaatcaacaagtgcctttacataactcgaaagatcaacaagggtaatgcaacttccttctaatatgaatgattatgatattgtaccagaatctactggagattcttaaggtgaattggtgcactatg

SEQ ID NO: 233727 - DNA, 334 bp, Glycine max
gcagcgtgggagagaatgtgttttcatatggaaataatttaccaacgtgcgggctccttaacctgagtaatactaaccataatgtggtattagagttttatgtgatagaagagggagatgtaattgaccataataagagtatatatcctagagtatcgtaccactaacaaccttatctttggtcttccagcaacgaggacatttaagcatgtatacattcaatattgctatatttatagaggacgtataatctcgttaaagaggaacttaagcagtttaataattcactcacttatgagcaaaagaatgaagactttccaaaaaatttaaagac

SEQ ID NO: 233728 - DNA, 321 bp, Glycine max
  unsure (1)..(321): unsure at all n locations
cacataaatttgttacacaccagcactgattgacaatatggagaaggcatcactaatgatgttagctcacattgtagatccaagtcgcttctaaaaaactatgattatatgtgaaattgataaaaaaaaacatgtttgtattcaaacagaccactccttgaacatgcattctgcatgcaaaaaagtgtgtttcacagtcaagattttnttacaaatcacaatatagggttgaacatctgctgcatgacctaagagacccacacattccactcattttttgactcaactgatgttgatggcatcaaactctattgtgctttt

SEQ ID NO: 233729 - DNA, 429 bp, Glycine max
  unsure (1)..(429): unsure at all n locations
agcttgtatttaanaatgttgtaaaaatacttttttttaatatttgaatttttattcctttattaatatatatgtgaggggtagagggtgtcacaccaatgttgttaggattctgttagaagtttttcttataaggttctagatttcgttaagaaccttgtcgtataaatagcttgtaataaggtgttcaaaggaatgagaatatacgctacttccatcttcttcttctctgcacttctggaggcgcttggtcctcaaaatccaagtgtaacattggttctttcattgcactacaatggcggacgcaactcaatccaaagcttcctctaaccacttagaagacgtcatttccaagctcgcagccttccaactctccatgtcgtccaagatcgacgacctccttcatcgcatgtcgcagctcgaaatcag

SEQ ID NO: 233730 - DNA, 452 bp, Glycine max
  unsure (1)..(452): unsure at all n locations
ntgagtcttacggatagcanatgagactttttgcagtctcgatcataagacgcattcatcttcggggaaggtgcatatgacaacgttagtcatagcatgctatcgggcattgagtcttaccgataggaaatcagatattttcgcagtctcagccgaaagacacagacatctccggaagacgttgacatctccaganaaggtacagatgatgatgttagtcgctgcatgctaccgaacatgaaatataacggatcacaaatgagactttntcgcagtcttggccggaggacggtgacatctccaggataggtgtaggtgacgacgttagtcactgcaagttatcgtgctttgagtctgacgggtcgcanatgagacgttntcgaagtctcggctggaagacgcgtacatcacccggaatggtgcanatgacgtggttggtactgcatactatc

SEQ ID NO: 233731 - DNA, 298 bp, Glycine max
  unsure (1)..(298): unsure at all n locations
aaaaatnacaaaaagaaatttattatatcaacatgcattcctttaggaagactaaccacaaagcaggaacataagccaggaaccaagaagcacaagaaagcgagcagcccggggaaggaaaattctgtcctgaaacttttatcgatccgtttcaaccaatttttattccatcttcttccctttcaccccacctatatttttgtaagtctctcatgacaaccaaagactaagaattcctattgcttgctgcctccgaaaatcaaactctctttgatgtaaggatcttaaccaatcttta

SEQ ID NO: 233732 - DNA, 411 bp, Glycine max
ccatattcaaatctaattattgttttgaatgttgctcttttatcaagtccatgcaaaaacacttgaattcatttggattttgggaaattccttcattgttttcattctcaatgttttcaaaaaaatccttttgttgtgttctgatccaaaaataagtttaaaaaataccgattgttgattctttccaaagcatgttatgttcaagaaaaattttctatttaagtcccaaaaatatttataatctataactatactaacataatatcaaagcacatgtaaattagtcaaaataaactcgcgtaagtttttttaaaaaaattcaaaacaataaataaggtaataaagcaataaaatttaatacaaagcgataaataaacataaagacaagttcgtgaaattttgaagatcatg

SEQ ID NO: 233733 - DNA, 291 bp, Glycine max
cccttaccctcggaagcaagataatgaacggggtgcatagactgacctctatctatcttggacgctgcatactaaagtgacaagcggactttcctctctattcactctagcataagaggaagcgagataccctgcctaggagtgggagaaagattctatattcgatctagctctcccattcctagaatgggagatggcaacaacgacgacgtcctttcacgaaagctcctgatcaatgaaactataccaaatgtgcataaagggattcgaccgcactatatctgatctata

SEQ ID NO: 233734 - DNA, 419 bp, Glycine max
  unsure (1)..(419): unsure at all n locations
gcttngacttgcgagtggatatgtagcgcttagtttttattttagntattagncaattcaattaagaaagagaaattccaaagagaaacgtccgattgatttttttggtttattttactaaaagatattttttattattatattattattttaactctttttggtttccaacctggttatggcatgaacgaacggtcggatttcattttaacagaaattaacggatattacaaatcaaatgatcggtggaaatttattttattttttgattaggcgagaaaatgacttaagtaaatgactaaagcacgtcaaaagggggtacggaaagtaaatgaaacgagaataagagtacgtgaaacanatggggaccaccaagggtacatagaatgaattgaaaagttcgatttcgggaacttacc

SEQ ID NO: 233735 - DNA, 443 bp, Glycine max
  unsure (1)..(443): unsure at all n locations
cttgacttgagttatcaagagactataaatacgtggccatgacatgtatntcactaatcaataatctatctttcaatcttctctcaacatcattcaatatctttcaactctttctacacaattttctaattcatttctctttatctttataaaagtttttgatcaacactttctcttccgagaaaagttctctgttcaaaaacttgtgctattcatctttttcattctcttctccctttgccaaaagaacgaagggctaaccgcctgaatacttttgtgtctctcttctcccttacaaaagattcaaaggattaacaacttgagaattcttttgattcttcccttccccttaagcaaaagatttcaaaggactaaccgtctagatatatnttgttccccttacaaagatcnaggactaaccgctgaaattcttctccaacaca

SEQ ID NO: 233736 - DNA, 379 bp, Glycine max
  unsure (1)..(379): unsure at all n locations
acctgagcatgaagcttggattccacccanagcatgtctatgttgtaacatagaacattccatacaattgagccaacaacaatctttgatatctcctttgctaccccncacccgctacttggtttatggaagtgaccttaaccccattaccaacccaaaaaccgaaaatgcttatggacaacacatttgaaatggggctatcctcataagccacacaattcgttgcaagagaaaaaaaaaaggggctaatggaccccttgcctatctatttgaaaatggattgnggaagaaagtaccagaccatatgtaaaaattcgttacaatttttggaaaaagactactcatnttattttttaagttcatttatactatactatgg

SEQ ID NO: 233737 - DNA, 378 bp, Glycine max
  unsure (1)..(378): unsure at all n locations
taaaactcagctttagaaaatccagtatntntgtcttaccaagtcacgttggctntaacacaaatcaaaagattttntgttgattaagacactcactaattcttaattgtcttacaagcaaatttactagctaagtacttagtcttttctctcaagatactcaatgtcttttgagagcgtttcgacctttactctataataatatacacaaagctctntatagaaagaatttgaatgatagagtgtaggttcgtatctaagttcttcaaagtttttggtattcttagaccttcttcgacaagtatttattgtctctaaacgggatagaatcttcactcgagtttgtgtctggaaattatgatcattgaagcatttaat

SEQ ID NO: 233738 - DNA, 435 bp, Glycine max
  unsure (1)..(435): unsure at all n locations
agcttcagctgctgttgtagagtttgttgttatttatttgcnnnatggcaagagaagggtgtcaaagtataatgagagtaaaggcattcacagttcataacacaaggaggatgaggaaatggctcacgaggaggatttaatgatctttcaaggtggatcggaccttacaatagatcaatagcaaccacaaggagtccaattaggacatccatagtttccatagttttagaatatcattttgtaagtctgttatatataaatttcactatcatagcttacccaaacagtgacaaagcagagacaaacactgactctgtccaatttttcccactttgttgggattaaaagtttggtatatttttcagtaccactattactttataggtatcttctttttctgttctggggaatcaatgtttgcatgtactttcaact

SEQ ID NO: 233739 - DNA, 380 bp, Glycine max
catcgctaatcgacgaccatatattcctcatggccatgcccctagtatgatatatggccctcctttgtgatacatcgcaatgcttacacacactttctattaacctgctaaccataggatgagaacctttctatggtagtacatcacattgacctgcactctgattgcctgaactagatgtaccccaataagatgcactgagactaaccacattgacctacacagtcattgacctactgtaggacattgaagaccatatagcgcttccatctcttaagcacatgtacatttccagggatcaccgtaacagatctaatggtatccactctcctctgattacagagcacttacgtgtgaccacctgatgctcgtaatgaatc

SEQ ID NO: 233740 - DNA, 433 bp, Glycine max
  unsure (1)..(433): unsure at all n locations
agcttggctcaactctattgaatgtttttgttgagtatggtgattctaaaaataattacatttggaagttcttgacagaagaacaaaagcaacaattggtaatgacagcaatttcaaacttggcatggaaataatattgtcaatagctccactgtggcattagcatagatgctgaactaatgtttaagcaaattcttcaaaaaaatattagtttcttctcataactagacactgaattaaaataacctaaaatagtgacctcatgagttccagtgtctctatggtattttgccacttaaatgtgttatgcatttgatgttctccaatactgagtcctttttccatggaacttgaggcaggatcttggctcgttgcttgatgaggaagaatgccgatgcatancactaatcacatgttagttatgccatcatat

SEQ ID NO: 233741 - DNA, 435 bp, Glycine max
  unsure (1)..(435): unsure at all n locations
actaagcntttacatgtcttctttttcctgtgaatatttgttcttactctcattttacaactaatgaataaagctgctgtggattggtgttttcttcattgnggtttattggttagcccatgtttgttaactattatttttgagaaatgatattttttgcaaatgctctttcaggaagctgctggtaaggagaagtgatgatttctctacaataagctgaactaaatatgatcttagtataataaactgtgttgaaactctggttggaaaaatgtttgtagacattcagtttactatttggaattatgcaagaatttattgaaattgaatttgatatataattataaatgaaataatatataggaaatanggatgtgatggacacccactttatttggttcaagttctaccccttatctcttgaactggtctctg

SEQ ID NO: 233742 - DNA, 243 bp, Glycine max
gataataatatagcctgaatcgacctagggaaaagtatgaccttgaatttcgaacttcgtgtcattgacgtttgttggatgctccaatggactcgatgaagttgaccttgatctaagctttgtgtatttgacgccttttggagcgccgtcgactagggaagtttatgtgattctgaggttcagttattcaggttaatattttacctatggaccccggaagttgacttgatctagagctctgta

SEQ ID NO: 233743 - DNA, 418 bp, Glycine max
  unsure (1)..(418): unsure at all n locations
gtgcctgtatatngatgcgcctgaatcggacatccgagtgaaaaggtatgaccatttgaatttctcgagagcttcctatgtttaattttgagcgtctcgatatattatacgcctgaatcgaacctcagtgtgaaaagttatgaccatttgaatttctttagagcatccggtgttcattttcgagcgtctctatatgtgatgaaccttaatcggacctccgtgtgaaaagttatgaccatttgaatttctcgagagcttccgttgttcaatttcgagcgtctcgacatattatgcgcccgaatcggacatccatgggaaaagctatgactatttgaatttctcgagagcttccgtagttcaatttcgagcgtctcgacatattatgcgcccgaatcggacatccatgggaaaagctatg

SEQ ID NO: 233744 - DNA, 374 bp, Glycine max
  unsure (1)..(374): unsure at all n locations
agctngncagccaaggtgcctaagtgctaccactccttactgggccgatagtgaaggattatgtgttgtggtctgggttagctgacctaatcatgacgtagtaccttgctgcaaacaagggctttgtgaatgcccttatggagagatgacaccaagagacgttctccttccacctacctgtcggagagatgactatcactctggatgatgtgtcttgtttcctgcatctgcttgtgacaggcaagcccatcgattatgtcccctccaccttcgacaaataatctatgaagattctactgatgatccgccttggcatatcgacaaaagaggaggctatggcagtgaccattgcaagtgccagggtgagactgacg

SEQ ID NO: 233745 - DNA, 442 bp, Glycine max
  unsure (1)..(442): unsure at all n locations
tgttcatcttgagataataggtggtcatcctcatttgaagttgatggtgcaacatatttctttggcctaacaggaactccactatttttacagcttctaatgttatgattggtttggccacaccttccacatgtaaactcagccaatttcctctttagcttatgtcctgtgacattgtcctcatctacagatctccttctatttttctttggccttcctctttggacccttttatgtggtggaacagggtgtgtatactgtgtttgggcccaatattgtggtccttggactggttcaataaaatgctggtatgtcttattataagcttctattgacaaccactcatgacacatgtcctcaggcttcctttctttgtgagttatntgtgcaatggcatgtcggcatggcatccctacatcaaaagtgtaaatcagcacacatg

SEQ ID NO: 233746 - DNA, 426 bp, Glycine max
  unsure (1)..(426): unsure at all n locations
gctttggttgaatgtctatgtctgacttattctgaanttgttactaagttcgtgtataaccagaaacagagatgttggcaacttaggaaaaagggttatgctattggcaggcttcaatgggttcccccaactacaggggaattattttatttgaggatgatgttgactgtctctagatgaccaatctcatttgaagatatcagaacagttgctggtgttgaatatcctacatatagagaagcatgtnttgtaatgggttttttacaagatgatagaggattcattgacacaatcaaggaagcaaaagactggggctcagcaccttatctaaggaatctttttgtattattacttttgacaggtacaatgaacaaacctgaacaagtgtgggcaaaaacttggcattggttaagtgatgatattcta

SEQ ID NO: 233747 - DNA, 321 bp, Glycine max
taacttcagaagaaattttctaactatagacatgttctccttactcctacatgaacatgcatgatgcacatatgaaatgatagagactaagatgcaacacacaatacaacaatcaacataaatgccactcaagagagttggacatgtaaaagacaaaaacttcttcaaacttcaaggctaagtcttcatgttgctccccctatctctaacaacaactttatctctatagtgcgtcactccttgtaagttaaatccacttgataattctcctttttgttccaatgtttccttatagtatcgttatttgttctcattcaaagc

SEQ ID NO: 233748 - DNA, 392 bp, Glycine max
  unsure (1)..(392): unsure at all n locations
ggagtcaatacatgantgtactttgaggctccccaaagtttcctattcctttgtaaactataatcgcaatatttaataaacatcaaattgatggttcgcatgtcgactcttgtgttgtgtctgttattgctttagaatacatactctcattttaaatcctgagccatcttgctcaatctatgggggtgccgctagcgtttaaagtaaaattgaacataataaacatttgtttaaattgttacacttgaactgcctaatcatgaacatgcatgcatatgcattttgtcatcctgtgagtcggaggataagcgaagatttggccgataccacaccgaattccagacaaaggtcagtggtggtgtggttcatattttactgcgtgctgccatctc

SEQ ID NO: 233749 - DNA, 460 bp, Glycine max
  unsure (1)..(460): unsure at all n locations
ngatacataatcagtctcaacaatatattgctntataatctanatcacaggccatattcataccaaatagaatggtccaaagtttagcctctataatggtagaatgcccaagtctcctagaaaacacttttataaaatcacctttatcattgtgaagcacatcaccacaagcagcaagagccgccaaggcaaggtaagagctgtaacgacccgcctcgtcgctacggtatccacactctaatattcgaaaatttcaaatttttttttataaaaagaactcccttaattgttgcttatgaaaatagaagtggattttgtacaacataaattcatccaacaacacgccattacttaagtgaatatgcataattacatagaaataataattcggtacatgtcctacacataacgaaaaataatatggtcatacatatagttaaattccaagtttacatcttta

SEQ ID NO: 233750 - DNA, 162 bp, Glycine max
  unsure (1)..(162): unsure at all n locations
agctnccttgcctcaacaatccgatcatgtcttctagtnnaaatcaagcaaagaattagccacaatcacattccacacaaaattacacttcaccacaaaactgtgaactggtggcccaacacttatatcttccaacgtgttccctgcagtaaaaacgtgctc

SEQ ID NO: 233751 - DNA, 476 bp, Glycine max
  unsure (1)..(476): unsure at all n locations
cttcaactcaagcataatgatcagagattcagagctaagatgagatgtgttaaatatgtatttttcatcataaaatatcaaattgtgagcagttgcccataatagcaattttcacctggtttatatttcaaaacgtttctctctttgaatactgtccatggcaagatagaatttataggttccattctatctagctttttacttggcatttcatatnttgtgaaacattgtggaaaaatagttagagtgttgctaggtgtaccagctttattgcttgtgcacccaacattttttgttaattccaaaattaccctgcgtcgaaggtacatgagttcatggttgatctatatgtttanaattnaatttacggattacatgatctgtataaaatatacgaatcatgcgctccataagtatatattaaacatgctgatcacgttgatctgtatggttcgtatggataaagttgatcatat

SEQ ID NO: 233752 - DNA, 428 bp, Glycine max
agcttggcttggctgggctcatggccacctttgttctacattcaccttctatgtactctgccaaggtatttcttgttcccaagttgtcatctcctaaaatctatattctgttataaagcttctagagagtgaaaaactatacatgtacctttttcttcatttaaatggactttatgatttctcatttgaatatattcttcaacaccctacttaaagcttgtgtacctcgaaaaattatatagattagggaaaagttagaacaaaggactgaataatttaatattaattgagagtgctcggctagccatttcaattagaggtgtttataaaaaagcctatatttcactggctaatgcaacttatatggcttcactttgctttatgatatatgttagttattgccacacaaataatgttacccttgatat

SEQ ID NO: 233753 - DNA, 451 bp, Glycine max
  unsure (1)..(451): unsure at all n locations
ctcaagctncattcaaggaaggggggncnntccactacttgaaccttaaccttttgttttggaagctaggcttcattgcatgttgtattgatggtcacaattatgtatatgtcgccatgactaaaactgtggaatatgtgtttcttttctcgaattattaaggctaaaatgagcttcttgggtattaaaacttacggttagccttaagtttcccttatatcagagatttctagcaaaagttatgaataaaacaagtttaaggactttctgtatgaaattctgatactggggacagatgtcgtaccggatgtcacgacatcacgcttcataacatgcaaatttgatttgactgtatgaacagatctaacaagtcaataacacacgagaattgtaacccagttcggtgccacctccccacatctgggggtaccaagccaggggagaaatcact

SEQ ID NO: 233754 - DNA, 450 bp, Glycine max
  unsure (1)..(450): unsure at all n locations
taagacacctgcagcatcaagctncttccggntaataacgactctcttcttataaacacataaaccatcttacatattttttatattctaattaaaactagacttttctgtcattaaaaaaatcgcgtaataaatagttgatattaatgtttgatgtttgttattgaaattgtcgaaaaaattccaagctctacatcaactagaaataatgagtatatagggactccagtttaaaagaaatatgaatattctgtattacaaaagatattctccatttagtaaattttcattctattaaaagatactactactttaatatatcgaactaaaaaatatgaaagaatacgcgattaaagccacttattataaaatagtactactacttccaagttccaagtattcttcaacttttgccattataattatttattttccgaatcttgactaaag

SEQ ID NO: 233755 - DNA, 432 bp, Glycine max
ttactaggtgtgagaaatgaactttatattattcaaaggtcctcaaggttacatattagagtgtgcataaataaaattaagattcataggacatagctaatagtctaatactataaacattaatccattcttcacaacttcttgttgtctgcttaatataataaatccgcgcttttgagttgaatttcaaacttgtttctgcactcaaatcacactataggcagtagtaaagttgtgagagcaaagccggttagtatatagtattaaccttgatttgtacataactggcaggaaaaaccattgagtggatcttccagttgatttatacattaacaatttaacacggtataagaggactaatagttctaacatatttcaagactatacagataggtgtatattaaaataaaaaaaaagttaccttatactcct

SEQ ID NO: 233756 - DNA, 436 bp, Glycine max
  unsure (1)..(436): unsure at all n locations
agcttatccccataagagagcagaacagctggctatttatcattgattataggaggctaatccaggtaaccaaaaaagatcattttcccctgccattcattgatcaaatgcttgagcgcttggcaagtatgtctcattacaattttattatggtttttctggttatttacaaattcatattgctcctgaggatcaagaaaacaccacattcacctatccctttggcatttttgcctataggaggatgcccnttggcctatgcaacgcctctggtaccttccaacggtgtatgcttagcattttcaatgatnttttagagagttgcatagatgtgtttatggatgattttactgtttatggaatcctctttgatgcatgtttggatagtctagatagagttcttaatagatgcattgaaactaaccctgtgctgaat

SEQ ID NO: 233757 - DNA, 363 bp, Glycine max
  unsure (1)..(363): unsure at all n locations
ctaagctgggcaagctagaangaacacaagggagagaatgttttattctttatattcggngaatggaaagggttgttctctaatcattgatggaggaagttgtgccaatgttgcagcactaaattagtggagaagcttggtttaaaaaccacccctcaccctaagccttataagttgcaatggttgagtgacaatggtgagttggttgtggatatgaaagagttacttacattctccattggaaagtatggtgatgaagctctttgtgatatggctcccatggaagccgaacatgtgttgcttgtgagacctctgcattgtgatataaaatttgtctacaatggggtcaccaatctatattct

SEQ ID NO: 233758 - DNA, 372 bp, Glycine max
  unsure (1)..(372): unsure at all n locations
gagcttccaagaatcaagagcaagagtcaagtctattattcangaatcaagagaagaggtaatcaacataagcatgagaaagttttttcaaaaactgagtagcacatggattcttctcaaaacatgtttaccaaagagttttttctctctggtaatcgattaccagattgttgtaattgattaccacaaagcaaaatggttttcaaaaagctttcaactgaacttacaacgttccaattgattactaaatgttgtaatcgattacaatattttggtaatccgattaccagtgtgcttgaacgttgaaattcaaatccatatgtgaagagtcacatttctttcacacaaaatttttgtgtaatcccttacact

SEQ ID NO: 233759 - DNA, 386 bp, Glycine max
  unsure (1)..(386): unsure at all n locations
tacgagagcatagattcacacatatttctgacaaaccataactcattttttcacagccccaaccttattgttttgtcacacttaataacacacatactgttctttgcacataggttgctgactaacgtctcaattccacagatatataacagaacactctttttntacaaggaaggaaacaatcaacatataatacgtggactggagcaatttactgtatactacaactcacattagattgcgttgctattaatgtttcagcaacaataagtttatcgaatacactccctccaattcaggacaaaagtggtcttgatccatgagcgcgtcttctacaaccatatgatagggtaaattactcagtatcaatttcattcggctcggat

SEQ ID NO: 233760 - DNA, 422 bp, Glycine max
  unsure (1)..(422): unsure at all n locations
agcnnangcggcaaacagggataatttactttctcagcagcaaaaccaacaacaacagaataattatgaccttccaagcaatagatacaatccaggttggaggaatcatccaaatctgagatggacaagtcctccacagcaacaacaacctgtccctcttttacagaatgttgtggggccaagcaagccatatgttcctcctccaatgcagcaataacagtagccacaacaaaggcaaccagcaactgaggctcctcctcaaccttccttagaagagttagtgaggcaaataaccatccaaaatacgcaatttcagcaagagacaaaagcttccattcagagtctgacaaatcagatggggcagatggctactcagatgaaacaagctcagtcccacaaatctgacaaattgtcttcacaaa

SEQ ID NO: 233761 - DNA, 338 bp, Glycine max
actacggtcaggagagaatgtgatgagctgaaagatatcaacatgaccacagttgaagtgctagagtgggaaacgaaaaaagcctgaaaggaagaatggagcacgaacaagttctgaagggctttggggggcagcagtaacgagctcaaacttagaaaggccgagagggaaaaatcaaggatggaaagcatggtgttaaaggataagttaaagagttgtcagaggtcgaagataagtttgccagagcagttgagcacaacagaaaagaatatgttgataatcattgatcaatataaggagaaggcgaacctggctactattcacgggcagatgctgga

SEQ ID NO: 233762 - DNA, 371 bp, Glycine max
gcaagctgccctcaccaccagatttctgagcaacttcatcttcaatatttctatgagggacttatcaacatggagtggagtatgattgatgctgtcaatggtggagctcttggggatatgacccctgttgaggctatgtaattgattgagaatatggcatcaaactcccaacaatacagtgcaagaaatgatgctattgttcttaaaggagaccatgaggtggccacggattcatcttcatctattgaaaataaaaagcttgaaggaaaacttgatgccttggtcaacctaataactcagcttgccatgaatcagaaatctacacctgttgcaagagtctgtggtctatgttcttttgcagatcaccattc

SEQ ID NO: 233763 - DNA, 406 bp, Glycine max
  unsure (1)..(406): unsure at all n locations
ntataagtgcgggttcgggagacaaaggtcaagcgttcttatatgcgaagatgatattccgagtactttggatttggtacgaccatgctctcctgatttccagctgggaaattggcgagtggaggaacgccccggcatttacgcaacaagcataatgtaaacctttacggttttaaaaagctctatagttgggcctaagctttagagttttcattntgttaaggctttgtgtcttttgttttgaatttataatacaaggatctttcttcatctgttcctggtctctacccattctcattcatttgcatggttactntcttttctaaaacggcagattcgatgacgagtcccccgaaggtactaatacctgngacccgtctataacttcgagcaagaaatgaatcaa

SEQ ID NO: 233764 - DNA, 427 bp, Glycine max
  unsure (1)..(427): unsure at all n locations
agctngaaagaaaattaataatgttttattgttataaattaagtggggataattaaggttgattaatggtgatctacatctcatagaatctgaaaaggggtaattaagtcataagagttcaaagtggagggcattttcgtaaatgactatacaactagtttaaaatgtctaattatatgatgtagaataattaaaataagttagagttggaacaccctataaaattacaactccaactaatagataaaactctgtgttgtgtcatctatgtgtgtatgaatttaattccaatagttatatatatgtttttaattataaatctttttggggtgtgtgtgtgaagaattgcattgtacactacgtgtctatgtaattagctctgtctgggttcactctggttatattgtatactacggagactagcaca

SEQ ID NO: 233765 - DNA, 461 bp, Glycine max
  unsure (1)..(461): unsure at all n locations
tcaagaaaaagatggcctcagcaaattccttattttctatgggaattctatcaatagacctccaatctttaatggagagggttaccactactggaaaacccgaatgcaaatttttatcgaggcaatagatctaaatatctgggaagccatagaaatagggccttatatacccaccacagtagaaagagtttcaatagatggtagttcatcaagtgaaagcataaccatagaaaaacctatagatagatggtctgaagaggatagaaaacgagtacaatacaacttataagccaaaaacataataacatctgccctaggaatggatgaatatttcagggtttcaaattgtaagagtgcttaagaaatgtgggacactcttcgattaacacatgaatgaactacaaatgttaaagatctangataatgcactactcatgagtatgaatatttagaatgaatgc

SEQ ID NO: 233766 - DNA, 427 bp, Glycine max
  unsure (1)..(427): unsure at all n locations
agctngntcctctctgcctcactgaacctattgatattctccttcgataacgacatccccgcctccgctgggacattatggtccttcaccaccacctttggtggcttcgtaggctgtcttcaccgccgccggagatacagcaacggcagcagcaacaacaacgccaagccaagaacggaccccacaatgattgcgacaatggggccagtggagaaaagtttcatttttggtctcaatctcggtcttgtggcgagtgttttgagaagatgtgctgttgatttggagctctttggagagagcggtggcaagaggttgctggaacttatcgagcttgtcgatgaggtcgaggacggagggtttggagcgataaacctcttcctgctccttgttcaagggcttgccctgggagacggagctcctcttccat

SEQ ID NO: 233767 - DNA, 304 bp, Glycine max
caaacaatgacgaggaccaccacgacacgatttgctcatcagtccaccacgacagcacgacaacgatgacgactaccaccacaacgcgagtagctcaacgagagtcattttggggggatagtagcttgaacaaggtagagtgagcgagtagagagagtcagactcatttctgggggttgttgaacaacgtcatttcggattttataaactccgggactcggagcagactcgcgagtctacccaaacttgtccaagactacgcataatcggacgagtctactccgggttcgatggtcactccgat

SEQ ID NO: 233768 - DNA, 381 bp, Glycine max
  unsure (1)..(381): unsure at all n locations
agctngaaaggcaaagcgtggttggctgtttcagtcattccngacaactntggatagagcttgaataatgactagtatgtgatctgtgccactacaacaaatgactggtaagagtcatactatagtcttgtaggttgttgtggctttggttcgattaaaaatgtccctaaaatcatacaaggaaagggaattatacaagggaaaaaaatcccttattaggggaacaagaatacaaaaatatttttcattctattttggtgccataacatacaaagattaaaagagaacacacaacatatgcctgtgtttcataagtagctctataaaatagtagacatagtgggaattctatagaaagtacacatgttgacttttaacatg

SEQ ID NO: 233769 - DNA, 381 bp, Glycine max
  unsure (1)..(381): unsure at all n locations
tgngcctcttcatgtctggaatatgaatgtagcatatattatccaaagacacttagatgctntgctgatggcttcttcccgttccaagcttcaattggagtcctgtctcttacagacttagttggacatattgtgagtatgtaaacagcaatgtagactgcttcaatacacaaagtggtaagaagcccttttccttgagcatcgatctagctatttccataactgtgcgattctctctcttggacacttncattttgtgaggagaatatgcgactataagttgtcgctctatgccttcatcctcacaaaatatttcaaactcgcgagaggtgtactctttgcgcgatcacttcttaagtactttatctatttccactttga

SEQ ID NO: 233770 - DNA, 368 bp, Glycine max
tcgagagctttcgttgttcaatgtcgagcatctcgacatattatgcgctcgaatcggacatcctggagaaaagttatgatcatttgagtttctcgagagcttccgtgtgtcaattccgagtatctagacctattatgtgcccgaatctgaccttcgtgtgaaaaggtttcgaccattgaatttctcgagagcttccgctgttcagtttcaagccctctcacatattatgcgcccgaatcggacatccgtgtgaagagttatgaccatttgatattctcgagaactccgatgttcaatttcaagcgacacattatataggagcctgaatcgtactcaatggaaaagtatgaccattttatttcttgaag

SEQ ID NO: 233771 - DNA, 430 bp, Glycine max
  unsure (1)..(430): unsure at all n locations
ggacctatgaaactcagcttacagcagatttagaatgaccctctaatctaaaatttatataacttagagccattaacctacggaattaaaacaaactaaatggctgagtgttactgaaattgttggcaaccaaaagtcacccccaacagtcaacatgtcagccaccatttggtctcccataaggctgatgcctaagttgccaattgggcccttactacaactngaactaaagcccttttagttgattaacccaaaacatatttttggtcagccaactttacaaggattgggccattatttatacaaactatacactctaaaattgaaataaagaggcgtcatttagtcctccattagggccatgatacaactcacaaccttggacttttctccttgaaacttgggcgttgattcaaataaaatggacagc

SEQ ID NO: 233772 - DNA, 426 bp, Glycine max
agctttaggcatatgtttttatactgaatattgaacttcaccaaaaggcttcaaggcctcactgtttgatcttcaggttttatctggtatggactatggttgaaaaacttattttttaagttaaggagccaaaataagcaaatttgcaaggagtatgctgagaaatgtgccacattataaaaagaaacatgtaaattgaaaaaaaatcgtgattttaaagaccctaagctctagaagttcttgtaagttgtaacattgattattaggcacccaaacctcatcttgttcttgttttaaccacaaactcctgccttgaagatgaggtgtgtgcacattgaatgacatcactatagtgagggagaatgaaaatgtctattgtccccactgaggaaagaattatgttaagtaatgagattttatgtaatt

SEQ ID NO: 233773 - DNA, 439 bp, Glycine max
  unsure (1)..(439): unsure at all n locations
tgggttagtatttntctaatataatttgatcattcatttacaaaattaattattagttntgcacataagctatttttttaatatgcatatacacgtgtaaaggtatagaagttatttttttctatacacggacactaattagatttacaataggaccacacgatttacatcgtaatgagtaaggatcaccttgagtctttctaaaaaaaaggaccaacttgtgtgaaagaaaataagtttacttaagtagcttgagccgtaccttagtcaaggcctcgtttgcttatcttagctgttagaacagatntttctttttcctttattatgtgtgtgtcggnggggcacagctgtttcaacgtatttaaaagtattaacaagttgtatcgaattattaatgggcaatagtgtgaccgtatntaaaaacaggtgttacgcacgc

SEQ ID NO: 233774 - DNA, 358 bp, Glycine max
  unsure (1)..(358): unsure at all n locations
agctttgacttgagtcatcaaaatattatatatatttaccatgacatgaannnnattaagagatcaatcatctatctttcaatcctctctcaacatcattcaatattcttcaactctttctacaaaattttctgattctttttctcttcatctttctataaaattttgttcaaacactttcttttccaagaaaagttcttttgtcaaaaacttgtgctattcatctttttcattctcttctccctttgccaaaagaacgaaggactaaccgcctgataattcttttggttcttccctttcccttaagcacaagatttcaaaggactaaccgcctgagatatctttcgtttcccctaac

SEQ ID NO: 233775 - DNA, 383 bp, Glycine max
  unsure (1)..(383): unsure at all n locations
acctcttggaggagacacttacctccttacactcttccttaaccattaaagtgtagaagcaaagcctcatgatgaatcaagagtgattcaaagatggttttgatgatcacacatagatgatgacaataagctcacaggtcaatcaaagaatgagttcaagatattcaagatagaatcaagaacacttcaagattcaagagatcaagaatccagaatcatgattcaagagatcaagattcaagactcaagattcaagaatcaagagaaggcttaatcaagataagtatcaaaaggttttctcacaatatgagtagcacatggattgttctcacacatatttaccacagattntntactctcttggtatcgattaccagaatatt

SEQ ID NO: 233776 - DNA, 430 bp, Glycine max
  unsure (1)..(430): unsure at all n locations
agcttatggggggcttttgaagcttagggattattttctagcaaacatatccaagcttcttatgccatacccaatgatgctcttttgataaagagtaagcatgacaccttttgattggacaaatcacagtgaagagttgtacttgttctagatgatacacatatccttgttaaaggtgagattgtatccactatcacataattgacttatgctcaacagattgtgcttcaatcccttaacaagtaaaaattatctatagaaagatatggagagatgcatactttacctacaccagttatcaaacctttctgattccctctgaaagtgaccaccccaccagacataggtcttagggattggaacatagactttntgcctgtcatgtgttgtgagcaaccactatccaaataccatgattggtgtttctttc

SEQ ID NO: 233777 - DNA, 383 bp, Glycine max
  unsure (1)..(383): unsure at all n locations
caaaattggatgagggaaagagtggttntcgaaatctgcactttatgcagaattttgctgttgaaatggcatcaaaattttgtataagtgcacaacaaagcttgtgtatggctggttgtaaaaagggtattacatatggcgttctggaaattttctaagagatcccaacggtcaaaatgtagacttatgtactagagacttccagtaagattttcgagtcgatccaacggttaacgaattctaacgaaggaaatgttactggggtatttgtatgtgaaaagctgtgatcttgggttgtgttttgggcagagttttctgcctttgccctgttttgcttgggtttggtagtccatgatgaatggatgtggaattaactggatgtt

SEQ ID NO: 233778 - DNA, 430 bp, Glycine max
  unsure (1)..(430): unsure at all n locations
agcttgaagcaaagcttgatgcanagaatgttttttaaaatgtttaagctaaaaagaaacaagacaatacagtccaggctgaaggaactccaaaggttgtggatgatgctattgttaatgatgtcctgattgatctcacatgtcaacatgatcatgcgtgcaatggtatccaatgcagacaatgctaatgaggttgtgcacacaagtcaacatgatcatgcgtgcaagtaagttgacacctcaaatgaagctactttagtggaggaaggcttgcatgatgtagtggtagtttactccatcaattttggtgctactcctatcaactacactgctccaacttccttaagtgaagattgagtacaagagatgaaaagtcacaccaccgataattttgttgagaaacaaagacgggagaataagtaagtcgttt

SEQ ID NO: 233779 - DNA, 283 bp, Glycine max
gtgtcacatgctatttacatttacatgagttcaatataaagtgatataatccaatgagcccattaaactgccaatagaaaattgatatgagcttaatgagcgaaaaccagtttggcctattagggaataatgagaatcctaataagttaaaacctaaggcatgattatggttcccaagataccatatctagaaataggttctcctctctccatctgtagagaaaacaaatgtcccataagaaagaaggtgatttggttgaggaagatcatcaaactaaatatt

SEQ ID NO: 233780 - DNA, 433 bp, Glycine max
ctgcatctgtatcccaatgcagtgtttatatatttttctccacctggttggtgcctttcttcataatcctcctatcccctgagttattataggggttggagcacatatcttcaatgaccttgatggcatcaataaaggttttaacatgaggttacccctacaagcaacatccaaacttgtccttttatgtgcgaacactctaccatggaaaatgtgaattatcctttgtagggagaaacgatgatgtggatagcttctgatcatctcttggaactttcccaggcttcaggtagactctcttgttccctctgcacaaagtttccaatggctctgatatattgatttgtattcatggtagataaatacctccataagaaggcacttgtgcactggtttcatgtagtgatgttgttctcaagtattaaacacagtc

SEQ ID NO: 233781 - DNA, 361 bp, Glycine max
gaggcataaatcatgccggcgtgttttccatcatattcttcttctacattatataaaactttatgtattctttttcatttggtaaacggagatggcctaaacacagcagaagacatcttccaatggtttctaacataattattcaagctagatgtgtttagtccttgtaaatatgactaaatttagtcttaatccaaatttttctgtcggtttcggtcctcgaaacttaaattttggtttttgaaaatgagctgcatcatcattcgctaatgagtggcatacatctaaatatttcatggcacataccacctcagaaaatgacacggaccgatgtactttgggttcaaagacccctaacttt

SEQ ID NO: 233782 - DNA, 447 bp, Glycine max
  unsure (1)..(447): unsure at all n locations
agcttcaacatcagaccacttgcagggtgctggttttacttcacatggatttgatggggcctatgcaagttgaaagccttggagggaagaggtatgcctatgttgttgtggatgatttctccagatttacctgngtcaattttatcagagagaaatcacacacctttgaagtattcaaggagttgagtctaagacttcaaagagaaaaagactgtgtcatcaagagaatcatgagtgactatggcagagagtttgaaaacagcaagtttactgaattctgcacatctgaaggcatcactcatgagttctctgcagccattacaccacaacanaatggcatatgtgaaaggaaaaacaggactttgcaagaggctgctagggtcatgcttcatgccaaagaactgccctataatctttgggctgaagccatgaacacagcatgctaca

SEQ ID NO: 233783 - DNA, 335 bp, Glycine max
ctaaaccttgaaaacttgagctattcattcttttcttctcttctccctttgccaaaaagaattcaccaaggactaaccgcctgaattctttttgtggctctcttctccctcttccaaaagaacaaaggactaaccacctataatcttttgtgtctgccctctcccttgtcaaagaattcaataagacacagtctgagaattcttttgattcttccctttcccttatacaaaaagattcaaaggactaaccgcctgagaattcttttgtatccccattcacaaacgatcaaagggttaattgcctgagatctttgtttaacacattggagggtaca

SEQ ID NO: 233784 - DNA, 416 bp, Glycine max
agcttatgcacggaagatgtagatttgaaattgttatgccccaagaaacaccatttcctagttaaccatgcattaggtaccatgttcaattattttgtttttaagtgaaacgggtttatgatcccaacatggttggctcgtggtgcctaacacatgaaactaagaatgtagtgtgaagtttcacgcttcccccttttttgtttttgttttgtagaggaaaacgcaaggatgagcaaacatgaaaacaaatggtatgcaattttgcagatcaaaaagtttattgaacgcatatgcatgatgatgccatgactcatgcaaaatgtgaggctggaatatgataacggaaaaatgcaggatatgtccattatgatgttatgaagagatgcttatgcgatgcatgatatgaatgcatttta

SEQ ID NO: 233785 - DNA, 390 bp, Glycine max
  unsure (1)..(390): unsure at all n locations
acatagaccacatactcttgctacacgtgcaaatgccgattgctgattcatagcaagctggattactacgtggaccaaagcatcaaggtatccctcaagctctttattttcaacatatgaagatgaatctgttgccacctcatggactcctctacagagaatagcatcatttcttgcactaaatagtcgggagtgggaagccatcttctcaatcaaattcctagcctcagcaggagtcatatcaccaagggctccaccactggcagcatcaatcatactcctcctcatgtngcatacaccctcatataaatactgcagaaagagacgctcataaatctggtggggaggacagcntgcacacatattcttgaatacttccaatactcatac

SEQ ID NO: 233786 - DNA, 419 bp, Glycine max
  unsure (1)..(419): unsure at all n locations
agctngatgatcagagtgagaaacatgtgttcattggctatgatgcaagttcaaaaggctacaaattgtacaatccaaacaatggaaagacaattgtgagccgagatgtcgagttctatgaagaaggcacatggaattgggaggagaaagaagacacttatgattttttcccgtactttgaagaaatagatgaagaagccttgactccaaatgattcaactctagctctttcaccaactccttcaaccaatgaagcctcatcatcttccgaagggagttcaagtgaaaggccaagaagaatgagaaatattcaagaattatatgatgaaactgaagttataaatgatttgttttgtctttctgttgacagtgaacccttaaactttgatgaagcaatgaaagacaaaaggtggagacaa

SEQ ID NO: 233787 - DNA, 466 bp, Glycine max
atctttcaccttcttctggcttaaatcgaatctctggatttaatttgatcactgcttcctctagccctctaggctcagatgctgttgagtatggtgcacatgggtcttcatgagacctagatagagaaaaaattcttacatgatcaacatggggccaattgaggcagcacttgacaactaatatgtagtagcctataaggaagaaagctgtaaacatcattccaatcacaaggattactaagaaggaataattatatggagaaggattagtcacatcactaaggggagttgtgcacggagaatgagcttgttgcatataatgcagtaggtgcctttggctcacaatatccatagtagattctacagacaaaaaaagggttctcttagatattggaatatattgcatgaaagtgagtcttatgacactttccctcgaaaatctattatatatatgcttaacgcacta

SEQ ID NO: 233788 - DNA, 431 bp, Glycine max
agcttcaatcctgtttttataggtctttatttaatatgaccattggggggatcacagccttgaacttttatgtttagacatagagtttttttgcttcttatgtgtgatgtgtggtatttatactatgttttctgcatattaattcattaggtttgcattcattttttgtcgtttaggactatttgcatgactatttcctttactttttattacctaagactttttgaggtttgttttgtgtttttggttttagaaaggaggattcttgagaaaattgacacggatgcttgaagttctattcttggagttattggtgattaaagatagagcacttgagaactttgttgaagcttggatcaagcaaagaagagaccgcaagtaactacattgcaagaaaaattgcaaattccacaaccataatgcaccatggg

SEQ ID NO: 233789 - DNA, 412 bp, Glycine max
  unsure (1)..(412): unsure at all n locations
gcttgagatgangaagtgttgaaggggaaactttctgcttttattgttgaccacagagtggtacctggagatatgtcgcggtggtcaggagaccttgtggacgtcaggtggggtgctattgcccaaaaccaagcttgaccaatcccgacccaacccgggcatattcggtcagtgagaacctgtgatgtacctaaacaggcgagctcctggcagtcaacagataaaaggaaaacaagaccacaaagcaaggaggcttgtggtggctggccagctgtgaaatttgtgtaatatgtggattgtggcctctggtaatcgattaccaagggtgggtaatcgattacaaggcttaaaattgaggacaggaggctaagatggtctcttgtaatcgattaaccaagggtgtaatcgatta

SEQ ID NO: 233790 - DNA, 364 bp, Glycine max
tagcttcaaaaacgacgactagagagtgtgtttcgtgaaagctcgctctaaatcattgggtaaagtgaaaacacaaggtgactatttatatgaaaaatagttacaaccgcctgtaatcgattaaattaccaatgtaattgattatctcaaagaagtaatcaattagattctcatttcaatcaattaaagtgttattcccaaaactcggaaagctttcaagagcaatgtaatcaatttgattcttgacttaatcgattaaagtgttctcgatcacttctaggagcacttcaagaatgatgtaatcgattactatacccacataatcgaataaagcagagattctaaaaaactaatatggtctcta

SEQ ID NO: 233791 - DNA, 460 bp, Glycine max
  unsure (1)..(460): unsure at all n locations
tgatgtcattcanaacacactatgtagacctaaatgattatctttcatgcatngnnnatttaattgtattcattatgcgatataattcgttgtaacccgttactaaccaattaatattatcaactactcgtttggttaagcaaggaaattgttggtccaacaaaaattatatacgcgtgcagcatacatcattgtcataattgacaacacataatgacatgcatgcgtattacagtttgagcgtgacaacacattggctgacttcagtacacattttgaaactagcagtcgctcgacaacacattgattgacttgactacacattatcgacaacacattggctgacttgactacacatttacgcgtgtctattttatttgaaacaaagntatacaaatgctctgtcacaaccatctatatatatggcatactatgctactaaatcacacattatcttgtt

SEQ ID NO: 233792 - DNA, 223 bp, Glycine max
taatttcaaacgctgaatttccccttttaacgcctcggctacaggctccagaaaaagaatccatcaattttcatcatatttgagaaaatctatatgaactggtgacctcccatatgctcaaacttacatatttcacaacaaaacatgaaactccactttcaggccaaaaagattatttcattcttattcatcaaagaaataaactagaaactcaccacaaaaa

SEQ ID NO: 233793 - DNA, 348 bp, Glycine max
  unsure (1)..(348): unsure at all n locations
tgaggaagtanggnggatacgatcaacaacttcatcatctccatctacaccaaggggcatctcatcaccaatcaaagatgttgaactctggccaacaatattgcgtttaaatttttctacactcaaaccgcccttggtcagaattcgtttatcatgttcttttgcaagaacagaacccaaacaagcctgtttaggacaatcctgcaccttggggcaaaagcttgccgtctggcacgacccatcattgattgccattgattntgaatcttcactggtaataactgaagaaacattgggtttctttcaatttcccttccacctaaattgaaagaatctcaccttcactac

SEQ ID NO: 233794 - DNA, 425 bp, Glycine max
  unsure (1)..(425): unsure at all n locations
agcttaacaatcagtgttatactatngattttaacaaagcaggcataaatatgcaatactagactcaaaatatgcaacaaacactagacctaaatcagggtcacagaaattggaagataatattttatccaagcacaaacttcaagccttattccatgtattggggggaagttatgactggccatatgggtagaggtgtcatagaggagcaggtatggaggaagggaccttggactgctgaagaggacaggttgcttgttgagtatgtcaggttgcatggtgaaggcagatggaactctgttgctaggcttgcaagtaagaaacaccaaacttttttcactgttttggttcttaatatatatgatcggattntcacatttataagtgacaatactagcaaaaaacaactgacattgttttcaact

SEQ ID NO: 233795 - DNA, 348 bp, Glycine max
  unsure (1)..(348): unsure at all n locations
ggctaacatagcaccttgtggtgacaaggaggctgttgtcnaatcaagtgacaacgttatccactctgtcaaactccatcctacctatgggtttatatgggagagggaggaaattggtgctgttccctctgaagatggagtcattccaccaactgggtggaatatgtatgaagattaatatgactgaggccactgcattggccagaattacggcttatatggccgaaaatagactaaatacggcctttgatgctgaatctcaacaaaatatggcagttgaagccaagatcgacgatcataataacaaagaaacaaaggatcgaagactggattgcatttatgacgatg

SEQ ID NO: 233796 - DNA, 357 bp, Glycine max
  unsure (1)..(357): unsure at all n locations
agcttccgttctcgagagcatttntaatttaagcatttcagcctttgctgtcgtgtagcttaggaaaaacgacatttcttctcctttctttcttccaaagtcattgttaacgttccaaacactttctccatcacccacagccaccattagccaccacaaaccgccgttgttctccgttgcaaccccatactgagaggaacccttcgaccgaagcggaatcttccaacttgactcgcagtttcggtagagaacaaaaccctaatctgacctttcatttcctttgagggaaccatgattccatgtttgttcctttgtagtttcagcttggctttgcatcttttctgactttggaaccac

SEQ ID NO: 233797 - DNA, 441 bp, Glycine max
tcctgactcaccatataccttgacccattgtgagaatgtcaatccttaccctcggaagcgaaaagaatagaagggaaatttccaatcatagaaaagaaaagaatgaaaattccccaatcaaagagtgggagaaagcaaaaagaaaagaaagaaaattcccaatcaaagaatgggagaaagttataaggaagaagaagaaggaaagaaagctcctgatcagggatcgaatgaaaacagaagaaatgtgcagaaaggtctttggaccggacaatatctgaacaatacagaattgtcaccaaatgaacaaaaagaatgaaaggaaaccacgacctaaaatggtcttctccctttgattaccaaccaaaatctcgtgcgctagcgactttttcgccccgcactatacaaaataacagagaatgaaatagccactaaaaatcaaag

SEQ ID NO: 233798 - DNA, 430 bp, Glycine max
agctttatgaaatgcctcctaacatttttttttctagatatgatctccttcttgataatatcccttcctgcaagttgcttaaaaagctgtcatctaaactttccccaattccgcctctaaatctaaataatttttatgagtagaaagatgaaagatcatgcattgatctgtaaccttgtctgttataaataagtggcaatcaatagaaaaggacaaaacttatggatagtttattatgttcttttagtgcagtttgtgaatcaaaattagagtttcactttcagtaattatgttgatttttaatgtaaacttttattatgtagattaccaagaagaaacttcaattctaattggagaacaatactaaaagcacctatgaaattgcatatagggttttgccaatagaaaagtaacatcacttttattctac

SEQ ID NO: 233799 - DNA, 296 bp, Glycine max
ctagccgctctaggatcataagctgcaacgactgggcttctgactcaaatggagaaaggggatctcaactggcctccattcatcacccatatctattcttgttaacggcaaccctacaaacgaagttgctccaactaaaggtttgagacaaggcgaccctctagcccctatgctctttaacatatatggagaaggcgccacacagttgatgagggaagcacgtcataaaaatctatacagaagctacatgtgtggaaagaaaaaagaacccactaacattctgcagtaagaaaatg

SEQ ID NO: 233800 - DNA, 435 bp, Glycine max
  unsure (1)..(435): unsure at all n locations
agcttgcaacggnngatgtagattttcatgttccttttggaactggaagagtccctgcttttgaatgagtcgtaataacccatttggtcgtcttgctcatcgcaccaagtcttgtaccattctatttgcgctctataaggtaccaccttggataagctaactgccaggcttgcagcattcagggttggtgaaggacccattctccttgttgtcttcagacattccttggcggatgtaatagctggttcctattggttacatcacagtaactaattcagtcaaaataatcatgagtggctaatataactatataagtgagaaagcactgccaaaatcatagacactgctttcccaatagactaaaccccacttcagttcttgaaattatcaggtcataattaccttaatctttaacttttgaagactttgcaaaat

SEQ ID NO: 233801 - DNA, 253 bp, Glycine max
caaaacagcatcgtcacaccgagtgggcattcttcgggacgctacagataccggcgcgacctcacatatagtgagggctttccacgaccgaagcttcttaactgttctttcttccccatcaaaccttaataattcaattattaaccaaaattaaagtaaaaactgatcaactaccctacacatatccattaaaaaaaaattcacaatccatttactgaattacaccgacgactaggctttcctactgaccgat

SEQ ID NO: 233802 - DNA, 440 bp, Glycine max
  unsure (1)..(440): unsure at all n locations
agctttgagtattgatgatctgatgaatgttagtttatgtatagngcgagacacacgtctgttgcgcgtggctaggagttggagctgtatgaatatatagtaagcgcatatataaggtattgaaatttgaagacattaactgtctttatatatatatatatatataggacatattagatgaaagaagtattttatcatgagaggtaaaaaaattaaataatattctctaaatcaaaatatatatatggacatattaggtgagagaagtgttttattacgagagatgagaagatctaattaataatattagatacatgtgtatctaatattagctctctcacacatatttaaatttgaaccttctatttgatctaaggagtgtatttactcatcttttctctcataataaaacactcaactcactctcttatgctatatat

SEQ ID NO: 233803 - DNA, 433 bp, Glycine max
  unsure (1)..(433): unsure at all n locations
agcttatccccataagagtgcagaacactttttttcagcattgattataggaggctaatccaggtaaccaaaaaagatcattttcccctgccattcattgatcaaatgcttgagcgcttggcaagtatgtctcattacaatttttttatggtttttctggttatttacaaattcatattgctcctgaggatcaagaaaacaccacattcacctatccctttggcatttttgcctataggaggatgccctttggcctatgcaacgcctctggtaccttccaacggtgtatgcttagcattttcaatgattttttagagagttgcatacatgtgtttatggatgattnttactgttatggatcctcttttgatgcatgtttggatagtctagatagagttcttaatagatgcattgaactaaccctgtgctgaat

SEQ ID NO: 233804 - DNA, 227 bp, Glycine max
  unsure (1)..(227): unsure at all n locations
tatntggngaaaggaaaggttgttctctatcaatgaaggaggaagttgcgccaatgatgcaagcactatattactggagaagcttggtttaaaaaccacccctcaccctaagccttataagttgcaatggttgagtgacaatggtgagatgcgtgtggatatgaaagtgttacttacattctccattggaaagtatgttgaagaaactctttgtgaatggttcccat

SEQ ID NO: 233805 - DNA, 342 bp, Glycine max
gtcttgtcagacatactccaaaggtccacttctctccctctttttttccttcaatttcgtgctccccccatctctctttctctccctctttcttttcctccattgaagcatccttccaagcttcttatccaaggctcatcttggtggtgaagctccatcttccatggcttattccctagtggatgacgcctcctctcacctattctcctttgtcttttgctgcatctccatggtggaaaatcaccattaaaggacctcattgaagctcaaagatccagcctccatagaagccccccaagcaagcttccatcaagtggtaatcagagcacaagagcttcaagt

SEQ ID NO: 233806 - DNA, 397 bp, Glycine max
agcttagacaaaggaagtggcattattcttttaatgttttataacaccacaaaatgcctgcattacctttcacttacctttgtcttaaaatggtgtggtattgaccatcactcaaaatgactcttcattcatcctccgatttgcaagatcctaaatgacaagatgcgaatgcatgcatatttatggttgaacgttaaatgcaacaattaaacaggtgttatcgtgttcaatttttacttaaacgcttacagcaccccgctgatcgagccaaatggctctggattcagcgggcaagatcgagaatgtttgctcttaaggacaataagaagtaaaagacacagcagaggaggttgagatgcaaatctttaacccatatttattaatgttgcgaatatgg

SEQ ID NO: 233807 - DNA, 302 bp, Glycine max
aaaatctattttactttttactcaagttatgaattcccttaatgacaatcttcttaaaatttaatgtcaagtggcacaactttggatattgaatataaaggcaataataaattaaaggagattacgggaagagaaaatgccaactctgttttatactggttcggccacacccttgtgcctatgtccagtccccaagcaaccccgctggagagtttcactatcttgtaaattccttttacaagttctactcacacaaggaccattctatctttgtggttagagattctttacaacaagagact

SEQ ID NO: 233808 - DNA, 420 bp, Glycine max
  unsure (1)..(420): unsure at all n locations
agctntgaaggtgcgtagcccacctatcttttcatagtagagtatcgataatgtgtctaccatcacgatcatcgtctccctttttgcacatgatctgtagttgcatcctatccgaaaccatatcagaatagtactgatactgcctaacgaaggcaaccattaggtccttccaagtatggactcgggaaggttccaagttagtgtaccaggtaacagctaccccagtaagactttcttggaagaaatgtattagcaattcctcatctttgcgtatgcccttatcttccgacaatacatctttggatggttcttggggcaagtagtccccttgtacttgtcaaagtccagcaccttgaacttgtgaggggtgatgatattgggtactaggaacaactcttctatgttagcaaaggcataatc

SEQ ID NO: 233809 - DNA, 421 bp, Glycine max
  unsure (1)..(421): unsure at all n locations
taaacccagtatggtgtgtgcgatcttgccactgttggctctagaaaaatcaacaagatttgttgttgaagatntctcgatgactaatagatcatcatcttatagacgaacatcacactcaactctntagtctattctctcaagatatacatagtgttttgagagtgttttaatctatacaaaaatttagagaaagctttatagaataaagaatgaatgaattttgtgcgtaaaagtttggtgtcttattcttcanagattcttctattcatagccttcaccttcaagtatttttttgtctgcaatggattaattcttcacttgagttcttcgtctgatgaaatttggttgttgaggcaattaatgctcgcattaaatgtgtcataccctatattcatccggggacgatcattagcccaca

SEQ ID NO: 233810 - DNA, 378 bp, Glycine max
  unsure (1)..(378): unsure at all n locations
agctngagttttctgtgaaatcattacatttgcatttggcaatcaattaggagaatgaaactttggtgtatgtacatatatacacatgcgtgcattaataacttttgttcgcttaaaggcgaacttgtcgagacagatgacacagaaccattaacattgtagaaaatattcggaaacaatgtcccaaattacataacttttgttattattcatttaatttttaaaatccaacttgatgttgtgaccttgttactttaatttttggactaactttaagtgttgatctgaatgtcttgaatccttgaaccaaaggatttatattgtgatcataattgtgattttgaaatcttcagaaactctaatatgataaaaaaataa

SEQ ID NO: 233811 - DNA, 427 bp, Glycine max
  unsure (1)..(427): unsure at all n locations
tttgcagctgttatactaaatgttatcatnttcattatcgncaaaatcaccctgagacttgagagttgcaaaaccaccaaaatccttcatgtcttcttcctcttcaagttcatcataaccttctacatattctacctctggatcctgttcaatccaaaaacaaacaattgataaattgaacagactaaacacattaaaaacgtaaattccaaatagttttaactgaaacataattgacaacagaaaaaaaataaaaagataaaagatggataagtgaatacatacctcttcatcctcttcttcatcagcaatttgaagtttctccatatcaagaactttattgtactcttcaaaggataatcgtatatatcacttttgtgataaactcctttgtgaaggcgttctaatagctctttttcatagacta

SEQ ID NO: 233812 - DNA, 266 bp, Glycine max
  unsure (1)..(266): unsure at all n locations
actataccttaagtaacagtttgatactttctaatcttaagaacttaaatgacaactaaaatcattctgaagatcaagattataattttaaaagaaatatgcatagcataagacaaacactttaagagtgtgtgtgatttatatgagagaagtaaaagaaattaaaaaaataaaattttatattaaaataatatgtaagaaacatgaattngacataataaaatacaaaatgtctcttttatttatttattttcgaaacatacaca

SEQ ID NO: 233813 - DNA, 400 bp, Glycine max
  unsure (1)..(400): unsure at all n locations
agctntaacctcatcgtctctcacagtcttatatttgggagccaatccaatccttgtgttcggactctcagccacttatgatagccgccgatgatcccattactgcttcccctaagctctctgtcctttcttcacgccgcatcccatgccttgcgaactccttggagtaccctcgcgttgtggtcactgaaaccccgtgcaatgaaaggcgtgatgctttcgtctgatggcactcctctcatggggtagccaagctgtcttatggcgaggacgggattataattaatacaaccccttgttccatcaagggaacatttggacatcctttgcatgaagatagaatcctgattcttccttccttctagcgagggaacaaattaacagacgctcctccatgcta

SEQ ID NO: 233814 - DNA, 410 bp, Glycine max
  unsure (1)..(410): unsure at all n locations
agcttcttagtttcagatgatttatatggttttgnagctacctcatgcactcctctaatgactatggcatcatttcaggcgctaaactgctgggagttggaggccatcttctcaattaaatttctggcttcagcaggagtcatgtctccaagggctccaccactggcagcatctatcatacttctctccatattactgagtccttcataaaaatattggagaagaagctgttctgaaatctgatggtgggggcaactggcacatagtttcttaaatctctcctagtactcatacaggctctctccactgagttgtctaatacctgagatatccttcctgatggctgtggtcctggaagcagggaaattnttttctaagaatactctcttaaggtcatcccacctcgtgat

SEQ ID NO: 233815 - DNA, 367 bp, Glycine max
atggacgaattaagatcattagttggactatcatgtgtgtgattcatacaacatctcatataatatcttatatatattgataacactttatagaattatctctttccgttgtatagtatattatatccgatcatattctttttcttaaatatataacttattgtacgaattatcgtaaaaaagatattgtattgtattgagaaaaatacatttctggttaacttaagaaattgtcttgttactcctcgatcttaagctatgtctatattaaggagaggatgtaattatatcgcaatattatggatcaaaatgaacaggataaataaatgtcactctattcataactgttaaaaaataaataaatctg

SEQ ID NO: 233816 - DNA, 427 bp, Glycine max
  unsure (1)..(427): unsure at all n locations
agcttagctacacacacctcgctaatagctaagtttacctccttgagatgagaagctagagcttagctacaccccccctataatagctaagctcacccatatgccaaanaacatgaaaatacaaaaaaagtccctactacaaagactactcaaaatgccccgaattacaaggctaaaatcctatactactagaattgctaaaatacaaggcccaaatgaaggaaaaactattctaatatttacaaagataagcgggctcatacttagcccatgggctcgaaatctaccctaaggctcatgagaaccctagggccttcccttggatctctagcccaatctacttggagtcttctatccaatgcccttggggggtaggattgcatcacttattgtgtgctggtttaccttcctgagacaaattttagct

SEQ ID NO: 233817 - DNA, 387 bp, Glycine max
caacttctatgcctacaagattgacttgcctagtgagtataatgtaagcgccactctccatgtgtctgatctatctctttttgatgcagatggaggggccttgtatttgaggacaaatccttttccagaaggagggagtgatgatgacataaccaatggcaaggaccatgaagcacttgaagggcccatgaccagaggcagacttatacaagcccaacacgtcatagagacaaggctggtcatttgtatagctaccattgatgatgattgaaggcccaagtggagaaagatgaaggcccagaggcagaggcactaccaagactactgaattgtgctgaaggcccaagtaaataaagttttagttataattatatttattgaattttg

SEQ ID NO: 233818 - DNA, 439 bp, Glycine max
  unsure (1)..(439): unsure at all n locations
agcttagaaagttttagacagaagacacattttacttcatctnaacatataaancttggatgcacattaatgttttatatttaatgtcttaaagtagcataccacaagtcaaaatcaatatacaatgtgaatttttctagtcatttatttcatgtcctaaatagccattgaaaacaattttcctctaatgaagttttccctaagtggttagactatatgtggctttaggtgagaacaaaataaacaagatctatgtgaaaaatatattcaaagttagggagctgatagactactggaaggtgacgaaagcatctgagagtaaagaatattaccaaagctgcagcacatattatagttgctgtgtgagtagaatgagctcttctgccaaatggaaactgtgtaccactcagaggtattgaattattagttgtcagtaatc

SEQ ID NO: 233819 - DNA, 432 bp, Glycine max
  unsure (1)..(432): unsure at all n locations
gcttgggagagggagcaagagatgattattatttttccaccattgcattactcaacaaaggctggtcaatatcttttatggtggagtgtcctcacataataggatgagcatgaatgctgcttatgcggccaacctattgttaaagcctcatgctaatgccatcaatcattgaagacatgtgctctatcccctacaacaactcaggggatatgaggataatgaagagaggcatctatcgggcagagatagatgaatcccaaattgaattgggaaaacaaatgcaagctcaatcacttaagattgagatactcatgagagctcaagctcaagtccccattactacacctcaattcccaacctgtgataaatgtganaatgtgcatgggctaagagaatgcactattaatgacaagctagttgcattcatggatg

SEQ ID NO: 233820 - DNA, 314 bp, Glycine max
aacagcacatctttatgtggagtctcgaatggctatccttggcctatatatgtgtgacttgagacacgaatttcataagagtttttcagaacaaaaagacttatcctcttaatagaacacaaagggcttattcaaagtggtctatttgaatcacgatttacgagattcttattaaaggaaattataacttgaatagaacgttaaataaaattcttaatatgggaataagttgcatatcttaatacaaccccgcccccttttaagatatatgaagcccctggccaacaccatagaatcaaccgataacgatatga

SEQ ID NO: 233821 - DNA, 441 bp, Glycine max
  unsure (1)..(441): unsure at all n locations
agcttttatcttgaatgcttcgctgtgtttatttttgtctctacacgtgatggatacctatggagtcgagcttgagctgagaaagctagaaggagaagtaaaggccatccatgagaatttgctctatcttaagggaaggtaattccaatcacatcaacatcttcccctgtaaattgtttaatgcatataattttttaaaaacttttcatatgcttaatttttgttttttgggttatttattcagggaagctgaaatgaggactgtgagtgaaaaaacaaatggcagagtggcatggtttagcattatatccttggctatgtgcattgcagtttctggtttgcaattgtggtatttgaagcagtacttccagaagaagaatcttatatagattagttaatttaagtttttttgtgatacagcanacatataataacttagtc

SEQ ID NO: 233822 - DNA, 260 bp, Glycine max
tttttttccccagcaaaagcgctacgcgaatagtgccacagtgtctcccggttttgagaattagataatgcccgatcgaataaaatggagcccgtctcctcgtggattgatctcagaataatgttgtgatcagcccacaagtattcaccgtcggcaaaaatctatgatactgcttccactcctcgtgaccactgtgttggaagtgagcctaaatctggaaaccctatcacagtgtggctgaatttttaacaaccaattat

SEQ ID NO: 233823 - DNA, 368 bp, Glycine max
  unsure (1)..(368): unsure at all n locations
agcttctcccctattttttatatatagggtgtgaagcgaacaagaaaagggttcaaccccttatgcacttctttctctttcgaatatgcttgggaaaattgtttccgtgaagaaaatacaaggccgaggcttcttccgtaacgttttcgtaacggttccgtgagttatttcgtgaagattctcgaccgttcttcaagattcatcgttgggtcttagttttcttcagtcttcaacgggtaagtacctcaaaccaagctttcaattcattatatgtacacgtggtgggccacactttgcttcatgtattttcattctcgctttcattgaccttntatacccccttttgacgtgcttaagtcattatttaa

SEQ ID NO: 233824 - DNA, 308 bp, Glycine max
  unsure (1)..(308): unsure at all n locations
gccaaaatcttgatgtaggatttgaacagcatgagaatanggactcttttgtataaatttgtgctgtcccatgactggcactttgcacctcattaacgtgggagatgctcttttatggtggggccgtatatgtgtacatatatattgcataagaatatgcttgacaggggagcaatgtatatgtcataccaatatgctgctaagtgtgtaaatatatatggcataaaaatattgtgcaaagagtgtgaatatatggcactagaataccctgcagagtgaatgaatagtgaaaaatgcctttccaaata

SEQ ID NO: 233825 - DNA, 434 bp, Glycine max
  unsure (1)..(434): unsure at all n locations
agctngacttgcccacttacatcatcttgtatattatcacactcgatatacctttaaaattgaatcattgaatcgaaatgttcagaatgtagcaaatcaatgcaaattcaagatatttaagaagttaatttccaagcactgcatccaactttcatcttttgtactgattgaaagtcaagcatttttcactatccgaataaaatctgttaaagcaaaatttttcttcccaagcggagaatcatattcaatatctggtttcttaaaaattttctcaatataaatatatgtgcaaatagagctatagcatatcctctaatataagaacaaaaatactataactatttgtaacacatggctagaatgctaactggcaagagagagaagtatatgataggaattaatgtactagctagtcctgatactatgaaattttt

SEQ ID NO: 233826 - DNA, 320 bp, Glycine max
aaagtaaaagagtatggaagaaggaaacaaacacacaacagtttcgtatactggatcggtagcaacccgtgcctacatcaatccccaagtgagctgcgaaccttgagatttctttcaaccttgtaaaaattcttttacaagcaaagatccacaagggatgtaccctcccttgttctctttgaacctagaggatgtaccctccactagagctgatccataagagatgtaccctctctttgtctcagtcaaacccaagtagatgtaccctctactggtaccacacaggatgtacgcctcaatgtgttaagacaaagatctca

SEQ ID NO: 233827 - DNA, 431 bp, Glycine max
agcttctacttatgtggcagggcgtgtctttttcactttcttgcctcaaccgcgagctttgaccaccgctctttctttccgcgatgcttctcttcatatccgcctgagtgggtttatagcctaaaccatacttcccacgatttcctttggcatttatcaagctagttatgccgccgttgtctttgcctaaacccattccgggtttgtaaccgttccccaacatcactcgggccatcattactgctgcatcggacaggcaagcttgcccagagaaggagtccacggaggaaatgcttaccacctcaaaagactggaaagcggtttctaatgactcctctgcggcttccacataaggcatagaggatgggcagctcaccaagatgtcttcctcgcctgatacgatgaccagatgcccttccactacgaatttc

SEQ ID NO: 233828 - DNA, 408 bp, Glycine max
ttctctctcctcactcagccaaagcagaatatttcataatctctccctctctctcacgcagccttcttcttctcttcttcctccaccattgttgcctaacaaagctccaacctttggccatcatttctgctccaaatcgcgaaaggagggcattttcggggtcgtgaagtgtgtgtctacgagtgggacttcaaaatttcaggtttgggtgaacttctttctcctttgattttcgtgggtatggggttttgggagatatgatgggtagttttgttagttttctgcttcatgatggttatttgtgaagactcttgttgaaagcttgttgaaattgccatgcttggatgagttagacatacccattcctgtttaaggtttttgtgatgatagttgtgatgttatatgctg

SEQ ID NO: 233829 - DNA, 382 bp, Glycine max
tcaaaaggggaatatcaagtcccttgttgaagtgtttcagtgaagatcaaacacaatatatgatggattgtgctgagtacatcaagaaaggtaaaggatgtcaagaattcattaatatttaacacgcaccccctaaggaacttcatagtaccacatctccttggccttttccatgtagtgaatggatatattcaattcatttcctttggttaaaggaaaaatcaaactctttcttgttgttatagactactttaccaaatggatagaagcaaaacctttggtgacaatcacaactcatagattcaaaaattcgcatggaagagataatttgagacgtggctaaccttaagccttgaattggcacgggagaaatcactgacaa

SEQ ID NO: 233830 - DNA, 314 bp, Glycine max
aaaagagattagattgttttgccaggctttgagtgaaaaagtctcaagaacactcgcatggagcttggaagaagaagaaaacggatgcctctcctccctagaagaacttatgcaagaggttaaagaatggaggttccaagtcttgattttttttggagaatggaaagatagtgatgagatcaatttgacaagcatgaatgaccatttgatagccatgttggatgtgtcaaagggtgctataagagggtgttttggcttttcaaattctctaaccaaaaaagggataagttgacctaagccaaaaaatggaaaaa

SEQ ID NO: 233831 - DNA, 375 bp, Glycine max
  unsure (1)..(375): unsure at all n locations
agcttacttagattgagaaataatgttagtgcaaaatcttaaaagaaagcctactttaaaatcttatggctatcattcttatctaaagaaagaccaaggtctaggcaacttaggggcagcaccttctaagcccaatgatgataaggggaagacaatagaaaagcaatcccctaaggctagtatgcaagaaaagactagctccatgaagtgctttaaatgtcttggaagaggacacattacttctcaatgccccaccaagaaaaccatgattatgagggaccaagacatttatagtagccaagatgaggctactacttcaccttcctctagtgaaagngaagaagcaaaaggggaagaatctagtgaagaaatcta

SEQ ID NO: 233832 - DNA, 311 bp, Glycine max
tagtgcactcccccttaattctttggccctccattgatgtgttttaatgccttagttgttcaatctttgccaatttcatgagacaatgtatgcttggatttacaattgtttgtctgcattggagggttgtgtgggatggcctcatgcctaatgtgggttctaaaatggttgggcacatcacattgcccccatcccctttgttcatcatacctaagttgtgcccaccaagtgctcggtgaaatgcctcaatgtgaattgggcatgattttgtgaactttattttgtgggactgactcgtgtatatggaaagc

SEQ ID NO: 233833 - DNA, 383 bp, Glycine max
  unsure (1)..(383): unsure at all n locations
agctgtggatttcaatgttgagtgtctcgatatattacaagactcaatcggacatccaagtaaaaagttattatcgttagaatttgctcagagcttccattttcaattacgagtgtctcgatatattacgggattaattcggacatccgagtataaagttattgtcgtttgaatttgcttagagcttttttctgaaatttgagcgtcttgatatactatgggacacaatcggacatccgagaaaaaagttattttcgtttgaattngctaagagctgttgttctgaatttgcagcgtgtcgatataccactggccacaatcggacatccgagtaaaaattattgtcgtttgaatttgctcagactttttgtttcaatttgagc

SEQ ID NO: 233834 - DNA, 363 bp, Glycine max
  unsure (1)..(363): unsure at all n locations
tgatgcttgtggagtaggcattggggctgttttgatacaaaacaaaagggccatagcttatttttcggagaaaatgggaggagccacattgaactattgcacctatgacaaagagatctatgccattgtgagagctcctgatcattggaatcattatttgcgttctaatcactttatatngcattcacatcatgagtcattgaagtatatcaatgggcagcataagttgagtccaaagcatgctaaatgggttgaatttcttcaatcttttaatttctcttccaaatacacagatgggaagaataatgtggcggctgatgcactttcaaggaggtatgccttaatttcaattcttgaaactcg

SEQ ID NO: 233835 - DNA, 421 bp, Glycine max
agctgttcgattcattctatgcacccatgtgtggtccacattgggttttgtgtatttttattcccgtttcgtttactttttataccccctcttgacgtgcttaagccattttacttaagtcatttctcgcttaacttaaaaataaaataaatttccaccgaacgtttgaattgtattatccgttaacttcggttaaaatgaatttcgaccgttcggtcgtgccgtaaccacgttggaaataaaaaaaaagagaggtgaaaaataatataataatcaaaaaaacatcttttagtaaaataaagcggaaaatcaatcggacgctttctctttgggatttcttattcttaatcgaattgattaataactaaagtgaaactaaggctaaaatcaactcgcctagtcaagctcgtccacaaaaata

SEQ ID NO: 233836 - DNA, 446 bp, Glycine max
tgccacccagctcgcacaggtgagctatgttgcttcatccataaggcaccgccttttggagaaattcctggaaggcccaaatgggctaattgctatatgcacccctatattactaaatacacccccctgccttttctttgctgattctttttccataacgttacggaaacttatgaatcacgtaacgatacttgttttccttccgtaatgttacagaaccttacggattacgtaatcatcccttttttgccttccggaatgtgacgaaactttacaaattgcgcactaacacttcctttaaattcttgcatgtcacggaacttcacaaattatgctacaatgcctgtttttgactatcggcatgtttcggaactcaccaattttctaacgatgggtgccaatacctctaatggtcaacgaggtcgcctccaataatgatggtcccc

SEQ ID NO: 233837 - DNA, 407 bp, Glycine max
  unsure (1)..(407): unsure at all n locations
agctntgatggtgtttatattaaatcatatgtttgtcatcatcaaaaagggggagaatgtgaatgtatgtatacatgattttgatgatgtcaaaagaagaattaaacaaggctcatttttgcttcaagattaatacaagattgtttcaacaaacaaagtcttgattcaagatttcttcaagatcaagccttgcctcacaatgaaaggtttcaagtcattcaaggcacatgtaatcgattaccaatggtttgaaagtgtgtaatcgattacacatcatatgtaatcgattaccaaagactctgaacgttgagaattcaatatttaaatgaagggtcacaactgttcaagaaaacaactgtgaatcgatacactattctgaatcgataccaggaggattttaaggaata

SEQ ID NO: 233838 - DNA, 415 bp, Glycine max
  unsure (1)..(415): unsure at all n locations
ntgcaaatttggtcttcgccagtgataggatcaatgtgtggtccgaaagaagcaaatttgatcatcctactatgacgacggagaaaactgtggccaatgaagagggtgagaaagagggagatacccatgctgtgactgccattcctatacagccaagtttcccaccaacccaacaatgtcattacccaacccttctccttacctaccgcccatttatccaccaaggccatcgctaaatcgacaacaaaacccacctaccacacaaccaatgctaaacaccacctttccacaaaccaaaaacaccaaccaagaaatgaattttgcagcgagaaagccttagaattcaccccaagtccagtgtcatatgcgtaccttgctccatatctacatgataatgcaatggtagccataaccc

SEQ ID NO: 233839 - DNA, 376 bp, Glycine max
ctattaacagttactatataggaatcgcctcaacgcaacaattgcaggtagacaatctgaagactaacatattaacattagagctgagaactcacatgcagatgctcgtgaggctaaaattatttctaaattcaaatatggtcatttgcataataactttttgcccgaagttttgtttgcgccctaaccttgtttatgacaatctgcctaagtacattattccactaatggttgatttcaattaagccattaagtcacattttcatgttcaaggaagaagaacttatgtgcttctataagacgatgatcaatgcccaatgcttcccttacctttatgaggccacagagtctagcacaaaaattgggtaaatatata

SEQ ID NO: 233840 - DNA, 318 bp, Glycine max
gacatcttttgccttgaatggaattgccatgacaggtttattgttactgtctctgatattcggaagacgatattgtgttgccggagggaattcccgatcggattaactcaccatccttaacttgccaacttgttatgacatttgctgttggatcacctatgatgtcttgtttccaagggtaatctatatcctttctgatggcgtaagcatgaaaccaatcaaagaaaaggacattaattttgactcgttcgacaaattcagagaacttgtcttggattctgtctctgtttgacccttgaacgttggaaaaccatctct

SEQ ID NO: 233841 - DNA, 466 bp, Glycine max
  unsure (1)..(466): unsure at all n locations
catgcaagcttctcgggcctttgacgctcatgctcttgncatgtttcctcctatgcctcgtattaggtcttgggcttccatctggtcatgagtctgggtctggtggccgccatgggcttggactttgatgtccacatcataaaatcttatagttagatgtctatgctatggtttataaactgtttctacacaagttaaatcattttaagcttcttttttcatacctaaagcaataaaattaaatgtagttaataaaaaatgaaagaatgaatagaactaataatataaatgaaaaattaatataggttaaaagaataacttaaaatttatgaaatgacttataggtagaattatataatcaataaagaatgactagcgaatatgtatctaattttgaataattgatcaattttaatctgcataactaanaaagatgtattactattactactttaacactactaaa

SEQ ID NO: 233842 - DNA, 373 bp, Glycine max
  unsure (1)..(373): unsure at all n locations
acctgangcatgcaagcttgttcagaaacgtgcatgtgtgtgctatacatattgaacccattgnggaagaaccacaagaagtaacattaaggaggtctcaaagagaaagaagaccagctatttcgaatgactatgtggtatacttacatgaaatagaaacaaacttaagcattaattataatgatccagtttcgttttcacaagctataagttgtgataattctgagaagtggttaaatgtcatgaaagaagagataaattccatggaacataatggtgtttgggaccttgtagaattaccaaagggttgtaagagagttggttgtaagtgggtcttcaagactaaacgtgactctcatggcaaccttgaacg

SEQ ID NO: 233843 - DNA, 320 bp, Glycine max
aaagtatgagtggttgggggtattgttctaataccatgattaatctcatgtttaccatgaatgaatgagtgtgaatagaagagagaaaaatcgagaaaagttaaaccgcttaatgttaggattatgctcaaatgagcaaaacttagttttttcataaatagaatggttatataacctaacttatactaactacattataactaatttataactaattaaacttatttatatttctaatatttaacatcacatctgggtttataattattacaacatctatcttcaaatctttacaaagaatattgttttcaaccaaaatt

SEQ ID NO: 233844 - DNA, 252 bp, Glycine max
tttttttttgccccccaaacccggagaatacgcctaaaattataaacgcttttttatctcagccgaagaccgttcgcaacataaacgcattattggtttatattatctgacggctaattcattataaagaggtgacaaagaccttctatagggacgcgcttaaacgtttattaaagatctgatattacagattcctgttaaccactctgttgcttaacaacatcgctactctgctagtattagaccggccac

SEQ ID NO: 233845 - DNA, 407 bp, Glycine max
  unsure (1)..(407): unsure at all n locations
aacattatgatacatgtaagccaaaaacataagtagcagactatattactgctttgactagaaataatctgaatgaaataacaatatgatgtccaactcattatcatgattcatgctgaaaacctngaagcagtgaaataacaattttgttcatggagtaaacataggccaaatcaagccaaattattcagccatccagagaaacaaaggtccataagatattatatttcatcaagttctagagatgtgaattagtcaaataaaaattgtaaagtatccttagtatatttagatgtacctttactgtnttgtcattaacaatttttcatgcattagataaaaatgtgtatgcagactgcacacacagtgcagacaagcttctaatgactgatcataatcatgtacct

SEQ ID NO: 233846 - DNA, 276 bp, Glycine max
tgaatcttgaattcaggtattgtattgtcatcatcaaaaagggggagattgtagatgcaattggctttgatgttttgatgatgatcatgatgatgtgttgcaattgatgcaaatgggcttttcaagaataaatattcaagacaatacttcaagattacaagtcacaacatcaagatgatcactagaatattatgaagggaattcctaattgaattagcaaaggtttggccaagtgatttacaatataaagtgttcttaaaggtttactctcttgta

SEQ ID NO: 233847 - DNA, 287 bp, Glycine max
  unsure (1)..(287): unsure at all n locations
ccaacgncaccacccatctccatgtatcatctttacatacattgtattctcttaaagcatacataaatataaatcgacttcgcccattataggctttctgagttgaatatgagtggtctaaaaccaagcaaaccagctgtcgataccctttgcaagcttgcagggacctcaaatttggcacgaccaatactcggaggcaccggtgttggaactgcgagcaaaacctatctccaactgtgttcacgtattaaggttcattctagcatgctttgacttcctggcttccg

SEQ ID NO: 233848 - DNA, 452 bp, Glycine max
  unsure (1)..(452): unsure at all n locations
agctttgactctgataagtaggatattatattaaattaataacttaagatgaaattatttttgttcatgtaatggttcttttattctcaacccaaaaccatgttcataaaatctaacaactaatcatgattcagggaaatacaaacggatcaagatgcatagacaagttataacatanttgcaccagaaggccacaatgctacactgccttgaagactcatcccttaggtcataattttttcagagattaggtgacttgcccttgttacagtacacaaaattagctaaggttaaagaaaatcacaaaagaataaattagtcccatgtttggtggcttatcaacccacgagcataacaaattgtttatatttcaaacattnttaccaatcagttggttgccataccatcaacaagaagcatgtctnccacatccacatcattgacgaaatcgt

SEQ ID NO: 233849 - DNA, 395 bp, Glycine max
  unsure (1)..(395): unsure at all n locations
tgtgtttttctgatacccctttgcttgttttgcgtgtattatcaactttcactntgaaactaaaaccgtgttcaattgggtcatgtcttctgtgaatagaaatttggccaagttgcgaaattttgataagttnttaaccaagatgggaaatttgttgtgtgggtgtttgtgtggatcaatggtttggagactaattgttcttgcttttttctccccagaggctgttgctgatgcaaacaaggcgattaagttgaatccttctcactcaaaaagcatatttgcggaaaggtgagtctggtgccactaagttttttttttcttcaactttcttgttgttatcaataccggatttgagttcgttcaatgtataantacgtgccatcaaatgtatcaat

SEQ ID NO: 233850 - DNA, 400 bp, Glycine max
  unsure (1)..(400): unsure at all n locations
gaccctaagcgacctgcggcatgcaagctgtgaggtaggagggatggagtttttatnggcactaccaatattgctattggcactaccaacattggaaaaatgaccttcctatcctcctagatttccaacaggcaactcttttcccttcctctctccctttccctttcatcacacgcccacccttcaccatcctccctcacacttgtttctttttccctttctttcattggataaatgaacttggngagttttttttatcatttgcaaccaacataatcatgattccatgttctttattttcgtaaaccacaatagaataatgatttcattggttcctagattttgacacaatgaaatcgggatccattgggaatttttggcacaatgcttgatggtgcct

SEQ ID NO: 233851 - DNA, 346 bp, Glycine max
aggttcttctattctcaagtcagaaccatgttcataaatactaacaactgatcatgagtgcgggaaatacaaacggatcaagatgcatctacgtattataagctatctgcaccagaatgccacaatgctacactgtctcgaagacttatccgttaggacataattttttcagagattatgtgacttgctcttgttacactacactaaattactctacgttttagaacatcccaaagaattaattattccatgtttggggcttataacccacagctacaaatgttttatttcaactttttccaatcgttggtgcctaccataacaaaagatgtttcccattccatta

SEQ ID NO: 233852 - DNA, 430 bp, Glycine max
atgcaagctggaaggatgctccaatggaggaatttattgagggagataaagagagaggcgggagcacgaaattgaaggaataaaagagggagagaagtggaactttgaagtatgtctcacaagactctcattcatcaaagttacaacaagttttacacatgcttctatttatagactaggtagcttccttgagaagctttcttgagaaaactttcttgagaagtttctttgagaaaacttccttgggaagctagagcttagctacacacacccctctcataacaaagctcacctccttgagaaacttccttgagaagattcctaaagaagctagagcttagctacacacacatttctaatagctaagttcacctccttgagatgagaagctagagcttagctacacaccccctataatagctaagctcac

SEQ ID NO: 233853 - DNA, 400 bp, Glycine max
  unsure (1)..(400): unsure at all n locations
ctcgcgactggtccctttcttcccttcgcaactngagttcattattgctaccccatagagctccgcgaaatttgttccggccatactcttcctttcgagccctcttggtctcttgttcaagggctcttgcggtaattgcattctcttcccgtaacccggcacactccttccgaacgtgtgtagcagccaacttgaacttctccttggcgagtattgcctttcctaactcgcttttgagagcttggacttcttcgtcctcttccggtgctctcaaattctcttcgctgacgacttttaacttggcgagccaatctaaacctcgtatgcgaactttcagccattcgtggtacccaccaatgatgccattacgaatgcctctagctcttgatctttcctaacg

SEQ ID NO: 233854 - DNA, 372 bp, Glycine max
  unsure (1)..(372): unsure at all n locations
taagttcacattcgcaaggctggctganttgctgaatcctcgtcgtacagctgggattttctaggtatctccactcattcaagagtgactgtagtaatnttaatttaggataaccaccatgcttctggttctctgtcactttctaattcatcattttataatgcctataatcaataaaaaaaatcttatttttttactgcaataaaaatttgtatttatttttacgttgtataatatgtttagagtttttttaacacaaaatatttctcaattaaaaatcagaaactaatctcttgaagccaataggagatccagaaattgttagttgtggagacaatatctatttactattttataaattagtattttaat

SEQ ID NO: 233855 - DNA, 322 bp, Glycine max
  unsure (1)..(322): unsure at all n locations
tatccctttctggagcttaataacaagtgggctcctatatggtgggtgacacactctataaattcgaatttgctttttcttgcataaaaatggttttgctgattaatctatatatatacaatgcangtatttgtgcctggcagtaatccatgccccttgccatatggcgtgtatcatctggatagtccgagccaaaaatacgattcttcccagattgttccctcgagcatttntgtcatangaaggacatgctngtttgttgcggatacatggtctcacacatcaagaacaatactcaatttcacatttcaagaacgatgct

SEQ ID NO: 233856 - DNA, 453 bp, Glycine max
  unsure (1)..(453): unsure at all n locations
agctttcttaccanaatgaaatataatgtacatggaccatgatgagaagcatcatagccatattacaagaaagtttaataaataactcaatttcagtcgggcttgtaattgaagaattttgaccatcaaatgtagtaaattgggagaaagtttattcagagggaagctaactatgaaatattggtcaacagaatcacaatataataagtcaacagttaatattaattatctcctcaatttgttacttcagataatgacattttttatattttgctatgaacaaatttcagtctctacctatcatattagaagacttttgaccactcatatcccttcaagacttttactatttctgacttcagtcaatcctganaagaaccttggctgagtttgatagcctctagttgtggataacatttctctttcattcttgctgcaatagcaacttagtat

SEQ ID NO: 233857 - DNA, 309 bp, Glycine max
  unsure (1)..(309): unsure at all n locations
atgttatttgaatttttttaactcggtacaaaagtctacatttgcaaagccaaagttaaagggttaaagctgtgtacctgagcatacttgcaatagagatgcacccaccttctggatggcactntcagctttcttaatttcatcctatccagattcatcatgtaggaaatagaagagaaatagatgattaacaacttcaaaatcctatccagattcatcatgtaggaaatcgatgagaaatagataataacaacttcaaaagtcaaaccatggacatgaatganagctcacataatgagctgattacat

SEQ ID NO: 233858 - DNA, 394 bp, Glycine max
  unsure (1)..(394): unsure at all n locations
aaacagnatccataatgttatgataggaactttcaaatgattgttatctaaaacagtatccataaagttatgataggaacttttaacactatgcataccgtttagagataatttccagaccagcttatcatcagccatggtgttgaaaagaggcaacatcgtaatttttaagacatcttcatttgtgaacatagtagcatcaagaactttttttcatgtgtttgtttgttgatcagtaagtgctctcactagtaaactttcatggtcaacaattgtaggagatgagatgtaatagttttcagctgaatttaaccaaggttggaccagactcctataaaatttccattgtctatcctccattctaagacttccttcaccactactcgggaagcat

SEQ ID NO: 233859 - DNA, 449 bp, Glycine max
agcttaagtcatatctcttaattgagaatttggatgcttgtgttataggaaattttggatcctttatattggttggaccttatagtctacattgagtatataaagggaaaataaacaaacaaaaaggaattcaagtgttgaaagaactaaggatgtcttacaactactacatacatatatttgtgttctattccttatggattcatggaatgaacaaatgtattttattatgttcatagatgatttctctttatttaaattatgagaagtttttgcctctagacatttaatctttcaaagctgaagttaaactctaactaagaaaaagaaagaaaataagattgtcaaatgtgaccgtgaggaatacaaggtagatatgacataaggtgcaatggttggagtccccatgcgttttctctataattggaaattttttacacatataatgt

SEQ ID NO: 233860 - DNA, 196 bp, Glycine max
ctgaactgcggctggtcatggagataaaggttaatatgaagcttgaagaggaactgctgatgtacaagaaggagactgtggaacagcatgaaaagggctttcacaaggtcgctaggtaggtcgggttcttttgcaaagcccctaacttgggtctttttgaccctttcaaggacatgaaagacggtgttctgcttga

SEQ ID NO: 233861 - DNA, 387 bp, Glycine max
  unsure (1)..(387): unsure at all n locations
tcatggggaaacatgcaaacaatcacaggcgccctcacgatatcaacgttggagattgggtttatctaaaaatcagaccacatcgccaaggatcaatgcctccgcgattgcatcccaaattaacagctaggttctacggtccgtatttggtagttagacaggttggggcagtagcttttcaattacagcttccttcagaggcacgaatacacccagtgttccatgtttcacaattgaaaagagccctcggaaatcatcaagcacaaggagaattaccccctgacttggaacatcaggctgaactatactttccagttcaaattttgaagatcagagaagttcanaaacagcatgaagtcgaacgtccagttttgattcgttcgcatg

SEQ ID NO: 233862 - DNA, 219 bp, Glycine max
  unsure (1)..(219): unsure at all n locations
tcatacataagagcatgtgctngctgaanagactcttgtccaagatcacgaatcatatcctctaagcgatctcctatttatacatcaaatgggttaaattgagaccccctctacatgtctgtcaattcatcatgccatatccatgtggtgtaattcttattaatcccatcacacaatagatgctcccgtatgtcgtccagtatttgtcattctctgttc

SEQ ID NO: 233863 - DNA, 377 bp, Glycine max
tatgccactgttgtctcgcccttgtggcttatgtccttcaaaagacatttcccctattgttcttgtgcctcaatctgatgtggttcgtactattccagcaagtcaccctatggtgactcgtgctaaagttggtatctacaaatataactacttatcggccatcttctcttttacatgcattactcaacacttctgagcctaaaggttttaaatttgctaccaagcatcctggctggcttgctaccatgaatgacgaactcacggccttacactccaacaagacttgggaacttgttcctcgaccacctaacactaacattgttggctccaaatgggtattccgcactaagtatctttctaatggctctattgatcgc

SEQ ID NO: 233864 - DNA, 394 bp, Glycine max
  unsure (1)..(394): unsure at all n locations
ggccttgatctcgctacaacattagtccagcctaattttttttaaatctgaaaaatagatagattgatgaaataaatctggagaaataaatctaatagaataaatctggataagataagatttgataaaataaagctattattattattattattattattattattattattattattagntaaataggtcgacttgtcaagcttaacaagctttttttatagtttgggcttgaccttttatctaaaaaagctttttaaaaagcttgagcttggcctttatagtaaacaagccgagccgagtcgagccttacatatgccgagccaaaggcccttgacaagctactcggctcatttcacccctagctgccgtcatgtccgcaacataatcaaca

SEQ ID NO: 233865 - DNA, 429 bp, Glycine max
agcttagcgcattgatctcgcgcttagcgtgtggccttgatgctgatgccctgtcagattcttctgtcgcgcttagcggtggatgcacgcttagcctactgatgagctaagctcaagtgtcacttttggcacttcatgacttagcctctttttcacctgaaattgcacatatttcatcattaaatccaatggacatattctagagacatctttatccataaaacaaaatttatttacaaaaatcactaaaaaataaccataaattggggaactatacaagttttggaaaatgatttctatacaaaagttagtcgtataaggcaactaacaaactcccccaaatttatagttttgcttgtcctcaagcaaagaaagaagagctcacccttcctcaagtgacaaagacagtggtcaatcaaaagaaaatgg

SEQ ID NO: 233866 - DNA, 388 bp, Glycine max
  unsure (1)..(388): unsure at all n locations
ggacctatgaaactcagcttataactctatttaaccatatctctaggttatgtgatactaaatgaccaccaaagggtgcaattaaggtatctctcagacgctgcaactaaggtgggttagagtgactgaatttaggggctttcaacactctccctcatgcccaaggataaaggtctntagaagctacatttaattcatatagctttcaaagctgtaatttaatcatgtgtatatgtagtgcattgctagctgttgtagttggagaacccaaagtcttataaagcccaccttagaatctcattnttttaatgtgggactcaagtttcatgccttgcaattggatcctaacatctcacctcgttccacagccttggcgcccacatgggct

SEQ ID NO: 233867 - DNA, 440 bp, Glycine max
  unsure (1)..(440): unsure at all n locations
agcttccctttcttcggccatttctggattcgttttgcagngatttccttggcaatttgatgctcagaaacatcaatatctattactccatcagtgggtctgcccagatatttgttgatcacagcaggggagaatctaatacactttcctctgacaaacactctttgataatcatcactttttctgtttgatatgtcagagggaatgttgacaatgaattccctgactaagccttcatagcactctcccaacttgctgacagtcttcagcagtccagcagccttgatgagatccacgatctccttgcaatccatggcagctcttcccagttctctctccaaggcaagtctacgttgatatacatatttccacttttcaacattgccaatggagcggaaagagatgttgctcaatggtgcatcaggaacatttccaggcac

SEQ ID NO: 233868 - DNA, 357 bp, Glycine max
  unsure (1)..(357): unsure at all n locations
actcagctgatggaaaaggncaagaaacttggatatttgtttgaaaaggaaatggatctctttcttctatgaaagagggaagaataccaattttgtgagcttttggagtaatgaaacttgtaaagaagcttaagcatggccattggataaggtgtggcttatttaacactcatttgactcatgaagattttggagctcatgaaaccggtcataacccctaatggatgtttcctttgatatttactaaatggtaagaaattttcgaaagggattttttttacaaatagaaattatcaacgctgatactatgtatctttagatcggtacctaggacctctaaaccttcccactaatcct

SEQ ID NO: 233869 - DNA, 347 bp, Glycine max
catgcaagcttgagaatggaagttatgccttatgttttctcacccacgcaagcgtgaaacacagcaccaaactccaacatggaggacaaatgaacagccctatgcattatcattcatgtggctcccaataagggagagaaaggaggattgcctttagggtcctaacttaagccatcattgaacacagctccaaactcgaaaatggaggacacatgaacaactctacccaataacatttatgtggctgcccaaaatggtcagaatggataattgccttgagggtactcagtccgcaatcatggtacacaactccgaactctacactgggggacacaacaacaggccta

SEQ ID NO: 233870 - DNA, 330 bp, Glycine max
  unsure (1)..(330): unsure at all n locations
tcaacatcagaccacttgcaggttgctgttcttctttatcatggactgatggggcctatgcaagttgaaagccttggacgaaagaggtatgcctatgttgttgtggatgatatctccagatttacctgcgtcaactntatcagagagaaatcagacacctttgaagtattcaaggagttgagtctaagacttcaaagagaaaaggactgtgtcatcaagagaatcatgagtgaccatggcagagagttttgaaacagcagggtcactgaattctgcacatctgaaggcatcactcatgagttctctgcagccattacaccccaacagaat

SEQ ID NO: 233871 - DNA, 450 bp, Glycine max
  unsure (1)..(450): unsure at all n locations
agcttgaagatgtgtaacccaccatttctataatagaacactggtaatgtgtctactatcattgntatcatttctttctccgtcattgagggaaccacttgggctgccaaatccctccacctttggacatattctttgaaagatctgtgccccctcttgcatatgctctgtagttgcatcctatccggagccatatcagaattgtactaatactgcctaatgaaggcaaccattaggtccttccaagaatggactcaagaaggttccaagttagtataccaggtaatagctaccctagtaagactttcttgggagaaacgtatcagcagtttctcatcttttgcgtatgcccncttcttccgacaatacatctttagatggttcttggggcaagtagtccccttgtacttgcaaagtccagcaccttgaacttaggaggggtgatgatat

SEQ ID NO: 233872 - DNA, 415 bp, Glycine max
  unsure (1)..(415): unsure at all n locations
tttaaatttagaggtaattgcaatgttggtttctctcttaaatgacaaaaatatttctgaagaggttgtaaattcgtaatgcacggttgatttgcgatctatagtaattattggggttattatttttagactttgtttgagttaacttaagcactttaatttttggagaagttgaacgaaattatagtgcttttataaaagctaaatacataaattgatttttgtacctttacattttatattttatttcatataagtacttatgaagaacttgatccaaataggtcttaatagaattacgtgaagctcttatataaatntagtgaaaaccacgtgacaatatttgacatttaagtaaaaacattatactgaaacattaaagttctttgatcattttttatatttttaagtatga

SEQ ID NO: 233873 - DNA, 407 bp, Glycine max
  unsure (1)..(407): unsure at all n locations
aataaaagtaagaagaaaagttcatactactatattataaactgggaatgaagctttaagtaattgttaattctcctcattcctcaaaaaatgatggtagaaatttaagtactttgcttgccaatttggtttgcttctttgccaacttgttacttattatttgcagcacttgtcattttatagttctcattatcttcagtgtttatatccaaatttacagcaaatataaccgagggagtgcagcttggacgaatgatcgggtacactcggaattatagcatataaacatcatcaccgctgtaaaaaaatatctcaaattctcacactacaatttntttttaaatcatccatatgaagggtatcacctacaacattctatatcatccacgtatcacctacacaacaat

SEQ ID NO: 233874 - DNA, 256 bp, Glycine max
agaagagctcacaccagagagcttggtagaactggaaggagcttcatgagaaaaaaaaggagaaaagaagaggggagccgaattgagaataaagagatagaatggactttaagtagtttacagatctattataaagtacacaaggttccagcttctattatagactagtacttctgagaccttttgaaaattcttgaagctcttgaaaacttctgaaactgacttcttaacctccttctactactactcttaaact

SEQ ID NO: 233875 - DNA, 392 bp, Glycine max
  unsure (1)..(392): unsure at all n locations
ttagaaatgtgacctaagcgcttatgccataatgctcctgagtttgtattatcaattctacacttagtacctcgcaattccgcattaaaagattcaccataggaagctacaatatcaagtaaatatagattattataagccaagaacacaaatatctgaattaaaagacaacctacacacattgtttccaaatgaacacaaataacccaatatgtccaaataagaatctgaaaccaaattccatctaaatgatggtacaacaaaagtgtatttcaaatccaaataaaaaccagtacataatgataatctaaaatgtcctatagctttcacctncaccgatttaccatctccaacatatattcatcttttagaatcaattgactactggtagc

SEQ ID NO: 233876 - DNA, 404 bp, Glycine max
  unsure (1)..(404): unsure at all n locations
tgattctncagacagtgtaaattctgaatccacacaacgtactgcaaaaagaatgtttcatgctcttntttgctatggttcaggctctaattttttaggctctaatttcttaactgcctatgaggattgtcaatctccaactaatcaacctgtaattaacactgaaggtaataactataattctgatttataatttcatatatcagggcacatgctcttaaattaatattcacaattgctatcatcatattgtactatggtattaaacaatttcacgatattctgatcttggtgatcaacttatgcaatgtaaatattgtaatgcacaaatgtggtatgatgaaagaatatcacacgataaaaattatgggagtccaaggctcagcttatgttgtggagatggc

SEQ ID NO: 233877 - DNA, 138 bp, Glycine max
aaaaagaaagaaaaaggggaaagaaaggaattgaagaaaggagaaggaaaaaataaagaggcaggaaatggaggggaaagaaaaggagaaaatattgagagggaggaaagaaaggtaaggaagggaagaaaaaatggg

SEQ ID NO: 233878 - DNA, 389 bp, Glycine max
  unsure (1)..(389): unsure at all n locations
agcttactcctcatttcaacagttcttaccaaatcgttaaaagagtcaacggagttgcctattagattgccttgtcaccatccctctcaaatctcaatagtgtcttccatgtctcccaactcagaaaatatatctatgatccattaccaatgaggattgaggaaaaaatggtgaaacaactaagagagaaggatattcctttgatcaagtttgtgagcggaggagctactaaagatagtgctacatgggagttggaaagccacatgggagaatcatatcttggtttgttcttttcagctaaatttcaaggacaaaatttcttttaaggaggggggaattgtaacatccctctatttttttaaaanatatatatatatatatatatatat

SEQ ID NO: 233879 - DNA, 260 bp, Glycine max
  unsure (1)..(260): unsure at all n locations
aatacaccactgagaggcagcattactctatagtctccaagctgagaatcataaccattggttctcgtcccccatgtgaaagggtccataacactcaatgantgttgggctcactcgatgcttgaagtactacatggttgagcgtggatagttggactgtaacttaaccgcatacaagccctatctatgaattagacacccaccgcagcactgaatggacgctctgcatatgatgttaacctactggctcacatatcgat

SEQ ID NO: 233880 - DNA, 460 bp, Glycine max
gacctaagcacctgggctgcagcttgattggtgaacattttgactcattatttgagtgaaacacttagtgagttgagaggatccatacttttttcctatttcttgtctattgaaactatgactactcattgggactttagtatggatgggttggaaatgagaaattggagacatatagaaacatagaaagagttagaggttttgaaggataaggttccccgtttcaaatgaaggagtgattcggatgcacctaaagtgggagatgaaaacagagcaagtatttgcatgttgccaatatagtgaagtggaaaaggttaaggtagcaactctagagtttaaatatcatgctctaatttggtgtgatcaagaaaagaaatatagagaaacattcaatgaaaccccggtggggacattgtaggagatgaagactcgatgagaaaaaggtatgtccaagagaata

SEQ ID NO: 233881 - DNA, 404 bp, Glycine max
  unsure (1)..(404): unsure at all n locations
gaaactaagcttcacaggagcaagtggaagatgctttttgctattgatggagctgcaaactgggntcccaccaatcatacttccactgttgccacaggtttgggtaaaattctgtatgcttgtggaaccaagttccaaatttaattttggaaactatatatttgatcaaactgtcaagcattcagaatcatttgctgtcaaattacccattgccttccctactgtattgtgtggcattatgttgagtcaacatccaaatattttaaacaacattgactctgtaatgaagagagaatctcctctatccctgcattacaaactggttgaggggacacatgttccagacattgtctcgacatcaaggaaagctgctgcttatgtgctgtgtncaaggatgctctgat

SEQ ID NO: 233882 - DNA, 243 bp, Glycine max
agaaaaaaacacatagaacctaccaaaaagagcgaagagcctgagacaaacactagacaatcccagccctacaccaagagacaaaggacccagcaaccataaaccggactagacaagaaagaaactcagacaatctacctaaaaagaaaccaaaaccacatatagccacgggaaagagagacgccctaaaaaaacaagagcaaacacaaagaggagtggaggagacccgaaccgcccaaaaga

SEQ ID NO: 233883 - DNA, 205 bp, Glycine max
  unsure (1)..(205): unsure at all n locations
cagctcctgcaaatcttatctcggtagattgcccctaaaaaggcctgcaaacattggatatacccaaagtttagtaattgaaactcccactaattactctacgagatgtctcttttggggtggactgaacttaaaacataataaaatcttaaaaccttgcatccaataaccacatgangccctatattctatcttcaaagagaca

SEQ ID NO: 233884 - DNA, 471 bp, Glycine max
  unsure (1)..(471): unsure at all n locations
aagtcacctgcggcatgcaagcttcttttggaccttgaacaggcaactatctcctctntcanaaccatgctatgttctcgcgactggtccctctcttcccttcgcagcttgagttcattgttgctaccccacacagctccgcaaaatttgttccagccatactcttccttgcgagccctcttggtctcttgttcaagggctcgcgcggtagttgcattctcttcccgtaatccggcacactccttccggatgtatgtagcggccaacatgaacttctccttggcaagtttcgcctttcctaactcgcttttgagagcttggacttcttcgtcctcttccggtgcttcaaaactctcttcgctgacgacttttaacttggcgagccaatccaaacatcgcatatgaactttcagccattcatggtaaccaccaatggcaccattacgaatgcccctaagatcttgatctttc

SEQ ID NO: 233885 - DNA, 340 bp, Glycine max
  unsure (1)..(340): unsure at all n locations
agctttgagcaaggtgcgggtttgataattatcatgaagcaganaactagcaagaccacccatcatatctcccaaaaccccatacccacgaaatttaagagagaaagaagtccacccaaacctgaattttcgaagtcccactcgtagccacgcacttcacgaccccgaaaatgccctcctttcgcgatttggagcacaaatgatggccaaaggttggagctttgttggggtttcaatggagaatggaggagaaggaaaaagcaacgtgaggaagagggagagcttcagaattttttctgctttggctgagtgaggagagaggaaagctttctgggtttaa

SEQ ID NO: 233886 - DNA, 412 bp, Glycine max
  unsure (1)..(412): unsure at all n locations
gaccttaagcaccgggctgcagcttgaataggatgtgttttttgtgtatcttcctgctctaatcgcngaccacagagtggtaactggagatatgtcgcgggggtcaggagaccttggggacgtcaggtggggtgctattgcccaaaaccaagcttgaccaatcccgacccagcccgggcatagtcggtcagtgagaacctgtgatgtacctaagcaggcgagctcctggcagtcaacagataaaaggaacaaagaccacaaagcaaggaggcttgtggtggctggccagctgtgaactttgattgatatgtgggttatggcctctggtaatcgattaccaagagtgggtaatcgattacaaggcttaaaaatgaagacaggaggctaagatggtctctggtaatccattacc

SEQ ID NO: 233887 - DNA, 238 bp, Glycine max
  unsure (1)..(238): unsure at all n locations
ancccaatggtgtgccggcggacttgagtcttcgtgccaccccggaagattaagccaagcccctactttcgaggggcaacctccaccttatgaagactatcccgggcaagacgattgggaaggagatacccatctnggccccctgctccacctcaaagatccgtctccacatgaactaccccaaccgaacatagtccgccatatcccggcctcactcacacccgtaaaagaatctgct

SEQ ID NO: 233888 - DNA, 432 bp, Glycine max
  unsure (1)..(432): unsure at all n locations
agctgtaggcttcatgttgcttcctttatttctaacagnnctcggttagttctaccccaatataagggagttcattagaaacactctgagatagatagatagatatatatagagagagagagagtttccttgtattatgtttttcgttagtaataacatacacaacgggtgctactctcttcttcttctttgacaatcttcttccttattctgaacttattttctcagtcttaatcacaacaaatatcatgaatgacaaatttgaacctatttaaaaatataaaggaccaatatgaacttaattaaattcataaaagatcaatgtgaattaatttttaaaacataaacttcattttataccacattatcacttttcattccaccctctagcagacctaatgactatatgatggaaagaactaaaatgattca

SEQ ID NO: 233889 - DNA, 258 bp, Glycine max
caaaaaactttttttttcatttttcgaccccgacatattcaggccatttggtcacaacaaattggaaattatcctcagcttctactaacctagtgattttgggacacgtattttgactagagaaacgcaatgccaatactctcccttccaaacaacataccccacccagtgccacttcacgagtcacgccctactgcctatttgtccttcacccggtcatcaccctcagctcacaattcagcattattgattcaaaaa

SEQ ID NO: 233890 - DNA, 400 bp, Glycine max
cggctctctaagtctttagatttggtagccaatccaatccttgtgttcggaatctcagccacttatgatagccgccgatgatcccattactgcttcctctaagctctctgtcccatgccttgcgaactccttggagtaccctcgcattgtggtcactgaaaccccgtccgatgaaaggcgtgatgctttcgtctgatggcactcctctcatggggtagccaagctatcttatggcgaggacgggattataattaatacaaccccttgttcccatcaagggaacatttggacatccttcgcatgaagatagaatcctgattcttcctttcttctagcgaggggacgcaataacagacacccctccatgctagccaagagttggtccaattcgcctttcttt

SEQ ID NO: 233891 - DNA, 297 bp, Glycine max
tcttaagaagggggggggggtgattaaaaaattcccaactacttccccaattaaaaatctatttcactttttattcaagttatgaattcccttaatgacaatcttcttaaatattgattccaataaaacaatttgaatatgaatataaagcaataataaataaaggagattaagggaagagaaagtgcaaacttagatttatactggttcggccacacccttgtgcctacgtccagtccccaagcaacccgcttgagagttccactatccggtaaattccttttacaagttctaaac

SEQ ID NO: 233892 - DNA, 402 bp, Glycine max
  unsure (1)..(402): unsure at all n locations
gaatccatgattntatctttgatttaacatatcagaacataaatattatgtagccaccaaaatgaaagaacaagttagcttgaaattcatgatttggtcacatttctctgtctcaatcctattcaaaaaaacaacaaaaaatttaaaaaaaaaaagaagaaaaaaaaaacaaattaagaaagacaacatgataattactgcataatttattcaagaacgcaatactcacggcatcagacatcaatatccatttgtcaccacaacctaattgatttttcacaacaaaatatatatcaaatattcaagcgaanaaacaagaggcgaaatcactcacaacaaaatatatattctattattgatataaccgtaacaaaatttgcatgaatttctctatgaattttt

SEQ ID NO: 233893 - DNA, 216 bp, Glycine max
tttatcatccatatcatcattggactcaacttttttcttcttcatgaagtgaataacctcaattcttctaaagcttctttcaaactattggatggtggaattctattctcgaatgggaggaaactcaatgggttgaggatcatgagcaacaatggtatcagcttgctcgttcgctggatgcttggtcctttgtgcaccctttttcactctcttgct

SEQ ID NO: 233894 - DNA, 326 bp, Glycine max
  unsure (1)..(326): unsure at all n locations
cctgcgctaagcgcgcgatcaccgncatactcactaagctcagatgctgtcgcgctcaacgcgtgatcacaccgccatacccattaagcctacaagggcacgctaaccgtgaggccgagagaatctaagctatcttacgcctactaaaggagtaggaagcaaaaagacatacggagtctcaaaactctctggtgaataatccacagcctgagcatgtctaatacggacaagtccttcttctttagtcatctccccctttattccttcattcatccatcttattcttctatccacatcaaccctaaagggtaaaacctctcatggca

SEQ ID NO: 233895 - DNA, 297 bp, Glycine max
gaggttgagattctttagtatcctacaataagtctgaactcacagaggtgcctataccaagatgccctccgaagatacttgaataatactccgtacaagcatttttaataggtgtgacatatgccatgaagtgaaaatcagagaatggtagatgaagaagacttatcacaaaatacagagttgcgatgaaagaaaaaaaagcaatgaagaacatggacaactaaataccggtcttaatattctcaaagacatcataatgtcaagtttcttaaactaatattttgacaagtggaactg

SEQ ID NO: 233896 - DNA, 318 bp, Glycine max
gacgcgggagcacaaaatcaaagcgagaacaacggacacaagttgaaccttgagtagtgcccacaagactctcactactcaaagttacaataagtggtacacatgcttccacttatagactaggcagctcccctcgagaagccctctcaagaaaacctccttgagaagatactttgagaaaacttccttgagaagccagagcttagccacacacacccacctaaaaactaagctcacctctttgagaagcttccttgagaagctagagctcacctacacacacccatctaaaaactaagctcacctcctcgacaaaat

SEQ ID NO: 233897 - DNA, 282 bp, Glycine max
  unsure (1)..(282): unsure at all n locations
attaaaacaattcaatggctgagtgtaactgaaattgtggcaaccaaaagtcaccccctacagtcaacaagtcaaccaccattcggtcttcccaaacgctgatgcctangatgccaatcgggcccttattacaacttgaactaaacctaactaaagccctttatttgattaacctaaaacatatttttggtcagccaactttacaaggattggaccatcatttagacaaactaaacactttataattgaaacaaagtggggtcatttactcctcctccattt

SEQ ID NO: 233898 - DNA, 193 bp, Glycine max
ggggttttttcgggcgcagggccgacacaacacaccaccccaagaaacaaaggacccggacgcagaaaccggaaccaggacaacgccacaaccaagcgacgaaaagaaagacaacccacaaacaagagaaggaaagccacaaaacacaacaacccaccagaaaaaaccaccaaggggaacaaaaccccaaaaa

SEQ ID NO: 233899 - DNA, 336 bp, Glycine max
  unsure (1)..(336): unsure at all n locations
ctcgatccattggcgataagcacctttgcgacaacatggtccatacactntaccgacacatgaagagccttgttgtgtcctctcccctctacggaaatctcttcttccgcaaacgcgatataattgttggtggttatatgattaacgatgcctttaaaaccctccattgagatatcgtgggctacatgggcctcattgaggacttttatcaacagcgtacgatgaggctcacaatttatgagcagttcaagcaatgagatccttgctggagttntattcagttgctcgactaccttaaactcgctttgttggatgacgcgaaggaactcatgggcc

SEQ ID NO: 233900 - DNA, 327 bp, Glycine max
gtctataagccttctatatcgctgctcctttgcttgaatttgtgcgttgcaacgatacaacttctcacgtgtaattgcttgtctagcttctcatgttaatgggttctttttcttaattggctctcgtgctatttcttcaactatcacgtcctcctctgttatggtcttccttcactttttcatttacctccatgtcctttcttactacgctgttagttgctaacctgcttcttgttttatgacattgtagtcaaccctgatggggatttcttttatttgcaccactaactgctttactctgatttttaatgaattttattacctcat

SEQ ID NO: 233901 - DNA, 435 bp, Glycine max
  unsure (1)..(435): unsure at all n locations
agcttagcagggttgcgcttagtggctcttgaattncaaaccnttntactaagtatgtgggcttagcgagctaggctcgcttagcccaatggttgctgcaatgaaatgagcttagcccatataggctcggcttagcgcacgactttcaacaaaaaaaatgactaagttacctgtgcttagcgaatcacccccgcttagccacaggtatctcctcaagaagatgaatgttcttccccaaaagatgaactcgcttagcacggtaggcgtgcttagtgagttcgtctgaaaatgcatatattcatgcaatatccatgaagtcgcttagcacagaatgcgcgcttatttgagtaatattctattctggataacattttaaagttatantttctagattctatctattagcgctcggtnttataaaaaaaatcttggaaa

SEQ ID NO: 233902 - DNA, 378 bp, Glycine max
acctgcggcatcaagcttagggctgattagggatggcctttgtttatgaccccggggcaggtaatgagaagggatgatattggctgagtaatgacattgttgagttggtgggaaatttggccatgtaggaacagcaaacataacatgctgtccttcctccttctcattctctctatttgccctaggctctttaattgtcaaagcaggattatcaaatttgtctctattcacacccacttcgatcctttcatcggggaaaactaaatcccgataacttgaaggtgtgtaacccactaccttctcataatacaacactaataagggggctactatcattgctatcatctccttcctccgcatatggggtggcacttggac

SEQ ID NO: 233903 - DNA, 266 bp, Glycine max
acatgaagctgtctctggaaaaacgcttcctcacctctcttaaccggtggatcttctctaaattcggtctacagcctcacaagacaattgttcacaacctgaccgttgggagctttgtgaaaatgcttggagtgagcgccacccatttcaacctttgcgttctcgtagcttatgaaaaatgccatttcttctgctttatttcttccaaagacatttctaacatcccaagcactttctccatcacccacaggcaccattagtcatca

SEQ ID NO: 233904 - DNA, 236 bp, Glycine max
  unsure (1)..(236): unsure at all n locations
acctgtggactacacaatcactcacaaactcatctcaagctctcaggacggttctctcttcaagctttggactctgcacatcttcacaaaacaaaatctcccaaactctctggaacttggaccttcctctctctataactctcaagacatgtggaagcttacagaaaaagccaaactcccctccaaaatctgatttctggcttanataggaggctctgttcgtgctcatgtgctta

SEQ ID NO: 233905 - DNA, 439 bp, Glycine max
agctcacacaaacatttattattttcttttacactcaacaaatagtcatcatccgttcatagttccaatcaatcatgctcagtatgatgcatacacctgatctcaactctcaaatgtaatgtggtaccatccccaaggaaatagcctaagtgtgtccacacgacactctcacttaaaaaactaggcagtaagtgtcgaggtcaccctatcgtgcataggcaactccaccccccccccctcccccatggtgatcagcctgagtctcaagggagttccaaaccgagtgacatgcccccaagcacaagtattcctcctcatgagaaactacaggtacttattgacaaagtctatactatttccatgtcatatgaagtatgaaacatgggcaccatcaatgcattgaccgtgaataattaaagagtctaagccactcccctcc

SEQ ID NO: 233906 - DNA, 423 bp, Glycine max
  unsure (1)..(423): unsure at all n locations
cctttgcngnnggtggtggtcagtggttatttactangtacttttatggnngttgttcatcgcggacgtttggatgacttccggatcaagttgaaccataatttccggatcaagctgatcccgaagtgtattatttttgcgattcgatgtttttgcatttgttttttcatttattctccttttttcttttaaattactaatctttttgtatgaccattttttgtttgatctggctagatggatgaagatgagtgaatgtatgaaataatgtctaaacgagcggatatggattatgacaatgcataatcatgtggtgcgaatgaaccacatgttgaatgttcggatgcgctcaagacttctcacgttataatgtttatgtttgtcacatatttaataaaatgaatactggtagaaacttaaata

SEQ ID NO: 233907 - DNA, 464 bp, Glycine max
  unsure (1)..(464): unsure at all n locations
agcttaggatctaggagagcattcattcttttctattatntacaaaccacaacttagaatntttcacaacaccaaccttattgttttgctactcttttcaacacctttatatcctttgatgatggttaccccagcttttattctttataataacaacttttttttttctctttatttttgaaaatgtaaaaacattcatactggactggagtaataccatattttgtaactcaatttaacttatgttgtacatttattttcttgcaataaaaaatcacccaaaaatatttccccaaatttgggacaaatttgtttggatccatgagtactctcctacaacctaagaaagggtagttagtaaatatcactttttaggcttaggttccaataacaaatttttttacattaggctcaaaaagggtgcaaggatgcattcattcacaggatgactntgtaataccatg

SEQ ID NO: 233908 - DNA, 399 bp, Glycine max
  unsure (1)..(399): unsure at all n locations
tttggaggttaagaatttttcattaattatttaattggaagtataattggtttggtagaatgaagtattcatgtctaagttaagtttaatagagtaagaaaatatattnttttttatttttatcattcacaaaatatttaattgaagtaataatggtttttgttagataaaattttaaggtgaagtttaagcgtatttaattttgtgattagaattnttattttgaagttattttaattatgtttaattacttataagccttttgtgatggnttttctaccttaaaaaatattacctgattctcgtctangtttttanagtaanggaatatctannaatatttaatggagtataattttctgtagaatgaattttatcttagttaagttagttttagta

SEQ ID NO: 233909 - DNA, 328 bp, Glycine max
gtatacagcctcttcaaggcggtttatggtggctatagtgagtgggtatggcggaaggtaggggttctggtaggtagaggcagccatgggcggcaggtcgaaccaattgttaagagcagaggggagggagaaaactacacttcttggtttcgaggaccaaggcctcctttgaaagcaaagtatcgaaaattcttctctgccttattcattctttcacattgcttttatacacaatcgtacatgtacaactgaatgataattggtacaactgaatggtaactatattaacagaataataactggcttaaagtgttgaactattcttatg

SEQ ID NO: 233910 - DNA, 365 bp, Glycine max
  unsure (1)..(365): unsure at all n locations
cttaatggatatgggtacgagtatgttaatcaattaaactttacccgtatctttgtggatgtatgccttgaaaactgccatgtattngttgaacatggttcctataaggcagttcaaagacaccttttgaactgtggacaaataggatacctagtataaggcacctgcatgtttggggttgccaggcagaaataagaaattacaatccgcaagacagaaaattggatgcaagaacaatcagtggatatttcattggttatccagaaaagtcaaaggggcatatgttntattgcctaatcatagtatgagaaatgcgaaactggaaatatatggttcattgaaacggtaaattagtgggagacagt

SEQ ID NO: 233911 - DNA, 392 bp, Glycine max
  unsure (1)..(392): unsure at all n locations
gataccattgaatgaatcattaaaacgatacacttgataaggtcttgtatcatttgcatgaaagctttagggtcaatctcttaactaaaagtccccacttcactctctaataggtagatnttataagaagcgtgtcataataaactctttagtacatgcatgctataagtccattaagaacaaatgtttagccttccacttttatttactttatggtctaaatacttttaaacccttgggatgcatatttatcgctaagtgcttacaataattttgaaaaatttctctcgtatagatcacatctacaaaattttataaaatataaaatcatttcatatcccattcatgtataccaaaattagtttgatactcccttcgcgccttattataaa

SEQ ID NO: 233912 - DNA, 388 bp, Glycine max
  unsure (1)..(388): unsure at all n locations
agctnggagggattgatggcgacccggttttatatttattaggatcagggctacgtacgagtacgtgagctcagttgaaggttggcaactggggatggtggatttatgtgtgatttgtggatgtggatagtcgacttgcaccatcgcccgaccgccacctagtaccacatgtgacgggtaccccataatcctacaagcttgaagtgaggaagtgtggaagggtgagacttcctacttttattcgtttgaccacagagtggtacctggagatatgtcgcgggggtcaggagaccttggggacgtcaggtggggtgctactgcccaaaaccaagcttgaccaatcccgacccaacccgggcatagtcagtcagtgagaacctatgacgta

SEQ ID NO: 233913 - DNA, 318 bp, Glycine max
atgaataacttgtccggaatgatacatttttgtatcataccgaaataaacttttgtaaagattgtgaaactctgtgctactcaggttgaaaaatttactctctctgattagcctttctgatctgaatctcactgatattttgatttgatcttgaactgatttgaactgatttgatttgaatcaatttcttgatttgaggtcttgatcatctgactcatcttgggctttgcatatttgtatataaactctgatcatctgatctcacatgagctgttctacactgatctttaataaatggccccaaccgttacatgttaa

SEQ ID NO: 233914 - DNA, 358 bp, Glycine max
  unsure (1)..(358): unsure at all n locations
gctaagctccttcaactgcacaaggctcttaatatttgaagagcatccntgnggaaccttcacccaacgaagacaccgacaaaaacttatcttcttcttcttggacaaagtatggcaggctgggggcaagtaaattttcttcccatcacaccttggatgcaactgtgatcgtatatccatatcagctagatcttgatgggtattcaagccatccttcgtcttgccttgaatgttaaggagcatcccaatcacactgtcacaaacatttttctccacatgcataacatcaatacaatgtctaacttcaagatcacaccagtacggaagaataaagaaaatggacctcttcttccatatg

SEQ ID NO: 233915 - DNA, 353 bp, Glycine max
  unsure (1)..(353): unsure at all n locations
ttccatggatgaaaatcaccatttgaggacctcattgaagcttaaagatccagccttcatagaagcttatcaagaaagcctccattaagcatgaccttccatgaaaaaccacaatttatttgagcagtcaaagaatacaatactacaaatcatttttgactggcaaacaacatattctgatcaaagaagggctaactttgtgtgtaatctcatgaacatggttgtcatgaagcttacgcgcatgtaatgcanagaagcataaaaatgaattatccagagtattagaggtatcacacttaccccccgttatgctcagaaagatcatcacactcgccgatacgtataacgccaat

SEQ ID NO: 233916 - DNA, 434 bp, Glycine max
  unsure (1)..(434): unsure at all n locations
agctggagagaaggagtggttttgtttttcttgcacaagcangttctgggattctaattgtacccgcctaattagactattaactgttgacctcaagaaattgatgattgaagcatgttgttatagatttaccaatcacttttattaccttccattacttaggtcgatcttgtactcttgattggctacgattcgcttggaaattgttataggctggtgaagatgacctaagactatatccaaaacacctagataacatgattggttgtacttcaacctttagggtaaagtatagcatcaagttcaacaactttcctatatcaaggatggttgatgatctacaacttataaatttaattaaagaacaacttgattctgattaggtcattctatattcaactatacaacttgggacaagttattattttcttact

SEQ ID NO: 233917 - DNA, 328 bp, Glycine max
  unsure (1)..(328): unsure at all n locations
aaagagaaaatcacaatgagctaaattggagcacattgcagattgttgaataaccggcttaatcgcaccagctcgctaagagcaattccacaattatgcttagcgcgaatgtctagcttagtgcaattccaacccacagagaaattacgcatagcccgagatattcagcttagtgcaattccaacccgaggagaattgggcttagcacaagatgtctagcttagcccaattctagcctgaggagaattgggcttatcgcgaagtgtcagtgtgaatntatgaaaactcttaactcttgttatttgagaatgggttgacttgatgaaat

SEQ ID NO: 233918 - DNA, 402 bp, Glycine max
  unsure (1)..(402): unsure at all n locations
tctagaacatttccattggatttaatgatgaanactgcgcattttcaggagaaaaagacgctatgttttgaattgcaaaatgtagcagtggggctaagctcaacagttgggctaagcgcatatccaccactaagtgcagcttcagcgcgcttagcgcaaaggagaatctggcagagcatcagcatcaaagtcgtgcactaagtgcgagatcaatgcgctaagcgtagcaggtgccttcagctaggctaagctcgagactggtgctaagcccaatttcacttactcgcgctaagcgcgagggtggcactaagcccagcgtcacgaatttagagcgcatctacagcctgtgcagaattagggtataactttctacagaatttacacaccttttacgacaacatg

SEQ ID NO: 233919 - DNA, 394 bp, Glycine max
ggacctatgatactcagctaggactgcgtttgataagaccgattctttattaccctcatggacctcaccatgttctccaaagtcacttgaaggtagttaccaactcagtaaacgatactcctattataaggaatacattagaagacgacagggaatttatcataatccagtaccacgcatacaattaagactcttactaaggagattaactattcgaagtcccttttgcaagtatccttaccttgctagaataaggagattaacactaaaagggagatcagaaccaacacttaggatagaagtaaggagctcagacataccaaaactcagtaagaacaattattattattattatatacacatacaaataagtgacaagtctgaatagttaaca

SEQ ID NO: 233920 - DNA, 392 bp, Glycine max
  unsure (1)..(392): unsure at all n locations
cgctnaagaggtatggcagagttaacattttgttttttacaaaggagaagatgcggagattgtctaagaagggaagctcctatactgtttgtctttattgcaaaatgactttccttcttagctaacctcttagaggagacacttaccttcttacactcctccttaaccattaaaggggggtcttctttccattttctattattttcctcatcccattggaggtntatttgtacttgatccttagctacctgtgaaggtgtgtgaggatgcaacacantattacctgccagattggggaggggaaaatcattcgttagggccattgtacatgaccctcctatcaaactggcatggcccttctaagagaatatgtctggcctccatgggaacta

SEQ ID NO: 233921 - DNA, 412 bp, Glycine max
  unsure (1)..(412): unsure at all n locations
tanactgtgcaaangaggaatatgagtgacctttgtgttacacnatttcctttctagggtaaaattgggtgttgaggagtcaaatattgattcggtagagttctcgtcgtanaaccagtttgagcgagtttagattgatgatatagacttgtttgagatgagagtttgctccaagtttaccccattctcattttcacttctcaaaccttgaaaatccactaaattgaggggttttagatacctagantttgagttgctttggtctgaagcttgtccttggtttagacatgattgatacatgatttaggacttttaggattcaatttgggcaaaattggatgagggcaagtgtgatttcgaaaatctgcactttatgcaganatttgctatcacatatgtgcagcagaatttt

SEQ ID NO: 233922 - DNA, 357 bp, Glycine max
agctcaagcatcacatttattctattcatatttaagcacgcagagaaagccctgaattatcaataacatcatacatccatcctaaacatcattggaaggggaataataaaccattagccatgcccatttgttacaggaaaaaatatttccacaaggcctaacaaccagtttaattgaacagttagactaggtaaacaataacagccaaaaaagacaaggtgacctaagggtttttttcttggagcattttggcaacttataagagtgaatctagtttgcttccaatagatattgagtgtcgcctcaatcatccgaccatatttttaatgataagctttaatggtcctgatcaattaa

SEQ ID NO: 233923 - DNA, 466 bp, Glycine max
  unsure (1)..(466): unsure at all n locations
ttgggagatcgcatagcctccgatctattaattttattgngttcattctctccagcacacagattanacactanataagcggtgctcaaagaacattgatggaacaagaaactcacagacaagtttgtcaaccacacataaattattcagatcaatctttgtgcgacaaacaaagttggagccaaactcacctctctgatttctccatatacattaaatatacggtgatggtcattatgcgaaacagatgaatcatgcaaaaagaccataagatngccctgattcatatctttcttggaacgactattctgataaaatttgtgccaaagcaaggagtcactaccaaactcaaaattgctttctgcattaattctgttgacaatcaacgcatctttgaagtgcttttgctctttacaggtgcatgagttgaaccgtcaacttgcatgtgtatggcatagtattagtt

SEQ ID NO: 233924 - DNA, 375 bp, Glycine max
agaatgagtcatgattgagtcaagaacacttcacgaatcaagagaaatttaatttcaagattcaagaatcaagtttcaagaatcaagaatcaagaataatcaagatcaagattcaggacttaagattcaagaatcaagaaaaggctcaatcaagataagtacaaattttttttttcaaaacattgagtagcacatgaagttttcacaaaagcttttaccaaagagtttttactctttggtaatcgattaccagtttactataatcgattactagtggcaagttttgttttcaaaaagctttcaactgaatttacaacgttccaatcaatttcaaaatggtgtaatcgattacaatatattggtaattgattacta

SEQ ID NO: 233925 - DNA, 298 bp, Glycine max
  unsure (1)..(298): unsure at all n locations
tctattaattttcataacatgcacaacaaactntgcattacattcacatctagtatcgcttattagttcacatttccttgtttcattagttaaccctttgtcttccctaacaccttgcctagaacaaagaaatggttgttgtgttttctcacccttacaatttttaacaactttgctcttccttagagaaaacccattaattctagcataccaatagtaaaataaatatgtcgcttcaaggtctccaaatgagaacctatccacttcatcaccactaatatatactactcatgttaat

SEQ ID NO: 233926 - DNA, 369 bp, Glycine max
attttaaaaattctgtggttgttgaatggtttgaaattatcaattgcatgaattgagtgaagtgtaatgcgtacatcatatgctttgaatgagcatgcaacgattagaagagaaaaaacatggattgggatcatgactagaaatgttagttagtttgacagattgattgtgaaggtgctcattagccataacccggtgagtgtgtgatctttaattgtgagggaacgactagtattgagtaatgatttttgcatgaatatttgattatggaatgaatgcatgaatgtgaagaggatgaaggccatgattgattgaaactgccacttatccaaaaagcttaccttgtgaatgaaatgatatatcctttgc

SEQ ID NO: 233927 - DNA, 321 bp, Glycine max
  unsure (1)..(321): unsure at all n locations
agcttacagatatataggagtttcctagtatgacaatatactaatacataaaaaagatggtcaactctactgggagattagaaatatgggccctgaactcagtgtggagacacataatgcttgaagtttcactgaagtatatttcttcttcttgacttgttccttccatgtacttagtgtttcaacatttagctacctataaccaacctgaagtgcattatgttntctttattaacttacatggttatttcacctctaggttattnctatttcttattatacaattgctataactattcccgcccccgctcccctttgaat

SEQ ID NO: 233928 - DNA, 333 bp, Glycine max
ttgcaatggcatgacggcatgacatccctacatcaaagttggaaaatcatcacacatgttggttaggaatgataaaaaaaactataaagaacaccacccttgttagttgccatactccacaagtgcatgtcctttcagataatatgaccataaccttattcccccacatgtggacctcatatcttacgcccatgttatcaccacaccacatgggagttcactgattaacaaaaggaatttcttattctactcttttatactgcactggacataacggtccacgctttccacaaagtataaccttgcgagcaaccatggctatcatgatataac

SEQ ID NO: 233929 - DNA, 458 bp, Glycine max
  unsure (1)..(458): unsure at all n locations
agctgggntcgaggtacttacccgttattatctaatatcgatgaacaacgaatgaagaacgtcgaagaacggtcgaaacctttgcgaaattcctcacggaaaatgttacggaaacgtttcggaagcgcctcagcttaaattttcttcacggaaacaatttttccaagcaaatttgaaagagagagaagtgcctaaggggctgaaccattttcttcttcacttcctcccctatttatagcaaaataggggagatggttgccgcccagctcgcccaggcgagccaggttgcttcctccagaagcaacagccttctggaggaatcttctggagggcccaagtgggcctggttgctatttgcacccccatttttactaagtacaccccttgccttattttggtgattcctttttcgtannagtacggaaacttatgaatttcgaacgatacttgtttctttc

SEQ ID NO: 233930 - DNA, 416 bp, Glycine max
  unsure (1)..(416): unsure at all n locations
agccttgactngagtcatcaagagattatatttatgttatcatggcatgagnttcaaaaaatgatcaatcatcataatcatcaattaacaatcattcatcatcaatcatctttgaatcgtatatctttcaatatctttctacagaattttctgattcatttctcttcatctttctaaaaaattttgttctgcactttctcttccaagaaaagatctttgataaaaaacttatgctattcatctttttcattctcttctcccttttccaaaagaacgaagttctaaccgcctgaattcttttgtgtctctcttctcccttacaaaagattcaaaggactaaccgcctgagaatttttttgattcttcccttccccttaagcaaaagaattcaaaggactaaccacctgagatatctt

SEQ ID NO: 233931 - DNA, 310 bp, Glycine max
  unsure (1)..(310): unsure at all n locations
tacaagcttctgaggtgccctattgtgtgctggttttttttttaaacaaantcccttagcaatccccccaattaaagacttatcataactcgaaacccttatgctttcttagaaccctaaaacaaggcaaggatatcaaaattaagctcatgggtttattcaaacaaatcattattacctttggctcaacaggggtgcaagggagtaaatcatcacagggtagctntntggctgagtggctaacataaaaagaaacatggccttgatcatatccaccttatgtaaataatctaacagtctaagaatgatg

SEQ ID NO: 233932 - DNA, 454 bp, Glycine max
  unsure (1)..(454): unsure at all n locations
agcttccttgtgaggctagatccttcattgtttcctttantcaatagatgaaacaatattggtttactcatccaacaattgttataaaaatgaccactgataaatgaaagtgacttacaatcctgtctgcaatttcctttgcaacctcagacgtcatttgactagttttcttcatgcgggtcatcttccacttcacgtgttgtctgttggtagatgggggatcaacgactgtgccagtgctcccagattaggtttcttcctccagtcgtttcttttgcttctcctccacaactttttttctataaaatcataacccccacgagacaacatgtgagggacaattgttntgttttgaatggcctgcaccttcttttgaacatgttgtgataagaacacataacgataactggtctagttgacaataatacattaatatgaagatttaaaaataatg

SEQ ID NO: 233933 - DNA, 334 bp, Glycine max
tatttaaacggcatacaggaatgcattttgatctccagcctaacatacccaacataaatttgtctccttattgggcacaaattatccttcatgcaataatgaatattttagctttacaccaattatggctcctaagttgaaaaccatttgttattatgaagaccatgagcatttatcagaataaaaagggtaaaatggtaaattaccatattgttggagcatccctctaaacaaaataccaagaactcatctttgtatcaaagaataagaaacaactgtttactccaccccaaaaaggaagactcttgaatcttgtagcccgacaataaaatat

SEQ ID NO: 233934 - DNA, 436 bp, Glycine max
agcttatcgtaaccgattactcttttatttttgagacaatgattggatttttaggagtctctgctttaatccattaccagtagatataatcgattacttctctcttaaaaagtgtttcagaagtgatcaagaacactttaatcaattacatcaaaaatctaatcgattacattgttcttgaaagttttccaatttttgggaagaacactttaatcaatcaaaatggtaataatcaattacttctttgaaataattgattacattgtatatttaattgattacaggcagttattacgagctggtataagctagaataacattattagaaaatatgttttttacatcggttatttatgactttcaacatcgggttttaaatcgatgttgaaagtaccgacgttgatagtattattggtaacatcgggtttttaaaaac

SEQ ID NO: 233935 - DNA, 348 bp, Glycine max
  unsure (1)..(348): unsure at all n locations
gacctataaaactcagctacaaacctgccctatgtattgaggcatttaccttgctcttggtgggcgcacgttttggcatgaatagcaagagaatgggggcaatgtggcatgccccattactctagaatgcaacataggcttgccatcccttacaacccctcaatccaacaaaaacaagcaacaatttgaggataaatccttcacgtttttgagccaatacatgcaatttagagcaccanagtacatcaatggaaagctagaaagctcaaggatgagatacttacttgttggagatgaataatagtgcaaaacggaatcaaaaaacgcaaaaatggtgatccctaggct

SEQ ID NO: 233936 - DNA, 418 bp, Glycine max
  unsure (1)..(418): unsure at all n locations
agctntgccaatntagttgtctccggctattggatcgaagtgggcctgagaagaggcaaatttgattatcctgctttgatgaataagaagctnggggcaaatggagagaataagaaggagggagaaacccatgttgtggctgccgttcctacatggccaaatttcccattagccccacaatattaatactcggccaatatcagtccttctcattacccaccaccctaccagccaagaacgcccaatcatccacaaaggtcatccctaaatcggccacaaaatccacccaatgcacattactgtaaacaacagtcacaatgctaataatatggataaatttgatgtccttgtctctcattctctcacaattacatctttgcttatttaactctcactggaatgtgaatgtaagtcgttg

SEQ ID NO: 233937 - DNA, 352 bp, Glycine max
  unsure (1)..(352): unsure at all n locations
gaaaaaagaggagagggagaaagaaggacttggctaactaattcagatgcgaactactttatagtatatgtccgttaatttccacattcttcaaatatttaatcgttactagagacanaggcaagtgtcatagattttccattctttaagggggtagatagtgacaatattgaagatgttatctatcctaacgaagagttagggaatgggattaatatgctttcttaatgtaaagatggacaacaacactaacatcaattcatattgtattaagtgcattataaaactatattacgattgaagatgatagggtgggaagcgtttcatgaaaaatactgagaacatacttatg

SEQ ID NO: 233938 - DNA, 369 bp, Glycine max
aaaatgcgtcaacgccattaacctatggaactaacacaactcactggctgaccgtaactgacattgtggcaaccaaaagtcacccccaacagccaacaagtcagtcaccatttggtctcccaaaaggctgatgcctatgttgccaactgggcccttattacaacttgaactaaacctaactaaagcccttttagttgattaacccaaaacatatttttggccagccaactttacaaggattgggccattatttagacaaactaaacactctcaaattgaaacacagtggtgtcacttagacctcctcctcttgggccatgatacacctcacaaacttggactttttccttgaaacttgggcttgattca

SEQ ID NO: 233939 - DNA, 430 bp, Glycine max
  unsure (1)..(430): unsure at all n locations
agcttgccagagaatttttctttgagtgattgcncaccacctcaaaagactggagagcggtttctaatgactcctctgtggcttccacatcaggcatagaggatgggcagctcaccaagatgtcttcctcgcctgatacgatgaccagatgcccttccactacgaatttcaacttttcggtggagtgtagagggaacaactcccactgagtggatccacgggcgccccaacagacagctgtagggggggttaatatccattatttggaaagtaacttgacaggtgtgagggcctatatgtactgggagatcgatctctcccctaacctctcggcggtggccgtcgaatgcacaaccaccattgaactcggctctaagtgggaggcactgaatggtaatctctccaagtgctctaggcatcacgtttaact

SEQ ID NO: 233940 - DNA, 333 bp, Glycine max
  unsure (1)..(333): unsure at all n locations
tcagcccgatcgctaagcgaaacttagcttggctattcntacccancgncggcgagcgcaattccttacggccataactgagggcaataaagctaagcgtcagtcacggcagctaaacgagatacattacggcaatgtacgccctaagccagtccttatcagctaagcgcattgctctntatacttaagatgaaccatcttagctaaaccagtcagagcatggcttaacgagagttgccgcttttcagatctgcaaacctcgctaagtggtctgatcctcgagctatgccaagatttggtgtaaaaacaaaactcgttttgaatttgaaacgt

SEQ ID NO: 233941 - DNA, 442 bp, Glycine max
agcttatggctagactcgttattatgctttaacgaaaacctagaaatcaattaagccaaaaccgtgaaaacagacaaggcgaggaaggtcaaagtcgctgaagttccgaggaaatgcaaggtggaagggcgcatgaaacgacaaacctccgattgtggtcgagagtgaccaaggtttgcaaatctcggtaagtgtctttgtcggaagataggaactgtcgaagttcatattgaaaagcggttaggggagtgaggtcgataacgactttgagctttggttcaaatgaggaggtggaggtggtggtgggaagagataatttgttgtgacgtctgcagctttgactgcggcggcggaaggaggagcacacgatggtgagacagcaatggcgacaacatggggatggtggagggaactgggagggaaaggtgttgacagagaaccc

SEQ ID NO: 233942 - DNA, 306 bp, Glycine max
  unsure (1)..(306): unsure at all n locations
ttggctcaacagacaggatcacaagaatattttgaccacctcaccatgaagcccaattttgttgtagttgctaatctccccgaggggaataagatcaatgacgaactttgtagcataatcaaattcactattcattcctcttggatgcatattcttcacgctcacgagacatgtggaattattggggagtgtcataaggttngtatggggtttgccaaaacctcataagtattattgccccctgacgactttattcctatggttgattatttangcaaaattctattgcacttcatgactttaatg

SEQ ID NO: 233943 - DNA, 423 bp, Glycine max
  unsure (1)..(423): unsure at all n locations
ctgcagctttgnatacaaacacaacaactatgtgattattctttcatnctttcttgggaaaaactctttgtaaatctctttatagatactaagctctcaaaacaccatgtaaatctttagagaaaagactaaagtgttcaatgatatatccgtttgtaagacgatcacatattagtcattgtgtaaacttccaataaatcttattgatttgtttagagccaatagtggcttggtagaacaaagaatactgggtcaaagtcaagcttgggataaagcttatctttgtaagaggtagaagtgacagtgaagaatacttgtaacttttgataagttagtgaaatcttggtaggctgctaagaactgaacgtagtctcggtgtagaaagtataacttcatgtgtgttattctttattgtttttcttt

SEQ ID NO: 233944 - DNA, 294 bp, Glycine max
  unsure (1)..(294): unsure at all n locations
gatattctaaatatagaacatacattcttctaggtcaagagtccttttggcattgtgacataatcaatctattcctgatcacaaatgggccacttttatagttgctctgttgcagtcattgccctactgcagtcattggcttcaatctattccatcagttattttcctctttttttgttttggttgctgggcctcattgagtccagtttgacttctttttcttttttttttcttattncgaatcctattaacatangcaatggtaaaggtgcatgtaagccaaaaatacctatc

SEQ ID NO: 233945 - DNA, 339 bp, Glycine max
  unsure (1)..(339): unsure at all n locations
attacgagagagtaaaaactctttggtcaaaggttctgtgaaaaattcatgtgctactcaatgttttgaaaaactatttagtacttatcttgattgaatcttttcttgattcttgaatcttcaacttgattattcttgattcttgattcttgaaacttaaatcttgaaacttgattcttgaagtgttcttgattcaatcttgaactcattctcttgggctttatgtcatcatctttgntatcatcaaaactccttgaatcaatcttgattcaacatcatgaagcttgctcttacattctaaatggngacttagaaaaaaagtttatatgacacaacccg

SEQ ID NO: 233946 - DNA, 314 bp, Glycine max
  unsure (1)..(314): unsure at all n locations
cactacttggaaacccaatgcaattttattgaggcaatagatcctaatatccgggaagccaatgaaatagggccctatatacccaccacagtacaaagaattacaattgatggtcgttcatcaagtgaaagcataactatagaaaaacctttagacacattgtctcgagaggatagaaaacgagttcaatacaacttaaaagccaaaaacataataacatctgccctgggaatggatgaatatattacgggttcaaaattgtaggagtgctaaagaaaatgtggacactcttcgatttacacatgaangaacta

SEQ ID NO: 233947 - DNA, 453 bp, Glycine max
  unsure (1)..(453): unsure at all n locations
agctgggttcgaggtacttacccgttgattatcgaataacgtatgaaaacgaatgaagaacgtcgaagaacggttgaaacctttgcgaaattcctcacggaaaacgttacggaaacgtttcggaagcgcctcggcttagattttcttcacggaaacgatttttccaagcaaattcgaaagagagaaaagtgccaaaggggctgaaccccttccttcttcacttcctcccctatttatagcaaaataggggaggtggttgccgcccagctcgcccaggcgagccaggttgcttcctccagaagcaacagccttctggaggaatattctggagggcccaagtgggcctgggtgctatttgcaccctcatttttactaagtacacccncctctgctgttttttggtgattctnttttcgtaaagttacggaaacttacgaatttcgtaacgatact

SEQ ID NO: 233948 - DNA, 471 bp, Glycine max
  unsure (1)..(471): unsure at all n locations
acctgaggcatgaagcctcggcaatatacttacgaatcatttgttctatcttccgagaaggagctcccattggttgtccttcttatccttcagtttattctcatgggtgatttgctcgtgcaaattcttgcagtactgatggtcttccatcatcagcttccaataggaataattttctacagttagcttgaacatatctccatcatgagtgacaacttcttccatcttgggaaacaccagcactatttccctctctatatactcaaaataggcacttagcaaaaacgaaaaacaagaatacagagtagaaaaatgacaccaagaatttttaacgtggaaaaccttttcaatgtgaaaggtaaaaaccatgggaccaagccagtaaatatctccactatttaanagtaagattataatgactctcttaatacaagagagtacctctcaacctcacccaacaatgatgggtta

SEQ ID NO: 233949 - DNA, 389 bp, Glycine max
gcacgcaagctgggagaggacgctgccacggaggattatacgtttgtttataacgagagaggggggagcacaaaattaaaggaagaaaaagggacagacattgaactttgagttgtgtctcacaagactctcattcatcaaagttacaataacgtgtacacatgcttctatttatagactaggtagcttccttgagaagctttcttaagaaaacttccttgagaagattctttgagaaaacttccttgagaagctagagcttagctacacatacccatctaaaaactaagctcacctctttgagaagcttccttgagaagctagagcttagctacacacacccatctaataactaagctcacctccttgacaaaatacatgaaaataca

SEQ ID NO: 233950 - DNA, 448 bp, Glycine max
  unsure (1)..(448): unsure at all n locations
gcaccgcagctgcagctcctttagggcggacttttaatcctatctcgacggnggcgcgagcctttgatggtactcggcgggaggtgatgggggaaatcgacattcctattcagataggcccccacacttgcaatgtggtgtttcaagtaatggatataaatcctgcctatagctgcctcttgggaagaccgtggattcatgccctgggagtggtccctttaacgcttcaccagaaattgaagttcgcagtgggtggacttttagtaatagtgtcgggtgaagaggatatgttagtgagctgcccttcctccgcaccgtacgtaaaagcggcggaagaatcgttggaaacggctttccaatcctttgaggttgtgagctgcgcctctgtggaactaaagtcgtcgctaccttctcttctcaacgccaccataatggtggcacgtgttat

SEQ ID NO: 233951 - DNA, 365 bp, Glycine max
  unsure (1)..(365): unsure at all n locations
cccaacangncacnaagagagcagaggacctattctcctttgagcttcacnagnatncgggcattacacacatgcgtncaatatatggattaagacactggacgtaagttagtaaaacacaatgcttcgagtgcatctatgctaagtcacctaaagcacgtccgatctcttatgaaaaagcctatatcttctcaactcaccttcatgttctctttctctctcttcaccctaaacacttaatcgtcaccatcactcatcattatgacctttcacttttaaaactcnttgaaatctttttgcatattctctttctctctctgaaacctccttgcaccctaacctctcttcctttctaaaacttataa

SEQ ID NO: 233952 - DNA, 438 bp, Glycine max
  unsure (1)..(438): unsure at all n locations
agcttgtaatcgattacacacttactgttttgattactagaggagtntttcagaaaacattctcaacagtcacatctttttatctgtttcttaaatagccatcaaaggcttatatatatgtgacttgagacacgaatttaataagagtttttcaagaacaaaaaggtcttatcctcttaaaaagaaaaatcgttttatcctcttacaaattccttggccaatacacttgtgattcaataaggaattatttgagtgctcaaattgttcaatctatctctttcaagagagatttcttcttctcttcttctttattctgaaaagggattaagagaccgagggtctcttgttgtgaaagaattctaaacacaaaggaaggattgtccttgtgtgtttagaacttcgtaaaggaatttacaagatagtggaactctcaagcgg

SEQ ID NO: 233953 - DNA, 422 bp, Glycine max
  unsure (1)..(422): unsure at all n locations
tangtcatgagtgatttgcaaaatgatgcttctcctatggangntgatcttnccttatgccaattatgggtgtgggtttattatctccttataaaatatcacacacaaatgatgcttgaaaccattggtaaatgaattagtgggtgttttggatgggatccatcgacggagaatacgctgtgaagatcaactagggttacggtggttgtgaatatctataatccactcagaacgtgatgatgataaagattgaagggaaagaagtgacgtgatgcaattccatcctcaggaaattagattaagactccagaagttgtgcccaaatgcagagaaggcctagattctattagccttaggtagattcagcccatgacaaagataacccattttttgtaatttagatcaaatcattattttggcct

SEQ ID NO: 233954 - DNA, 449 bp, Glycine max
  unsure (1)..(449): unsure at all n locations
agcttgctaaagaccatatattgatttctttaattngcataccacgtgttccttcccttcaactgagaatcccattggttggtccatataaacatcctcctttaaatcttcattcaaaaaggcagttttcacatccatctgatgtagctccaagtcataatgggctactaatgtcatgataattttgaaagaatcctttcgtgagactggtgaaaacgtctctttataatcaatgtcatctttctgagtaaatcccttagcaacaagtctagccttgtaacgttcaaggttgccatgagagtcacgtttagtcttgaagacccacttacaaccaactctcttacaacactttggtaattctacaaggtcccaaacaccataatattccatggaatctatctcttatttcatggcatttaaccactttctagaattatcacaacttacag

SEQ ID NO: 233955 - DNA, 276 bp, Glycine max
ctatatatatgtggaagcctaaagaaggtcaactatctgtttgccgaggtaagctcttctttttaaattatctaatccattttttattactaaatatttttccgcgaacaattcatgtgaatcttgtcccatgcatggaaagataattgggctcaaagagaaacagacttaccataacggattaaccggaggaacataactctttgctaaagatctcctgtcatacataccgcgaagaagagatcactactcctttaataaacatttaaatcttat

SEQ ID NO: 233956 - DNA, 451 bp, Glycine max
agcttacaaatctgttttaagtccaagtttataagtaaaataaaatctagacaagataagataagatttgataaaataaaatctatatgaaataaaatctaaataagataagataagatctagatgaaataatatctagattagataaaatctagataagataagatttgatctagataagataagatttgataaaattgtctgctctcttcaagtccaagcccaattctggattcaagcccaattgcttataattctcctgaaattaaattaaaagcacaaaattagtcctataggcccaaatgataaaactgcataattaatttgataattaagactaatcagtaattaaaatggtgcaaaaagggttaagaaataggagaaaataatggcacatcaaaaccccccatacttagccttttgcactcctgggcaaaatgaaacaaagaat

SEQ ID NO: 233957 - DNA, 118 bp, Glycine max
  unsure (1)..(118): unsure at all n locations
aacccccactaatatnttgcgttaccatctcttccattggcggtcttcatttttctccatgtatatcctcacatgtcttgtgctcaatgtatgtaacatgattctttacagtttccac

SEQ ID NO: 233958 - DNA, 422 bp, Glycine max
agcttgcacatcgatttttatgctttcttttcaacaacacggacaaactcacattcttccaatccaaaatacttccttgccaccctcaaaacctccctatcactatccacacccatgacctcaaaacccaattgatttctcaaaaaggtcatcaaagccccacctccaaccccaaggcacaaagccttcggcctaaaccccatccgaatccgcccctccacatattcactattcaacacaagaccagccaccataggccccaagtaagggtgcaccaaaaccttaagatcaggcacaaaccccacatcaccaccaatgcacacaccatcacaatctgtctcatgataatacaaattcagtttgaatcaaattaggcattcttttaaacctcaagctcctcctaaacctcctcccatgatcac

SEQ ID NO: 233959 - DNA, 363 bp, Glycine max
cttgaaaattcatagcaaataactaactaaatcgtatgggcaggagtggaaatgaggttaaaatttccaatgtgatgctcgtggtaatttttggacacacctcgtgttccaatttttgcctgaaatgaaattttgatagcttttaaaaaaatatctcctggatagacgcaaatcttagatattttattattaattattatctaacaatattatcatctgagaatcataatgcttgatccattcctctcacctgcttccatgagttaaattctccttcttcaccagacaaactgggtagcacacaatgatgttccatgagtaggtagagcacacaataacgcgtctgcgtgggtatgtgataat

SEQ ID NO: 233960 - DNA, 386 bp, Glycine max
  unsure (1)..(386): unsure at all n locations
ttaccttctcttccactgttgtttcttcatttttttctccatgtatctcctcacatgtcttgtgctaaatgttnttaacatgattctttagagtttccaccgattaaacttgctatagaagctagatttgattttctatggttcaaatttcttgttcttgttcttgaacaatgaattgtgttgattttaggttcctttgagttttgtcttgttattttttgtggctgaaacctaaaccataaaattcttacaaaaatattaaagtataagaaaacctcacaaatctagagtgacttgttcacctattgtagttttgtcatagaagtcatgtctagtcatgaaacttgtcacataagatctcttatgttgtgctgaattttattttt

SEQ ID NO: 233961 - DNA, 440 bp, Glycine max
  unsure (1)..(440): unsure at all n locations
ctaagcttacttctctctcttcctcatgagagatgggtttctgtttgttcttctgaaacnctactccttgcttagggatggccatccatgtgggcttaattatatctaattaacccatattaatagtccaccaaaattgataaactcggcccatggatccttcttgtcttgtaaattgggcttcccaaagtgattcttcaagttggcctcaaagcatcttcatcaatttgtaggagattgacccaattaggtgtatcccttaattcacattgatcttctttctctttgatctttagaatcaagccttgtaatgcttgcttcatcctcttagtcttggaccttgtcatangacctccaatcccatataaaggatcattagacggactgattgcaccttcatcaaaatgacttttgaagagggaagtggacacactttgtca

SEQ ID NO: 233962 - DNA, 325 bp, Glycine max
  unsure (1)..(325): unsure at all n locations
gccgccggggaggcacaaatggttgtatttgccccaccactgataccaacgtttaccatcaccggaaataggtgtgccatcagcaaaacacccagaccggttgcggaatagactgccatagacatctgaaggcgacaaaataggcggcaatcatcagcaggtaaggggagttaatatactgctatggttttgacgccagcttgaccaccatatcattcgcgccgatttgggtcatgtaagctggaaatccacacagcatcataattatcatgccgaggtcgccgncgcggctcattagcaatattttaacgtattcaacgatttc

SEQ ID NO: 233963 - DNA, 327 bp, Glycine max
tgccatgagccttgcaatttttggagatggtggggtagcatctccactttgtaaagtcatacctacacgacaagttagtgcaagtaaaaaatataataagatctcaccactcaacttactgttcactaaagttcactcgtgtatcactctttcaaggctttctcttttataatatgcactcttgcctttaccactctgcttcttttagttttatgcaaaccttcaagctacaatcaaaagattcatgtgaaaatgtacaatcatactcgctcagagccaaaaagaatctttatacaacttagatctaatgacagccaatatgaatga

SEQ ID NO: 233964 - DNA, 316 bp, Glycine max
ccgcttcccatacccgcctttgacgtacttaagccatatattcaagcgatttctcgcttaatctagaaacaaaataaacttccaccgatcgttcgaagtgtatccatccgtaaatactggctacaatgaatcctgaccgttcggtcgtgcgcgaaccacgtgggaaatcacacaagaggtaaaataataatataataatcaaaaaataccttttagcaaaataaaagcgaaagatcaatcgaacgttttctctttgggatttccattcttaattgaatcgctaataactagagcgagacaaggctaaaatcactcg

SEQ ID NO: 233965 - DNA, 272 bp, Glycine max
aacactttttatatacggccaaaacaataataacatattcttagtgagtactccaccaatatgaatgtgcatcaaacccagaagcttgaaattgttgacgattaatccttttctcaagaaaagggataatctatattacttggttgatatggaccacacttgagataaacacctccgaattcatctcttgatcaaaaggaacttccacattattgaacgcaatcaggatcttgtctatattataacatcatatctttactcaaatctttaca

SEQ ID NO: 233966 - DNA, 414 bp, Glycine max
  unsure (1)..(414): unsure at all n locations
gcttatactggttaacattatcccgttcttatatccagnccccaagcaaccaacgattcttgagatttctttcaaccttgtaaaatcctttacaagccaaagatccacaaggaatgtaccctcccttgttctctttgaacaaccaagtggatgtaccctccacttgaactgatccacaagagatgtaccctctcttgttctcagtataagaacccaagtagatataccctctactggtgccacaaaggatgtatcctccaatgtgttaagacaaagaattctcaggcggttagtcctttgaatctttgtaagggaaaacaaaagatatctcaggcggttaatcctttgaaatcttttgtttaaggggaagggaagaatcaaaagaattctcacgcagttagtcatttgaattct

SEQ ID NO: 233967 - DNA, 332 bp, Glycine max
  unsure (1)..(332): unsure at all n locations
ccctcttccctcctcttttgattggcagaattagttctcagcagagggatatccaagttaattcagaatggtctcttacctcggaggtcangaccaaggggctgtctcattcccagtcatgcttnttttacagatgatcttatgattttttgccgtggccaaaagaaagggttgatgcatttgatgaccttgctttctcaatatggggaagctctcggacagtggattagcctggaaaagtgcagatcagattttttcagggcgttctctctcgaaataggatcctctcttanggacatccttggtattggaaagggatctcttccttttca

SEQ ID NO: 233968 - DNA, 347 bp, Glycine max
  unsure (1)..(347): unsure at all n locations
cacgaaaactcgaagaataaacagttaatatattgtatagctgtactgcattactagcgttttcacacacgtccatggaagacaatgggaagagtctagatagagcaatgtagtttctattcggatatctgtatttgaaaaacaaatccgtattagtcttatatttacaaatccgtattcagccttatatttatattcaattgtgtggatggcaactntaattttattttcatatttattagataactatatattcatatctgcactactaacttgtactttcactcttataaagaattagcatattcacaaaataatattgattaaaaaatactataactaactta

SEQ ID NO: 233969 - DNA, 89 bp, Glycine max
aaacaattctccacatccttcaatcacgtattacccaccactcccctgttgcccacctcaactgaactcacgtactcccacagagccct

SEQ ID NO: 233970 - DNA, 318 bp, Glycine max
agctccattgtagcttgtaagtctacgatcttcttcatcaatggattcctttgcttcttggaagatgaatggctcccgaatggacaaagggagagagaataggagcactctctcttcacgcgggaatgatgagtcttataagaagctcaccaccatatgaggccatggataatagcttggaggaagaatgatatgaatgaacggagagggagagaacagcacgcaaatttgtgctctaaatgagctttgaaatctgaagttaatattcacatcctcaagctgaaaaaaatgcacacacctgatctctatttatagcct

SEQ ID NO: 233971 - DNA, 264 bp, Glycine max
  unsure (1)..(264): unsure at all n locations
aactatanaaactcaagctngaaagagcccggcnagtcgaagagaagttatgtccatattcatcatagtctggaaagagtattgatgaactaatggacgtcaatatggccaccgctgaagcctcggaatgagaaaccaagaaagcccgaaaggaagaacaccacccacagccaagtttgaggggctttatagggcagcaatagtgagctcaagctccgaaaggtgaaaggaatcatcaccggtaaaggcatgatcttgaaagac

SEQ ID NO: 233972 - DNA, 384 bp, Glycine max
  unsure (1)..(384): unsure at all n locations
agctgcagggtgaatgatgatttattcattgatgtnnngangataacactgatgataacaaaagatgatgacaacggtgatgacaaaaagctcaaagatcaatcaaagaacaactcaagtgatcaagatagaatcaagaacaattcaagactcaagaggaaagttaaagagtcaagaatcaagattcaaggttcaagatcccaagaatcaaaatcaagattcaagactgaagattcaagaatcaagagaagacttaatcaagataagtatgaaaaggttttctcaaaaattgagtagcacatggatttttctcaaaacatgtttaccaaagagtttttactctctggtaatcgattactagatggctataatcgattaccagta

SEQ ID NO: 233973 - DNA, 253 bp, Glycine max
actagcaacaggagaggaggtgatgatgctgcagtggggactcttgggaatgaccctgtgagctggaattgataataagaggcttccactccaacaatcactgctgaatgggctttgtcttaaggagtcatatgtgccatgatcatttcattatgaaaataaagctgaagaaactgagcctgtcactataacccagttgcatgaataaattacactgtgaagagctgggcatgtctctgagacaccttcaact

SEQ ID NO: 233974 - DNA, 97 bp, Glycine max
attccttcagttttattactgaaaaattgggactttgctcttatggaaatatttaactgatgtggatgaacatttaaaatttgttaagggcagttca

SEQ ID NO: 233975 - DNA, 106 bp, Glycine max
tcggtccaatgatgtttaaatttacaaatataactgtcatccccacttggttatttggataggccatgtacatctcaaattcttaataaaacaatagttactacta

SEQ ID NO: 233976 - DNA, 454 bp, Glycine max
agcttccgaggcaggagaactacaaatttttgttgtttaatgcttattttcagacaactcatatattcaacttcattaatttcaagagttaccttctgctatattacaaaaactttgcggaggaaatatcgcttctgggtccattttctgggaagaaacaatcagagacaggctatgcttgctgcaaagaaagcaatcacacaatgtttcagaaaaatggataagctaaaattccaacgaatttctatcatcaaacagtaaatatcaaatatcaccagaccccagttatctgattactaacagaaagtttaaggcaatatatatgcttggtgccaaccgcttactgtcgttaaagcttttatttaattttttttccttctttcagtttgaataaagaaggcccacatatactatgaagggtttcaaacccccacagacatcaaattaaagaatg

SEQ ID NO: 233977 - DNA, 439 bp, Glycine max
  unsure (1)..(439): unsure at all n locations
gttaattagaaccaaacttgtcccaagtgctattacctttttcctcaaccgactcttcctatcagcctcacgattctgagctagcctacgtacggtctaaaagaaagcattcacaaaaagtaagctatcaacaacaaaacaagaagttataataagcacaatgttttgatgcaagcagctaacaaccttctggtcttcagctttaaccttagtcttactttgatcctgtgagtctacaactacaagtgccccgtccccaactccattgcaccaagacacagttgagaaacactgtcaaacattaaaatccacaattctcatcatcagtatcactatccaatacccagatattaattaataataggcaaaaatgctgggtgtcgtattatttatttatntttatctgtttccattgcgtcaaatggtttacttcatgtat

SEQ ID NO: 233978 - DNA, 446 bp, Glycine max
  unsure (1)..(446): unsure at all n locations
gcttaacatataacgcaccatgcgagatttntgcatatggatattctaataaaattaggtgacgacagagatgattagagtgtagtatggtcgtaaaacactgggttacatgctttttttaaaattgacaagccacgtgtacaactattaaattacacgcgttcaattatttattttctctctcgtgaaacctaacccaaattcatgtttaaagtgagtctgtgtttccatcttgattttggttttatttgtgttgtgcgacacaccatcgtcatacaccgtctttgattttggcacaacacctaaatcgtccaagaagtgattntatctttttacaataaacaagttgttttttccgcatgagaagaaatgttntctccaatttaacggtgtcttcccccatttttgggtctcggtttgtacctttttccgtaaggagaacatga

SEQ ID NO: 233979 - DNA, 431 bp, Glycine max
ttaatcattgtcaaatgtcaaatgcaccatatattctttgagttggtttggcatttctgccccatcaaaagcacatggcaagaacttcaaagaaatcataaatagtataagaaattataaatcaatgttagcaaacctgcacgtatcaaaatgagcatctagtcttcgcactgcttctgcacttgctttgcgtacatcctcccgagtagataccatcttcggaaacacactggaccagtgggaattgctgcgcttgcagttctgccagaggtgatataacatttgcatgcgtaacctgcacttattgtcaacagaagacaatcatctcaaaaaaacagtacatcaaaggaaaatacatatcaaataatcaaacacaagcaacagtaaatacatagcatatcaaaatatgatttgaaaaataaaaaaagagt

SEQ ID NO: 233980 - DNA, 450 bp, Glycine max
  unsure (1)..(450): unsure at all n locations
agcttngatatttctatatcattgntcattagaattgccttatttatactaactactcactaactgaattttttattttgtgcaacgaatatttgctaatggaatttgtcattttgattgatagatacctattgctcatcaatttgtgtacaaattttgagattcatactcatcagtttgtgtacaaaatggcagggtaggaagactggtatggtctatatgcttttttttgtttctaattgcacaggtatacttcctccccggggtgattgttctttaatttctatctacaaaatctagatgatatgtttcaatactataatttggattcctccttcaaatatatggtactatatgttgcagtcctagtgaactgattgctaattagcagcagatgatacatgttatagtatgatgcatgcatgtgattgaaaaaatgttgaagagggg

SEQ ID NO: 233981 - DNA, 379 bp, Glycine max
tctaccatagaatacttgtggataaaaatggtttccacttgttggagggtctaccatgtgaaaaagactcacacttgtgggagagattgttggagtacaagtgtgaggtgatttttcacttcgtttatgatttagtttgttgtactccttttatgcgattgatgaaacttatatacctattcttcattgttttgtgttatagtgtgttgtcttgttcacttatgtggtgtgtttgttaccaattggtatatatcccctttgtgtcctcccctttttattttcacattgtttagtattatttccaattgtatttattgatcatattctttatgtgtttcattggcacatattactctttctcttgtttccattatttttt

SEQ ID NO: 233982 - DNA, 426 bp, Glycine max
  unsure (1)..(426): unsure at all n locations
atgcttttgttntcaattacgagcgtctttatttcctacgggacactattggacatccgagtgaaaagttattgtcgtttgaatttgtttagagcttatgttttcaattacgagcgttttgatatcccacgggacacaatcggaaatccgagttaaaagttattgtcgttagaattttctcatagcttccgttttcaattacgagcgtctcgatatcctacgggacacaatcgaacatccgagtcaaaagttattgtcgtttgaatttgctcagagcttcagttttcaattacgagcgtctggatatattacaagactcaatcagacatccgagttaaaagttattgtcgtttgacttttcatagagcttctgttttcaattagagcggctccatatattacgagactatatcagacatccgagtc

SEQ ID NO: 233983 - DNA, 436 bp, Glycine max
ttgaggaaattcaaacgacaataacttttgactcggatgtccgattgtgtcccgtattatctcgagacgctcgaaattcaaaacagaagctataagaaaaatctgtggacgataactttttacacggatgtcccattgagtcccataatatatcgagacgctcgtaattgaaaacagaagcgctgagcaaattcaaacgacaattacttttgactcagatgtcttattgtgtcccgtagtatatcgagacgctcgaaattgaaaacagaaactctgagcaatttcaaacgacaataactttttactcgcatgtccgattgagtcgcgtaatatatcgagacgctcgtaaatgaaaagagaagctttgaggaaattcaaacgacaataactttcgactctgatgtccgattgtgtcccgtagtatctcgagacgctc

SEQ ID NO: 233984 - DNA, 397 bp, Glycine max
accttgttccatgagacaatgcagtctttatggaactcgtgcatacatggcatctcctttgcttcactcccaacctcaacatcctccaagcacactgggcactgaaacttctcctcactagtcacactaggcaatgcctcaattgccgccttctgtgccggagggttaacacttgaatagccaccaggaccaatctgtgccaaatgctgtagcaacaaatcaaagccagatcctaccacaaggtcattcaaggagcttccgacagcattattctcattcgaactagttgtgtggctcaagataggtcccctcacaatcaatgcaccttcactgaatggatcaatcacaagtatgctgctgccatacatgttcctattataggcttcagggttttcaa

SEQ ID NO: 233985 - DNA, 351 bp, Glycine max
ggccaatgatgtacaatttacaagtataattgtcatccccctttggtaatttggataggccatgtacatctcaaaattgtcaataaactatagctactactaaccttggcgtgtgaaccatcacagaattgacccactcaaaaatctttacgcggagattatgtctcaactgagcttatatcacttatcacgtccaaagatatgcttacatgttgcatatcgttcaaagacatcatttaaactgccttgcaagctcactccctatattcatttctggtaataagggtcaataaaaaaaaaaaatttcaataaaattatatggacccagcttggtacaactgaacctaatat

SEQ ID NO: 233986 - DNA, 402 bp, Glycine max
  unsure (1)..(402): unsure at all n locations
gctttatgtgttgatggngacccgttgctgataggaactaggataaaggctacgtaggagtacgtgagctcaatttaaaggtggacaactgcggatggtgtgtttatgtttgacttggggaagtgggagagttgatttgcgccatcgcccgatcgccacctagtaccacatatgacgggtgccccataatccaataagcttgatgtgagaaagcatggaagagtcagtcttcctacttttgtttgttgaccacagagtggtacctggagatatgtcgcggaggtcaggagaccttggggacgtcaggaggggtgctatttgccaaaactaagcttggctaatccgacccaactcgggcatagtcagtcagtgaggacctacgacgtacctaagcaggcgagc

SEQ ID NO: 233987 - DNA, 423 bp, Glycine max
tcaagagcttggtatgaacatattattttattccttgtaaacaatggttttgaaagaggaaaaatggatacaactctgttccgcaagaactatgtctccaaatttattagttcaaatttatgtggatcacattatatttggtggtactaatgaacctctttgtgaggatgcaagctgaattcaaaatgagtatgatgggagaatgaaagttcttcttaggactatagatgaaacagatcaacaatggaaaatatatccatcaaactaagtaagtcaatgaacttctcaagaagttcaagctggaagatgcaaaagaaatgaaaactcttatgcgtcaaacaacatgtcttggactggacaaggaatccaactaagtagataactcaatgtagagcaatgattggatccttactatatctaact

SEQ ID NO: 233988 - DNA, 458 bp, Glycine max
gggatccttaagcacctgatgcatgcaagctttatttgatgcgcaaatgatgttttctacttttatgaaattatatgattatacaattaaaattctagagagaaatagagatatgaatattacaatgacattatgggacatgtgatatatgaacgaaaataattggtttcgttcgctgccaaaaaagttgttgaaaatgtagttgataaacaagcatcaatatgattgaaatcaacttatcaaaacaattaattcttcaaggacgagggtattaatttatatttctatgaaagtcctgaagcatttaatttactaatgcattatattaaaattaattgattacaaaataattgtaaatcattgtttcagtatcataaatacaatatgttctagattcttcattcattgtgtaaatacatgcaacaatatttgtcatatctacattatgggagaattac

SEQ ID NO: 233989 - DNA, 414 bp, Glycine max
ggaccttaaaactcagcttgacagcttacagaaataacttctgtgtctttgattccagagctaatcttgaaaaagatgccagtgatactggctaacaacaggatgatcaaattggaatctatcaaattcataaagaaagcatatattctacgtttataggcccactgaccttacatctggcagcatcatcctgtgctgcaagcatagcagcatatggagatgattcatctctgtcagctttaactttcatcccacctgaagatagataacaaagacataagtaaattacagtcagtttccggtatccactataaaagaaagactcaacccaaattcatttattggtgaaccatgttagctaggttatatacaaatgaatccccagttgtctagtatccgctctaaagaaagatt

SEQ ID NO: 233990 - DNA, 402 bp, Glycine max
  unsure (1)..(402): unsure at all n locations
agcttgtggagtacttacaactatcatttttgntacctcgttatgactacaaaacatgttttttgaagctgataacaagtgtgtcatagacaaagttgggtgcaattgtggatagaatcgaatttcggggtcataataaattattatagaaccttgttatctcataactcaacctagccttggtttagttaagacttaagagacaaccaatggtgttacacatgagtttgcttaggtggtcccatgtttgcttagtctctactaattntatcatattatcccatatatgggggaaacttgttaggaatgaaatgatataaatcttcggtcaaaaagaaagtacaagacaataaaaggaattatataaagtttttaaaaaagtgtctttacaatgagttaagt

SEQ ID NO: 233991 - DNA, 416 bp, Glycine max
tatacatgcctccttatcagatgttgcatcagaattcttcttaaacgcataatcatctaatgcttgatagataaggaagagagttttcttgtttttctttcttgaatccttaaaagtctcatttttgcttgggataatgaagtctcatcttgcggcccttatatccttttcaaccatttcctaaacatcatgtgctccaagaagggccttcattttgatgctccaattgtcatagatgctcccctttagaagtggaacttcgaaagatgtcgcttcattgcttgccatgactatagagggatttcttatcagaaccgaagctctaataccactttgttgaaaagaaagggttataagaagtatttgagagatatggaggaggagagaatatttgaaagagggctagtttttattac

SEQ ID NO: 233992 - DNA, 416 bp, Glycine max
  unsure (1)..(416): unsure at all n locations
agctttgtttaccatatctgagggtgtatgattcattnggttgatgccggatggggacgtcgggttcaccttagcaacagcgctggtagtggcaacttcaaccgcattggcttccattatcttcttcatgctcatcatggcctccatcattgcggtcatttgctctttcatggcctcctatgtcggcctccatctgctcttgcacctcctctacttcacctattactcttgctctagcataggttcggtaagggcgccgtaaagcgtgttctttttcttttttataacaatgattaagttcccccccccccccttttttcaaggaaagaatgcaatgagcaatgcaaccaatgaacaacatggatgtatgcgaatgatgcacagttgaagtattgtgatattttacgcaggatatg

SEQ ID NO: 233993 - DNA, 385 bp, Glycine max
  unsure (1)..(385): unsure at all n locations
ngagatgaggaagtgttgaagggtgttacttcctgcttttattgttgaccacagagtggtacctggagatatgttgcgggggtcatgagaccttggggacgtcaggtggggtgctattgcccaaaaccaagcttgaccaatcccgacccaacccgggcatagtcggtcagtgagaacctgtgatgtacctaaacaggcgagctcctggcagtcaacagataaaaggataacaagaccacaaagcaaggaggcttgtggtggctggctagctgtgaattttgtgtaatatgtggattgtggcctctggtaatcgattaccaagggtgggtaatcgattacaaggcttaaaattgaagacaggaagctaagatgtggtaatcgatta

SEQ ID NO: 233994 - DNA, 288 bp, Glycine max
gaagacggacagcatcatcacatattaaaacttgtgcctaacatgagctacactggtctttttacctcaaattgggaagtcaaacttggtttggtaatacaaatttgtaggagcaaatcatggcttataagctcactcccactggaatctctgcaagttaggtcccttgggatctctattaaaccacaattaacaactggcttaaccaatttcagcattcgagcactccgagattgttaaactgatactttgtggaaacaagtactttttggggtactcaacaaagtt

SEQ ID NO: 233995 - DNA, 401 bp, Glycine max
  unsure (1)..(401): unsure at all n locations
gtgtgggtgctgtacggttngtgtttgctgacgcatttattcgctttgaggaagcacaccccatttgcctttctctaattcactcgatatgcaaatcatatataacactgcacagtacatataggaccatccatccatatctttatcaacttatatgattgaaatgtgtgccttttattctattgatgaaaataaaataatataaagaataagatttaatttaaatacggtaactggcaattgttcagtcaattatatgatatcttattcgcttaattatatcattgatttttaaattataattaagaattcaattgagtctttgaattattggaaaattcaatcaaatcttctaactattgaaatatatcataatcacatcattttcatcaacataacta

SEQ ID NO: 233996 - DNA, 403 bp, Glycine max
  unsure (1)..(403): unsure at all n locations
agctttatctgcatttcatgccacctctggacagacaaacatctggcagaccttacagtaccacgagaacatatgtctttaccatcaatattaccaatcgtatcatctctactcctacacctcttggtaagagtatccttttttatatcataaaccaccatcaacaaaattcccgtccttccgattctaattaactatgttggtttaaatataggtgttgccacctgatgctgtggatatcattggctgcagatctcaatatcttactgttgaaccaccccgtggtcatcagatttagaggatgtctatccaagatggtctacaaactctcactacaccttagtaccaattcccgagacacaacaacttgatggctcgagatgaggggtgtcttnttcatctt

SEQ ID NO: 233997 - DNA, 415 bp, Glycine max
  unsure (1)..(415): unsure at all n locations
ctggacgaatatagtgatgcacttatgatacacaacatctaataggtatganaatgttcaagtttttctattatggttgatgaattgatggattttaattattgcatttgtttattgctttttgtgtattttaaatgtaaggttgagtatgatactaggctactccacatcataatggacatgtgccggtggtgctgctggtgccactggtacctcatggatatgtggctccacatatgtgtcatcctgcgtcacaagtggatgtctggtcatatcattangctgtgccggtgtcatgaacggatgataaatcctgaagaaccactacatgttatcggatgcacattgtccttgcacaacacaaagctgccccgcttctgtaggatagtcatagtaatgcatccacttgtcatca

SEQ ID NO: 233998 - DNA, 410 bp, Glycine max
  unsure (1)..(410): unsure at all n locations
tcaattnttgttgagcatcaccaaactgttttatgttccattcttttagtcccccccccccccccaaccagttacagaatttttcatcctgcagtcctgcactactttcttgaatgatttatcctcaagccagcaatcaaaaacccgaaatggcttcggccttcaatcagcactaaaggattgcaacaagcaatgattagaaaattacggtccaagattagctgaatgctgtctagccatttggaagaccactctgccgagacaaggatcctatcaattttgcttttagttgtctcatttagttggcaccacgtaaattttcaccccacactatgcacgccctcaacctccaagtcagctatccagtcattaaattctttcaagctacccccccatccttagacacactc

SEQ ID NO: 233999 - DNA, 433 bp, Glycine max
  unsure (1)..(433): unsure at all n locations
ttcgacaatgaaagaagaagaagaagttcaaagagactcaganatcaatgtggaaaaattgcttgtgtaaagaatgaattggaaaagatagatgatcaaatgcaaaacaaagccttgcttttatagactcttcatgtttggtcaagagaaccattagaagagttatgacctttagaaaaacttaaaaccaatttgaaaaagtcaaaaactatttgaagagttacatcttttgatttgttcagaaactatcactggtaatcgattaccaaatcagtgtaatcgattacacaaagcttttttgtgaaaggatgtgactcttcacatttgaatttgaatttcaacgttcaaacacactggtaatcaattaccaaaacattgtaatcgattacaacatttagaaatcaattgtgaacgggtaaattcagttgaaagc

SEQ ID NO: 234000 - DNA, 439 bp, Glycine max
agcttgtaatcgattacacacatactgtattctattaccagaggagtattttcaaaaaatattctcaacagtcacatcttttcatttggttcttgaatggccatcaaaggcctatatatatgtgacttgagacacgaatttgctaagagttttcagaacaaaaaggtcttatcctcttaaaaagcaaaatcgttttatcctcttacaaattccttggccaaaacacttgtgattcaataaggaattatttgagtgctcaaattgttcaatctatctctttcaagagagatttcttcttctcttcttctttattctgaaaagggattaagagaccgagggtctcttgttggaaagaaatctgaacacaaaggaagggttgtttttgtgtggttcagatcttgtaataggcttttacaagatagtggaactctcaagcaga

SEQ ID NO: 234001 - DNA, 451 bp, Glycine max
tcgcggcgtcgtgcgcagatgcatgcgaaaacctaatctaaaaagctttatattttttaaaaaatgaacaaaggcggttttctatttacacccgttgtagaaataagtcctacaaagacgggtctcgaagaccgtcgtaattatcttaccactatttacaaaaatgtcactgagggacattctaagacggttcctggaaactgccttataatgtgcgtcctaaaaacagctttttttagtagtggccatgtcctatctggttgcatcatgcaaagtaagaatctgagtgtctcactagagagatctcaacacctttagggtaccacaagtcgacatgtaaggttcctctaagatacttcatagctctcttaactactaagaaattagactctgtaggacatgtttgatagcaagcacacatgcaaacactaagcatataatatattatatg

SEQ ID NO: 234002 - DNA, 440 bp, Glycine max
  unsure (1)..(440): unsure at all n locations
ttgcaagcttannctcggaccatgatcccctatttcttagtcgnttttggctttacctctttcgttttagttagacacagttacgcatgagctctgtgtatcatcctcaatcagatggccatatagaggtcttgaatcgagttatcgaacagtatctttgagcctttgtccataagaagccttcatcttgaggaaaattgctacaccgggttgaatggtcatacaacacatcttggcactcgggctcgggcttctttccttatgaaatcacttttggcaaaaagccctttaattttccacaatatctggcaggtgattctaacattgacgttgttgataacatgctcactgatcgagaggcatattttgcggaagttaagaagaaactagaaaaggcttaggctcacatgatagcacttgcaaacactaaacgtcgcaac

SEQ ID NO: 234003 - DNA, 434 bp, Glycine max
tcttactcctttaacatcctaagatatcgaccattctatgacagcttgtactctagaatgatcaatttccatagtctttatccattaaggaaaaggaagcttcttactcctttaacatcctaagaaatcaacctatacattgtcaaagaaaactaacaaatgcttcaataataatggcctaaatattgaattcgtggtggattggaagctggaggtccaaatggcatggcaaggtacttatattgcccctcatgtgtgcaaaaagcagttttgtgagtatcctcatctctcacacttatttcatggaaaccagattttaaattcatcttagagaaagatgtgacccgtgcaactaatccaacaactcatttatggtaggcatatgtcatttgtctaatagagtgaccttcttcaacaccttagctggtatcact

SEQ ID NO: 234004 - DNA, 449 bp, Glycine max
  unsure (1)..(449): unsure at all n locations
agctntgatctatgtgatgaagagaatcttcttctggaccagaatgtttgcttgaagttgaaggagtgtggagaagagattctgaaggagggaaccaagtttgatccagacccttgaagattgatgcgtcaagctagtgacgtcaaaagagtgcatcctgggaggcaacccagtcctttttctatttgcattgcatttagttatagcttgcttgtttgtggttgcatgaagcattttcaacatgttttgcattgcataaaggggttggatgagcttctttgaagctggggatgaaaaataacttaagaatattttcagtagtccactcgctaagtgcattactcgcgctaagtgaatatgtcttcatgtgctaagcaactattgctttcgctaagcgtcgcgacccttggttttttctgaaagggtccactaagcgaacctgttcgcta

SEQ ID NO: 234005 - DNA, 444 bp, Glycine max
tactccgcttcttctcttttcctataatagagggaggagggatgtatcaaaaactttcaaccctcctggtatctgaggatgccttgaaattagtgagaaaaatcatttccatgaagaaaatccgagccgaggcgcttccgtaactcgtctgatacatttccgtgggtgatttcgtggagattttctgccatcctttgttcgttcttcgtcgttcttcggtcttcaatcggtaagttcccgaaatcaaacttttcaattcattctatgtacccttggtggtccccatttgtttcacgtacttttattttcatttcatttactttggttcccccttttgacatgctttagtaatatatttaagttattttctcacctaatcaaaaaataaaataaatttccaccgatcaattgaattgtaacatctgttaatttctgttaaaatga

SEQ ID NO: 234006 - DNA, 454 bp, Glycine max
  unsure (1)..(454): unsure at all n locations
agctngtccaagtttgagtaattgagtcttttcatgtttaaccaattttaagttcacacattttttccggtacacttgtgatttgaaccaagttgagaatctcagaatcagcaaagtacattaccggttgcccgtttgctagatgggggtttggtatttgagaatcatgtccagaagatgaagagaggtcagcatcttcttcccatagcatccccgccttggaactgtttccttggccatagttgatctcattatctagatcatcagcatcgtcttcatcatcatcatctccctccacttcagcaccctctgatatccacattcatcttgttcaacgtanattctgatgagggaaagaccatnaaaattaacatttatgcacaagctaaccttggtgacttgtgaatgcagtcttgcactggggacaagactggctcatatgtttcagctcata

SEQ ID NO: 234007 - DNA, 423 bp, Glycine max
cttgctccatccctagacataaatgtagacgtgtttcttcctttctttgttaaaagcattttccaatgacaattctacccctaaatatgtaaacctaactacatgactacaaaaagaaaagaagaaaatagatgaaaaagatgatgagaaatggtaaggaagccatggagggcaagggagaacttcccatctgcaacctaaaaccctatatagttccccagccaaattttccttctattcatattattggtgcttaaatatagtcaaacacgttgcactgtcgtttttgtgtaattgagttgtgcacttggcatgcacttgcttgctgagcatgcatacaaaagttgcactggttcaagtggcttgaagctgagcctgaggtgcgcgttaatcctaatgtgtgcactgagcctatacaagttg

SEQ ID NO: 234008 - DNA, 420 bp, Glycine max
  unsure (1)..(420): unsure at all n locations
agctttctagtacagcaactatgtttcttgcagagtctttctgctgttgacgatccaactggaaattcagtttctgagcttcaagttgatcacgtagcattttgccattcttttctaagacatcaattaattggctttgcaaagtttcctcctctccatcggttgctaaccacttcctcttccgttccccttgagatgtagaacccatttctggatttgggtttgcccgtttctcattggtagtacctacagaataaaattaaggaatgtcaaagcattgaatttacaataatgtcatcagctaagtccttgacactgtgattgtcaaaggagaagctttgaccctattcttctagtttatacctattataggaagctatagcctagctagagctcanaagttagggtaatagcataatg

SEQ ID NO: 234009 - DNA, 434 bp, Glycine max
  unsure (1)..(434): unsure at all n locations
cttggttctccattttggttccatcgatcccttcgttttcttcattggctttctgttagcgtttcttccgccatcgaggttagtgttctaaccccattggctttggttatctgttataatcgcgttaatggccttatgatagacgacattgctgttgtttggtgctggaggttgaagacgaagttcttctgcgagaagaagcttcttccgcgcttgtgttatgggatgaaaatggagccagcggaagaagaaggtgttctttcgcaggctccatttttttctcgcggaataacctgcggaaccttcttccgcatgctttgaatacttctcgcggaagaacctgccaaacttcttccgctggatacantttgctgtatattggtttttttttcttgaaaattatgtctgaaccaacaatttattgatattattag

SEQ ID NO: 234010 - DNA, 430 bp, Glycine max
  unsure (1)..(430): unsure at all n locations
agcttatataaatctgcatgagaatcttatttcctatgtttgtcacatgctcacagctcacaagtatcatactttggaatttgaccttggcacaacattatcaatgtttcgatctcacgcaattttcctagcatcaagaaattacaagttgtcatataataggaacttagaagtaaatgtcaaaggggaaacctagtgcatcagatgccatctagtggggtttggagactggcataatacaacaccaaggattgctctaacaagaactaaacgttaatacttggattcatgttagattatttaaaataggattaaaatatcaactaagatgaaatgttcacatgtttcatcctaagatgaattaattcttaatctattattgattttaaatngagatatcaagattggtccttgtgagtntggtctcatg

SEQ ID NO: 234011 - DNA, 405 bp, Glycine max
ctcagctacaaatctgtgttaaatccaagctcataaataaattcttatcaaatctttattagataagataagatctagatgaaataatatctagatgagatcaaatctaaataatatctagataagataaagtctagataagataaaatcttgtagaataaaatagtttgtcctcttcaagtccaaacccaattctggattcaagtccaatgtttcattaattcctgaaattagattaaaaacataaaattagtccaataggcccaaatgataaaactgcataattaatttgacaattaagactaattagtaattaaaatggtgcaaaaagggtttagaaatagaagataataatggcacatcatatggaagttgaatttgtagcatgttttgaggctacaattc

SEQ ID NO: 234012 - DNA, 434 bp, Glycine max
  unsure (1)..(434): unsure at all n locations
agcttatctacctaggaagacataatctgatgcaagntatatatcatgtatncgntccacttatcaaattacccaggttaataaaactaaaacatacatacaattttagattcttttttgtgcaactcctccagagctctctcaagaaacccgcattcctctaacaatgagatctgggcaacaattttagtgcagagaaagattacagggaaaaataatatcagcagtcaaaccatataaagatttcatattcttgaacattcaacagtaaaattgacaacaaaaagaatcatattcaacaaacgtattctgactatatatcaaaatattaaagcgacaaaaaaaattcatttgatntataaagccatagtggataccagctatcattagcaatataaaagagcatcacatagagccaaaatacatttcaatta

SEQ ID NO: 234013 - DNA, 414 bp, Glycine max
tcaagagagtacttcattgttaatgtttgcatctactgtttcaagtgttgtctctcctagttcaactctcactattaataataataatctactgtaatgtttgattctgtatcttcttctctcagtattgctaatctctggcatgctagattatggcacctaatgatcatgtaatgaaactagttctcactcattgtaatacttcttcttcaaataaaaattccacagggttttgtgcttcttgttgtatgggtaaatctcatagattaccttctcatatttctacttctgtttattctcctttagagctcatctttacagatttgtggggaccttctcatattacctcatattctggttataaataatatgtctctttcattgatgctttctctatgtataattggatatatc

SEQ ID NO: 234014 - DNA, 378 bp, Glycine max
  unsure (1)..(378): unsure at all n locations
agctttatgatgaatgtttntatgacattcttttgataaatatgtataatactaacctcatttcagtcatcaatatatgtccaatacacacaagtatgcattttaattagtagattgagttaatgtcattggcataactatccaatgtgaatgactttatgtctaattgattgtaggactaggtggcataacctcgttagtgctaggtatttcattgacaaataaatagtcctaaggagtagcatggatgtatgttattcttttcttaaaattaaaaaataggtggatgctgacttacttctcatagtattaatcaaatacggggctgctcatcacgacccgttccattgcaaagaggctaagaatgaaacagaacat

SEQ ID NO: 234015 - DNA, 430 bp, Glycine max
tgttcagagttgtgagcaacaaagggatctaaaatttatatactaaaatttattaatcaaatagtattgataaaaaaaatgtgcataaatcaagtacaaatccttcaaaacaaagtaagatcaaatagtaattttagcagaaaagagaaaaaaaaagcataaaaaaggataagcaactaaagttagaagctaaacgtaataacaaaaccaaaacccttgaaatttaaggtgtgtgtgagagaactgaaccgaaagaattgtgacctatgaagaacaaatcaaagtgaaaatgcatagaagagtgtcatttttttttaactaagaaatatatactttacggcatggttgttgcacaaccatatcataatcatcccttgaaaccattgagaaatcaagatccatgtgcaatttcataagatcaaagctaaaa

SEQ ID NO: 234016 - DNA, 432 bp, Glycine max
agcttgtttcccagctcgcccaggctatgttggttgcttcctccagaagcaacagccttctggaggaatcttctggagggcccaagtgggcctggttgctatttgcacccccatttttactaagtacaccccctaccttttttttggtgattcttttttcgtaaagttacgaaaacttacgaatttcgtaacaatacttgttttctttccgcaatgtaacggaaccttgtggattacataatcatccccttcttgacttacggaatattacggaacctcactaattgtgcaacgatgcttccatttgatttccggtgtgtcacggaaccttacggattctgcatcaatattttctttttgtttccggcatgtcccggaatttcacaaattgcctaatgatgggtgccaagcacctcacaaggaccaaacaaa

SEQ ID NO: 234017 - DNA, 384 bp, Glycine max
  unsure (1)..(384): unsure at all n locations
ntgatgcaacatatggagaggttattgaaacaacgtgttgatgcgctccatgagaggttggatcaaatggagaatagagatcataatgaagaagaaaggaggagaagagggaatgatggtgttcctagacaaaaccgaattgatggtattaaactcaacattcctccatttaaaggaaagaatgatccggaggcctacttggagtgggagatgaaaatagagcatgttttctcatgccacaactatgatgaggaccagaatgtgaatcttgccgccacggagttttccgactatgctcttgtgtggtggaacaagctacaaaaggagagagcaagatatgattagccaatggttgatacatggacggagatgaaaaagatcatg

SEQ ID NO: 234018 - DNA, 322 bp, Glycine max
  unsure (1)..(322): unsure at all n locations
agcttcttcagatagacgtagatnnttgtcttgaccaaccttgnaaagaggcatctgacgagctgacgaggaggcttaccacctcttccatctgggtgatgcctccaattatgcatttggggttgttttgccgcagagaagacatagactatcacatgtcattgcttatgcctcacgcactctggatgcacgccaagtcaactacaccaccatccaaaaagagctcttaactattgtttccgcatcaaacaaatgcagatcttatttgctctgctgccatattacctgccatattgaccttgcagncttgatgtacctattg

SEQ ID NO: 234019 - DNA, 391 bp, Glycine max
  unsure (1)..(391): unsure at all n locations
nggaagaacatttatggtcatgactgaatttcttgtttcaattaanacagagacccttctctcgtcgggcggctatctctttcggtgagagtcgtttgaagggtatcggaggttgcttggttgggatatgcagcaaaaggaatgaggaaatcgattatgatactcgtagtgaaagcggttggacaaattgttgagacagggtggaccactgaatgtgtggcgaaagtcaccaaatttctcctcctgaagatgagtcagagttgctgcttgaatcaacgtaagaggttgtaatgcctggacttcatggcgtatctccaacgagaaaccagagatgaagcaacttattaaanatggagggggcatgtcgatgatgtggttggctaatgtcttg

SEQ ID NO: 234020 - DNA, 417 bp, Glycine max
  unsure (1)..(417): unsure at all n locations
agctngcttgtggtgcttctatggatgttggatctttgagcttcaatgaggtcctttaatggtgattttccaccatggagatgcagcggaagacaaaggagaaaaggtgagaggaggcgccatccactatggaataagccatggaagaaggagcttcacctccaagatgagccttggataagaagcttggagaggatgcttcaatggaggaaaagaaagagggagagaaagagagaggggggagcacgaaattgaaggaagaaaaagggagagaagttgaactttgagttgtgtctcacaagactatcattcatcanagttacaacaagtattacacantgcttctattatagactaagtagctttcttgagaagctttcttgagaaaacttccttgagaagctttcttgagaaaac

SEQ ID NO: 234021 - DNA, 437 bp, Glycine max
gacactatgaaactcagcttcacaatcttccttctttgtctaacaataactatgcttgttgtcatcaactacttcatttggtagccatcgaaagttgttgcatccactgtcaaccccacgttgttttcaatcaccaacataaatcaatagttaaaaatggctaagcctagcaattcagcatgtagtcttgtgaaaattcaacaatgcagccgctataattaagaccaaacaaaaacaattaagaaaagaaaagctaagcgtaggaactcagcatgtaatcaatagaaaagtgcaaggccacaaggaaaatattgatgcacagatacatgtgcaagaatctaagatagaaaattgattctcaccttgtagttgggacattcccaaaatctccttccatagtaattttctgtgattgcagttcgcacaatcgcgatgtc

SEQ ID NO: 234022 - DNA, 267 bp, Glycine max
ccaacatcaaagtaatacatctttctaacagcacaaactatctcagccaagatttcagagcaaaggcggaaaactctgccaaaacaccaaccaaaatcacagcttttctcacttaaagaccccagtaacaattccttcgttccaattcgttaaccgttggatcgactccaaatttttactggaagtctctagtacataagcctacattttgaccgttgggatctactatcaaaaatccagaactcattctgcactgctctttccaca

SEQ ID NO: 234023 - DNA, 450 bp, Glycine max
acttgtccataaaaataactgtgtcacttcttttaaaaaaaccaagagatcattaatggtccaatgccttaatgttttctctcctttcaaaagaatcaaaagatcatttaaatggtccaacgccttaaatgactttttgtttggtcacaatatatcttgcaaaaaagataaaaacaacctaaccaacgtttagttctcgaagaactacgtaggtctgatttccttaccacaattgaggaatacgtatgagcaagggaaacacccttgttgaccacaaaaagataaaaaatataaaaaagcataaaaagacataaaaagcataaaagagaaaaaaaacacaaatcgaagtcatgtttgcacactcgattaaagaccgtcgtcccttgtgacaaacgcgtggtgtgctaataccttccccgtacgtaaatacaactcccgaacctttcacac

SEQ ID NO: 234024 - DNA, 370 bp, Glycine max
  unsure (1)..(370): unsure at all n locations
acagagccaggccgaatctctgcctaaacaccagccaaatcacagctttttcacttatagaccccagaacagatccttcgttncatacgttaaccgatggatcgactccgaattttactggaagaccctaatacataagcctacattacagacgcgtgggatctactagcaaaggtccataactcattatgcactgctgtttccacatccgagaaaagcctaatatgactctgcacttgagcaaaatcctgctgcacaatttcacagcaaacatctgcgctaaaggcagatttcaaaaaccacacttcccctcatccaatcgtgccgcaaagaagtactacaagatccacatgatagatcaatcatggct

SEQ ID NO: 234025 - DNA, 371 bp, Glycine max
aacaactgcgtccggtcgatgagaatttccaagagttttttattgcgccaatgccttaatgatccctctcctttgcgtagaatctaattaccatatgactggctcaacgccttcattgactatttagcttggccacaacatatcttgcataaaatattagaacaccctatcctacgtttacttctcgaataactacgaaggtgtgatctcgttaccacacttgacgaatacgtcagagcaagggatactcccttgttgaccacgtgtagatattgtttatcatatagcgtgaaacgacgtatttagcatatgatagagtctgtacacaactcgctttcatgtttgtccactctatgttagaccgcctctcc

SEQ ID NO: 234026 - DNA, 445 bp, Glycine max
  unsure (1)..(445): unsure at all n locations
agctntatcttgaggtgatgtcctattctttgtctttaacaagctgttcgttcaacttctatcccatccaacatttggtatcccaacttgggtgcctttcatcatgttactatcaatgttgagaacattcagtagtgttcttgatttgagggtcccaatcaagtgattgtaggcaatggtcaaggtctggaaacaaatatattggttcatcttccttataatcattctactaatttagttgtcaatagaatattgcatgttccaaccatttctaaacatcttccaagtgtaagtcaatttataagggataattcaatttcccttgaatttcaccctaatgtgtgccttgttaaatctcagcgatccaatgagattcttctcanagtagatgttggatccaatggcttgtacacattaaccaagtngctgtcaaattctacctctt

SEQ ID NO: 234027 - DNA, 438 bp, Glycine max
ttgtacaagtctaagtccaatagagtacaagttgtagttctattttccctcctaactgcctattttgcatctttcaaatatataaaatgaaatgactagttcttaatgtaatatttgtaatacataaaccaaaaatctctacagcctttgagaaattgggtattgttttttacaaattatttatttctggtagtttaacttcttgtttgattaatatgccaggaagattatagtaggcttagacccttaagctatcaaggagctgatgtatttatactttccttttctctcataagcgctagctatgaaaatattgcagagaaggtttgtttctttcattcaattaatatggatatattttaaatcaatttctgcacttaatatgatataactgattaagttattcttcttttggtttcttctttcactatatccttg

SEQ ID NO: 234028 - DNA, 449 bp, Glycine max
  unsure (1)..(449): unsure at all n locations
agctngaaggcatgtaacccactatcttctcatagtaaaacactggttacgtgtctaccctcattgttatcatctccctctccatcattggaggtgctacttgagcttccagatccctctacctttgggcgtattctttgaaagattcatgctcccccttacacatgttctatagttgcattctatctggagccatgtaagaattgtactaatactgcctaatgaaggcaaccattaggtctttccaagaatggacttgggaaggttccaaattagtataccaggtgacggctgccccaataagactttcttggaagaaatgaatcaacaatttttcattcttcacatatgcccccattttcctgttgtacatcttcaggtgattcttgggggcaagtagtcccgttgtatttatcgaagtccgacaccttgaactttggatgaatgac

SEQ ID NO: 234029 - DNA, 415 bp, Glycine max
tcaagaatcaagatcaacattcaaggttcaagaattaatagaagacttattcaagataagtatgaaaatgatttttcaaaaactgagtagcacatgatttttctcataacatgtttaccaaagagtttttactctctggtaatcgattaccagattgttgtaatcgattaccagtagcaaaattgttttgaaaaagttttcaaattgaatttacaacgttccaattaatttcaaaaagctgtaatcgattacaatgttttggtaatcgattactagcccctttgaacgttgaaattcaaattcaaatgtgaagagtcacatcctttcacataaaagccttgtgtaatcgattacactgatttagtaatcgattaccagtgactgtttctgaataaatcataagatgtaactcttc

SEQ ID NO: 234030 - DNA, 447 bp, Glycine max
  unsure (1)..(447): unsure at all n locations
atgcagttcatgttanggaattttgtttgaatctaccaaattatgtttcaatattttttgaatgaaaaataatctcaaacaaactatatcctctcgaatcaaaagaattagcatttagtctttgggtatattttactcccaaacagaaggtaagcctgattnttctgacaagaaaataaaaccgttggaatgaaaatgagagacacctttctcccatgtaagacatatatgtacatgcacaaacaaacttggttgcaaaaacaatcatttcattatccacaaaagagaggaggtcaatcgatatgtacactagctcactaagaatgccatcaatctttgatatgctcacatccgtggccaaacttgaccatagacatctntcttgttatattgccggtcccgagaccaggggatatcagcagaaggaatcattatctaaagacatga

SEQ ID NO: 234031 - DNA, 442 bp, Glycine max
tgcttggattctgaggtgcttgcttagtcgcgattcatgtttttcaattatttatcgaaacactttcttgagccaaaaacaatgctttggagtttttaatattcagcatctaattccatgactatattgcgttaggaatttattgtagtacgtttgacgtgggtctatttgcaatttcgagtatttggctaaaccaatctgttttggcagagcatcataatctcaaattatatccttgtttaacacagtttatcgtgtatcactttacttgtgaaactcttattgttcctccaagctcaatcggaacaagagggatgagtaactatgttctggttgcacgcacatgatagccacagcatgtacctgaaaagtacaaataataacccatttatgagatcctttatttgtttgtgtctaactacatgtatatgtttattgaaaa

SEQ ID NO: 234032 - DNA, 343 bp, Glycine max
  unsure (1)..(343): unsure at all n locations
gggattcttaagncacctgcggcatgcaagcttgtatcggacatgcgcgngatttttatgagcatttgaatttctcaagagcttccattgttgaatttccagcatctcgatatattatatgcctgaatcggacattcgtgtgaaaagttatgaccatttgaatttctcacgagggtccgacgttcaatttctaacgtctcgacatcttatacgcccgaatcgaacatccgtgtgaaaagtcatgaccatttgaattagccagagtttccgatgttttattccgagcgtatcgatatattataagcctgaacctggccttcatattgtaagttatgaccacttg

SEQ ID NO: 234033 - DNA, 399 bp, Glycine max
agctctaaatcgacatagatgttcgtattgatgggtggaggttacatgccatttttgctttaagagtaatgtgccactataactaactctccatatgtttgccttctcaagaatggctccgaggaagcttgcctcacagatgtacatgatagacaaggcggccgaatgaactatttccgccccggagtacgacagtcaccgctttatgagcgttgtacaccagcagcgtttctgaagccatcaagggatggtcgcttctccgatagcgacgcgtccagctcatggatgacgagtatactgatttccaggaggaaatatggcgccggcggtgggcaccactggttacacccatggccatatttgatccataaatagtccttgagttgtacgccaatgctt

SEQ ID NO: 234034 - DNA, 259 bp, Glycine max
  unsure (1)..(259): unsure at all n locations
cgactctgatctgaactgaaagactgctctcactaattacagctattnattaaaaaacaaggtgctccctctggtgcatctcaagtatcatatgtatctaaattcgctgagggacatcaatgcctcatgtgtgagtccctggatcataacttctcattctacctgaaaaaaaaaggatgtactctcattntatttaaaagcgaagatatacaaattctctgttcaaatgtgttcgacacgctgaacaactgcgtgtcta

SEQ ID NO: 234035 - DNA, 412 bp, Glycine max
agcttctatgtatggtcatcattgctttgccacacaaacgactcaggtaaaaatatatataaatctttagggaaacaaagattttatagatagattaccatttcaatatttccctcaagttgggagcatataaatcatatgcactaaaaaagtagataatccaaggatctctaaaatactggtaagatgtcttgatagttatctaggtacaaaagtaaacaattcaccgtgcaagatctctttcatgataaggacaactgcctctatttgtttggcttttactcaaaaaatagtttggattgtaaagcatgcaaggctacttgattgtcagtttgtcacatatcaagagttttagacgaaagagttcacatgttgccaatgccattgctcaataatcaatattctacttctg

SEQ ID NO: 234036 - DNA, 431 bp, Glycine max
tatgtcatacagaataatgcaaaattgtcaaagaattgggtgttgaaaaagcataacaagactttttatgattggtttaaagatacaatctttgcaaataaaatgcttcagaaactttaagaaagctagcatatgagcctaaaagaaatgttataacttggcaagcatacgacataaacaagtattcattttacacaaaagcacatgacgactaaagtacaatgcaaaacagcggggtcaccctaagggctgaatctcaacacttcccaagtgtgcatgacgtcaatccctgtgtagcttccatcccttactttaggttcattgatgaaaattgggagcttaactatgtgaaatttactatttgtgttttcaaatgtaaatgggttgacagcaacttggttaccacaatgaccctgtcatcatgacataat

SEQ ID NO: 234037 - DNA, 436 bp, Glycine max
  unsure (1)..(436): unsure at all n locations
agctnttggtcaatctaaggagtggtgtcttcatgctgcaaattgatggtttctgagtggaaaatcctaatttggttaagcctaaaattctgcagcatttgcaaagcagattcgaattaattgaagttatgtacgagcactgtagcttttacaaaaataagcactgcagcttatttaaggcacaaattctgcagcatctgcagtatgtgggtggaaaaagggtgggagtggaaatttaaatggagaagacacttgttagaaagagagcttgagatggaagattgtttccgtaatgatgttgctggcagttgtattcagattcacaaaaaagatgattggagaactttgacaaggactntgccttcatctacagctattggtcgtctaacatagcatcgggatttgtcttttcaagggggtagaaaccatagacagt

SEQ ID NO: 234038 - DNA, 436 bp, Glycine max
ctgtggaaatgatgtctatacaaaagttattcatatattacgactaacaaactcccccaaatttactgttttgcttgttctcaagcaaagaaagaacagttcacttgtcctcaagtgtcaaagacagtggccaatcaaaagaaaatggtgtttgattcatcaaggacatcaaccatatgaattgaataccatggaatgcttaaatcaattacttctcacaagcatgcagtttttcaaagataagagcacaagtattagagtcacaactgaaataagctagtaagcatgacagaaatcaaggaaggatcatcaaccaaaacctcacagtcattgtttcactcaagttcaagtgtttatgcttattccatcataaacaaccaacacaagttccaacctttgcatttcatctcctatcatgcagcaatgaacacacaat

SEQ ID NO: 234039 - DNA, 384 bp, Glycine max
agcttcttttggaccttgaacaagtcttcaactcctctttcagaaccatgccatgtgctcgcgattggtccctttcttcccttcgcaacttgagttcactattgctaccccatatagctccgcgaaattggttacggccatactcttccttgcgagccctcttggtctctcgttcaagggctcttgcggtaattgcattctcttcccgtaacccggcacactccttccgaacgtgtgtagcagccaacttgaacttctccttggcgagttttgcctttcctaactacgctttgagagcttggacttcctcgtcctcttccggtgcttcaaaattctcttcgctgacgacttttaacttggcgagccaatctaaacctcgtatgc

SEQ ID NO: 234040 - DNA, 385 bp, Glycine max
gtgcatagttccacaatttatggttatttcgtagtgtgttttgtaaatagatctcattgtatggttaacgatgcctctagaatatttccattggatttaatgatgaaatctatgcattttcaagtgaaaaagacgctaagttttgaattgcaaaatgtagcagttgggctaagcacatatccactgctaagcgcagtttcagcgtgcttatcgcataggagaatctggcagagcatcagcatcatagccgtgagctaagcgtgagatcattgcgctaatcgcagcatgtgccttcatccatgctaagctcgatactggcgctaagcccaatttcactgtctcacgctaagcgtgagggtggcgctaagcacaacgtcacgatttc

SEQ ID NO: 234041 - DNA, 379 bp, Glycine max
agcttgtgcaccttattgagaccgtttttatccctaaggggctcttcccgatttcgcattcgtccgattctctcgttctcgttccgcagatgaagacaaaatttatctctacgcacgattcaagaatcgcttgtttcactctcacacttaatgcgcaattactcgccaccgccagcaccaagggtactctgattcatattttcaagacaaatcatggctcctttcttcgggaagtgtattttttttcgtgtatttctctttttgcctcaaaattagtttatagtttcttagtattaatttttctgctctgatgctttatttacagtgtggcattcaagaattttggtctctggtgaaattgttggtgaccattagctga

SEQ ID NO: 234042 - DNA, 410 bp, Glycine max
  unsure (1)..(410): unsure at all n locations
tgagggtgttgagtatatcaaagtattaatatgctgttacaaaaaatagagaaaacttaatattattttatgttaaaatttaattgaagataaataatttttttcatttctataatattttaccttttcttttagttccttaaactaatcttctgtatacatataaaaactgtccagcactttgccacctgttggctgctgggtgctggatagtaaaaaactatttttcttgacaaaatttctcattttgatttttttaaaatccgtgcaacaacacaaggctctcacacctaattttattttctttctagtaactcagtaagttattaatgatgtgtcataatgttatggcatccttgctaaatgacataatggcgtgacatttntaaccatatgataagatggcatca

SEQ ID NO: 234043 - DNA, 458 bp, Glycine max
  unsure (1)..(458): unsure at all n locations
ctctgcgccttgcaagcttatccaaataggactataantttgaatgaatttaggatactatgttttgattngagaaaatattattattattattttatgttttaataaatcataataaaattgctattttattttattaattttctgttcataaaattttgaattgaaaaatgttttttttttcactttttttttacaaactttgaaagcaagaaatattttaaaataatatgatatttatatatattcatttataaaaacatgaagtaaaaataataattacttaaagataatatgttttggtttttaaaaagaatgaaaaatactacatatttacccggaaactatctgctatcattattaataaacgtataataaattaaaaacttatcaaaattaattnttgttttgaataacattactgaaagaggacaaaatcaatttcttagtgtcaaatc

SEQ ID NO: 234044 - DNA, 422 bp, Glycine max
actcgaaatgggatccatatgagtgtcacttgtgcgactatcaagcatgtcggtctctgtaagtatatccaaagcattcttccgctatgaaatagcaacgccaaaaaaggattgagcaacctcaatgcctaagaaatatttgagcggtcccaagtcttggtctgaaattggctgtgtacatgggatttgagccggcgggatatcgtcaaagtcatcaccaataatgatgatgttgtcaacatagacaacaagagaaatgcacatgccatatggagaatggagtgaaaacacaaaatgatcagcctcggcgagtcataccaaattgaagtaaggaaaaactaaaacagccaaaccaggcacgatgagactgcttcacgccgtatatagagcatcgaatgcaacagacaatgtgagatccacca

SEQ ID NO: 234045 - DNA, 432 bp, Glycine max
  unsure (1)..(432): unsure at all n locations
catgcaatctttgattcttattgtgtgtgcgcattttatattataaggntcttttgtacaaancatgctatttgtctaaaggctgtatttaattactgatcgaatattttattcaaagcgtgtatgtgcaaaatagattcggagataataaaagccttcttatagattttttattttacattattatcagtacataactctttaataagtactttcataatacctttttatgttcttaacaaacacttacagaaagcgngactaataataagtactttcatactgacagaactaccaaaaatctgcattcagaatttaagtaaagctgtgtgcctaaaattatcaagactttaagcaaatttatagaaaaatataatctaatatacaattttatatgataaatataaatgtacagggataaatataatgaat

SEQ ID NO: 234046 - DNA, 392 bp, Glycine max
  unsure (1)..(392): unsure at all n locations
cacacacacccccttggctgctttttgcaatcacaaaatgattaaccaaaatagttttacacgatcaaattttaataaccaggagactaaggagagttaaaacgagtaatcagagcttcaatatgagatgtgaagccaactgttattgaggactacagtgagtatcattggctttatacataagggtgggaggacgattacattgacacaaattatgaaacattgatcttctttgctttaatactctcaaccctactctatgttactttcaaaactgtgacacgtttataacatttatgcaacgcaattgatgattgttaaccagtggccaccatatatagtatggtaacatcttacacatgttcattagaatatgaattanatgtgaacat

SEQ ID NO: 234047 - DNA, 405 bp, Glycine max
  unsure (1)..(405): unsure at all n locations
taacttttctctagcttcttaaggaagttttcggaaagaagcttctcaaggaagttttctcaagaaagcttctcaaggaagctacctattctataaatanaagcctgtgttacacttgttgtaactttgatgaatgagagtcttgtgagacacaactcagatgtcaacttctctccctttttcttccttcaatttcgtgctcccccctctctctttctctccctctttcttttcctccattcaagcatcttctcctagcttcttatccaaggctcatcttggcggtgaagctccttcttccatggcttattccctagtggatggcgcctcctctcacctcttctcctttgtcttccctgcatttccatggtggataatcaccattaaaggacctcattgaagctc

SEQ ID NO: 234048 - DNA, 424 bp, Glycine max
ccttctgattctgtgatgcatttctatctgtatggcttgagatgaagttcttagattggacctcttgctagttgttattgatgaataacttaaacacttgagcttgagtgaaacaatagttgtgagactgtggtttaagctactttccttgatatctatcttacgcctaaattcatctaattgtacaggttacattttattcttctctttgaataactgcatgctttgtgaaagacaagtgatgagggcgtttttcttcattcttttatcatgcaatcaatagttcttgttgcatacagctttgaacttagtcactgcatattattgtcacttggggaccagtgagctgttctttatttgcttgcttgaggacaagcaaaactgtaaatttgtgggagatgttagtcgatgaatatgactaact

SEQ ID NO: 234049 - DNA, 397 bp, Glycine max
gcttgatctatttgatgaagagaatctttttctggaccagaatgtctgcttgaagttgaaggagtgtggagaagagattctgaaggagggaaccaagtttgatccaaacccttgaagattgatgcgtcaagctagtgacgtcaaaagagtgcatcctgggaggcaacccagtcctttttctatttgcattgcatttagttatagcttgcttgtttgtggttgcatgaagcattttcaacatgttttgcattgcataaaggggttggatgagcttctttgaagctggggatgaaaaataacttaagataattttcagtagtccactcgctaagtgcattactcgcgctaagtgaatatgtcttcatgtgctaagcaactattgctttcgctaagcgtc

SEQ ID NO: 234050 - DNA, 447 bp, Glycine max
  unsure (1)..(447): unsure at all n locations
tactcatgcttcttcctctnttccctataaatagagggaggagggatgaacaaaaacgttcaaccctcctggtatctgaggatgccttgaaattagtgagaaaaatcatttccatgaagaaaatccgagccgaggcgcttccgtaactcgtctgaaacatttccgtgggtgatttcgtggagattttctgccatcctttgttcgttcttcgtcgttcttcggtcttcaatcggtaagttcccgaaatcaaacttttcaattcattctatgtacccttggtggtccccatttgtttcacgtacttttattttcatttcatttactttggttcccccttttgacatgctttagtaatttatttaagttattttctcacctaatcaaaaaataaaataaatttccaccgatcaattgaattgtaacatctgttaatttctgttaaaatga

SEQ ID NO: 234051 - DNA, 453 bp, Glycine max
agcttcacctttggtcctcctcatagtttttgcatgagaaaacatgctctattttcatctcccactccaagtaggcctccggatcattctttcctttaaatggaggaatgttgagtttaataccatcaattcggttttgtctaggaacaccatcattccctcttctcctcctttcttcttcattatgatctctattctccatttgatccaacctctcatggagcgcatcatctcgttgtttcattaacctctccaaatgttgcatcaaagcttgcatttggaattgcgaaagccccactccatcattaggattagtacctgacatctcaaacaaacaaatcaaacgtaacaagacaattatagttgctgtttgaatacctcacccactcaagtgtatcacacaattatggcttttctctaatggaaacactcttgcctttaccactctaattc

SEQ ID NO: 234052 - DNA, 442 bp, Glycine max
  unsure (1)..(442): unsure at all n locations
tattggattatggggcacctgtcatatgtgatactatgtggtgatcggacgatggcgcaaatcaactctcccatttccacacgtcaggcataagcacaccatccctagttgcccacctttaatttgagctcatgcattcctacgtatcccttatcctcgttcctcttagcactgggtccccatcaacccctccaagctttcacaatatccaaacaattcaattccaattatcatgaaactaccctaaaccaagaaaacagagtagaggcagaaaaatctgcccaaaactcattcaaattccacagtttttcctactcacatgccccagtaacattctctttgttccgattcgttaaccattggatcgccttgaaaantttactggaggttcctaatacagaaatctaaattgtgaccggtgggatctgctagataatgcctg

SEQ ID NO: 234053 - DNA, 405 bp, Glycine max
agcttgtattgttccccaatttatggttattttggagtaaatttagtaaattaatcttgtcttatggttaacactgtctctagaacatttccattggatttaatgatgaaacctgtgcattttcaggtgaaaaagaggctaagttttgaattgtaaaaagtaatagttggactaagctcagcagttgggctaagcgcttatccatcgctaagcgcagctttagagtgcttatcgcaaaggagaatctggaagagcatcagcatcaaagccccacgctaagtgtgagatcagtgcgctaagcccaacaggtgccttcagccaggctaatcgcgagactggcactaagcccaattccacttactcgcgctaagcacgaaggtggcactaagcacaacgtttgcattt

SEQ ID NO: 234054 - DNA, 437 bp, Glycine max
taacaaaaggcatgcgaagtgggtgttattcctagttcaattcccttatgttatcaaacataaaaagggaaaaggtaatattgtagctgatgctctttctcgacgtcatgcattactttcgatgcttgaaacaaaattgattggtcttgaatgtttgaaaagcatgtatgaaaatgatgaaacttttggagaaatttttaaaaattgtgaaaatttttcagaaaatgctttctttatacatgaaggctttcttttcaaagaaaacaaattgtgtgtgcctaaatgttctacaagaatttttcttgtttgtgaagcacatgaaggatgtttaatggggcattttggggtccaaaagactctataaacattacaagaacatttttattgtcctcatatgataaaggatgtgcagaaattgtgcaaacattgcattgtgt

SEQ ID NO: 234055 - DNA, 424 bp, Glycine max
  unsure (1)..(424): unsure at all n locations
agcttgttatgaggaagcgtanaatgttgaacttcctgcttttattcgttgaccacagagtggtacctggagatatgtcgcgggggtcaggagaccttgtggacgtcaggtggggtgctattgcccaaaaccaagcttgactaatcccgacccaacccgggcatagtcggtcagtgagaacctgtgatgtacctaaacaggcgagctcctggcagtcaacagataaaaggaacaaagaccacaaagcaaggaggcttgtggtggctggccaactgtgaaacttgattgatatgtgagatatggtctctggtaatcgattaccaagggtgggtaatcgattacaaggcttaaaaatgaagacaggaggctaagatggtctctggtaatcgattaccaaagggtgtaatcgattaccaggcttgaa

SEQ ID NO: 234056 - DNA, 430 bp, Glycine max
cttctgcaatctccccctttttgatgatgacaacttctgaaatcattattcacatacacacacactctcacacactttttcctagtcgatcactcacataaatttccattatcccccattgtttttgaatttatgcttctcttaaaattaagttgattactcatgtgagttcttgatttaatcactatttctctccccctttggcatcaacaaaaagtcaaagtgcgtaacatgtttgaaacatacaaatacaactaagcatccatacaacattcatggaaaaatataaaccaaatcatgaagcatgaaccatgaatagatcaaatatataaaaaccacattgtcaaataacatagttaatatttgttcatacataccatgcaaataaagaaatagtaaattgttcaaatatcatggatatatagaatat

SEQ ID NO: 234057 - DNA, 432 bp, Glycine max
agcttcttgtgtgagaagaaagagtgttatgggggagcatgaaaatgaaggagaaaaagagggagagaagttgaactttgaagtgtgtctcataagacactcattcatcaaagttacaacaagtgttacacatgcttctatttatagcctaggcagcttctttgagaagttctcttgagaatcttctttgagaaacttacttgagaagttagagcttagctacacacacccctttaataactaagttcacctctttgagaagctttcttgagaagaatcctaaagaagttagagcttatctacacacacccctctaatagctaagttcgcctccttgagatgagaagctaaagcttagctacacacactccctataatagctaagctcaccccatgccaaaatacatgataatacaaaaaggtttgtactac

SEQ ID NO: 234058 - DNA, 428 bp, Glycine max
tgtatgattatggtgtacccatcacatgtggtactttgtggcgatcgggcgatggtgcacaacaagttttccacatccacaaagcgcgcataaacccaccatcccctgttgcccacctccatatgagctcacgtactcccacgtagcccatatcctcgtttctctcaacaccgggtccccatcaatcctcccaagcttccacaacatccaagaaaaacgacattcaaaccgcacaagctatcacagccaagcaaaacagagcatatgcagaaaactctgccaaaacaccaaccaaatcacagcttttctcacttaaagaccccagtaacaattccttcgttccggttcattaaccgttggatcgacttgaaaaatttactggaagtctttagtacataagcctacattgtgaaccgtgggatctacta

SEQ ID NO: 234059 - DNA, 399 bp, Glycine max
agctttatttcttcttgttggactctctctttcatcatcgggttgagtctcctttgtggatgtgctactggttcgaattccacttcaaggttgatgttgagtatgcaaatggatgggcttattcctttgaggaaagatattttccatgctaaggcttagttgtgcttctttattacctgcactagtcttgtttcttcttctttgtataatatgctactaatgatggctgggttctcatcctcgccctctaaaaagatatatttaaggtaaggaggcaagggctcttattccaagataggtttttccttaatcaaggtcgcttggatcttctatattatattccaacactgtgcaggaatctaggtgctatatgcattccctcagctcttcattatgttc

SEQ ID NO: 234060 - DNA, 432 bp, Glycine max
actcagcttctcaggaagtggtctcaagagagcttctcaaggtttctacctagtctattaatagaagcatgtgtaacacttgttgtaactttgatgaatgagagtcttgtgagacacaactcaaagttcaacttctctccctttttcttccttcaatttcgtgctcccccctctctctttctctccctctttcttttcctccattgaagcatcctctccaagcttcttatccaaggctcatcttggtggtgaagctccttcttccatggcttattccctagtggatggcgccgcctcttacctcttctcctttgtcttccgctgcatctccatggtggaaaataaccattaaaggacctcattgaagctcaaagatccagcctccatagaggctccacaagcaagcttccatcaagtggtaatcagagcata

SEQ ID NO: 234061 - DNA, 434 bp, Glycine max
agcttatattaatttacgtaaaaaaattttatatattagtttctccaaaaacttaatttttatttatgtataaactggttttagcttatgaaaaaaacatattttttttccagaattgcttatgaagaaacttattcaaataattacatataatcattcaaatctaaggaaatatattactccgtatttaatttttttaatacctaccatgaatataatttatttggatccacgtatccagctagctatttatgttttaatagacactcatcaatttgtaattcattcttctttcattcaaacaattgcacatgatcaaagaatctaattctattagttgaataatatgtgtgaatattataattttttgaaattgtgttctatttttacagataaaaaaaataattgtatatgaataagtttactatatattt

SEQ ID NO: 234062 - DNA, 419 bp, Glycine max
  unsure (1)..(419): unsure at all n locations
tctcattctaactaaagcatggtcatgttaattgtgtctaaccttagatgtagcattgcatccattattttacactaatgcacttaatatggaaccaacatatattcatttagactttatactttatttgtgggttgaatatgaattatctgtttgaacactacaggctaagcttgtgccagtttccaatttcatatcatttgtcaatcctaaattgcctttgtttccacaacttgctcaggggaagtcctgggatcaactaagtttccctcatccattttctccaatttgtctaccttccatatctgtctaggtagctgtattatgttctacaccaattgaatcacaaaagttgtacacataaagtagtgaggtcaatgttattatatatatagcaagtgatcctgaaaaaaanaaat

SEQ ID NO: 234063 - DNA, 419 bp, Glycine max
  unsure (1)..(419): unsure at all n locations
agctngatgagtttgcatagtactcttattttgcatgggcatccacatctgcatatactataacatcatgttggntctcaatacaaggccattcatcattctgtggaacattggcgctaatgacatggccttgattagtatttgtttctgaaactttggaagcataaccttgcaatgaatgcaaattgttatctgaagctgctggaggcatgaagacattctgatgattacaactctggatggaagagttatgcatggatggcctggcctgtggcctacccatcttgacaatgtcggccattgatacttgacctgtattccctgtccatgcagaatgcagtccagcacgttgtgatgatgaagatggtccatcaccgatgccaaatgccatatgtttttcagtaaccacagaatcactc

SEQ ID NO: 234064 - DNA, 369 bp, Glycine max
actccgctgattctgaacacttcattctgtgcaaatcttgttgttgcaaatcaacctagtgatatcagtgattctgttttattctttgggataaaatcgcagtatcagtgaattagttgcttataccttaagttataattggaaactttgtttatttgatatcttcttccatcctgtaagcaatttcaatatatgtaatgagttcccttgcaattttctcttttttgatatcttcatgatccttgcactttaaccacctttttttgttgatagatataaaagaacttgacctgactgggaaccttcttttggagtggaaggtatcttctgccaccaggttttttctagttatcaatcctggctactgct

SEQ ID NO: 234065 - DNA, 377 bp, Glycine max
  unsure (1)..(377): unsure at all n locations
agcttcggaagattttgatgaggtacttgccctaaaggcagagcttgaaagagcctgtgtagtcgaagagaagttcaagtccatagccatcaaagtctgaaaagagtatgatgaactaagggatgtcaatatggccaccgatgaagccttggaatgagaaaccaagatggcacaaaaggaagaacacgaccaaagcaaagttttgaggggctttatagggcagcaatagtgagctcaagcttcgaagaggtgaaaggaatcatcacgggtcaaaggcatgatcttgaaggacgagctaaaggtttgccttangtcgaaaagaaatttgtcccaacagttaagcgagactgaagggaatatgtgggccatcatcgata

SEQ ID NO: 234066 - DNA, 404 bp, Glycine max
  unsure (1)..(404): unsure at all n locations
ntaacctcatcgtctctcacagtctttagatttggttgccaanccagaccnngagnncggactctcagccacttatgatagccgtcgatgatcccatcactgcttcccctaagctctctgtcctttcttcacggcgcatcccatgccttgcgaactccttggagtaccctcgcgttgtggtcactgaaacctcgtgcgatgaaaggcatgatgctttcgtctgatggcactcctctcatgggacatccttcgcatgaagatagaatcctgattcttccttccttctagcgagggaaccatttaacagacgcccctccatgctatccaagagttggtgcacaacaaacaattcttgcgccgctcttttcacatccccggtcgaacgtgtcatacatggccaaaat

SEQ ID NO: 234067 - DNA, 488 bp, Glycine max
tcggacccgggatcctcagagtcgattgtgaccttgcaagctctgtatcccagggaggggatttgagcttaatgttgatgggcaacctttgaagattctgagaaagaacatgaccactctagctcagacatggagcgttctttccttctcgaacctcattcccacctcccatacatatgatgtgaccttggacagagccaagttgatttatggtataattatgaatatggatatgaacttggggtacctcatctcccaccagatctctctgattgcacaacataatacatccaaacttggattccctgccttgatcacagctctatgcaaggccagaagagttcagtcaaactttagatccctagagagcttgagccctgccattagcttggcatatattaagaagaattgttagaatcttgatgattcaacagtgacatttagagggccaaggaaggccagaggtatgagatcagaggcccctacta

SEQ ID NO: 234068 - DNA, 427 bp, Glycine max
gattacggtaaaatgtgggacttagccatggtagaagtctctacatattgttttccttgcccagtattatgatcagccgatgatgtgcttcacctttgggaacttccagctatcacccatggtagaagaatttgaagagatcctagggtgtcctctatgggggaggaaaccatacctcttcacaaggttctatccctcattagctagaatttccaagatagtccaaatcttggcgcaggaattataccacaggaagcaagtcgaaaatggggtggttggaatgccgagaaaatatttggaggcaaaagcaagaatcttggcaggtaaaggcgagtgggccccgttcatagatattctcgcactgctgattttcggaggattcctctttccgaatgtggatgggttggtggacctggcagcgatcgac

SEQ ID NO: 234069 - DNA, 459 bp, Glycine max
  unsure (1)..(459): unsure at all n locations
cacctgcggcatgcaagcttataagtaatgttcatcataggtttctcgttagacttcttggttgttgcagcaaaggccaagagagaatcctagtttatgaatacatggcaaatagcagccttgacaaattcttatttggtaaatcatgtcaaccttcaatggaatcattttttgaaacttcattgctttttattctcttctccacaatcttaaatatctatacaaacttgggaaacaggtgacaaaaagggttccctcaattggaaacaacgctatgatataattttgggaaccgcaaggggtctagcgtatctacatgaagagtttcatgtatccatcattcatagagatataaagaccggtaatatccttctagatgatgatctccagcccaaaattgctgattntgggttggcaaggctttngccaagggatcgttctcaccttatcacaaaattt

SEQ ID NO: 234070 - DNA, 444 bp, Glycine max
tcccatatccgatcatggaaagactgggcaactgccgttattaggctgttccagtacaatacggatatggctcccgatcggaaccagcttcagagtatgactaagcgagagcatgaatccattacggaatatgcccaaagatggagagatctcgcagcctaattcgtaccgcccatgacagatagggagatgatcacaattatggtggatacgttgcctacgttctactatgaaaagctgataggctacatgccagctaactttgcggacctcgtcttcgccggagaaagaattgaatcgggactgagaaaaggcaagttcgaatatgcctccagcacggtcaataacaacataatagccccattggtgggcacgatgggaaaagaatgagatacccacgcggtcaccaccgccccaacatggatgtaagcaccccaaaatatc

SEQ ID NO: 234071 - DNA, 444 bp, Glycine max
  unsure (1)..(444): unsure at all n locations
agcttcacaagcaagcttncatcagtttttaccccagcattacaaatttattctcatgctnttggcaatcaaaacgttacgctctactcctagcaacgtaatgtaaagagtaaaatcgttcacttcaaattctaagattatttccagtctcacttaaaatccaatttcatgacactagtgatcaaataaaatcaagcgttacgagtagaatgaaataccaaccacgagtagaaaagacttatacatatataatatcaatagggatatataagggtacaaagattacatccagtccttaagaaaaactaaccgatcattgcacagagcacaagactaacaagagaaatgacgaaggatgtgatccacagtcacaactctacagctcctcggctccacttttcctttcctcattcttattccttagcctatgtgctntntctctct

SEQ ID NO: 234072 - DNA, 453 bp, Glycine max
acacttgaatactaatcttctcaggatgtgagcttaattattagaggggtgtgtgtaactgagctctagcttctcattttagttttctcaaagaagcttctcaaggaagttctctcaagaaaacttctcaaggaagatacctactctataaatagaaacatgtgtaacacttgttgtaactgtgatgaatgagagtcttgtgagacacaactcaaagttcaacttctctccctttctcttacttcaattttgtgctcccccctctatctttatatccctctttcttttcctatattgaagcatcttctacaagcttcttatccatggctcatcttagaggtgaagctccttcttgcaaggcttattccctaatggattgggcctactctcacctattctgctttgtcttccactgcatcttcatgatggcaaatcaccgttaaaggatctcat

SEQ ID NO: 234073 - DNA, 454 bp, Glycine max
  unsure (1)..(454): unsure at all n locations
gcatgcaatctnggcattattattaagcaccaatgttgttgtgagacatngtgtatttatcacaanaaagntggcacttaagcgctagatagtggagcttaagtgcaaggtaggtgccgcttaaacgccactatctgtcaggcacaagtgtattgcttccaaatggattctaaaatagaatttccctattgatataaggctttggaattatataaataagtataaatgttatgagagaagtatttacttttactaaccatgggcgaagtagaaatagaatcaaatcgaatttgaactccttgccctntaaccactattattaaattgttattgaaatggtccttcaacttattatacattaacatgatggaatgagtctaccccaacagggtatatcttgacatgaattaattgattattgtgatggagctctctaatagtacaaaaaattgta

SEQ ID NO: 234074 - DNA, 417 bp, Glycine max
  unsure (1)..(417): unsure at all n locations
aattcgatggaactggatgaagccaaaggttttgatntagttttctaaannagancgaccngaaattgacggattcagtggaaccaaatctacttgaactgaattaagctaaataggatgtaccaatccttccagaaagtcaactaaacttgtggcaaaggttatgcctaaatatatgacgatacatgtgtggctcttgccgaaattacatggtcgtggttcaactagtctgtatacccatgtactattgaagtattataatttcctctaaaattctcaccacgttctcaaattcttcagcttgctgaaattcaatgtgaaccataggcttgatgacatgtgccaactgtttatacaattgatacatcatatcgtctatccccatattgatatgttgttattccatacagggtattg

SEQ ID NO: 234075 - DNA, 390 bp, Glycine max
tcgctggttttgacccaccaactgtcctaactctatcagaccggcgactcctaagctcttgatcttgacttgatataacctcttattaagcgaaggggtctgactcgatcccatgttttaataaagtggaataaaaaccagcgcgaatcaagactctgacatctatcataggtgaaatggatgaatgcatgaagataatgcgtatgacccagatgcattttatggatacgagaacccgggagatttatctctttcttaaatacaacattcgggcagcatatcgcccgatgcatgcatttaagaaggtgacacggaccttccgtcttctcgtgacaaattgaagggatcatgacgctacccgtgcatgatgacatgatccggatgcgaaga

SEQ ID NO: 234076 - DNA, 428 bp, Glycine max
tcatgatgatgaatgcaagtgattctatgtagtttttaacgaaaaagttgatgacaaatagcccaaagaatgatttcaagattaagtcaacaagaagaaatcaagaagattcatgaatcaagtgaagtttgatttcaagattcaagaaaagatgaattcaagattcaagagaagaaatcatgaagacttcacatgggaagtattgaaaagtttttttcaaaaaacaaacatagcacagttttgttttttcaaaagagttttctcaaaattttctaagttaccagagtgatcgaggtcgtacccgaatcatataaacattaatatgtagtaactatgaagtgatcctatgtcgtttcccaacgagcaatgatacaccaaatgttcatgatagatagtatgataatatgtacgaatctgggggggtgggg

SEQ ID NO: 234077 - DNA, 429 bp, Glycine max
  unsure (1)..(429): unsure at all n locations
agcttgtttatatatgaaaatngagttgttgattaagnttctgcactatngaactacttgaataaaagnaaaatactcaaagctataaaatgtgacaacaattaagataaaagcgttgggaagtttcctactgaaatttctcttgccgtataaattttttttctctatttaacattattctagtgttcttacaccgagaaaatactcagaccatgattccttacatgaatgagcttaactcttttagctgttgttcttgattccttaacaaactcgctcttacagagttgcactaaacatacagtgtaaaatatagtagatcactgcactcccttcctagacatacatatttctagctggctttatcaagttctaagggttcaaagcattttccaatactaagaagtctaactacacatacaaatgggt

SEQ ID NO: 234078 - DNA, 431 bp, Glycine max
tttgctgttttggacttatggtatttcttctgcacttttgtatgcatactctgtatactcattcatggtaatctgagggattttctgcaagtggttcaattttatgatcttttctgatgtgtggtgctcatagatgaccagaatagttgagtgggaaaaattcacttgcttatgttgaacaaaattgccttattttctatgataaggttgtattttcaatctatttcatcctggcttttgacaaaacactacaacaatgcttttaacatcccaactttaaacagctccatatacaatggagcagtatatccatcatgcacatgcaccttttcccattccatgcttcaaacaacctttctgaggtatttcaaacctatgtacattttcttgagagattggataacctttaataactgagcttgtatacctgc

SEQ ID NO: 234079 - DNA, 398 bp, Glycine max
  unsure (1)..(398): unsure at all n locations
agctttttctatacttgctgaagattggcttccaaacactccagcttttagaactcgtccctactggaattccatgataagaaaaaggaatatccagctggctacagctaagaaaatgagctgcatccctacaccaaccctctgatttgcccatgcaaccaaaatgacttttagcataattcatcttgaggccagaaaccatctcaaaacatctcagaatagatttttggactctaacattatcgcgtgttgcagtcccaaaaaacagagcgtcatctgcatattgcagaatattaacatcctctttntgacttcccacttgatagctgctgaacatattcttagaaatggctgtccttatcaaactagaaggccttccgctatatattgaaaggaag

SEQ ID NO: 234080 - DNA, 398 bp, Glycine max
tgaacacccacttattcttcaatgcttttctgccttcttatactttcacaagcttataagtatcattcttctgcaaggaatctatcttttcttacatcactttcctccaatagaatttatccttatgaatttcaacttttgcaaaacttcctggcttcccttcattgatgatgaagatgtactccaaaccatggtaccttctaaatgattggtgctctttatttgatcttctgaacagcaactgcttttcttgctcaacaccttcatcatcaccatactttattgctagctcatcatcaaccctaagttcattatcaagatctaccccttctatggcaattcttctatcaagggtgactgtggtaagatcaaccttaccacctttgtcactggtttct

SEQ ID NO: 234081 - DNA, 385 bp, Glycine max
  unsure (1)..(385): unsure at all n locations
agccacaaaaggagagagcacgatatgaagagccaatggttgatacatgggcggagatgaaaaggatcatgatgaagcggtatgtgccggctagttactcaagggatntgaaattcaagctccaaaaactaacctaaggcaacaagggggtcgaggagtattccaaggaaatggatgtgctcatgattcatccatagattgatgtaaacgacgaggtaactatggctcgatttcttaatggttggactaacgatatccatgatattgttgagctgcaggagtttgttgaaatggatgatttgcttcacaaagcaattcaagtagagcaacaattataaaggaaaggagtggctaacatgatgtttaccaacttctggctctctaa

SEQ ID NO: 234082 - DNA, 396 bp, Glycine max
ttctgtgttccataccttgttcttctgttttgaaaattctgtataaaacacaagtgtgctatatcttttcattctcctctctctttgtcaataagaattcaacaaggactaatcacctgaattctttttgtgtctctcttctccctttgccaagagaacaaaggactaatcgcctgaattcttttgtgtctcccttatctctttccaagagaattcaaaggactaaccgcctaagaattctgttgattcttccttttcccttatacaaaagatttcaaaggactaaccgcctgagatatcttgtgttccaccttacaaagattcaaaggactaactgcctaagtattctctgtcttaacacattggagggtacatcctttgtgatgatgacatgac

SEQ ID NO: 234083 - DNA, 419 bp, Glycine max
  unsure (1)..(419): unsure at all n locations
agcttttgcctatgggaaaaatgagtctcgacaatangattcaacaacagcagaacagtcaaggaaaatagggacagaacatattgttaacttccacccaatcctatcaactctgcatatatccaccctataaagtaatgagtgctgaagctcagacaaaaagaggataaaaaatatatatactgtataaaaatcagacagaacatgggacaaccataattcaaatatgtgataatggatatgaccctccaggcaataactctaactttcaaagaggaatcttatagcttaccttcttggacaacgacgaataacagcatcatcaaggtcaaatggcctggtagtcgcacccagaataaggattctttggttttcttttgacctcaatccatcccaagctgccatgaactcggtcctca

SEQ ID NO: 234084 - DNA, 386 bp, Glycine max
aatactcacgactttgcagattgtgagacacctttgtgtagccagatgtgctgatctaagtccgaaagcagagagatgagctcgatagtgcaaattgtaaagaataaacgggagaggtaaacaatgaaattgaatagcgtatcagttcctaacaaatgcactacaaagcaatgcccatatacaacattcaacacactatcgtttacatggagcatagccatcactaattaaacatcacacagatgaagtattgttacttcaggtatttgggattatgcatgctgacaagttcagcaagtagttaagaggaacatattttcaatttcagtaattataaacccttttcacccatttcacaaacacctcatacgattaataaaatatat

SEQ ID NO: 234085 - DNA, 405 bp, Glycine max
agcttgggaagtgcttgaccaaacgtttcttgtttggctttagtcgacactctcgaagtctgtcctttctcgtgtgctaagctcaaatcactcctatcaagtatgggagaagattcgcgagcatatcaatcttcacaccaagtctagggcacggcaattacaaaccgcaatgcgtgctgtctcactcgaagggaaaacaatggatgagtaccttcacaaaattaaaggctacgttgacgagcttgccggcgttggagttccggtacggcatgaggagcatgtcgatgctattcttgaaggtctaccttcggattatgcgccaatagtttctatgattgaaagcaagaagcgtatgccatcaattgcaaagattgaggctctgccttatggccatgaaactcgtct

SEQ ID NO: 234086 - DNA, 414 bp, Glycine max
  unsure (1)..(414): unsure at all n locations
tctctgagaanacttccttgagaagctagagcttatctacacacaaccatctaaaaactaagctcacctccttgacaaaatacatgaaaatacaaaaaaaagtccctactacaaagactactcaaaatgccctgaaatacaaggctaaaaccctatactactagaatggtcaaaatacaaggcccaaaagaaggaaaaacctattctaatgtttacaaagaagagtggatccaaccttgacccatgggctcaaaaatctaccctaaggttcatgagaaccctatggccttctttagtagctctggcccaagcctcttggagtcttctatccaataccctcggnggataggattgcatcacatatgacctctatttatagcctaagtgtcaaacaaaattggagggataataatt

SEQ ID NO: 234087 - DNA, 422 bp, Glycine max
  unsure (1)..(422): unsure at all n locations
agcttaaggcctgtttccatattcatttcaaatcagngnttcgaaagtngctttttttatcaagtccatgcaaaaacatatgaattcatttgggttttgggaaagtccttcattgtttttcattctcaatgttttcaaaacaattcttttgttgtgttctgattgaaaaataagtttcaaaaatactggttgttgattcttttcaaagcatgttatattcaagaaaaaaataattgcttaagtcccaaaaagagttataatctataactatactaatagaatatcaaagcacacgtaagttttttaaaaaattcaaaacaataaataagggaataaagtactgaatattaatgcanagcgatatataaacatatagacaacttcacgaattttcaaagatcatgggtgaggagctcaatctc

SEQ ID NO: 234088 - DNA, 385 bp, Glycine max
actcagcttttagtctcacctgatgaaagaatcatggctttgtatgcactcctctaatgacaatagcatcacttctggcactaaattgctgggagtttgaagccatattctcaattaaatttctggcttcagtaagggtcatgtctccaaaggctccaccactggcaacatctatcatacttctctccatgttgcagagtccttcataaaaatattgaagaagaagctgctctgaaatctggtggtgagggcaactggcacataattttttaattttcccccagtattcatataggctttctccactgagttgtctaataactgaaatatcctttctgatggtcgtggtcctggaagtaaggaaaatggtttctacgaatactct

SEQ ID NO: 234089 - DNA, 437 bp, Glycine max
agcttgaaggcaaactggatgcattggttaacttggtaacccagctggccttgaatcagatatttgtacctgtcgcaagggtttgtggtttgtgctcctctgctgaccaccatacagacctttgcccttccatgcagcaacctggagcaattgagcagcctgaagcttatgctgcaaatatttacaatagacctcctcaacctcagcagcaaaatcaaccacagcagaacaattatgacctttccagcaacagatacaacaatggatggaggaatcaccctaacctcagatggtccagccctcagcaacaacagcagcctgctccttccttccaaaatgctgctggcccaagcagaccatacattcctccaccaatccaacaacagcaacaaccccagaaacaaccaacagttgaggcccctccacaaccttccctc

SEQ ID NO: 234090 - DNA, 437 bp, Glycine max
  unsure (1)..(437): unsure at all n locations
ggtagaatggccagacatgatacatgtcanggtttggtttggttcaatggtaaaagggatgccccacattatttccatgacacaaatgcaaaaatgatgatttggaaattttatgcaaaactggtcatgcatgcacctatgcggacactcaagtgtcaaatttttatggtcatgtgatgctagggctcaggattcatttcctctattttattcaacccaacgtttccaaaatatgttcttttatcaatttgtgcattcatccgagtccattttgggcgtccgggaaaattttcacagcattcacccttcaggtgtatacacattttttcaaaaattggttatgatcagtgaattttttttcaaagaanagttggaaattatctctctcaaaagcatgttggttgtttagctagataacttatttctctttcttctct

SEQ ID NO: 234091 - DNA, 466 bp, Glycine max
  unsure (1)..(466): unsure at all n locations
cctgcggcatgcaagcttcacaaaagtttatatggcttgtatcaagcacgcgaggcaatgttacaagaagtttaatgagtttatgagcaactcaggattcaacagatgtgacatgggccattgctgctatgttaagaaatatactaatagttatgttatccttgtcgtgtatgttgatgacatgttgattgcaggatctagtatggcagaaattaacaagttgaaccagcagttggcagaaaactttgaaatgaaggatcttggtccagttaaacaaatccttggtatgagaattcttagaaacagatcagaaggaattttgaagctatctcaggagaaatatatacacaagttgcttgacaggttttaccttgaagattctaagaccaagaatacccctttgggatctcattngaagttttcaaagaagcaatctttgcagacagatgaagaaaaatgttacatg

SEQ ID NO: 234092 - DNA, 384 bp, Glycine max
  unsure (1)..(384): unsure at all n locations
tggcctcaaacttgctaataatatgctgccacactgtaccgcatttattgcttacccctaaaggaataccaaggtaagaaaaaggaaattccagttggctgcaattgagaaaagaagctgcctccctacaccagcccacatatttacccatacacccaaattggctcttattatagtttatctttaaaccaaaaaccaattcaaagcttttcaggatacactttaaaactttaacattatcattattggcagtcccaaagaacaaggtgtcatcaccatattgaagtatattaacttcctcttttttctttcccacttggcagctattgaagagattatnttctactgctgatctcatcaacccagtaatgccttgcaccacta

SEQ ID NO: 234093 - DNA, 452 bp, Glycine max
  unsure (1)..(452): unsure at all n locations
tgcaagctcgacgtacggtggtcaattacattatattggtgtcactctatactaataaactagttaatacttgncatcatgaggaattacactagcaattgctgtaataattaaaaagaaagaaaaatgataaatggttgaaaaattaaatatggctcttcccatgttctctgttatttgtacagcanggtacgtacaacacaatatgagaagagagagagagagagagggatgcatgcaagctgatgtttggtctggactctggaaaaacataacccatcttttataattagcacaatgtttgctggatttgttgagcgagttcttcggcactgagttggcattcaattccaatctatatgtacatacgagtgcatgtaaagaaaccacaataattagtgaacctaaattgaacacgtaagtagcatacatctacatatatatccaatcat

SEQ ID NO: 234094 - DNA, 437 bp, Glycine max
gccctccaccatctaccttgtgccaggtggacgatttcttccaagacattttgttagcttctgatcctctcgttctgctctgaacactcttagtcagtcgactcaagttagtaaactctcattcgttaatccttcacgccagattttgcttccggtggtaaaacaaaataatgcttagtttctattaattaataaataaattttaagtttttagatgctccgttacaaatagctaacgggaggaagatgagttgagaacttgagagtgaagttttgtttaaattttactttattggttgtaatcttttgcttaataagtaggatcgtacgttgagacttgagaatgttaatgtatatttgtccagatgttaatctaagtgtaatggagttcttttctttaccacttgatttttaagcactgttctctatcacttgcg

SEQ ID NO: 234095 - DNA, 455 bp, Glycine max
catgcaattctaactcatgatggatgcatatgtttttaacattccgaaggttttttataagctataggaacatatggtgcctcataatcaattccctcctcttgattatatccttttgctactaatctagcctaatttctaataactatgccattttcatctattttatttttaaacacccattctgttccaatgactgcgtaagttttaggtttctcaactaactcccaaacattatttctttcaaactggtttagttcttcctgcataactattatccaattttcatcaattatggcttctttcagattcttaggttcaatcaaagaaacaaaagccatactattgcatatatctataggagaatgtctagtgggtaccccttttgatatatcaccaatgatgttgtcaagaggatgatatctagaagttctccattctcttggaagatcatc

SEQ ID NO: 234096 - DNA, 424 bp, Glycine max
acataattgccccaaagatatccaaattgtttgtgaatttttttttcttcaacaagaatcaagccaaggctattgtgcaagcaatcaatggggcataacacaccaaatgattatgatgatggatggctcaaattctcacaaaggtaaactcatcactgtcaaagtgagccttcataactatcatgatatgtagaggagaatcaaagatttcaagtcacaaaatgtcaaaaacttttattttcaaaacaattacccatttcttgaacaaatcctatgattcaaagaaaaacatgcaaagtcgtacatgcgcacagaattgacccaaaatataaactaaaaatccgacgaaactaacaacattaacatattaacacaactaacatattatcataaccaacatatctcacgttaaccaattaacact

SEQ ID NO: 234097 - DNA, 380 bp, Glycine max
agagcaacaatatgtagggccccggtcttaatttatataagtaccctaagctttacaaagggaatataacaggcatttcgttttcacttgatgaataaatgacactgatcaaagtcacaacaagaatagaattggggtgataagggatctagcatttatatataacctcctatgaatggcggtgagacaaggagacattgtataaagtggaataaagggggatggggaacatgataagaaaagatatttataatctaatggtctttaccatcctatatcaaatatgagcgctaccaacccctctaaggagaatattctaatcaccatgggatgatgatggcgatcgacatacccttatgtggcgatcccctctcaagtcc

SEQ ID NO: 234098 - DNA, 428 bp, Glycine max
  unsure (1)..(428): unsure at all n locations
accttatatactcagctagcctgactgatagcattaagttgtctgttgtttcttttacacgaatatgaaagtctatatatataataaaattaatgatgaatatatatcacatgactcacaccttaatcgtaattaaagtgattataggaatataagttatggaacactattatcaaagacggctagttgtaatataataattaattgtacccaataaaaatataagtattaattggtacccaaaaaaacaatatatatatatatatacatatatatatatatatatatatatatatataaggcttgttaataagactaagcctgaactatttaatataatagacatttaaaaaagtgtgagactaacattttaataaatatgggatgacagaccaaacnttaatatggcagacatatgccgttataat

SEQ ID NO: 234099 - DNA, 378 bp, Glycine max
tgactgccttattggctagtatctttttgttcctcccatccggaggactattatatccaatgccaattatcttatgcaatcctctcttaatattttccttttcctacatggttatattcatatagggttactccaccagctaacattcttccttaatatttcaccgaatcccacttcatatctttcaaactctgactcctgctacttttgttcttcctaatcattccttcctatcatgacagagggttactgcatctgtatcaccagcatactggatatggtatgttcatgttctacattattttcttgaaataatatgcatttagtcaagatatttcttttagtatacaagctagggcaagtaccgatctgattgat

SEQ ID NO: 234100 - DNA, 239 bp, Glycine max
agatagtgatctttaaccattgttaacagttcgaaatatatctaccttttatgcaattcctgatactatctctcgagcagatatattgtcctatctccacataaaaatgaaaagacgtatttgcatgaatgtcttacacactttggcttgaaatataactccgaggacgtagaattcggaatcgctgggtgattatagtctgacctttaaggtcactatcaaaagatttgtaactcaaa

SEQ ID NO: 234101 - DNA, 407 bp, Glycine max
  unsure (1)..(407): unsure at all n locations
agcttttttctgatattgcaatgntttttatgatntctaaatggtgtaatcgattataatatattggcaattgattaccagtgtatctaaacgttgaaattcaaattcaagtgtgaagagtcacatctcttcataaaaggcattgtgtaatcgattacatgattatggtaatcgattaccagggacaagttttgaataaaaagtcaagagatgtaactcttgacatgattgtctcaaggttataactcttccaatggttntcttgactagacatgaagagtctataaaagcaagacctttgacttgcattanaacatcttttttttgataactttagaacttctttgaacaacttttgagaaatcttgaaacctttcctactcatgnttcttctcttcttcctttgc

SEQ ID NO: 234102 - DNA, 426 bp, Glycine max
tgaaattgaacaacggaagctctcgttatattcatttggtcataccttttgactcataagtccgattcatgcgcatcacatatagagatgttcgaaattgaacaacggaagctctcaagaaattcaaatggtcataactttcactcggatgtccgattcaagcacatcacatattgatacgctcgaaattgaacgacggaagctctcgagaaattcaaatggtcacaacttttcagtcggatgtccgattcaggcgcatcacatatgctacgctcaaaattgaacaacggtagctctcgagaaattcacatggtcataactttcacacggatgtccgattcatgtacatcacatatcgagacgctcgatactgaacgactgatgctctcgagaaattcaaatggtcctaactcttcactcgggatg

SEQ ID NO: 234103 - DNA, 343 bp, Glycine max
cttctctaaatgacgttccaagtcactatgatgcgatcctgccccccaagggcattggatagataactccaagaagattgggccagagatgcaggagatggcctagggttctcgtgagccttatggtagattttgggcccataggctaagtatgagcgcccacttatctttgtacatattagattagggtttcattatttttaggccttttatttagggcttcatattgttgggaggataccctaatgatgtaagattcttcaacctttgtattctaaggcacctagactagtttgtgattaggggagttttgtatttcacatgcattaagtgactattgatg

SEQ ID NO: 234104 - DNA, 408 bp, Glycine max
tatatgaatactgtgagagatctattttactatgtgtcttttgccctctccaccaaatttctgagacagcttcttctccaatatttctatgaatgactcatgaacatggtaagaagtatgatatatgctgccagcggtggatcccttttagacatgacccctactgaagccagaaatttaattgggaagatggcttccaactctcatcagtttatcgctagaaatgatgctattgtcattagaggagtgcatgaagttgccacatactcatctgcatcatctgatactaagaagcttgaaggtaaactatatgccttggtttacctggtaacccaactggccatgaatcaaatatctgcacctgttgctagactctgtggtttatgctcctctgtcgaccaccacaca

SEQ ID NO: 234105 - DNA, 250 bp, Glycine max
ttaacacctgagctcgctatgggacctttaattttgttatatacccataattggatgcccacacttggtcttgacctgaggaaatttagtcatctattgaacccagaccacaaaattgcccctgaaaaaaatatatactgattacaagttatgaccccttgcttccacacaagacacctgccatactttgatactacggttacaggcaaaagcaaaagataccttatctaaatgcatgctatacatttta

SEQ ID NO: 234106 - DNA, 429 bp, Glycine max
tatactactcaagcttacctgtcagagcatatggtgggactataatgtctgttgggataaggctcctcaatcacacttctggtggatcactatgcttatggaataattctgtttttgaagtaaacagctgggtgaaaggcaacaacttcctaatgcttgcaagcacatggataaaggatgatcagaggatatacattgttaatatatatgctccttgtgacctacaggggaagagagctttgtgggaagagttgaggcagctaagaatctctcacactgatggtctttggtgtttccttggggacttcaatagcattagaagccaggaagaaagaataggcacatctcacagaatgggaaatagctctgatatctctgaattcaataactggatttctgatatggaactgcatgagatcaaatcttatg

SEQ ID NO: 234107 - DNA, 393 bp, Glycine max
  unsure (1)..(393): unsure at all n locations
agctngttgagatattgtgcaaacattatgtgaatggtgagacatgctattactagattttccacttcttatctaaccttggaaaggctccacaaagagaaagctaatattataaagatgtttatttctgatgaatggatcttaaacaagttatctaatgagcctaaggggaaagaagctgcaaaggtagtgctcatgccttctttttggaatagtgtggtttacactcttaaagtcatggctccacttgtcaaagtgcttcgtcttgtggatggtgaaaggaaaccagccatgggctatatttatgaagcaatggactaggcaaaagatacaattatcaagtctttcaacaacaacgaaagcaagtacaaagatgtgtttgcaatcattgat

SEQ ID NO: 234108 - DNA, 408 bp, Glycine max
ggggtaattcatttattatatatatacatatacttttacgccatgggcctttgtttgacgatatcagattcaattttgaacatctttcttataatgagatcaaaatagttaaattaagcttcccttgaaacatgagttataagattcttacataaaaattattattttttaaggtcaggttcttaaatatattttagtatcttaaaggattagtttctgattttcaactggagtgaagatatcccgagttaaacccctccccctcaaaaaataggattatcttaaaaattaattgttatctctgttccatctagtttaaaacattaaggaacatttggttaaagaaaatattttcagttcccatgcatctgaagtgagaatgtttttttttcatgtgggtcctctctg

SEQ ID NO: 234109 - DNA, 422 bp, Glycine max
  unsure (1)..(422): unsure at all n locations
agcttgttacctcatactngactntgacttgatgaaaaccttttcttaaaagcatgtgcttggttcgaccccataatccaagaaaatagaaatttgattgtcaatactttgacaaccagtcatagagacgaatgattaaggcatacttatgctatgcatgacaaatgtaattatgagatcaacatgagacgcccaaagaaccatcctttcctagttaacaatgcattaggtatcatgttcatgtaattttcaatcatttttcaagagaaattagtgtacaatcccaacaaggtttgtttatagctatcatcatggtactcaacacatgtaattaacaatgtggtgtaaactttcacgcttcattgggactttctttntgttctttntaatttgcggagaaaaatgcaggcataagcaactat

SEQ ID NO: 234110 - DNA, 390 bp, Glycine max
tagctattataaaggtatgtgtatctaagctctagcttctttagaaatcttcttaaggaaacttctcaaggaggtgagcttatttatgataggggtgtgtgtggctaatctctaacttctcaaggaaattttttcaaaaaaacttctgaaggaagttttctcaagaaagcttctcaaggaagctacctattctataaatagaagcatgtgtaacacttgctgtaactttgataaatgagagtcttgtgagacatacttcaaagttccacttctctcctcttttattccttcaatttcgtgctcccccccccccccccctctctctttctctccctctttcttttcctccattgaagcattcctccaagcttattatccaatgctcatctt

SEQ ID NO: 234111 - DNA, 445 bp, Glycine max
  unsure (1)..(445): unsure at all n locations
agcttgngtctttctgcttcgnttgtatcttctgctgcgtaaagaggatccctttctgattcttccgtaaatttcgtctctgaaactagggctaatacttcatctaccgatctctatattctgggtatgttgtctcccaaatccaaagtgtactcactctctcttctttttttcattcaaacaatctgtggagggtttcttctaatctgggtcttttctttttattctacttggtctctgttgaaaatgctgggggcgaaactcatgggttttcagtttttccaagttcttggaaggaaaatggtgggtgtagaaaaattgagttattttgcttccagtttctgtgggagccaaatcttaaaggagattgtgggatttgaaattntgaagacttgtcttctaactctctnttttgtgctatgcagatgaaggtttgcttttgatc

SEQ ID NO: 234112 - DNA, 441 bp, Glycine max
tgttagcaattaaataattaaaaaaacattggttatgtgaataatgaacaaacatatgtcaatcaatatttacagagtacacaaatcaacgtttgaaatttgtcacaaggattaaaattgtagattttttttaaagtgaggtaaaaaatgtctcaactaaaaaaagatggactaaaattgtaaacttttaaaaagtggagatgaaatgtctcaattaaaaaatgggaggactaaaatcatagatttaagagaataagaggataaagttacattttagcctaattttaaccatacctaaagcatcaactaaacatgtagtaatgagattagacacaaatttcacaagactaaaaagaagacaatttattgtttagagactgaaaataaatattatcatatttacatggactaagaacatatgtaacctttaaactattactc

SEQ ID NO: 234113 - DNA, 435 bp, Glycine max
  unsure (1)..(435): unsure at all n locations
agctntatatatatatatatatatatatatactggttaactntcatttataataataactctttagaattgatcatgttgatatggatatatggacaggttaggaaagaaaagctgggggaccgcatcactgctcttcagcaattggtttcacctttcggaaaggtaaatttttttgtatgttctttctttcactttattttttttcccttcacggcagctttgacaatgatatggtagaatttaaacctttacattttagactttgaagggtaaattgaaaactcaccagatattattatattcttgttgattttaatagacggatacagcatccgttcttcacgaagccatcgagtacatcaagttcctccatgaccaagtcagtgtatgtttccattggtcgaagttctaactttgttntaaagaaaaccct

SEQ ID NO: 234114 - DNA, 437 bp, Glycine max
gtatgttctcatatcttgtatgtctcggtttatctatcttaaaagcatatcctttgcttacattggatggctattttggggtctatggagtatgaaactaaatattctaataattttggtcaatgatagattgtcataaactttctttgttttttttttctcacgagcatgttatgaaatgtcaagaccaagcagaagttgatcgtatccaagccaatgttgaaaaaagtagaaaagcactgcagaccttgggttatgcagacttgacttttgaagatttttttgcggtaacttttctactgcaattccttatcctcgtgggatatgtattaacattttaatattctcttggcaaaatggactacacgcaactaacatttgaaaaatactcttgattgctatttttggaaatagggatattgcactgtgtgcatgaa

SEQ ID NO: 234115 - DNA, 446 bp, Glycine max
agctcgctatcccctccaagaaaaggatttatatttcctcatccgattctgatgatgatgtcgaactagatgtctcgacatctaagagggccaagaaatctggaagaaaggtgcctggaaatgttcctgatgcaccattggacaacatctctttccactccattggcaatgttgaaaagtggaaatatgtgtatcaacgcagacttgcggttgaaagagaactgggaagagatgccttggattgcaaggagatcatggacctcatcaaggctgctggactgctgaagactgtcagcaagttgggagattgctatgaaggcttattcagggaattcattgtcaacattccttctgacataactaacagaaaaagtgatgattatcaaagagtgtttgtcagaggacaatgtgttatattctcccctgctgtgatcaacatatatctg

SEQ ID NO: 234116 - DNA, 428 bp, Glycine max
  unsure (1)..(428): unsure at all n locations
tattgtcgtttgaatntgcttagacctgtatgtgtctatttcgagcgccacgatatagttcgggacacaatcggacatccgagtaaaaaggtatagttttttgaatctactgagagcttcagttttcaatttcgagtgtctcgatatattacaggactcaatcagacatccgagttaaaagttatggtcgttggaatatgctacgagcttctgttttcaattgcgagcgtctagatatactaagggacacaatcgtccatccgagaaaaaagttaatgtcggttgaatttgcacagagcttcggttatcaattttgagcgtctcgatatactacgggactcaatcggacatccgagttaaaagttattatgggttgaatttgcctagacctactatttcaatatgggcatctcgattattacgggact

SEQ ID NO: 234117 - DNA, 449 bp, Glycine max
  unsure (1)..(449): unsure at all n locations
agcttatcgaagggaggagtggaagctgctctgctaatgccttggccaagagacgacttatatctacatccatcctcatagtaagaaaaagccagtgaaagctctcttctaggcgcttattcccacagcagactcaatagctgcaattacggattcaattgcgacaagatcgtattcttcctttttttattaacgtgcaaaacctttttgtccaattctaggaactgtcaggtaagaaccgattcacttcctcacaacctagcattttatgtccctgggtacctttactctagtttcaaaggtttctagcacttgcttactgagctagggggagctcctgtcccttgctattgcagtcacataaaggttaagagcgaggggatcattcactntgaaaagcgaaaggatgaagaactaatcctcgttctttntttctatatatatctata

SEQ ID NO: 234118 - DNA, 430 bp, Glycine max
  unsure (1)..(430): unsure at all n locations
taagttttgtctctttttcaatntttaatttttaaaactatttgtaagtcttatagatagcattttgtatttttttatgaatataatttttttgtgttgttgctacacttgcattagacaaaaaggaagaagttgtccataatgtgatgcgccaattaattcatgaagactgcatgatatactgactgaatgttgagctcataattggatatcgagcaatccaaaaggcaattgcaacatgggaattaaactcccattttccctaatgtttatgttatttattcattactcaacttctactaagcgaaagtaaaacattggtggctctagaaaatttgagtattattacttgctctagaatacaatcatgagtctgccagttgactaaattaatttcatatttacaacaccccctcaagttggttaatga

SEQ ID NO: 234119 - DNA, 456 bp, Glycine max
catgcaagcttctcctataagctgttgtgtaccattggcagatacaggttctttttatatactctaaagaaagatgtactggacttgtggtcgtgttgctgttttgttccttgcgtcatttaacaaagacaaatgttctttttttcttgagaaatgggaccggaggaaattttattaagactggaaattgtatgggctaaagccattacatcatgttcaacttggtaaaagttgattggaaaatcctccatacaacaaaaatcatgaaaagtgaaagctgatctatatcaagcataacgcagtgatcttgcagtcttccaaaacaccatgaaaatagcttctatcgtctgcaacctttccaccactttagacaatatattggaaacccttttgttgctgctgctaattaatttggaattagtcttggagtcttactacgtactgattgcataattc

SEQ ID NO: 234120 - DNA, 388 bp, Glycine max
agcatcattggaaatcaatgtccttttattggcccctcctcgttctatatagggcaatcaatcacaatcttttttttaaagtgaaatcaatcacaatgttgaacacagatgcataaatttcggcgatagaccatattcaacaaaattcttaaaatacaaaatttgatcttggcgaagtttatctattgttgtgctgctttttttttttttatataaaaaaaacataatttgtgctgtgtaagtgtaacgataccaaccaacaaccgaacatttaacattggcattgctgttcggtagtattaggaagcacagaaaatggtggtgagggagatagtgcacgctatgattcagaatcaatcggatccaaggggaggaatggaacgaaact

SEQ ID NO: 234121 - DNA, 427 bp, Glycine max
agctttctcaagtagctgcaagtatatatccttcttaaggattggagtatgattggtcgccaagggtgtgtaacgctcgtacctgggccctttcgggagaggctgacgcttgtctggcttgtgcctcttgtttaacttgtgtgagttggccttggtgtttccttcctgcttgacgcgcttttgctcggcatgtcataccttgttccagaacctaaacatcacgtccatttggatgtagcctttggctcgttcacgcaactcatccatgctactaggggttttttttgcacaaacaattcacaaacttaccaggccttatagtgaagagcatggggtgtaatgctacctctgggttgagattacggatctcgaacacaatacgtccaaatctttccatgaattttggagaaatcatcatctacttatc

SEQ ID NO: 234122 - DNA, 424 bp, Glycine max
gggatttccttatagtagggaatctatccttcctattatggagccaaacccagtcaccctcattaagaactagctcttttcttcctctattgcctttagttgaatacacctttgtttggttctctatttggttcttaaccctctcatgcatcttctttacaaattctgacctagattccccttctttatgtataaaagaagtgtccagtgggaggggaatgaggtctaacggtgttaggggattgaacccatagacaacctcaaaaggggactgcttggtggttctatgaacccccctgttgtatgcaaattctacatgaggaagatacttatcccaagacttatggttgcctttcagaagagcccttaaaatggtggataaagacctattcactacctctgtttgcccatcagtttgtggatg

SEQ ID NO: 234123 - DNA, 428 bp, Glycine max
  unsure (1)..(428): unsure at all n locations
agcttgtatgattatggggtacccatctcatgtggtactatgtggcggtcgggcgatggtgcacaacaagttttccacatccacaatgcgtgcataaatccaccatcccctgttgcccacctccaactgagctcacgtactcccacgtagcccatatcctcgtttctctcaacaccgagtccccatcaatcctcccaagcttccacaacatccaagcaaaaccacattcaaacagcacagctatcacagccaagcaaaacagagcaaaggcataaaactctgccaaaacaccaaccaaatcacagcttttctcacttaaagaccccagtaacaattccttcgatnccaattcgtaaccggtggatcgactccaaaattttactggaagtctatagtacataagcctacattntgaccggtgggatcta

SEQ ID NO: 234124 - DNA, 414 bp, Glycine max
gttcgattcattctatgaacccgtggtggtccacattgtgtttcatgtattttcattctcgttttcatttactttttatacccctttttgacgtgcttaagccatttatttaagtcatttctcgcttgatgtaaaaataaaataaatttccaccgatcgtttgaattgtatcatccggtaattttggttaaaatgaattccgaccattcggttgtgccgtaaccacgttggaaataaaaaaagaggtaaaataataatataataataaaaaaataccttttagtaaaataaaagcgaaagatcaatcggacgttttctctttgggatttctcattcttaattgaattgactaaataacgaaagtgaaactaaagctaaaatcaactcgcctagtcaagctcgtccacaaaaata

SEQ ID NO: 234125 - DNA, 278 bp, Glycine max
ggacttaccttgtcttaattcacttgatagcccttttgagccctgtttccctttccttgtattgaagctcactacaagccttatgtgaaacaccctgaactcaccttatccttaatgaattttggagcttaggaaatgctttgggaacaagtgtgggggatttgcttcatcggataacacgtattgatagccatgcttgatgatatatattgagccatacttgatgtacattgcattattggtgaatgttggacatgctgaatatgatgtcgtttctc

SEQ ID NO: 234126 - DNA, 424 bp, Glycine max
tcatcctgatcgataagcgacaaattatccttggcttatcgtgacctattgtcaccaagcgcaattccttacggccataattgaggtcaatgaagctaagcgctattcatggcagctaagcgagattcattgaggcaatgtgtacgctaagtgagtccttatcagctaagcacatgctcctctgtacttaagatgcatcattttagctaagccatccagagtctggcttagtgagagttgtagcttttcggatctacaaacatcgctaagcggtttgatcctcgcgctataccaagtttgtgtgttaaaaaaaaaattgattgtgaatttgaaacatcggctaagcgcacgggtccgctaagcaagtctctgtgagaaaccaaacgtttctctggcttgcttatagcagtggtccgctaatcga

SEQ ID NO: 234127 - DNA, 396 bp, Glycine max
  unsure (1)..(396): unsure at all n locations
ttactcctatttttatcgaccacacctcatgttaattgattacataccaatattgtgttctttgtttgaactcaagttgtcgctttaatctattacacatcgaaataaccgattacaatggtttggtaattaattattcttgtgcaatctaattntttataaatagtcaccttgtgactctcttcatatttctctttccaaaaacccacttttacatatgatagaagagagacctcacaggagtgtgatgcatagcgttgatcagcaaacaacacattttggatatctaatcatagataaaggctatgacattactatggagcactctagagcttaagtgatggattcttgcataactaagtgtactctaatccatattctttgtgacattacatt

SEQ ID NO: 234128 - DNA, 406 bp, Glycine max
  unsure (1)..(406): unsure at all n locations
nttcgattcattctatgtacccatagtggtccacattgtgtttcgtgcatttttattctcgttttgtttactttttataccccctgttgacgtgcttaagccattttacttaagtcatttctcgcttaacttaaaaataaaataaatttccaccgaacgtttgaattgtattatccattaacttcggttaaattaaattccgaccgttcggtcgtgtcgtaaccacgttggaaatcaaaaagaggtaaaaaaataatataataatcaaaaagacatcttttattaaaataaagcggaaaatcaaatcggacgttttctctttgggatttctcattcttaaccgaattgattaataactaaagtgaaactaaggctaaaatcaactcgcctagtcaagctcgtccac

SEQ ID NO: 234129 - DNA, 415 bp, Glycine max
  unsure (1)..(415): unsure at all n locations
ttttcatgcaagctntataagtgtgtcaggngctttcatctccctaagagtcctctcacgaggtggaggttgagccatgntttcagtatgaaaattaacagtcgaatgctcaaaatcagaatgttcagaatcaccaacaacaaaatgctcaaaatgcataggatgctcaaaatgcactgaatgatcaggatgcacactatgcctaactaatctatgaaagcttctatctattttatgatcaaagggttgtaaatcgcctggattgcccctagtcatgcactatatgcagcatatcatgtatttctcatacaagcaccaggggtaaaactaggggtaaaactgtaactatactcaaacgatatgcaaatgagctgaaaatttggagatcaccctatatcatgaaagatacacaaaa

SEQ ID NO: 234130 - DNA, 397 bp, Glycine max
  unsure (1)..(397): unsure at all n locations
tctccactatgttgctataaatttgtgatgaagngtataagaaaagggnncagccccttaggcacttctctctctctcgaaatagctgaggaaaattagttccgtgaagaaaatccaagccgatgcccttccgtaacgtttccgtaacgtttccgtgagtaattacgcgaagattctcgaccgttcttcaagattcatcattcgttcttcgttttcttcagtcttcaacgggtaagtacctcaaaccaagcttttcaattcattctatgtacccgtggtgagccaatatttgtttcatggtattttgttctcgttttcattcactttttatacccccttttgacgtgcttaagccatctattttaagcatttatcgcctaatctaaaaataaataaa

SEQ ID NO: 234131 - DNA, 417 bp, Glycine max
agcttgcatttggaattgcgaaagcttcactccatcattaggattagtacctgacatctcaaacaaacaaatcaaacgtaacaagacaattatagttgttgtttgaatacctcacccacttaagtgtatcacacaattatggcttttctctaatgaaacactcttgccttttaccactctaattccccttgagttcttatgcaattcaagagattatggccacaacaaagaacaattcaccaatatgtgtaaaggtaaggctagagagacaaggaaaggttaaccaagaaaaaggctaacaatggttttaggcacaaatgaaggaaataaaattcagaatttaggaattcaagtaacaatccttcatgcaaccaatatattaccttaaagagaattttttaaagttcttcaagcatg

SEQ ID NO: 234132 - DNA, 413 bp, Glycine max
tcattgcttcatgatgatgaatcaagattgattcatggtgttttgatgataacaaagatgatgacaaaaagcccatgagaatgatttcatgattgagtcaagaacaagagaaagattcaagaaaagtttcaagtttcaagaatcaagattcaagactcaagattcaagaatcaagaaaaggctcaatcaagatgagtacaaaaaagtttttcaaaacattgagtagcacatgaagttttcacaaaagcgttcaccaaagagtttttactctctggtaatcaattaccagtttactgtaatcgattaccagtggcaagttttgttttcaaaaagctttcaactgaatttacaatgttccaatcaatttcaaaatggtgtaatcgattacaatatattggtaatcgattaccagt

SEQ ID NO: 234133 - DNA, 370 bp, Glycine max
  unsure (1)..(370): unsure at all n locations
agctagntatctgttgtataagctgctgtagaggcaatttcactgaatttggcctcctaaaagtggaagtggatattctcattcatcacatcccatgcaatcagttctcctttgtatcttgaaaccacagatttcatactttcagctgctgcttctcctgatttctcagatgatagggtcttaacccattctggctgttgttttggattgtcctataaaatgttatggcccctcacaaaaatgccattctctttggtaaatctcatcatggcatctgggatagtgtatgtttcctctgtactataccacttcatctcattggngaaggatgtcatggttaaatatatctttattccctgaacaatatcat

SEQ ID NO: 234134 - DNA, 389 bp, Glycine max
taacaagctattagaagaagatatatgctattcggttgttttaagatactggttaaaaaacttataaatataaatgattattttattgagaaaccaaaaattatgtggcttataactattttatttactcttataatttttaagataaatattattcttttagtttctttatcaatatccgaataagattgattaacaacatgattagaagaatagtgtaaggaggttggtttgactttgaggggcagaatacagtggtctacttccgaacgtggagatctcggattcctcctcaaggggtgtccccacatgttgctttttgggctgtgacacatttttaatttacctccaaccatcactctattcacactttgtattacttgatggag

SEQ ID NO: 234135 - DNA, 449 bp, Glycine max
gcttgtgataaccattcctttcggtgtttccctctaacagatgcttatgtacaccaagtttgtgaaaaacctcctaagaaaggaaatgatattaataatgaaaatattgcggtagaacaaaattgcagttatattatttagaaaattctaccacaaatattctatgatcttggaagtgtgactattccatgctccatcaggacggtgtctgtaggaaagactctcattgatttgggggcaagcattaacttgatgccaatatcgatgtgccgaaggattaggaatctgaagatagctcccaccaggataactttccaattagcatatcattctatcacaaagccatatggtgtggttgaagatgtcctggtaaaggtcaagcaattcaccttcctgtagaatttgtcatcatggatatagaggaggattcttatgtacccataattcta

SEQ ID NO: 234136 - DNA, 436 bp, Glycine max
taatgatgccacaaggaaggatcatttccctctaccattcatgtactatatgttggagcatctagttggacaagctctttattgtttcttggatggttactcggggtataatcaaatagcagtagatcctaaggaccaagaaaaattgcttttacatgccctttcagtgtctttgcatacaaaagaatgtcatttaggttatgtaatgcccctgccaccttccagagatgtatgctagctatttttgctgatttggtagaaaaatgcattgaagcgttcatggatgatttctcagtctttggcccctcctttgaatgttgtttaaccaatctagaattggtgctacaacggtgtgtagaaactaatctggtgttgaactgtgagaaatgtcatttcatggtccaagatgggtttgtcttatgcaacaagatcttgt

SEQ ID NO: 234137 - DNA, 447 bp, Glycine max
  unsure (1)..(447): unsure at all n locations
ctgcaagcttgaatgtaacaatctcagatattttcacatacgaatggaagatgtcaaagtgattaacaaacctcaattggatagtggggatctttgtactcttgttgaaaaaattagacaacaattgaagtatgagaaggagctgaatgcgaatctccaattacagttaaataagacacaagatgcaaattctgaactagttcttgcaatgcaacacctggatgaaatgctggagcagaaaacatcattcaataataaacacaagcacctacagtggggtcgtatactactcgaggcctctctatgatggaatcggcgttgcgggaatgtgggttgttctgacaatggtggtagtgtttgaattcagcatatgtaagtttcagacatcctatacatatttctccttattatagaattgaagaccanagtacgtaagttttggacact

SEQ ID NO: 234138 - DNA, 437 bp, Glycine max
  unsure (1)..(437): unsure at all n locations
tgtttcataanattatctaataaaataatatattattttagtttctgctaaacaaaccaaatgttggcctgaaaatcactgaatgttaaaaaataatagataaattctgatgtgatttgacgaggcaacatatgatgctctaccaacaaaagagtggactgattcttcttacacccattttgattgtggctgggcatagccaatttgacaactcttccagctaatgagaggcagacagtgagacttatcggacataacagaaccatgtataacatgacttacatagtcatcaaatattgcataccatggatcacattaaagtccacgcacatagatttgctttcacatccatcacctacaccaccaaaaccttatcaagccgtgaaggcgtgaaagatataacaaatttatcttactctacaattattttaaacaaa

SEQ ID NO: 234139 - DNA, 465 bp, Glycine max
  unsure (1)..(465): unsure at all n locations
tcgtgacgctgcaagctntcataagtgagatcaggtgcatttatctccctaagagtcctctcacgaggtggatgttgagtcatgttctcagtatgaaaattagtagttgaaaggtcaaaatcagaatattcagaatcactagcaacagaatactcagaatgctcaaaatgctcacaatgctcaaaatgcacataatgatcaggatgcacactatgcctaactaatatatgagaggttctatctatttcaggatcaaagggttgtaaatcacctggattgcccttagtcatgcactatatgcagcaaataatgtgttctcaaacaagcacctaacaaggtggtaaaactacagctatactcaaacgatatccaaataagctgaaattgttgaggaacaccctataatcatgaaaagatagcacaataattttcaaacanaaattcaaagtctaactatgataacta

SEQ ID NO: 234140 - DNA, 437 bp, Glycine max
tacaatatctatatatggactaaatagagcatcccaccaatggtatatacagtttcatattatggtctccaaatacgaatttgtggaaattgttgtagaccaatgcatataccttatagtcagtgggagtaagttttttttccttaattctatatgtagatgacattttacttgcaagcagtgacttatgtcttttgcacgacactaaatttttcctctcacaaaactttgatatgcaggatatgagtgaagttcctatgtcattggcatagaaattcatatagatagatctctaaggacattaggattatctcataaggcctacatagaattttttttgataagatttaatatgcagaattgttcatcaattaccgcacctatagttaaagaggaaaaatgtattctcaatcaatgtcaccaaacaacattggaac

SEQ ID NO: 234141 - DNA, 446 bp, Glycine max
  unsure (1)..(446): unsure at all n locations
agcttatagctgacttattatccacattttgcttcactccatcactctccttgatttttaattcctgtaataatgtgtccaaccagacagctnggcaagcactcattgcagctgcaacatactcagcttcacatgttgataaagccactatggattgcttcttagaacaccacgatattggtgctgcaccatacatgaatatgtaacctgtagtactctttctgtcatctctgtctcctccccaatctgcatcagtatatcccactaattcctctgagttgctgttatctttatttggaaatagaattccagtattgatggtcccttttatgaaccttagaatcctcttagcagctaggagatgaggaattctgggtcttttcgtatatctacttattagtccaacagaaaattccaaatcatgtcttgaatgacacatgtacctg

SEQ ID NO: 234142 - DNA, 418 bp, Glycine max
  unsure (1)..(418): unsure at all n locations
nggaatgtatatgttacaatgttcgtaaatgtctaaaaagtttttaagaacaacctgtctatgtaaattttttcagaaagacttctaacaaaataagaaaagaaaagtttttcataattaccttatacaccagctaatgatagaagctctttcatattagtttttttcaaaagatatttttaaattatgtataaactaacattaacttatagaaaagtgtatttaattgttttctttttattttctttttttagtagtacttctaaatacatttatccaaatagacccttaatattaatatatatcaacaatacttacatccaaattattacttaatcaaggcttgaaattattttatataaaataaccagattaattaaccaattacgtgcgttcgtttcatttctaaaatcaatat

SEQ ID NO: 234143 - DNA, 391 bp, Glycine max
  unsure (1)..(391): unsure at all n locations
ccatgaatacatgaataattaaggaaaacaaactaattgaggaaagataggataattgaagaaaaaaaggactaattaaggaaagaagactaattggggaaatactgactaattaaggaaaacatgaattaaggaaaacaaaataattaaggaaatgaggaaaattaagaaaaaatgactaattaagaaaatcaaactaattcagaagcccactaatctgatcctatattagaagaaaagaaaagaatgagaagacccacataaattccaacagaatacaattccttatagaaggaaaaagctagaagaaggagaaacaagtaatgagaatcattccttcatttcattccctttcttaactnntcccctatactaaatattctcctcttgc

SEQ ID NO: 234144 - DNA, 419 bp, Glycine max
tagacggagaagtaaagatcgcgtgtaaaatagggctcgtgttctaatatttttaaatgtaccttcaacatcgattttcaataaaaaaaatcgatgttaacaaaacactataaatgttaacatcggttttattgaaaaaaccaatgttaacttatcatacgttaacatcggttttttgtataaccgatatcaactaatgtacattatttacaattatgctaccgcgtttatattttaacatcaattttttttttatcaaaaatcgatgttaacccgacgatgttaaatctacattttcttgttgtgaccatgttaaattgctatggcacatcatcatatggtgattagattcaattaggtgataagtcatctaaactaaagaacacagtaatatgtataaatcaaattaaataaatttt

SEQ ID NO: 234145 - DNA, 435 bp, Glycine max
agctttgatccatagtcccaactcactattaacttttccctcaaaaggaaacaaaaaaaaatggagaaagaggaaaggagaaaaggagaaaattcccaatcaaagagtgggagaaagcaaaaaaaaagaaaagaaggaaagttcccaatcaaagagtgggagaaagcaaaaaagaaaagaaggaaaattcccaaatcaaagagtaggaagaagaaaagaaaggaaagaaaattcccgatcaatgatcgaaagataacagaagaaatatgcataaaggtcttttagaccagaccacatctgaacaaatacagatttactaccaagtagacacaaaagaagggggggaaaaccatgacctgaagtggtcctcttcctttgattgccaaccaaaatcctgtgcgtcggtgactttgtcacctcactctaaacaaaaac

SEQ ID NO: 234146 - DNA, 429 bp, Glycine max
  unsure (1)..(429): unsure at all n locations
ngcctgtccgatgcagcagtaatgatggcccgagttatgttggggaacggttacgaacccggaatgggtttaggcaaagacaacggcggcataactagcctgataaatgccaaaggaaatcgcgggaagtatggtttaggctataagcccactcatgcagatgtaaagagaagcatcgcgggaaggaagggcggtggtcaaagctcgcggttgagacaagaaagtgaaggaagcccgccctgccacataagtagaagctttataagcacaggtctgggggacgcgatatacgaagatgatgttccaagtacattggatttggtacaaccatgccctcctgatttccagctgggaaattggcgagtggaggaacgccccgacatttacgcagcgagcataatgtaaacctttacggttgtaaaagctcta

SEQ ID NO: 234147 - DNA, 428 bp, Glycine max
agctttctcttatacgaagcaaactttattcgaacagcacaagctatcacagtcaagcaaaacagggcaaaggccgaaaactctgctcaacacaccaaccaaaatcacagcttttctcacttatagaccccagtaacaattccttcgatccaattcgttaaccgtgggatcgactccaaaattttactggaagtctatagtacataagcctacattgtgaccgttgggatctactagcaaacatccagaactcattctgcactagaatttccacagccaaccacacacaagcatttttctacacaaagccaaaatcctgctgcacctattttgacagcaaaattctgcatatgtgcagatttcgaaaatcacactttctctcatccactcttgcccaaatcaattcctacaagtgccaaatcatgtat

SEQ ID NO: 234148 - DNA, 420 bp, Glycine max
  unsure (1)..(420): unsure at all n locations
tgcaagcttgttatcttgctcgcccaggcttgtttggttgctttcttcagaagcaacagccttctggaggaatcttctggagggcccaagtgggcctggttgctatttgcacccccatttgtactaaatacaccccctgccttgtttggtgattcttttttcgtaaagttacggaaacttatgaatttcgtaacgattcttgttttctttccgtaatgttacagaaccttgcggattacataatcatccctttttttgacttacggaatgttacggaacctcactaattgagcaatgatgcttccatttgattntcggagtgtcacggaaccttacggattgcgcatcaatattttctttgtgtttccggcatgtcccggaatttcacaaattgctaatgatgggggccaagcacctcac

SEQ ID NO: 234149 - DNA, 401 bp, Glycine max
  unsure (1)..(401): unsure at all n locations
ggtanaggattgtgtgaaataagtgttcaagatcgatagaatgaattaattgtaaatgcaaaacaaagccttgcttttatagactcttcatgtctggtcaagaagaccatttataagagttataacttttcgaaaaacttaaaacctatttgaataagtcaaaacctttttgaagagttacatcttttgatttattcagaaacagtcactggtaatcgattaccaaatctgtgtaatcgattacacaaggcttttatgtgaaaggatgtgactcttcacatttgaatttgaatttcaacgttcaaagacactggtaatcgattaccataacatatgtattcgattaccaactttttgaaattaatcggaacgttggaaatcaatttgaaactttttcaaac

SEQ ID NO: 234150 - DNA, 420 bp, Glycine max
  unsure (1)..(420): unsure at all n locations
agcttgatcaattctaacatctacttattccattccacttaaatcatatagttgctcattcaaatcattcgcaaacactcatttcatacaaaacaatccagtgcatatcaaattcaaccagttcactgttcaaacaagctttttgtacaagcaatcaactcaaagtactgaaatttaaataattgaaatttaaagaactgaaacataaaaactaaaatttaaatgactgaacataaatcataaaataacttaaataaactaaaatgttcaaaatgcacaaatttaaatgtcctgctcctgtgattgctcttgtgcatgctcattgagatccaacaattgagcagctggtgaattctgagggatatgttgctctagctcagatgctggtgaagatggcatggattcatcangtatgggtac

SEQ ID NO: 234151 - DNA, 302 bp, Glycine max
actaattccactccggagtatgacagtcaccgctttaggagcgctgtgcaccatcatcgcttcgatgccatcaagggatggtcgtttctccgggagagacgcgtccatctcatggacgacgagtatactgatttccaggaggaaatagggcgccggcggtgggcaccactggttactcccatggccaagtttgatccataaatagtccttgagttttatgccaatgcttatccaacagatgatggcgtgcgtgacatgagatccagggtaaggggtcagtggatcccgtttgatgctgacgc

SEQ ID NO: 234152 - DNA, 419 bp, Glycine max
  unsure (1)..(419): unsure at all n locations
tcttacaaagcatacggctttctggatgtanatgatgatatctatacagatggatcttatatatctatatatctatagatagatatatagatatagatatatagatatagatcatacaatgaagtaccgcacgagtgggtatataggaatccaaatctgccgaatcactcatgttatgatcttctacatcctaagtcttaccgttccttcatctggcttatgttcttcatgtagcattcagactgaatgactctatgaaattacgtcgctacttccacatggtacgggtaacgtatgagacatctctattcttcccggggggaatccttataattaccacagcttatctttcaattcgcctctgaccatcaaatgaaatgtgaataacccgtccttccctctgtgaaactttgaaacat

SEQ ID NO: 234153 - DNA, 355 bp, Glycine max
atctgctgtatgccagcactggacatttttcatctggagacccttcagttccacgagaacatatgtctttaccatcaatattaccaaatcgatcatcttttctcctacaccttctggtaagagtattcctttttttattataaaccaccattaacaaaaattccgtcctttcgattctaaataactatgttggttcaaatatatgtgttgccacctgaagctgcggatataattgggctgcaatcccaatatcttactggtgaaccaaccccgggtcatcagaattaaaagatgtctattcaaaattgtctacaaactctcactacacccttataccaattcccgaacacaacaa

SEQ ID NO: 234154 - DNA, 417 bp, Glycine max
  unsure (1)..(417): unsure at all n locations
agctnatacngatgctcaatgagtggttgctgctatatatcacaaggnnaaaatgtaatatctattcaattagtttatgaacatgtttacatttttttggaacttacatgtgttgatgcaactcagggttaagcaacctttaacatatcaacaataaacaaagctgctactacagttagtattcccatcaacacgtgggatcatccacaaaaaaagtagaaggccaaggctatgtgccatttgggaacactcagagttgccacgttgtttaatgaaggacaacatattggaatctacggcttattggggcaaacaaatgtttttgaaagaagggaacttgttcaaatttctttattgtgtgggaaataggttgcccagacaccctgtaaatggatggacaatatgctttgacattat

SEQ ID NO: 234155 - DNA, 281 bp, Glycine max
acaccagcaagtcggatgcgtttaagggtccgtccgttgtgctatgcaggcacgatatagacgttttgcttgtaataaacgacaaccctgtgtgatacactcttgaccagagggtgctacgatcttcattgtgcacagtgccgttataaccccattctgacagtaattgcttactatggatgaatatcagcgatcactgtttttgttatatgcacaccatataacaagaatgtgatgcgccttgtgcttggagtctcttacctttgaggccatatggagtc

SEQ ID NO: 234156 - DNA, 323 bp, Glycine max
ctcattgacattcatgcgagccaacagatcattctatctgatacgcactgagacggtgcgaatctgaacttctctaatgcattggcagacaatcgcagcggtcctatatacacaccccttaattggcgtgttaaaaataaaaaatgtcttgtggcgcacccatgcattttcatctgataatccatctatcatgtgtcaatcactgtggtgtgttcatagacttcagcggtgccaatcattcattcagtgttgaccctagcacctactcgtactcacattatgtaacatccgccgattcttgcgcgatcgaacctcaaatctct

SEQ ID NO: 234157 - DNA, 336 bp, Glycine max
  unsure (1)..(336): unsure at all n locations
agccncnnnaaggcagaggatgcagaatgttttgtttttaccacacgcactcctctaatgattatggcgtcaattatggcgctaaaccgctgggaattggaggccatcttctcaattaaatttctggctttagcaggagtcatgtttcccaaggcctccaccactaccaacatctatcatactttctctcccaattactgagcccttcataaaaatatttggagataaaactgatctgaaatctgatggtgggggcaactggcacattatttctttaaaatcctccaaaactcataccaggctctctcctattgaattgactaatatcctgaaata

SEQ ID NO: 234158 - DNA, 439 bp, Glycine max
ctcaagcttggttggggcaactattatctgatatactaacctggactcctctcggttctactcctagaaagatctaatggatgctttcatcagactatgaatgtatgaatacatgaattttgatgatgccaaaaaagaatcaaataaggccgcttcaaaggatatgcatttgcttcaagattaattcaagattgcttcaacaaacaaagccttgtttcaagattcactaaagatcaagccttgcctcaaaacaaagggtttcaaagtcatgcaaggctctggtaattgattaccaggaagtgtaatcgattaccagaagggaagaatgaaaaagagctgttgaaaagggttttgaatttgaattttgaacatgtaatcgattaccatatgtttgtaatcaattaccagcaacaaaactctgaaaattcaaattaataag

SEQ ID NO: 234159 - DNA, 340 bp, Glycine max
caatggactccctttttaattcttgatttttcttgaccatgttcccttgccttgttttgaagctcactacaagccttaagtgaaaaaccatgatataccatttcttaagaattttggagctttggaattgttttgggaataagagtgggggtttttgtttcaattggataaacatgtttgtctggcatgcttcatgaaatatatggagccatacttgatgtacattgcatattggttaaatggtggacatgctgaatgagatgctatcttcaaaggcttcgtagaaattaacaataatttaaaatttgaaaaaaaaagaaagcaccgaactcgagtgaat

SEQ ID NO: 234160 - DNA, 432 bp, Glycine max
cggtgaggttcgttgaaaaccatcgaaggttcggtctatgttacaagcctacacatgcctacaaaagaagggccgccttataaaggaaagaaagaagcctagcccatttgcaagggcggggaccacagatggagagggtccctatctgccacaatagcaaaagctttgtcagcgcggggtggataagtgagaaacaaattgctgtgctagacgaagaaaccgaccaagagcaaccaagttgggtgtagccgtgctccccgggtttcaaattgaagaactagcggatcatggagcgactcgagatttcagtgtcaaacacaatataatctagtagtttgaaccctattgctgggcctatgctttaaggtctacttctctttgtaggcatacctctttctttaatgttcccacaattataaatacataaccctt

SEQ ID NO: 234161 - DNA, 319 bp, Glycine max
  unsure (1)..(319): unsure at all n locations
tgaggggagtcctgagaatcccttgaaagacattttaattcctgcataagggttgaacactaggagaaacataaatagttaactgattaaaattatcactctctctcttttgtgtatcactcttttccttgggtgtatcactcttctttttcatattcctttgtggagcctcactattttctttctcttgttctctcttttctctcattctgattnggtcatcacatgcttctctaggggatagaggtttaagagtaaacgaggaagattgactattcgtcttgtaggctcttctttgttaccggtcaacaaccgtgca

SEQ ID NO: 234162 - DNA, 420 bp, Glycine max
  unsure (1)..(420): unsure at all n locations
tctatataagctgaaccattntatcaataaacacatgttgtgttntattcagaaaattagagttcttagtgagagtgattctcctaaattcttgagtgattcaagaacaccctgtctgtatcaaaggactttcacaacctttgtgtgttgccctcgctggaaagagtgattctttccttcctatcatctccacccttgttctttcaaaccacaattccagaaaatccacctctgcccaaaattatctcgtgaccataactcccatttcacacactcaaattaagtgattcttgagcctaaattgaatttcagaacgagacctttcacctcgttntggaatcacctcatttggagccctgtagcttccgttattgccatttctatatttctgtccagccaccacttaacctacgttttacc

SEQ ID NO: 234163 - DNA, 303 bp, Glycine max
  unsure (1)..(303): unsure at all n locations
ttttttcccncgctcacctatcaatgagctggctagaataaacggcatcacctgggtgaaaacagaacagcctttctttgctaaaaaaagctttttatgacctgttctactcttctgactttcaataatttgagctaaatgtgagccttggagtgggattggagcttttgtacaagggggcaccctatgcttatttattgaaaacttcaaaagcccctcactactctcctttataagagcttttcctataaaaaccttcaatgcgacttcctcttccaagaatttttcttatgtgtcctaaca

SEQ ID NO: 234164 - DNA, 459 bp, Glycine max
  unsure (1)..(459): unsure at all n locations
tctcaatgagagtgttctcgaagagagtcttntcaaggtattctacctcactctatagaatagaatgcatgtgttacatcttgttgaatactctcgatgaattgagtagtacattatgagtactacatacctcaatagtatcaaactctctcttcccttctcattattactcttacgatttcagcgcatcaccccactctcatattttaacctccgctcgtttctatttccctccgattgagagcatcctctccaaggcttcttaatcctatgtctcagtcttggtggtagaagctcctctttaacatggcttattccctagtggatggctgatgtgccatcattttcttctattttttaaacccttcttgcaccaatttaattattgaattggcttaattgtcaattaattaagctagtttattattctggctcttttagctaacttgatgttattaa

SEQ ID NO: 234165 - DNA, 394 bp, Glycine max
aataaatatagagcaaattatattgctgataccctagggatatatagttatgttaagtcagctgcctcctttttggcctcattttcgattttccccttctcctcttaaaaccctatctttttcccgcagcccaccaaaccagtctcagaaaaatgacgatctcgaacccattcaccgttggatcgtcgtgaaatttgagtatcatgttcgcaacttaattccgaacattctcaccgttggtaatttcaaaatcatatctgagtttagaggaaagcccttcgcattgtagcattttaattttccgcagaaacccataactgtctcggtaaaactacgatcccggtttctatagccgttggattttcatgaaatttggatatgttgttcgaaattc

SEQ ID NO: 234166 - DNA, 369 bp, Glycine max
  unsure (1)..(369): unsure at all n locations
agctagccattggaatgcttttgctatattcatcataaaantaatttttgaattattttgcaaagggtttttggtatttttgaaacccaacaccttatgctgggttttaaatttgttatttgcatctattgaaaataacaattagttcttgacatgcactatgaagattttttcatcaagctaactatcaattcttcgaacgtttttatgttcttgcaatgctcatgttttccagcagttgaagtttgaaacattagcatttgggagattttatgaatttcactaaattctgttattctcatgcctttttgataattgcaggcagggaaagctgacactattaacattcttttgttatattggtagaat

SEQ ID NO: 234167 - DNA, 415 bp, Glycine max
  unsure (1)..(415): unsure at all n locations
cggaaggatgcttcaatggaggattataaagagggatataaagagagaggggggagcacgaaattgaaggaagaaaaaaagggagagaagttgaactttgagttgtgtctcacaagactctcattcatcaaagttacaacaagtgttacacatgcttctatgtatagactatgtagcttccttgagaagctttcttgagaaaacttccttgagaagcttctttgagaaaacttccttgagaagctagagcttagctacacacacccctctcataactaagctcaccttcttgagaagctttcttaagaagattcctaaagaagctagagcttaactacacatacctctctaatagctaagctcacctccttgagatgagaagctagagcttagctacacacccnctattatagct

SEQ ID NO: 234168 - DNA, 342 bp, Glycine max
agcttgtaaaataataggtttttaagttagtatcacagacgacaagatagtattatatatatatatgaccttaattgccaaaatagaaaaagcaaattaactccttattttttggagctagtgtgctacaaatccaaactgaaattgcttgcatcaatgccaaatggaatcaaaagtatatgctaattccaatgggatgtacttgacattcaattaagcaataaaagtatatgcttataagttccaaatgagtttttcttactcttgggatcctatcaagttcaaattgggtttcttctataattagataaaaaaaaaatattttaaggtggtgctaaatat

SEQ ID NO: 234169 - DNA, 403 bp, Glycine max
  unsure (1)..(403): unsure at all n locations
ngtcatcgngagacatcatacgctattattttaatatatgtgggtaggaaaaattcaccaaattgatagaaaaaaatctaaaatcatacatcttaggcaaataaggcatgctagcccccaacattattgcattttgattccatctttggacattcaaattgttgtttatttttcctgttatcttttcctttgccttagtctaaatttcaaacttacaattcggtatctctttcttcttttgtttctcctcatttcttaataattggatttgcatcacttaagtacaaccaaagtccctctggattcaacagttgaacttcaatttcaatctttactacttgtgataaaattaggacacttgtcaantctattaacaagttttggcactgttgatggggacttt

SEQ ID NO: 234170 - DNA, 359 bp, Glycine max
aagaactctattagagtctatgctacatggctcaccatgttacctaacaacctcacttatatacgacgtggtcaacttttctaaagcaaatctgatattaatgggaatgaagtgtgcatacttattcaatctttcaacaataacccatattgaatctaaacctctatgggttctaggtaggacttccacaaaatccatggaaatactgtctcactaccactgtggtatctctaaaggtagtatcttcctttaacggatttgatgtacttattaagacttctgacagactacgcatgcatacacaaacttgataatctgtctatttatgtgcgccaccaatacatcatctttaaagtgaa

SEQ ID NO: 234171 - DNA, 415 bp, Glycine max
  unsure (1)..(415): unsure at all n locations
agcttccatcatgttgagtggtgcaaccctcttttgtaaaatcactcatgcacccaacatcttcatgatttgtgtacatagggactcattaggtaggtttgttcttattttttgtttcaatacaaacttaggtgctcatatgggacaccttaggtttgtcataatattttgtaggaataatcaacatgaaaataaagaaaaaggtatgttttattcaattactttccttaacttttaaaataatgatcaagggcttcccatggaccctgagagaataatggtcattcctgagtggcctactccaccatgtataagggacatttggggcttcaatgacttaacaaacttttacaataggtttggctcatatttttctatacttgtagcaccactcattgagtnggtaaggaactat

SEQ ID NO: 234172 - DNA, 454 bp, Glycine max
acgcgacatttgagacactgaagctcgagatgaggaagtgtagaagggtgaaacttcctgcttttattcgttgaccacagagtggtacctggagatatgtcgcgggggtcaggagaccttggggacgtcaggtggggtgcttttgcccaaaaccaagcttgaccaatcccgacccaacccgggcatagtcagtcagtgagaacctgtgatgtacctaagcaggcgagctcctagcagtcaacagataaaaggaacaaagaccacaaagcaaggaggcttgtgtggtggctggccagctgtgaattatgattgatatatgggatatggcctctggtaatcgattaccaagggtgggtaatcgattacaaggcttaaaaatgaagacaggagactaagatggtctctggtaatcgattaccaaggggtgtaatcgattaccaggcttgaaaacgag

SEQ ID NO: 234173 - DNA, 339 bp, Glycine max
  unsure (1)..(339): unsure at all n locations
agagcacgcagctccnncgcctggatccgtgaggtttacccttttttctcgcaccacagccttactacaaaagatttttataagagctagatccccccaactcaaggtatttccatatcttcacttttactatacaactctcttttacagtgctataatttctcttaaaaatttttcaatttgacatggcatatccttcaacttaattaaatcaaattcaaaaaatcccgcatgtcctgtttgttgggacacctttattcagggacattatttaaagataatgtatctaatacgactgattgaatgacctgactattgagacattgacttatctgtttt

SEQ ID NO: 234174 - DNA, 274 bp, Glycine max
tcacttttgtcaacaagcttacaggactcctccagtctaatatttgcgctccaaaacaatgctatcgactgaaaggagtgaagctatttataattttacaaagtccacgaatacgatcaatttataccatgtattggtaatgcctctaatcacttttgttcttgtacgaaaatacataaggggataatcggattttataaaattctaaccttttaaaaaacaaagctatgtttgagcccttaaagaaatacatgtttccaacaacctataaatg

SEQ ID NO: 234175 - DNA, 388 bp, Glycine max
caagcttgatctaacatcttggacccattttttcctcctttcttccttccttcctcttgaagctaggtcattgagttttgatggaaaggaaagctttactttgattgaatgcttcgcttgagtggctgaagcttgaaatgttgattttgggtttggaatgatttttatgtatggtatatgatgcgtaattcgaattgtgtttggacaaaagctagttctgcagacctttacgcttaagccaagagtgattgttgcttaagtaaaaatgttcgtaaagaaaatatgggtgttggatttctagcttaagcgtaagtgaatcgaggttaagtgaagatggatctaccctaagcgtcataagaattaacatttctgatctagcttagcatat

SEQ ID NO: 234176 - DNA, 409 bp, Glycine max
tatatccacatggatacatactttctctgatactacctacatacaaacatatatataacatgaaattctatgattaaaaacatataactattgaaattaaattcacacatgcacagatgacacaacacaaagtttcctctattaatatgagttgtaatttttcaggatgttacaactctaacttattttaataatcttacatcatataattagacactttaattagctaccaactagttaaactacaattctatttttaaactagttatatagttatttatgaaaattctttctctttaaactctaatgacttaattacccattttctaattctatggaatctagatctccattaatcaaccttaattatcctcacttaatttctaactttacttacattaattaataa

SEQ ID NO: 234177 - DNA, 424 bp, Glycine max
  unsure (1)..(424): unsure at all n locations
gatccctaagtcacctgcngcatcaagcttacatggagctgcatcatgtggtatcagagcatctncatcttcatgtggtatcaagagcatcttcatcttcatgtggtatcaagagcatcttctccttgaagtggcgtctccaatcatctttctccttcactttaattacttgttattcatcctattctccatatatatcctccattgtcttatggtttggtgttgtttagagtagattcaaaaaaataaaccaattaaatcttagatctatacttgttcttgcatttctatggttcaaattttatagatctactcttgaatcatgtttttgtgttgattttaggttctatcatttttcagtcataatattcttgtgctgaacttttagatctaaattttcttctaaaatattgattagaaaaaa

SEQ ID NO: 234178 - DNA, 437 bp, Glycine max
  unsure (1)..(437): unsure at all n locations
ctcaagcttatcaatttggattcacgttaatttggcttatcaatttgtacaaattgtacaagcttttataaattcaggaaacacattgcaaggatactagaacacaaggttaaaacaactataaggaaacttaaataagatttaaataatccagcaaacgtatgattctccagacttcattgcattttggatgaaaagttttgtcttgataatctccatcatggttaatagtttaaggagattttggagataatacatgtaaaggttgatttcttttaacaattatggttgtattataaggatactgatttgagtattatttccacccattgctcagaatctccctctctaaagaaaaatatccttgatccatgtataatatttntgttattagtagatccatgtctaatatgttcatgttgaaactttattgtcag

SEQ ID NO: 234179 - DNA, 339 bp, Glycine max
  unsure (1)..(339): unsure at all n locations
gcatgcaagcnngaaccnagagacagaaaaaagattcaattatttttaactaagggggnatcacagngcacatgatcaccaaaactcacttaatcaaacaatacaaggaactcacttaatactaaaacgccgagaccaacgcaaataaattacaagacaccaaaactcaacaactcgagcaaactaggattgaaatggaataccattttctaattcaccatccactaaaacatggggtgcattattcctcaaaccacacaaaaatgtgggaataaactaaaccttgcgagacggaggaggaacgacccatttggagccctcaatcatcgcaagggttat

SEQ ID NO: 234180 - DNA, 390 bp, Glycine max
  unsure (1)..(390): unsure at all n locations
cttgaaggtaactanatgccttggttgacctggtagcttaactggacattattcaaaaatctgcacctgtcgccaaactttgtggtttatgctcctctgccgaccaccacacagacctttgtccttctgtgcatcaatctgaagcaattgaacagcctgaagcttatgttgcaaacatctacattagacctcctcaacctcaacaacaaaatcagccacaacagagcaattatgacctctccattaacaagtacaaccccgggtggaggaatcatcctaaccttatatggtcgagtcctttacaacaacagcaacagcaacaaccttatttccataatgctgctgggccaagcagaccatacgttcctccaccaatccagctacaacaac

SEQ ID NO: 234181 - DNA, 405 bp, Glycine max
agctgatagagagaagatgttccgtgatttataacacacaataagccacaaacaatattaccttctatgaagatggcattcgatcagggtcatttcaccaattagagtcacgaaagaaatgtacacacgcacatttaaaaactatttagcagtaatagttgtagcagtagtgagtagtctactattactacctgatcataaatcgtgttgatctcggatccccctatcttcctactttgccacgtagctagagaaaagattattacaagttgagtaacaaaatgagagaaaaaatgtactacggataataataaaataataataataatactaataatatatttttaataaaaatgtaccagggataataataaattaataataatatatattgggttatatatt

SEQ ID NO: 234182 - DNA, 416 bp, Glycine max
tggaaatgaggagcaaaacgcgttttgtagtgcatttaatctttcatattacagaagaagctcgctaatcaacacaatatataaatggtgcaccccatattagtgactaagttgaagaaaacaatgcaacaccacatggggtatgagctagattagtgccaaacaagtcatgcatcaatttaatacggcagaaaatattagcacaaagagcagaaccccgaggcagagggggtggtgcttgttcactccaaaatcgtataaaaaataatcttgtctccttttcttgctttactacaaagcaagtataatactagtagtaatcgtagcaactatggtgacacaccaatataatagtgacgttaagcatgtcgctatcgagagagttgctaaaaaaccacaagagagacccaatgcaa

SEQ ID NO: 234183 - DNA, 344 bp, Glycine max
agcttaaacattcaacttcgagcgtctttatatatttcgagtctcaatcaaacatccgagaaaaaagttattgtcttttgaatttgctcagacgttcaacattcaatttcgatcgtctcgttatattacaggactcaatcagacattcgagtaaaaagttattgtcgtttgaattggcttagagcttcaacattcaatttcgagcgtctcgatatatgacgggactcaatcagacatccgcgtaaaaagttattgtcctttgaattggctcagagcttcaacattcaatttcgagcgtctcgatatatgacaggactcaatcagacatccgaagtaaaagttat

SEQ ID NO: 234184 - DNA, 433 bp, Glycine max
  unsure (1)..(433): unsure at all n locations
actatacacaactcaagcttagagccaattcaaacgacaataatcttttactcgtatgtctgattgtgtcccgtcatatatcgagacgctcgaaattgaatgttgaatctcttaaccaatccaaacgacaataactttttactcggatgtctgattgagtcccgtaatataacgagacgctcaaaattgaatgttgaagcttagagccaattcaaacgacaataacttcttactcggatgtctgattgagtcccgtcatatatcgagacgctcgaaatttaatgttgaagctcttagccaattcaaacgacaataactttttactcgaatgtctgattgagtcctgtcatataacgagacgctcgaaattgaatgttgaagctctgagccaattcaaacgacaataactttntactcggatgtctgattgaga

SEQ ID NO: 234185 - DNA, 346 bp, Glycine max
cacttaaaactcagctgtattacaagaggttaaaatgttttatcatttttcgacactataccctataatatattgtgaggggatacggcgcacattgtgcacctttatttttcttttattattttaaaattaaaaatctttcatacaaataatacaaatatcttggtaaaaaaatggagttaaaatatattttagcagtataaaaatattcttatatataatttatcacttttttcttaattctatttctattctcttaacaatcatctttgcttttatttttccgtaaatactcattatccctatagttatgattcgatatttattcttatagcaattcaatatt

SEQ ID NO: 234186 - DNA, 219 bp, Glycine max
gttgagcatctcacgtaaaacacctttccgacctacatcgcatgcatattatcgctctccgaagcaataagactttccctgtcgtacgagagaacattatctgccagcgagcgcttcttttaaaaaataactgctcatgtcggctcacaaataacagtggggcctttcaagccttgacggctatcgagtttttatcctccctgcagaaatttgaccatg

SEQ ID NO: 234187 - DNA, 284 bp, Glycine max
cactgcgaccaggttggtcttttacccgggacacggccggttgacccatcaagcgctacgaaacctcccttctttccaagatcttagggcatctgacgacccgtgacccgacttctaccgcaaaaacccagcaatcctcaacgtagctgtaaagcgcagagctatgaaacattcgggacaaacaccgtgatgtggtatgagtaaccactcgtcatgtaagctaacccatcgcagtcttcctgcgatccagcaccagcactgacaagcctatttggccttaccct

SEQ ID NO: 234188 - DNA, 414 bp, Glycine max
tgttcttgaccttgcaccaaagctctataaatatcttttttgaaagttgcattcagtgcaattcatagttcatgcctcttatgcaaacaagcatgaggaaactacatagttcaacataaactcaggctcagctacttggagattctattataattgcaaatttatttctagttcaataaaattttctaatttaaataaataaaatcatccactgaagttaaatatatggatatcgattacaagtatagctctctttcaggagtacatttgctgataaaaaaacattaagatcctagctaataacctaaaacatttttatgagttctttgaaaaattaacctgatattactggtctacatgcggcgttcatcaatggtcttgcatattttcaacgcggttaaaattcctcataat

SEQ ID NO: 234189 - DNA, 372 bp, Glycine max
  unsure (1)..(372): unsure at all n locations
agcttgcccactgaaacatttatgctttataatntgcagacattgatactatcaaattgcgaatttcttattcaattgccacagcagataggaaatctggttaatttgcgtcaccttgacctcagtggcactaatttgccagagatgccagcacaaatctgcagactacaagatcttcgtactttgacagtttttattgttggaagacaagatggactaagtgttagagatttaaggaattttccttatctgcagggtcggctttccattttgaacttgcacaatgttgttaatcctgtggatgcatctcgtgcccatttaaagaacaaaaagaagattgaggagcttatgctggaatggggcagtgaacta

SEQ ID NO: 234190 - DNA, 369 bp, Glycine max
  unsure (1)..(369): unsure at all n locations
tatgattgtacgagatggacaaacattaaccgtgtttttgaagaagngggtctgcctcaagaacctcatttttctcattataggacgtatagcaatggtggaaactaatgttacgtagaacggaaagcgatctcccatgtttgctcctaataaagggttgcacagaggtgatttgctattaccttacctctttgttataagtatgaacaaactctcccacattatcttgaaagcagtggaagcttggaaacctttttgtatgggaagaaagggccccctcatctcgcacttcatgtttgcggatgacttaatatttgtggggcaagcttctactangcatatgaaatgactttcgacactatgcaattg

SEQ ID NO: 234191 - DNA, 383 bp, Glycine max
  unsure (1)..(383): unsure at all n locations
agcttgtggcatttgaagcattcaactctttccttgntgaatgtctgtcttccccttcctctgcctcgaaaagaccctatacttctccctcttcctttacctcttccacttttctcattaaccaccatctgcatgacctgctcctcttctgctggaaacatcattctctgctcgtgaaccaatagactactttgcagttcgtctgttgtcataatatccctgttgttggattcttcaatggagcacaccatgtagttaaacttcgtcttcatagatcgcataatttttgcagttatgacactctcttgcatattttctccatatgctttcatactcttggcaattttcaacgtccgagcaaagtatgaatccactgactctcc

SEQ ID NO: 234192 - DNA, 400 bp, Glycine max
  unsure (1)..(400): unsure at all n locations
gcgcaagtgacatatntataggcgagattagtgcaattttaaaagaattattattaaatgtcaaagatatttgttgctcctaaacctagaattgatacaacaatttttttcttaagttggtacatgagtttgtattgttccaaaaatagattgataagtatttcatcgctatgtatatccaacatatgtaagtttaaaaattatattcaatattcataaattaataactgctcaccactcctaacaaactactaacttgtagaattttcgatcagatccttggcaaatgtcgacgcaagctatcactctatgagagacaaccacatagaccactatcttacatattttatcgattaatatgttcaataaagaatgacgtgaatgcgtaaatggtataaaa

SEQ ID NO: 234193 - DNA, 380 bp, Glycine max
  unsure (1)..(380): unsure at all n locations
tcaanctcggaaaggatgcttcaatgaaggataagaattttgtgatttaaagggaggggggagcacgaaattgaaggaagaaaataggagagaaagagggaggggggagcacgatattgatagaagaaaaagggagagaagttgaactttgagttgtgtctcacaagactctcattcatcaaatttacaacaagtgttacacatgcttctatttatagactaggtagcttccttgaaaagctttcttgagaaaacttccttgagatgcttcttgagaaaacttccttgagaagctagagcttagcttcacacacccctctataactaaactcacctccttgagaagcttccttataaagattccaaagaagctagagctt

SEQ ID NO: 234194 - DNA, 219 bp, Glycine max
gaagctcaatacaatcctctatagtaaaaccaagatctaactttaggattaatgaattctgtgaccttggaattgctttcatagttagtgtgtggagggtttttgtggacaacatgtcttgtttgctatgcgtcttggagtatttttgggccataatgtcaaacaatttttatgggcttaatgttgtacatgcttcttaatgatatgataaaactgaaa

SEQ ID NO: 234195 - DNA, 411 bp, Glycine max
  unsure (1)..(411): unsure at all n locations
tgcaagcttannncactggatcaagtctattgcctgtatgtntgttgaacacaacgacaaattaaagctataatgtaatatatttcccaaatctatatgcaaaatctacctaaatgagttcaagcttggaatactaacatttgcagccctgtgtttaggtgggatggacatcccataattctgtacatgtcaaaatatgcatatgaaaatatttttttaaacaagtaaacctttcaaggctttattaataaatcaaataccaattctcctaaaagatttcacttttttggtggaggctctattctctaacatccatatatagaacatgaattcatgacacataaacaagatccaaccactaatataacattgttttaaagaataatactaatgaaagtaatacatataaga

SEQ ID NO: 234196 - DNA, 437 bp, Glycine max
  unsure (1)..(437): unsure at all n locations
ctcaagcttaagctcctttaactgcacaaggctcttaatatttgaatactatccttgtttaaccttcacccgacgaagacactgacaaaaacttatcttctccttcttggacaaagtatggcaggctgggggcaagtaaattttcttcccatcagaccttggatgcaactgtgatcgtatacccatatcagctagatcttgaagggtattcaagccatccttcgtcttgccttgaatgttaaggagcgtcccaatgacactatcacagacatttttttccacatgcataacatcaatacaatgtctaacgtcaagatcacaccagtacggaagatcaaagaaaatggacctcttcttccatatgcaactttgacttttatccttcttttgngtcttcccaaatacagtattcatgtgttcaacccgctgatatacct

SEQ ID NO: 234197 - DNA, 401 bp, Glycine max
agcttcttccataagttaaaaagtaacttatgcataaagtaaattcaactttttagaaaagcttatcaagataacttctacaaaaagtgaagtgcataggttgcttttaacttatagaagttaaattaattcattttatcttggtttttcttattccttatgtaagtacttatcgagaagtttatctaatcaatcctgttttgttttacctgctgaagaacttgcagtccaattccaacaaccaatgcgcgcctgactcctaaatccaacaaacctccccaaccagtacgtttggcagcaacttctggtttgatgctcatatccttagggctgataactgagtgactaacaagtgcagctgctggataagcctcagtactaccatctgcatgcaaatcata

SEQ ID NO: 234198 - DNA, 369 bp, Glycine max
ctacatgtgactacgagacgtttgtttatggatgagttcccgtcattttctgattaacatctttcgacgtttggctcgtcaccaatcaacttataaaatggcgaatatcgtgatgacgttaacgtcatggaaaaacaactcccatctttaaatccaagtttttacttcatcgttacctacatagattaaaacactgttttaaagaccctgaccatcgagcaactcatgggttccttactatcccactaacaaaaaatacgtgtttaatatatcataatgatgctactgagcaactactacaactctacgtatacgaatccaatctttcatattacatgatccatagatgtcaatggccgagccaataac

SEQ ID NO: 234199 - DNA, 353 bp, Glycine max
  unsure (1)..(353): unsure at all n locations
agctnataatagagcggagtgaagtggtatgctcctcatagacatccatcagggataaccacatcatcctcatgttggtgtgggaagacaaccattgctggttgaattggtgatgccaaactgtgtacgacatgcttgaagcactgattttgctatccatactccaaatgggaccggcatgatcgtacctgttggatcactaggtaagctcacgaatggaaagaacctattatgtctcataccgcttcttggtctgggattgaaactgactataaaatagaaacctactcttgactcatttaaaagtgataacgggaggtgaaataaatcaacacctatatattctagcccgc

SEQ ID NO: 234200 - DNA, 386 bp, Glycine max
actcagctgtcggctggtgcgggactaggactggcttgttgactaaatgttaaaccttatagacacccgcaacatatcgtgtgattctgaactgcttgcaatccctcctatgacgattgctactgaatgatgttatttgaccccagacgaatgcttccatctacttcattgcttatgcgtgataaacatgcctgagactgtctgacagctggtgagtacgaccactatattctacttatgctacatgtttaagtgaaatggctgtaacatatcatgttggattatcccggatctcaaaatcgaattactacaatgcaatgataatattcatactctcttaagaataataactatggaccatgaatagaacttagattaccgtatat

SEQ ID NO: 234201 - DNA, 301 bp, Glycine max
taacgccacactaacccgtgagcctaggctggacataacattcactaacccatcatttcctgatgttcgaatcacaacatccgctttgcttgctctttccactaagaggggagctctccatgtcaatggagggctaaacactccattggtggagagtaatcagcggactctcttgaagcaggaactctcataatctaattaatatcattgctattggctttccttcctcctatgtatattccccgtatatggttcgaccggccattttatgctatgttacagatgaagtcttgcaaaatgc

SEQ ID NO: 234202 - DNA, 420 bp, Glycine max
  unsure (1)..(420): unsure at all n locations
ctctataaggcaattggtcagcagccaaagtcattttacaaaaagatggtanactgaagcacgcagcattaacaactggttggactacacttctgcatgttgctgcaggtgcaaaccatgctccctttatggaggagctgctggaagaactcaacgacgatcaatacattttattgcaagattaccagggcaacactgccttctgctttcctgttgcatctgggaacatgaaaattgttaacttattgcgggaaagagatccatacttgccaacaaaaaggggtggaaatgattatatccctattcaaattgctgcgatgcaagcaaaatgcgacatgacacgctatctataccacatcagcaaagaaacgttcaatgataacgacaagataatgtgttctttactcttatcaagacccg

SEQ ID NO: 234203 - DNA, 352 bp, Glycine max
tgaaaaaaagccaatttgatcatcctactaggacgactgagaaaactggggcatataaagagggtgaggatgatggagaaacccatgctgtgactgccattcctgtacggccaaatttcccaccaacccaacaatatctttactcagccaataacaaactttctccttacccaccacccagttatccacaaaggccatccctaaatctaccacaaagtctgtctaccgcactttcaatgacgaacaccacctttagcacaaacccaaaacaccaaccaagaagtgaattttgcagcgagaaagcctgtagaattcaccccaatttcagtgtcctatgctgacttgctccata

SEQ ID NO: 234204 - DNA, 430 bp, Glycine max
cactataaaactcagctagattataaaccccacctaatttcctagttttttgtgggactcacgtcctataccttgctattcgatcctaatactcaataatcaaaacacatttaccatgacaaatctttcttaaatcttgaccaaaaataatgttgacgcttttgtgtatggtacaagtttgaaattacttgataaaatatgtgtatggtatgattattaattttaatgtatttgatcgttatattaatggttgttgttttatatacaacttatgttcataataagtgaaccttagtttcttgtttaagattcaatacactgattaatacagacaattttgactaatcattgtagtgaatcttgaattgttcgtttggatagtgtgcgaagactatttctttatagtagattcatacgtataggttaactt

SEQ ID NO: 234205 - DNA, 402 bp, Glycine max
  unsure (1)..(402): unsure at all n locations
agctagcatgatttacattctgcccctttctcattctttatcttaattcttcttgacatcatcaaaatcttcgtgatttacactttgggccgagcacaatccgcataaataatttcatgctagcatccatgcaatttaattaaatcaatttacacaatagaggttactttggcaacataatggtccaatcaatttaataaaaattactagacatgcaaataaatggaaaggattcgtaatggttaaatttgcacccaattatgatagcagtaaatattngaaaacaacgtcatggtgaactaattacacattcgagatgaacataccacaatactattcacaaattataccaaacacaagaatatcatanactatcagcctattaccgattcatgaagaaaa

SEQ ID NO: 234206 - DNA, 415 bp, Glycine max
  unsure (1)..(415): unsure at all n locations
tctggccaaaagattaaagaaggtgatgctgaccattatatatggattacaatcagcgttcataaaaggtagacacttactatacatggagtgctagttgcaaatgaggtggtggaagatgctaatagaaagcaaaagccatgccttgtgtttaaagtagactatgagaaggcatacgactcagtctcatggaattttttgttctatatgatgagaaggatgagtttttgtcctagatggatcaaatggatcgagggttgttatcatccgcgtctgtttcgattttggtaaacggggagtccatcggcagagtttataccccaaagaggtttaaggcaaggagatacattggagtcttttcttttcaatatcgtanctgacggtctaagtggattgctgagggaagctattgaca

SEQ ID NO: 234207 - DNA, 357 bp, Glycine max
ttgacgaagttttggctatacatgccccacttccttgagtggcatttatattggttgttaccttggttattgtgtcttagtaaatttaaaatctgtattgcatcatgcatcatcatggttagtgtgaaaaaacatttctaagttagaaaagtttcttcagaggcaaaaactttgttataatcgactacagtgttgtcttaatcgattacaacaagctatcagaagcttgtagagttcagtctcatatcgggttaatcgattacagtagtctcataatcgattacactgttgcttgagatgatgactgatttattcaggagtctttgctttaatcaattacttctctctcacttagtt

SEQ ID NO: 234208 - DNA, 419 bp, Glycine max
tctcctctattttcctataaatatggggagaagtgattggaaaaaaggttcagccctcctggtaattcgagatcacttgaaattagtgaaaaaaattgttttcgtgaagaatatccaggccgaggcgcttccgtaacgttgtcgtaatgttttcgtgggtgatttcgcgaagatattcaaccggtcttcgacgttcttcgttcgttcgtcgtcgttcttcggtcttcaactggtaagttcccgaaatcgaacttttcaattcattctatgtacccttagtggtcctcatttgttttcacgtgcttttattttcatttcatttacttttcgtacccccttttgacatgctttagtcatttacttaagtcattatctcgcctaatcaaagaataaaataatatttccaccgatcatttgaa

SEQ ID NO: 234209 - DNA, 392 bp, Glycine max
  unsure (1)..(392): unsure at all n locations
ancnttgagttttaggttaaattacattttgaattatggactcggctcaaaactcaacgattaattatctaaggaattatgaataatcattttagtttaaatcttggttgcattgaactaaaaaattgattagtaacacattacatatgtagaattctatggatttcatcttagcaacactttatacttttgaatttgatttggctccaaaatttcttaaaaaaataaaaaatagtatatttttgccatagcaaatttttaatttgctacaaccaaaacctttcttaaaaacataaaatcttgagacattcactacaatgaattgacaacttgctgcaacgaatgcttctaaattcagatgttaatttcaatttgttgcacataatctttat

SEQ ID NO: 234210 - DNA, 398 bp, Glycine max
  unsure (1)..(398): unsure at all n locations
cancttacccattctgatttatggattttattangatgcttgagacgcccatgtgctgaaattgctgatggaaaattgctagggatgaagggtatagttaacctatggttagaaagtgagaatgttgtgttatgagttgaaaaaaaatgaggctttgagagttggaaggctaaaacgggattcaggggtaaatggaaggtaaagtgagtaaatcctagtttgaaatgtcatctatgacttatgagaaagcttgggctgtgcaagatagataaacaaatgactcaagtgaacgcaagacccattctacggtaaaattgtgtgttgaggagtcaatatttggatcggtagagttttctttgaaaaccagtttgagccagtctaattaaagttatagactt

SEQ ID NO: 234211 - DNA, 396 bp, Glycine max
  unsure (1)..(396): unsure at all n locations
agcttctatagaaagctacatgaagcttcncttgtaaaaacgcttcctggccttcattaaccgttggatcgtctcgaaatgtggtctgcaacttcacaaaacacgcttccatgatctgaccgttgggatctttgagaagatgtctggagtgtgctagaagcctcttaatgaagcttctggaggaagcctcttaatgaagcttctagagaaaactacatgaagctgcctcggtagaaacgctgcccagccttcgttaagtgttggatcctctcgaaatttggttttcaacttcacaagacactttaccatgatttaaccgctgggatctttgagaaaatatctggagtgtgctagaagcttccgtttccgagagcatctcttatttatacatttcag

SEQ ID NO: 234212 - DNA, 396 bp, Glycine max
tcaaaccacagctgtcacaaaatctatgtgtccaaaataccctcaattcaatggcttttctaggtttgaaaggtggaatttaaaatgaggtaaatttggagcaaattctcacctcacacaagtctataacatcaatctaaacttgctcaaactggatttacacctaaatttccaccgaatcaaaatttgactcctcaacacccaatattgccctagaaaaggctcttggatcactatggtcatttgtttttctctctagctcagcctaacctttctcacatgtcctaaatgacatttcaagctagtattaactcactcttacgctcatttaccacagaattcagacttagtcttccaactctcacgtctcactctttttcactcatacatcacatc

SEQ ID NO: 234213 - DNA, 372 bp, Glycine max
agcttgatctttgatctttcagctaattatctcaacttattggagactcaatcatcaattcttgcaaataaagtatgactaggaaagcttttgaaaaattagcttataagagaaactcgtgagagtttatgtgagtttaaagagtttacttgagtttatccagaaaagagtctgacggcgagtaaactcattttatttacctagaattacaaactataagagtttattagttaactcaagagtttgacaacttttgttatggtgctcttcctggtggtttaagggtatgtggttcctctttccagtgaagttctttcactaaacaatgtgtgtgtgaatcttataatgatgcagttctttagatacttaaat

SEQ ID NO: 234214 - DNA, 411 bp, Glycine max
  unsure (1)..(411): unsure at all n locations
ttgacacttgaatgactcccttggctgccaatttgtatgtgccatgctataccacaaatgggtagtttttatttttgcaaaactaccaaaaatggaagagataagatttgacaaaaatgagtatttttggtttttaccgaaactagtaaatcttatcttaatagcctaggttgttgtgctaatctccctaggaatacatgtacccggagtgattctcatacagaaaacacttttacacaaagttaaattacactgccgctcagtgcgcgatgcaattttgctacagatggaattttatttaggcaatttccaaatgtcttccaactaaataaataattnttttacactaaaaataaaaaagctaattctaaacttatgcaattaatatcatacaaatcataaattaaatca

SEQ ID NO: 234215 - DNA, 355 bp, Glycine max
  unsure (1)..(355): unsure at all n locations
agcttgcttgtggggcttctatggaggctggatctttgagctttattgaggtcctttaatggtgattttccaccatggagatgcagcggaagacaaaggaaaagaggtgagaggaggcgccatccactagggaataagccatggaagaaggagcttcaacaccaagatgagccttggataagaagcttggaaggatgcttcaatggaggaaaagaaagagggagagaaagagagagggggaggacgaaattgaaggaataaaagagggagagaagtggaactttgaagtatgtctcacaagagtctcattcatcaaagttacaacaagtgttacacatgcttctatntatagact

SEQ ID NO: 234216 - DNA, 432 bp, Glycine max
gctcttcttcgtgagttgatgggttctgtctcgtagaatggcatgatcactagctgacatgttctcaattagctcagttgcttcttccggagtcttcagttttatctttccccctgcagaagcatctaataattgcttggtttgtggtctcagcccatctataaacatattcatttggattggctcggaaaacccatgtgtgggagttttctcaataagcctatgaacctctccaatgcttcactcagagattcatcaggaaactgatgaaatgaagagattgcagctttcccttccgcagtcttggactctaaacctctccaatgtcttccctggatttcagaatgttacccttgaatgagtggagccacctcttggcttctcctgctaatgagaatgagaaaaggttgagcataacaacttcgtctggta

SEQ ID NO: 234217 - DNA, 412 bp, Glycine max
  unsure (1)..(412): unsure at all n locations
agcttatttattggtacaataatggaatttttggctattaattaaacaacattaaataagaaaagaaaaatacctgaatatcctcccaaatcaagtccttctgagcagtagggacctccttccagttctcgtacatgacatccaccttatcacgtgccacaatccccaaatatgttattaatttcttcctgtggggaccatcggccttgccggtagtaggatcaatgtggaccactggtctatcagcaccaggtggtctggtagacaaggatcgtagacgtgagtctttgcatgtccgcttcacgacacatggtgaagctgatgcatctgaaggcggaggaggaagaggcaaggcangtggagaagccatgatcctgtatacatcatgaaaatgtaaatntcgattacagac

SEQ ID NO: 234218 - DNA, 429 bp, Glycine max
tcttagtttcagatgatgcatatgggtttgtagctacctcatgcactcctctaatgactatggcatcatttctggcgctaaactgctgggagttggaggccatcttctcaattaaatttctggcttcagtaggagtcatgtctccaagggcttcaccactggcagcatctatcatacttctctccatattactgagtccttcataaaaatattggagaagaagttgttctgaaatctgatggtgggggcaactggcacatagtttcttaaatctctcccagtactcatacaggctctctccactgagttgtctaatacctgagatatccttcctgatggctgtggtcctggaagcagggaaaattttttctaagaatactctcttaaggtcatcccagctcgtgatggaccttggagcaaggtaataca

SEQ ID NO: 234219 - DNA, 400 bp, Glycine max
ctgcaagcttgagttaattcattcggtgtattatgagcctacatcaaacaattggattactaatgtttctgtcacaatcaagcgattgttaacggcttcatatgggtgtacattgtggtcatgttttcgtttctagaattctttgagatattgttgttgattctgaataagtgatcatttttttattcaaaattattgtctcctaatcaatcgagtgttcatcttgtcattagtttctcatcttccaatcatgtcttgttaaactgctcgattttgtgtcatgtgttacttctattacgaatagagagagacttcgcccttgttaatcacgttaaggtgttttgaggggaaacacttgagtatgcattttccttgttacccatatacgagagtcaaactt

SEQ ID NO: 234220 - DNA, 430 bp, Glycine max
  unsure (1)..(430): unsure at all n locations
tcctcaaggaagttntcttaagaaagcttctcaaggatgttacctagtctataaatagattcttgtgtaacacttgttgaaactttgatgaatgaaagtcttatgagatacacttcaaagttccacttctctccctcttttattccttcaatttcgtactccccccttctctctttcttttcctccattagagcatcctcctcaagcttcttatccaaggcaattcttggtggtaaagctccttcttccttggcttattccctagtggatggtgcctcccctctcctcttctcctttgccttccgctgcatctccatggtgtaaaatcaccattgaaggacctcattgaagctcaaagatccagcctccatagaagcgctacaagcaagcttccatcagttgaggcccctccgtaaccttcccttgaaga

SEQ ID NO: 234221 - DNA, 396 bp, Glycine max
agctttgcaactggaatgtcaggaagatatctaagtaatccaggaatggagcattggaaagctgcaaagaaagttctgagatacttacaaggaacaaaagatcacatgcttacatataggaggtctgatcaccttgaggtgatttggtattcagacttagactttgctggatgtgtggatacgagaaaatccactattggatttgtattctcttagccaaagaagcaatatcgtggaagagtgcaaaacaatcaattgttgtgcatctaccatggaagttgaatttgtagcatgttttaaggctataatttaggctaattggctgcgaaattttattttagggcttggaattgtcgatagtattgctaggccactgaaaatatattatgataactc

SEQ ID NO: 234222 - DNA, 430 bp, Glycine max
ttacacgaagttacatcatattatattattcttctattggttcttgaatgtaaaaaatgttacttcatgctatctagacgttagggaatgtttctagacacctaccttgattagtaaattaattatgattaatttactatcagtttagtattgaacctacggggtcatacacaaccaagtgttccaatctttacaaaagaaaataatttatttgataataaattatagaatttaatttaatcaaataaatattttagtgaaatattgttatattttttttgctagcgccaagaatataattaatataaaaagggagtgattatttataaatgtgaaagttgtccatgaaataagaataatattctattattacataccaggatcagatcatgtgaataattattggaattagtcatgcgattaattgtga

SEQ ID NO: 234223 - DNA, 408 bp, Glycine max
  unsure (1)..(408): unsure at all n locations
agctttaacggtgttggcttaggagaataattaaacactaaattaatttcatgggaagaattgcacattcttaaagggaggagcgtacaatgcacatgaagcaaaaattaacggggaaagctatatttgagcctttctaatttgggtagtaaataattttaccgttatttacatcccaaagttgtcattttggatagttcacacagcacttaggagaaaaactaagcactaaaaataaatttcatgtgatgaattgcacatttttagagtgaggagcgtacaatgcacatgaagcaaagattaacggggaaagctatcttttagcctttctaatttgtgaagaaataattttaccattatttacgggccaaagaccactctggttttgaatntgaatgacacaatctt

SEQ ID NO: 234224 - DNA, 433 bp, Glycine max
taccaaggtaggtttctgtgtccatgttctccaactttgtatgtatcaaggtggttatgatgttgtagagacaaaggatagtattgcaatagatctttttggctttattccatacctcacaacaagtaggataagcttgaacttgcggctaaaggttgggagcaagagaaaattagaaaacacaacacaaggaagcatcaacttgctactaacaagcgtaaatcatggtgggaacatccttttcttgggtgttcaactgatcaacatgatcttggccttggaaccataacttgatagttgcatcccaagtgctacatttgactgtcccgattagtatttgacatggaatcaacagtgcagtacaaaagtgacaataacactatgtctggaagagaatccattgaaagccatgacaaaacatgctaagtagatc

SEQ ID NO: 234225 - DNA, 359 bp, Glycine max
  unsure (1)..(359): unsure at all n locations
taacaaaaactttttttctagacctatattgaccactcctttcacaactaaataacacaaatgaagtccttcctctactactagtgtttgggtcagacctcataatgtccgccacaaattcattttcatgagcaacggatcgagcccactgcaaatcatcatctcgagtaccatacacatacaacgcaacccacacaattttagtcttctaagggacattgattttatgaaattaataacaatcatgaacattattacctgaaaagtattgaacgctttcgaacaatcaacatgttgctcatttanaccacattcttgttcattttgatcatccatatcaacttcttcagacattatat

SEQ ID NO: 234226 - DNA, 405 bp, Glycine max
tcaagaaaaggcgagactccccgttcttatctgatttcttgctcaaatatgtggctatgcttgcgcttgcgtgcttagtgcatctcataaccgcttggggcgcattattgaatttcagcttagcgcatgctttcttcgctcaacggatgggctgaaatggtgcgcttatcggtatgaccccttgctcatcgactatgcatagctcatacttattccagattcttcctcgcgctcagccgataagtgttgcgctcagcaaatggctcgctaagccaaaagattggcttattgagagggtgaaaatcaccacttcatacacttgcctatataacctgacattgagaggaaatgatattacacacacaatatgtgaagacgtaataattattaccgtatgttaaccaa

SEQ ID NO: 234227 - DNA, 374 bp, Glycine max
  unsure (1)..(374): unsure at all n locations
caagcttgcttctacaatgattatggtgtttaaagattattgangaagacctttgagatgaccgaccttggtttgatgagttacttccatggcatagaagtaagtcagagaaatgaagggatattcatctcacaaaagaaatacacaaaaggcttacttaagaatatcaagatgtatggttgcaaacctgttgctactccactcaaaacaaatgagaaactacagaagaatgatggagcaccaaaagtttatgcatcccaataccaaagtctaattggaagcctcctatatttgaccgctacacggcctgatataatgtatgctacaagtcttttatcaagaatcatgcaaagtccaagtcaaatacactttgg

SEQ ID NO: 234228 - DNA, 388 bp, Glycine max
tgcttacttgagaatggctctgatattcctggtatttttaccatatactcgatctaaaatttcagcttaaatgtatgtttttatgaaaacatgttaatgtgttaattacaaggattaagccatatatagtttaagtgaaaggttctaaggccatagtattatttggaaacaataattgttttctcaggacagccttttaaatagtgtagtaccctatacctggcctagacatgaaattgttagaaattatgcacaaattggctgatgagtgatgacacacactgatcaatgcacaaattggctgatcacacacactgatcacacataacttgaaaggaatgtgtgaactttttgttatcatgggagaaaaaacagagaaagagaatga

SEQ ID NO: 234229 - DNA, 395 bp, Glycine max
agcgttaggagagactggttgttcctttatctccatatgcaaaagggttgatccttaacataattgctttagaagtaatatactaacccagactagaactatgtcaggagacataataacaattgatacaaaaactagaaatttctctatacaattatctacaaattgggacatttttggcgaaaagatttttataaataaggcagacgtaatagatttgcaacgtgctaaagaaaaaatgatcctaggacttgactttattacacatgataatagatcagttactattacaaaagattatttattaatctctacaaactcccaaatgtcaccaataatagacgaattcacattagagtaacgaacaaagcgtggtgatacccctaccaacccta

SEQ ID NO: 234230 - DNA, 429 bp, Glycine max
gacctatgatactcagcttataagttcttcgacccaattgtgtatatattttgcatggaatgagacgaacgcaaaattgggaactgattgttagttgtttggatgaatagacacttgcctgaaacacttgtgcgcttgagagaaacattggcttgtgaggaaagaagcttattcaatcttgcttgatgtttgtcatgcttgctaactgatttcatctctttagctcaattgcacatgcttctatcttgaaatgtgacatatactaatttgggggagatattgattgatagatgtgcagttatctcagttactgtggttggtacttactaaacatgccattaacctaacttagcatagttagcttaatttgcttgaggacaagaaaagctttaaatgttggggagtttgataactgatgtgcataagtag

SEQ ID NO: 234231 - DNA, 389 bp, Glycine max
  unsure (1)..(389): unsure at all n locations
tcaancttagacctagaagggattgacctttttatgtcttggagaggatcacaaacaatgccaataggttggaccttcacgaagagtatggagttagcaccactgttaatatttctgatttaattccttttgcaggtggagctgatattgacgaggaggaacccacagatttgaggtcaaattctcttcaagggggaggggatgatgcaatcctccctaagaagggaccaggtaccagagccatgaacaagaagctccaaaaggattgggttatagctggtgataaacgcccgagggttttcataaacctcaaagtttatttttgagcccatgggcaagggtgggtccacttatctttggacctatcaaattaggatttcattatcttt

SEQ ID NO: 234232 - DNA, 393 bp, Glycine max
taccctcaaatgttcgaaagatgggctcgcacatcattaaccttctcgggttagctccaacgggcatcccaagataggtaaaaggaagctgcagaggtccacaattaaggatctcagctgcagatcgactccattgctgagattggccaatagccccaaattggcttttggcaaagttaattctaaggccagataccatgtcgtagcttctgagcatagcttttataatagagacattttccatagacggttccccaaagaatatagtgtcgtcagcaaattggagcatatataccggcaccttattcttccccaccataaaactgtgataaaggtttgttgaaacagcttctctcatcattcctgacaatcctatagctactatattgaata

SEQ ID NO: 234233 - DNA, 396 bp, Glycine max
agcttgtcacaaataaactatttaatatgattataagcttggagcattcagtggcctccattgatgaaataagaactcaaggatgcagtaagatgtcaaagagacgagcattgcaagaaagaatagttagaaagacagatgaaatgatcacagcctaaaagagttggtagtatatcagcatgaccaaggaacaagacacttcattgaaaacttgctcaatggaaattccctagcaagcaattatacacaatggacacacaaaatgagtctagtaacaatgcaagtgatttaaaacacagttttattaataagttcagtcacccattctggggcatatctcatctcacccattctggggaaaaagaataatccatgacaaaacataaatgcaattct

SEQ ID NO: 234234 - DNA, 381 bp, Glycine max
  unsure (1)..(381): unsure at all n locations
tattgctgattatgcgatcattctcttccaaatgattagagttttctgctntacctgttaaacaaattcagtatcaaagcttcttggtcaggaggaattcaagcttcttgacaaaaaaaggtttaaggtgtgccccatttaaaccttatttttttaaaagataagccctttaaaacttgggaagaacaaaaatgtaaagatggtaaaattgatttaatattggagataaaagaattaaatgtggaactaaatatcaatgaaattaaagacataaaattccattaaacacatattattcttcatctacagagtgaatgatgagaatatataacgaattttataatcaacgaatatgtagaagtggacaaatagtagttcgga

SEQ ID NO: 234235 - DNA, 352 bp, Glycine max
agctttttgaggaagccacttaatgaatcttcttaaggaagctacatgagctgtttcagtaaaaacgctgcccaaccttcgtaaccgttggatcttctcgaaatttggtttgcagcttcataagacacttgtcaacgatttgaccgttgggatctttgcaaggatgtgtggagtgtaccccaagcttccgttcccgagagcatttctcacttgagcgttttagcctttgctttcgtgtagcttaggaaaaacatcatttcttctcctttctttcttccaaagccatttctaacgtcccaagcactttctccatcacccataaccaccattagcaaccacaaactgtcgttgt

SEQ ID NO: 234236 - DNA, 411 bp, Glycine max
  unsure (1)..(411): unsure at all n locations
tgtaaaaaaaatgaaaatattaaaatttcaaattcatattcccatgnaataaattttaaatcatgaaacacactcttaatcatacttacaatcttagcatattttcatcacatattcataatataataccgcgtttttattatcataatacaatattttacattttccttcatgtgacaattgcatttcaaggtacgttcatcaccaacttcatgtgacattgaatcattgacataaacttagattagaaaatgaatgaacacacttaaaggaaagaaatcattgtcaaaagttgtgctttgtaattaaggtgtacaatatataaagttagtgatgaacataccttaaaacatagtgttacatgaaggaaaaaacaaaatattgtataataatgatgaaaatgcaatatta

SEQ ID NO: 234237 - DNA, 265 bp, Glycine max
aagtgtgctatcttttatcccttcctcctcttgacaaaagattcaaaggactaaccgccttgaaattttttgattctcccttccccctcttgacaaaagattttaatgactaacttcctaagaattcttttgattcttcccttttcctctaaacaaaagattttaaaggactaaccggctgagatatcttttgttgcctcttacaaagattcaagggactaaccacctatgaattttttgtcttaacacattggagcgtacatcc

SEQ ID NO: 234238 - DNA, 438 bp, Glycine max
  unsure (1)..(438): unsure at all n locations
caagctctctagagccaactaaaagctcctaagaaaagaaatatatgctaaatttttctaaaaattattgcaattaacagtgttaaaatacgaatcgaattagaatatatacagaactggtcaatctttatttgaatttataaaatttatatgaaaaaatggagtgtattgacaatatattatttcgttagaacagtaatacacataccgctctacactaaacgaccactacttctatgggggtgttcgtttgacatttttgattttgntatacggttatctcacctcatattgttactgttatgtaaagtaagttaattcacttatataataattattttaaaaattgtatttaaattattttttaatttgttaatagtataaaacattatgtaccaataataatacatgaaaattaaaaaaaaatctattatgtgg

SEQ ID NO: 234239 - DNA, 407 bp, Glycine max
  unsure (1)..(407): unsure at all n locations
agcttctagccaaatggacttaccttgtattaattcctttgatagcccttttgagccttgtttccctttccttgttttgaagctcactacaagccttaaatgaaaaaaccatgatatcaccatatccttaaggaattttggagctttggaattgttttgggaataagtgtgggggttttttgtttcattggataacttgttttgttggctatgcttcatgatgtattttgggccatacttgatgtacattgtatattggttaaatgttggacatgctgaatgaaatgttgtttctcaaaggctatagagcanaanaaaaaaatattcgaaaaaagaaaaagaaaagcaataaagttgagtgaataagaatttaaagggcacaagaatgatgaaactcttggttctac

SEQ ID NO: 234240 - DNA, 438 bp, Glycine max
ctcaagcttgtacgattgtaagaaacatcttgttcaaccttgatgttccttgactttatctcattgaatcacatgtccacttgtaactacaaagtatcaaacctttcaccaacaaaggtttgaagaccatagaacatgtccaaaatcttttgaagaagagaggaatcttctccaccatgtaaatgttcttcttcatcaatgggttgagcaccctatttgatggaagcttgcttgtggagcttctatggaggctggatctttgagcttcaatgagatcctttaatggtgattttccaccatggagatgcagcggaagacaaaggagaagaggtaaaaggcggcgccatccactatggaataagccatggaagaaggagcttcaccaccaagatgagccttggataaaaagcttggagaggatgcttcaatggaggaaaa

SEQ ID NO: 234241 - DNA, 416 bp, Glycine max
acctgaggcctgcaagcttataagaacaaaattgccttaattatttccaatcatgcatgtgaattaggacgcatcaacaagaatcaaggcaaggctattgtgcagcaatcaatggggcaaaacacaccaaatgattataatgatggatggctcaaattctcacaaaggtaaaatcatcactttcaaattgagctttctaaactatcatgacatgtaaagaagaatcaaggatttcaagtcacaaaatgtcaagaacttttattttcaaaacaattacccatttcttgaacatatctctataatcaaagaaaaacatgcaaagtcgtacgtgcacacgaaattgacccaaaatattaaactgaaaatccgacgaaactaacaacattaacaaattaacacaactaacaaattacaaa

SEQ ID NO: 234242 - DNA, 422 bp, Glycine max
  unsure (1)..(422): unsure at all n locations
gctgctgtggagctttatgaggctgggcttgagtttgangaggttctttaatggtgattatccaccatggagatgttacgtaagacaaatgagaataggtgaggcgagccgacttccactaaggaataatccatggaataatgatcttccccaccatgaatgtgccttggatataaagcttggataggatgcttcaatggaggaaaataatgagagcgagaaagagagagggggggagcacgatattgaaggaagaaaagatatagagaagttgaactttgaagtttgtctcacaagactctcattcatcaaagttaaaacaagtgttacacatgcttctatttatagacaaggctccttgagaagctttcttgagaaatcttccttgtgaagcttcttttgagaaacttccttgaaaagtt

SEQ ID NO: 234243 - DNA, 414 bp, Glycine max
  unsure (1)..(414): unsure at all n locations
agctngcatacaagaggtctccttgcgctgtttactttttatncttcnngggngggtcatataagatgtgcttcctctannatccccatgccaagaatgcagttttaacactctaacttgctccaaggtgaagaattctcttgcagcttactatgctacaagaataactcttgatggttagtcatctnttaccaactggagagaaagatcttctggtggaaatcaattcccttgtttcttgctgaacacccttttcacnccacaagtctcgcccttgtattcttcttctacgcgtcagaattcttctctttagcctatnagacccacctattctgtaatgccttttttccttctgtgcaattagttaaagaccacgttttattcttctgaagggatgtgatctcatctttcatc

SEQ ID NO: 234244 - DNA, 363 bp, Glycine max
taaaatgtgcataaactgctggtgtataattaccatctctcgtgaaacaataacacattataaagattgcatttatatggaccgcaataaacattaatcggcttgaggtaatcgactaccacagagtgattttcaatttataaagagtagactgaattctttggccaaaccttttgctttttcaatttggagacttcttactaagatgctagagatcagcttgagcatatatctatgattttcttggattctagtcttataagcactagatcctttgccatcatcgaacatcaccacatctcgcttctgcatgcgaggcatttgacttactccaattactgacaaatacttcaactatttctc

SEQ ID NO: 234245 - DNA, 364 bp, Glycine max
ccctgagacggaacctgcgctccttcctgcaactcgtgcaatgtaagaactcatccctgtgaaagtttcgtttcctcattgcagagtctttccagttagccacatttgcctggtgaggggtgagaatcctcaaagaacacaatcatggagaggggtgagaagccttaactgtaaataaatcccgacaaatagattatgattattgttaattaaaaacatataggtcttgaatatgcatgcatatctaaggaaaaggaaagaaatgttctctcaaaagaaaagagaaggaaaggacgtatataaaagtctacgctattcattttaataattgcccccaattacaaaacataagctgttatttaac

SEQ ID NO: 234246 - DNA, 412 bp, Glycine max
  unsure (1)..(412): unsure at all n locations
ntaataggtgaagtcacgtgcaggtatttcccttagtgatctctcacagggtagaggtcgtgccatgttcttataatgtacaaaatcacaatgttcaaaactataatgcttaaaatcaccaataacagaatgctcaggatgctcaaaagatactaaatgatgtctaactaatctatgaaatgtcctatctatctcaggatcaaagggttgtaagtcagatggatcgcctctagtcatacactatattcagcatgcacaactagttgccttcttatgcaagtaacagagtaggcttgaactacagctaccattaaatgatatccaaatgacttgaaattttgttagcaaccttataagatgatgagaagataccactaaaatattcaaaccacaattctatgtcttactatag

SEQ ID NO: 234247 - DNA, 369 bp, Glycine max
cgaagcaatcccggcgccacgttttcgccggatatttccgacgacacattcattgaaccgcaaaagccttttagaagctgaaaaccaaaaaaaggaaagcaccgagttaaggaactgagctttaaactactatacgcagtgttttaaactaaacggcttggatctaagtgaggagaaaagaaaaacaaaaacggaagtgagaaccgcaatgtgagtgagtaattaaagagtggttgtttcacgggctctacttagaaagggtcgagatctggaaactggaagtgagtgtgagtgagctacagcttactcagacacattcgatctgatttgaagaagaaaaagaggatgcaaagaagacgggtagtgggt

SEQ ID NO: 234248 - DNA, 379 bp, Glycine max
  unsure (1)..(379): unsure at all n locations
atgaccacacttaagtgtttgtgaggcatgtttaancgctatcaagcttaagggtaggaagatccaagctaccttatgtgcgaatccttgcaaaatatgtatgaatgacttctaaacggatttctatcgcaacttttctcatttcataacaattatgaaaagcataacatggtttttaatggtatgtcaacagaaaatacttttactaagtatttatgagtagagagttgaatggattgaacgttgaataccttgcactatatctgaatcattactcgaattgatattcgactaacccaaagaatgggaagacttgcgatcctccaacaaatgttgtgctgaaaacattgcatgacatgtgctcgcatgatgactttga

SEQ ID NO: 234249 - DNA, 338 bp, Glycine max
agcttctcgatatatgatgcgcctgaatcagatgtccatttgaaaagttatgactcatttaatttctcgagagctttcggtgttcaatttttgagcgtctcgatatattatgccgctgaatcggacttgcgtgtgataagttatgaccatttgaatttctcgagagccttccgttgttaattctcgagcgtcctgatatattaatgcgccagaattcgacgtccgtgtgacaagttatgaccacttgaatttctcgagagctttcattgttcaatttccagcgtcctgatatcttatgcgcctgaatcggacttccgtgtgacaagatatgatcattt

SEQ ID NO: 234250 - DNA, 420 bp, Glycine max
atgatgcaacatatggagaggttattgaaataacattatgatgcgctccatgagaggttggatcatatggagaatagagatcataatgaagaagataggaggagaagagggaatgatcgtgttcctagacaaaaccgaattgatggtattaaactcaacattcctccatttaaaggaaagaatgatccggaggcctacttggagtgggagatgaaaatacagcatgttttctcatgcaacaactatgaggaggaccagaaggtgaagcttgccgccacggagttttccgactatgctcttgtgtggtggaacaagctacaaaaggagagagcaagaaatgaagagccaatggttgatacatggacggagatgaaaaagatcatgaggaagcggtatgtgccggctagttactcacgggac

SEQ ID NO: 234251 - DNA, 391 bp, Glycine max
gcttggggtttgaaaacttggtgtacttggatctttacatgaacgacattgtggctgaaacagtgaatctatagttgtagacagatttttgaaacgttgttctgttgacttttttcattttaatttaattcattttactaagcctggtattattaaaatttaaaactaaaactcttacaagttaattataaactttctctagtttactttgaagtggtaatgctctatcatacaacccctttactttcatttttgtccttttgtgtcatcattttgcttagcgaaattcttgcttagttgatattagtcactggattaagattgcatgccttcaaagatcatatttattactcccgtggctagaaaaagcaaacttgtgtgacatggaatg

SEQ ID NO: 234252 - DNA, 432 bp, Glycine max
acactatcaaactaagcttaaacagtggttgaatcgataaaataagagttttttccttttagaaaatttctaacttagaaaatttccttcacctaaacaatgatgatgtatgatgcaaaacatatatcaaatgtactaagatccgtcaatcaagataataaccaatacaaatgtcactcaaaggaattaggcatgtaaaaaccaaaatttctttaaaaactccacttcaagctttaaccttagggtttttaccatgttgctccccctatctctaacagtgttatggcatataataaatttatgtttgaaaaagctattagtgctataaggaaattgagtaaagaacctgctgattggctattacataaagacataccaaagcatacatgggctaggcacacatttgaccctcaatgcaagagtgacaatgta

SEQ ID NO: 234253 - DNA, 406 bp, Glycine max
agcttgaatacaaataaattttcttattatagaatttactatatgaccttaagtgtatcatccaatgatttagtagagtttcgcttcaaagattttgctaatctcttctatatttttccctgttatgcttttgagtagagactgtcttttatagacttaagagaaggatccattataggattagcactgaatcttgatatggttgttgtctcgcatgtgggggcgagacaacgtgacacgctttgatttgagaggaaaggaacaaaagtacagacaacaacatatgctcctctttcgcgtcaaaaacgacttctagcggaattttctgtgaataccctctattctcttctataatggcatttccttaaattcaaatgttagaaattcacaataaagatagggtaaa

SEQ ID NO: 234254 - DNA, 408 bp, Glycine max
  unsure (1)..(408): unsure at all n locations
tcanaccacagcaacacaaaatctaggtgtccaaatttcctcaattcaatgggttttctaggtttgaaaagtgaaatttagaatgaggtaaatttgaagcaaactctcacctcacacaagtccataacatcaatctaaacttgctcaaactgaatttacaccaaaaattccaccgaatcaaaatttgacccctcaacacccaattttgccctagaaatggctcttggattcactttggtcatttgtttttctctctagcacagtccaagctttctcataagtcctaaatgacatttcaagctaggattaactcactttaacctccatttaccacagaattcagacttaaccttccaactctcaaagcctcactctttttccactcataacatcacattctcactttct

SEQ ID NO: 234255 - DNA, 365 bp, Glycine max
agctttatgccttattaagagccctccaaacttgggaatattaccttgtttccaaggaatttttcattcatagtgatcatcaatcacttaagtacattagaaggcaaataaaattaaacaagaggcatgcaaaatgggtagagtacctagagcaatttccatatgttatcaaatacaaaaagggaaaaacaaatgtggtagttgatgccctctctaagaaacacacattgttttgctccctaggagctcaaattttaggatttgataatattagggacttgtatgctttagataaacatttctcttccatttacaagagttgtgtgaaaaaggcccaagatggattctatttggctaaagggtat

SEQ ID NO: 234256 - DNA, 426 bp, Glycine max
  unsure (1)..(426): unsure at all n locations
ggacctataaaactcagctntcggatttgttttcgctgcaaaagatcgattgtgtctgaaaagaggaaaatntgatcatcctgctttgacaaataaaaagccttgggcaaatagagaggatgagaaggaggaaagaacccatgctatgactgtcgttcctacatggccaaatttcccaccagctcaacaatgtcattactcagccaatatcagcccttctcattacccaccacccaatcatccacaaaggccatccctaaatcagccacaaagccgacctgccacacatccaatgccaaacaccacccttaacacaaaccaaaacaccaaccaggaagggaattttccagcgaaaaagcctatagaattcaccccaatttcggtgtcctatgctaacttgctcccatatctactcgataattcaat

SEQ ID NO: 234257 - DNA, 324 bp, Glycine max
  unsure (1)..(324): unsure at all n locations
agcttgaggttcaaatagtangtagcttttgatgtggcactcccacctgcctcaccggatcaacaacaaaacgcacaatcaaccacactctcacacaacggggcacacttctctctctctctacactctttctctctctctctctctacactttttctctttctctctctctctctccaacaccaccttttcttttagtatatttttcccctctgagacaaaaacaaaagtagagaggtttattttttttgggtctttntttattggcgaaaaaaggaaaaaaaacaaaagaaagatagcggaaatgtctgaagtaaaagaccc

SEQ ID NO: 234258 - DNA, 409 bp, Glycine max
  unsure (1)..(409): unsure at all n locations
tgcattattttatttagtttggtaactaatatatttttgtttgaggactggntattaccatgaagcangaaatgttgcccaatcatcacatcaatttgctcctttggtacatactgtggtcactacttatttactaatttatgatttaatctttcttaataatttacttatttctgacagttgacagagtggattaataaaggagggatggtaccagaagagattgcagctgccgcagcatctgaggaatgtgaaagaatattgattctcattacccattgacttatgaaattcaagtacataaaaaatttaaacaaaaaatatataaaataatgtttaatttccaactctcaaagtgtataaattgttggtggtttcttatattttaagcttcaataatccctctttc

SEQ ID NO: 234259 - DNA, 399 bp, Glycine max
  unsure (1)..(399): unsure at all n locations
agcttcctgacaaaagtatgcaaattcatatagatagcagatacatgtaccactggtctattntttaagtattaataagctttcttaaaggcaacaaaatgagaaagtaattagctagaaaaatcaaagacatagaaagaaggaatataagtagaaaaaagggaatggtgaatggaagatcattacgaatgttcacagtttatgttgcatttagaacaagtaacaattgtttcatcaaatccactagcaccacatatatcacaaactccagcctgcaaggaataacaaacacataaataaatatctactacaaagaacagcgaaattaaaaaaacaatgtttttaataaaaaaatctagaaaccgcccattttcatgtggaataaataagtaaagcgtc

SEQ ID NO: 234260 - DNA, 455 bp, Glycine max
cgcgacactgtagaacatctaagctccgcgtagaaatatgtgaaacaaagagagcaagggacattgagtaaagatagagcactggtatgttaatccagcttaaacccttatggactacctcacccctaccttgggggaaaccaataccatcctactagttgagttgtcaaaaggagtcacttttgacttcaagcattggttcctacaaatgttggagaacaacctgtttagtggtgcttcccatgtagaccatatgttgcacttgaggaagttcatcaagttaaccaacacagtgaaatagaatcatgtacggacaaaatacatcaaactttatgcctttcccgtctctctcaatgggaaggcatgagattggttgtgttcattccctaagaatgacatcattacatgcaatcagtgcacaagtgtcttcttaaggaggtacttatctcccatga

SEQ ID NO: 234261 - DNA, 331 bp, Glycine max
tggaaaaaatgtagacggaattcaatggaatcaactcgctaatagaagaaatactcatgttaatgaaggttgatggaggaaaggcaaacaaagatgacatgttaagcggagaaatcaggggaaggaggaggaagaatggacagggataagtattgaggttcagggggataagaaggcatggttgaaggagtgtttggtgggattcttaagtgatctgaaactgtttgagatctcatttgaagctaaaatattttatgacagaagggagataagattacagtacatggggagtgacatggtattaatcttcgaatcttcaaaagaaacagta

SEQ ID NO: 234262 - DNA, 438 bp, Glycine max
ctcaagcttgttatgggacaacatgcttaatgtatgatgaagtttcccttaaaagttttgacatgattctattatcccaccatgtttttataagctggtttttaatgatcaatgggcactgctcccatagtctctaatatagaatataggtggcaaggatagaggatagagaaacaaagagaagaattacataacagagaggatatttgatgagagataagagaatcagagatcagtaccaagcaaataatacccccaattccatttccatatcttgtcttgaaagcctgataaaacatttcagcaatggcatagccaccagcatcattactttcactcaaaatgtaagggatgctattaactgcaaagataatgtatattatgtaaccctatccaactgtaatagatatcccaatagcactgattattcgtgttggt

SEQ ID NO: 234263 - DNA, 384 bp, Glycine max
  unsure (1)..(384): unsure at all n locations
acctgatgcatgcaagctcgngcaattcaccatgatttacagttggaggatataaatgtttctctacatcaaagaagatgacacttgcattacacctctgcacagcagcttgaccaatgatgacctgcataaatgatcagccttagcccctaccacaacaacaacttgaaggccacaaggcaattaacacagaaatcttattcttacattaataagaaaaatgttactatcaatccactctctaacaccatgttgaacgtactttttttattggttcaaaccgaataaattctataaatctcgcatcatgattctctctcttaatttggaggttttaataaaatctaaataatcatgttcctaacagtcctgcagaaatactat

SEQ ID NO: 234264 - DNA, 413 bp, Glycine max
attcttataaatgaagtggacacaaggtttggctcagctctttccctattattattgtgacccacgtcaactagaagatatatcatgtctatgaggctgtgattcaacaatcgttgtttctttcatattgtcatcctcatgtttggccatgaagttatgtctcattatataaaagatcaataatataatttagtttttaatcactacaaaaatcttaacgtcacattattattgttcacgagaatatgtaacattgtgatttttgtgatgattaaaaatcatcacattctgtgatctacattttgtaatggtttgacctccaaagttaaatattattatctctagttggcaaacgatgttcaatgtaacacatcatataaaatgacgaactaaaaatcaacatttaaaattga

SEQ ID NO: 234265 - DNA, 392 bp, Glycine max
  unsure (1)..(392): unsure at all n locations
agcttacgctaaactttcgtaagctgttttagatgattctaancctacaataggaatctgttgacaaaactcagtttaagttagtctaaacctaagagggctgtctcaattgggcttagtgtaacaagagggatctgaagatgaagcttggattgattcggtctgaccagggatctgaagatgaagcttggattgattcggtctgacgagggatcgaggtttagtaatttaggctacaacatagaacacaagagcatgattgattagagaaatatatttatatgcatcaccttgtttgtgagtaagacccaacatttctacctattgctgtcacttttacttactttgtattttacagatttagcatataagcttagtttgaattctgtttg

SEQ ID NO: 234266 - DNA, 407 bp, Glycine max
tcatgctttctggtcaactggcttgcatatacgaacatggagtgtgatatgcctattcatacattatattccaaatttcagagactgatgcatacactactactcatagctagacgttcactcacagtttaagatcacactctcaccggttatggtttaagcttttctttctcaaccaacttgtctattgcctaacaattctaattgcaagttcacattcttgttctttttttgactaacatatatacttgctcaaacttatgaaaggaaacacatactccatctcaatcatgcattcaatccaagatcaattcaatacaccaattttcacaaaaagataaaaatgcttcactgcttaatcatacaagtcaagttaaactgtttcatatgcttaaaacacgcatact

SEQ ID NO: 234267 - DNA, 398 bp, Glycine max
  unsure (1)..(398): unsure at all n locations
agcttctnatccaagggtcatattggtgttgaagctttttccatggctnatnnccgaatggatggcgcctcctcttacctcttcttctttgtcttccgctgcatctccatggtggaaaatcaccaataaaggacccctttgaaactcaaagatctagcctccatagaagccccacaagcaagcttccaccatgaagcttttggatcagggagctaacaaaatatttcatgcaggtggaccttcttctagaagctttgacttgcagcaacctcctatccctcttccatattcacatagagcaatctccaacaaaagaatggaagaagtggaaaacgagatcttggataccttcatgaaaagtaaagtgaacataccttttgctatatgccctcaagcaa

SEQ ID NO: 234268 - DNA, 248 bp, Glycine max
ggaagaaggatactacaccaacttccacaccttgttcagaggcatataatatgactatttggatgcaacatcatgatcatcgtcactcttgaactccattcatcattgaccatatgggatgcatggtggaataatgcgataagtgcaatttccatactaatgatcagtttatatgatatctcctatcacgttgggtggatggacaagcaaacaactatatattcttgtctcgactccaaggctcaaaa

SEQ ID NO: 234269 - DNA, 420 bp, Glycine max
tgtgatagaagtccttcaagactgtgctcatttgttcttttaccttccacaactctttgttgttgaaagacaagtgatcatgatttgaagccaagagcaagcctcttaatgttgatactggagttacaggtgtgacgacattgatcttcacctcgactccacgttcttcattgagatttgtaattatgaaacaacaaggacattttttttaattagttatagcattaataacttcaaaattgataataaagacaatttgaaaggtaaaaccttgaactcaacaaacaaaagtgtggttgtaatacctcatatttatctcagacgtaaattggactatcatcaggagtatcgaaatcctcagcttgacaatcaactgaaaaaatgggcagcttggtggcacaaaaagcacacatcatgtct

SEQ ID NO: 234270 - DNA, 325 bp, Glycine max
tcctaagctcttgaccttgactgataaaacctctttttaagcgaatgcgcctgactcgatcctatgttttactaaagcgaaacaaaacccagtgcgaattaaaactcttacatccattatgggtggaatggatgaatgcctgaagaaatgcacatgacacagatgctatttataaatacgggagcccgggaaattgtccccttcttatatacaacattccggtatcataccgcccgacgtatgcatttaagaaggggacacggacccttcatcgggttaacaaagtaaggggatcaaaaccaatcctgcatgatgctatgtaaag

SEQ ID NO: 234271 - DNA, 233 bp, Glycine max
tgattctttgttactaatgtcaacgttcaaatgtcgctcgttcccttttatttactgctaaaaaaaatcatagctttcataacatggaagaagtcctactaaaatcggtattatagaaaacatggatgaaatcacatttaataagcgcaactacctatctttcagagtcctatggttaatttgtcttgactccttatgtggtggggttttgtttaataaaacttatactgttt

SEQ ID NO: 234272 - DNA, 395 bp, Glycine max
acctcataaaaaagatatggcttgttcaagccccgaggcagtggtactagaagtttaatgagtttatgagccactcacgattcaacagatgtgacatggactattgttgctacgttaagaaatatactaatagctatgtctatccttgtccggtatgttgatgacatgttgattgcatgatctattatggcagaaattaacaggttgaagcaacagttggcagaaaacttctggtatgagaattcttagaaacatatcagaaggaatcttgaagctgcctcatgagaaatatatacacaagttacttgacaggttataccttgaagattctaagactaagaatacccctttgcgatctcatttgaagttttcaaagaagcaatctttgtagacag

SEQ ID NO: 234273 - DNA, 413 bp, Glycine max
tcgtacttcttatgtaataatgtgtttgcacccatctttgctaatgcatcaacttgtccgtccgtccattcatctatcttcagtgaaagaacctataataccttcaaattatgttaggatttctctgttcagtgtgccagttattcatgcacaaataacttggtgaaatggggacaagaggttcaatactactccctttcatcactttagaaagcagataaagtcaacatggagtgcttccgtattaacgactaagatctagttcggataatcttcttaatacatatttataagagaagacactaaaatgaatcgaggaagtaaaataaattatgtttctctcataagttaaaagtaaattaatgcacctcaactctttctaaagctccctcatttaactattatataagtcg

SEQ ID NO: 234274 - DNA, 203 bp, Glycine max
cagaaaattagagtttattcttttatatcttagcgagaagtgattctcctaaattcttgagtgattcaagaacactttggctggataaaaggactttcacaacctttggggggtggcctctccttgaaagaagggattctttcctttctttctaatcacccttgtcctttcaaaccacattcccaaaaaatccacctttgccc

SEQ ID NO: 234275 - DNA, 358 bp, Glycine max
tcttgaggaagcctcttaatgaagcttcttgaggatatctcatgagcttcctcggtaaaaatgctgcccagccgacattatccattggagcttctcaaaatttggtctacagcttcacaagacaattgtccatgatctgaccgatgggatcttctagaagatgtctggagtgtgcgtgaagcttccattcccgacagcatttcttattttagcatttcagcctttgctttcgtgtagcttaagaaaaatgctattacttctcctttctttcttccaaagccatttctaacgtccctagaactatctgcatcacccttagccaccgcaaaccattgctgtgctccattgaaactccaca

SEQ ID NO: 234276 - DNA, 362 bp, Glycine max
  unsure (1)..(362): unsure at all n locations
ngcttggagctaattcgaacgacaatattctttttctcggatgtatgaatgagctccataatctattgagacgctcaaaattgaattctgaagctgagagctaattcaaacgacaataactttttactcggatgtctgattgagtcccgtaatacatcgagacgctcgaaattgaatgttgaagctctcagcaaattcaaacgacaataacattttactcggatgtctgattgagtcccgtaatacatcgagacgctcgaaattgaattttgaagctctgagctaattcaaacgacaataactttttgctcggatgtctgattcgagcccgtaatttatcgagaacgctcaaattgattctg

SEQ ID NO: 234277 - DNA, 392 bp, Glycine max
  unsure (1)..(392): unsure at all n locations
acttacaaactaagcttaacaatcaatgtcgagcgcctcgttattttacaggactcaatcanacatccgagtaaaaagttattgtcgtttgaatttgctcagtgcttcaacattcaatttcgagcgtttcgatatattacgggtctcaatcagacattcgagtaataagttatccgcgtttgaatttggtcatagcttcaacattcaatttagagcgtctcgatatattacaagactcaatcatacatccgagtaaaaagttattgccgtttgaatttgcttacagcttcaacattcaatttctgagcgtctcgatatattacgggactcaatcagacatccgagtaaaaagcaatgtcgtttgaatttgctaacgccttaaattctttttc

SEQ ID NO: 234278 - DNA, 381 bp, Glycine max
  unsure (1)..(381): unsure at all n locations
gcatgcaagctgtctggtgccatttctgcaatgtaacacttggaaagttagttttaccaagaaatgctacccttaaaacaaaaatggcatacaaccttctccaataaatacaaacatcaatgtaaatctagagcaagcttatgcgcatatttccttacgaacattcactcgcacaagatattcttctaactaagaaaaatgcacccatgcacaatcaaggcactttcgttacctacattatttgtatgtacttccaaggtgtactacctacaccacatgcatttccttggctaaatttacatacatgcatgctcaaagcctcttggctaccanaagttgcacacatgccaaccttaagatgaatcttggctatctacacaa

SEQ ID NO: 234279 - DNA, 350 bp, Glycine max
  unsure (1)..(350): unsure at all n locations
agcttatcgtaatcgattacacaattctttttgagacaatgattgattttttaggagtctttgctttaatcaattactaggtgatataattgattacttctctcttaaaaagtgtttcaaaagtgctcaagaacactttaatcgattacttctttgaaataatcaattacattgtatatttgattgattacaggcggttataaatgttttctctataaatagccaccttgtgttttaacttttaacaacttttgtgtgtgctagaactacgagttgaaatttagtaaacaaagaagagaagaaanagggcttaaatacaatgtgactcacaacttctaatctttgattat

SEQ ID NO: 234280 - DNA, 411 bp, Glycine max
  unsure (1)..(411): unsure at all n locations
tatcgtaaccgattacacaattatttttgagacaatgattgattttttaggagtctctgctntaatccattaccagtagatataatcgattacttctctcttaaaaagtgtttcagaagtgatcaagaacactttaatcaattacatcaaaaatctaatcgattacattgttcttgaaagttttccaatttttgggaagaacactttaatcaatcaaaatggtaataatcaattacttctttgaaataattgattacattgtatatttaattgattacaggcagttattacgagctggtataagctagaataacattattagaaaatatgttttttacatcggttatttatgactttcaacatcgtgttttaaatcgatgtngaaagtaccgacgttgatagtattattgg

SEQ ID NO: 234281 - DNA, 297 bp, Glycine max
cgcacgtgcttaccccaccagtagcacgagttcaatattggtgatgtgtctcccatctttatcgaggtataccctgcattgaagagcatcttccagccgtcttatctataatatcattgagctgttctcctttaatacgatacggcgcctttctttttgtaaatgttttgtacttgagaactattcggctcactatcatagatgtatagatgcttcctaaacatggtaacccttgagttcttgagagatactattctataaagtttcagctattaatgatatcttacattttccctt

SEQ ID NO: 234282 - DNA, 308 bp, Glycine max
agctttgcacatagtggttgagatgttgggagctcttggcatccggtcctgctgatgcagattgatgcgctggagtatatgatgaacggatgtcatctgctctaacctttgttttcccttttctcgatgccgtttttaatcaaaagaactcaaaaattcccttagactacatttttttaagttgaaaaaaatataaattaaaggctgaaattaacgataggtgcttattatgatacaactcgcttaatgtgccctagaaatataacactttggcttattgcaataaggtgctctttatccgaatcaat

SEQ ID NO: 234283 - DNA, 401 bp, Glycine max
ttctcccgcatttatatataaatagggggacaagtgatgtgaatgagggttcacccacttacgcgcacttgtatctttttcaaaatagcatgtaccacttggttacgtaaataaaatgtaagccgacacgctaccaaaacggtcccttaatggtgacatagggaatttctggaggggctctaccgctcttcaacattgttcgttcggacttaatcgtacttcgaacctcaacgggtgagtacctatacccaaccttttctatgcattctatgtacccgtggtggcccgcattgtgattcgtgtatgtttattctggtttcatctactgattatacccccttttgacgtgcttaagccattttatttaagacattactcgcttaaacctaaaaataaaatat

SEQ ID NO: 234284 - DNA, 387 bp, Glycine max
  unsure (1)..(387): unsure at all n locations
agaccatnnngcccagagctagtctagtcttattctatttaacccttgttccgaattacaaccactattatggtggaaatctatttttaactcaagtcggggtgatggctgacatctcttctatggcagtcgcggaaaggggcccatcaaaacttcgctactccaatatgtagcggtcagatattccataaatatggacatgaagcttatctctttgactacagacatgatgatgattatgtcccactcaacccatggattacccccaataattctaatctcagcttcacccacccccatcagtatccaaatcgaacccttattcttattcaattgaattctcatacccactcacaatcaacaaatttgtttctacttagtcattac

SEQ ID NO: 234285 - DNA, 383 bp, Glycine max
agcttctaatatgtgtgtgtgtggtgtttacttatttttacccacatgatcatgaagcgctatttaagaacaaagatgaaagtgtgatcatgcgcatgtgctgtgtttgacaactgatgaatgtcttgaattcaaaatatgtgtctaaaatttcacgacacactctccaactgttttacactaacgaagtacgatgcttggagttattacttaaaacatgcattacaactttgtataactaagtcatagtctccagattctaaattgttagaattgaaaaacctgttttaaatactgaacgatatttgttaaatctttaaaattataaagtgtgaaaaatcatttcttgctttaacattttctagcaagaaaccagaagattt

SEQ ID NO: 234286 - DNA, 404 bp, Glycine max
aatcctattcaggggggaggaattgatgcaatcctaccccccagggacaatggatagaagactccaagaagtctgggccaaagatgcaagagaaggccctagggttctcatgagccttagagtagattttatgcccatgggctaagtatgagcccacttatctttgtacatattagattaaggtttcattatttttgggccttgtatttagggctccatagtgtagggagggtaccctagtaatgtaggatttttcagcccttatattttagggcaccagactagttgttgtattaggggtaattttgtaattctacatgcattaagtgcactatatgatgtgtgtgttgggagataaatttaattgaattgcgagaagcccattccaattatattttggacca

SEQ ID NO: 234287 - DNA, 239 bp, Glycine max
tgaaccaaacccgagcatgcactgaaagtggccagcttcttttcgctcaacagctggccttaatgtacgaatatagacttagcaagactttaactgtgtaacataaaaaataggaaatttataataatatttaagtatgctattattgaaatattattatataattagatatataactataaaatttattttaatattaaaaataccaatcttataaaatctattaattaaataattag

SEQ ID NO: 234288 - DNA, 401 bp, Glycine max
acactgtgcgatactctagctctacaatggagatcgaacgccttgtatattgacatgtattgcactatccatgaaggaagatcttgtgcgaaagaggatttcctatgctgttagaggattatttatggtagatgtgcactgggtctactgtggtcctttagaaattcaaaacgctttgtatgctgtcggagagtttgtgcttaacactccaaatagagaaagactgcgctttccacagaatcatgagtgaccatggcagagaatatgaaaaaagtggggcacttaattctgtacatctgaatgcatatctatttaatgtcttgctacataacaccacaacaaaatgggatagttgagaagaaaaacgtgactttgtattaagatgaatggaacatgcttta

SEQ ID NO: 234289 - DNA, 350 bp, Glycine max
tcctgttaatctccacattaatcgaacaaataccacataacacggaagctagaggtgactggccagctataaactttttgttaataattggtttttgccacttggtaaatcgacttaccaagtggtagggttattcgtattacaaggtcttacataataaacgcaccgacgcataaaatgtgtctctatgataatctattactcactgggtgtaactatattaccaatgcttgaattcgaatccatgaatacaatgggagtctctcgtaaaacattacaattctttgccatctaattcacatactgaatgggtcataggtaatacatataccatatgtgcttacgttacg

SEQ ID NO: 234290 - DNA, 399 bp, Glycine max
  unsure (1)..(399): unsure at all n locations
cagcttaagaatattttgattatgtgaataaaatacttatttttttaaaaccctcaatagcatgtttcttaaatatatataattatttagattcttgataggaagggtttagaatcagtggaactctataagttntatgtggttggatggtatttgattatacatgtatactgcgtatcattgtttaaatggttaaattattttatttatgaataatttgattttcaagacgattattattgcctggactttagcaaattttcatgatattgggtactattctttgtgcgcatagtgacgtgattggattataaacgggacccattacctctatgcttttctttttctcctttctattcaagtaagtttcataacaactcaacctttaaatggacatac

SEQ ID NO: 234291 - DNA, 387 bp, Glycine max
tggagtcatattcacaaatgatgcttgtaacacccttatttcacgcaatctgcaacccttgagcaatggcaagcaacttcgcattcagactcattgtgaagcggcaacaaccaaataaactgagatatcaatttcccaaattatcacgaatcaatctgtcaattccagcctgactcggattgcctaaggagcttctatcagtgtggagtttgtaatcaaaatcaaccggaggagaccaacacaccatacgactaggaagacttgagatattgcgatgagttgcttctgcattaatggttcgaacgagagacttagtcttgtcaatttgacaagccagggtggccacgcttcatcatcgaagatttcaataattcattgaagccaaat

SEQ ID NO: 234292 - DNA, 324 bp, Glycine max
gtgcgtcctcagattcttcttgtgggactatgctcaatctataccgccctcctgcgtttagactaacttagactaagtttcatcctcagatccctcttgttggactagactcagcataggtagcttacaaaagtttagactagtttatcctaagctttgtcctcacatccctgttgggggactagacttagaccaaactacattattgaaaccaaaacttaatccacagatccctcatttaagactaagttccaatcttgcttcattcaagttctatggcaacagtacatttcttaatgctaaagtcgcctaactatgctcata

SEQ ID NO: 234293 - DNA, 344 bp, Glycine max
  unsure (1)..(344): unsure at all n locations
gtgtgacctgagggactagatgggattatgtaatatttgtatcncgattgacagcgtacgggtgccgcattatatataacggattgaacaatacctattatcacaccttagagaaagatgaattgagcttatctatagacatagtaaaattagataaaaagattgcctgtgatggattgctgggtgtacgatgaaaacagaatcgtgtgcgaagccacttaattaacaaacgtatacacaaactaaaagtttttcgtgcgtttatttgagctttccaaatggttaaagactaacaggaatataaaatctatgttaaaggatatagcttctcataataatccctt

SEQ ID NO: 234294 - DNA, 371 bp, Glycine max
catttgttgcttttattggtaaattaaaaaaatatggccttataatatttcgaactaaaataagaatttaattagaatggcatccaatcacaaatggtcatttatggtaaatttattggtttttataataattactttaaaagttttgagatcttttctgattgtcttacaatataaaaatctctgcactgccagtgtatgattaaactcttaaaaaaaacaaaaataagtagagtttaatacacattgtttgtcaatataaaagtttttgcactatcaaacaatcagaaatcatctttagtaaattggtcaacggttatagtaattgttataaaagtacacaaatttacaatcatagcaatttgtgctta

SEQ ID NO: 234295 - DNA, 438 bp, Glycine max
tcaagcttcactgaaattagaagaagaccacgaggcccattctctatagtcctcacaagatatgcacttgttaaggcacattttcttgcacttgttaaggcaccctctaagaaatcttgacttcatagttacttgcaagagagagagagatagagagagtgaaaaagaaagagatgaataggattaaaagtgcagtgagtacttgagatcgaaagtgataaggtatatataattgtggcatggcaagaacctatggtctggagcattaaatggttgacatgattggtagcctatgctatttgctactaatttaattatggggatcagcatttatatatatgtagtattattcaaatgtgccagttattgaatgatagttgctgactttgttggctagagtaatattattgtatatatctctgatacgaaactgtacga

SEQ ID NO: 234296 - DNA, 310 bp, Glycine max
agcttcatgatgatgaaccatgcagttttgatgatgctcaaagcccaagtgattgattcaagattaattcaagacttcaagatcaagcatcaagaatcccatccaagattcaagattcaagagaagaaatcaagaagccacaagtcaagacttcatataggataagtattaaaagaatttttccaaaacccaatagcacagttttgttttacaaaagatttttctcaaaatttctaagttaccagagggattactctctgggaatcgattacccaatgattagtttggtttcaaaatgtttcaaatgatt

SEQ ID NO: 234297 - DNA, 430 bp, Glycine max
tcagaccaaggcaacacaaaatctatgtatccaaaatctctcaatttaatggattttcaaggtttgagaagtgaaattgagaatgaggtaaatttggagcaaactctcacctcacacaagtctataacatcaatttaaacttgctcaaactggatttacacctaaaattccaccgaatcaaaatttgactctcaacacccaattataccctagaaatggctctttgttcactttggtcatttgtttttctctcttgcacagcccaaactttctcataagtcctaaatgacatttcaagctaggattaactcactttaacctccaaatgccactaaatccagatttggccttccaactctcaaaactcactctttttccactcataataccacattctcactttctaaccctaggttaactctacccttca

SEQ ID NO: 234298 - DNA, 399 bp, Glycine max
  unsure (1)..(399): unsure at all n locations
agctttgagccaaaatcctgactcactataaaccttgtacccaggtgagaatgtcaattcttaccctcggaagcaaaaaaaaaggggagagggaaaatttccaatcaaagaggaagcaaaaaaggagagaaggaaaatttccaatcaaaggaaaaaaagagaggaaagggaattcccaatcaaagagtgggagaaagcaaaaagaaaagaaagaaaattcccaatcaaagaatgggagaaagaaaaaagagaagaagaaagggaagaaagttcccgatcaaaaaanaataatatgcagaaaggtctttggaccggacaatatctgaacaatacagaattgtcaccaaatgaataanaagaaggaaagggaaccatgacctaaaatggtcttcccccttt

SEQ ID NO: 234299 - DNA, 424 bp, Glycine max
cgagatgaggaagtgttgaagggtgaaacttcctgcttttattgttgactcacagagtggtacctggagatatgtcgcgggggtcaggagaccttggggacgtcaagtggggtgctattgcccaaaaccaagcttgaccaatcccgacccaacccgggcatagtcggtcagtgagaacctgtgatgtacctaagcaggcgagctcctggcagtcaacagataaaaggaaaacaagaccacaaagcaaggaggcttgtggtggctggccagctgtgaattttgtgtaatatgtggattgtggcctctggtaatcgattaccaaaggtgagtaatcgattacaaggcttaaaattgaggacaggaggctaagatggtctctggtaatcgattaccaaggggtgtaatcgattaccaggcttgaaaa

SEQ ID NO: 234300 - DNA, 337 bp, Glycine max
  unsure (1)..(337): unsure at all n locations
agcttgcnctatggtttataggcggacataatattgttattaaacgaataactgcagcacaatttcaaggatcaacctaacacaaagctagaaaatcgactaaaagtagcaccagtaatagttttcttttgtgtcaaactaatttgaaattcctagtacttcatgaaaataaagctaattcctgtcaaattgagacaggtttgattgcaattttcaataataaactcttatccgatgcaaacttgttgaatgccgtttaaataagatgctttgcccacagggtaggaaaaaagcagtagttntaggagtggacaaaccaggatccacgtcgggcctt

SEQ ID NO: 234301 - DNA, 435 bp, Glycine max
ctcaagcttaatagctcgtatactgatcataagcacatagcttttacacactctatctattctagtcaacacacttactgaacatacacttactacaatgcataaagtataaaaagtaaatacactcgaataagcttgatctcacaattcttaacagcctcacgaacaacatggaaatcacttgaatatgctatgtctttccatgctaaacaggattttcagcaatgacaattgcttatttactgtcacaataaatctcagtagcatccatcttctccactcccaaatcaaacataattttcttcaaccaaatggcttggtttgttgctacagctgctgctacatattcagcttcagcagtagattgagatacaatgtcctgcttatttgagttccaagagaacatgtgtgagcctaacggaaaaacatattcag

SEQ ID NO: 234302 - DNA, 398 bp, Glycine max
agcttttctgactaagagaacccttatgtcaaaaagaggattcgcactgtcaatcaccggaactttgttagcttgtttaaaaagctctaaacaaagatatttaaacccacatgcattctaagataaacacttaaaagtaaatattgcaacagttaaaaatcttttgaaatactctcgtataatcatatactgataagtgataacgttaacatgaattacttcacaatggaattaatctggtcagaatatatacaccactaattccgcatctttgatgaaagttaaaatctagccggccggatggtatttctaaggaccatattgaagatttcttataaataaacacacgagatgtattacgtgaaacatttatttttataggacaggtgagaaaaaaa

SEQ ID NO: 234303 - DNA, 402 bp, Glycine max
  unsure (1)..(402): unsure at all n locations
tgcactgaatacttgatgatgatattataaattgactataatcattgagtggcagttcacgatattatacaccaattattacaagccaaagtctctgaacattttttggtgcttctttttcatcatttcatgatattggatcaaaatggtcccccacttcaatattttcaattcgagattgactcttctcatttatagcaaaagatccaacatgacactnttgctttcacgtacgataagcgaaatgctgatggcctctatcataaatacacactactctatacaaacaaggtgtaaaacttcaccttaaaattttaggtaactatgccaaaatattgcaccgcgcaaaaacttataacgtttccatttcataacatatgtcaggactaccgagaacattaa

SEQ ID NO: 234304 - DNA, 339 bp, Glycine max
tgaaacaagtgctagggaaagagatactcttctcaagaactttcaggaattggcaaagaaactggaagatctttaaaaggatttgaagaagctgaatgaacttcatgattattaaaaagaagaaagatatgatctatagagtgtaaaagcaagcttcatgatgagtcaagattgattcaaagagttttgatgataaccaagatgatgacaaaaagctcaaaagtcaagaacacttcatgataacaaagatgatgatctcaagaatcaaagaatgagtttaagatggaatcaagtacacttcaaggatcaagaggaaagttgattcaagaatcaagaatc

SEQ ID NO: 234305 - DNA, 421 bp, Glycine max
  unsure (1)..(421): unsure at all n locations
ntacagcagatgttagtaatgacttattaacctataattaaaataacttaatgccattaacctagggaattaaaacaaacttaatggctgagtgtaactgaaattgtggcaaccaaaagtcacccccaacagccaacaagtcagccaccatttggtctcccaaaaggctgatgcctaggttgccaattgggcccttattacaacttgaactaaagcccttttagttgattaacccaaaacatatttttggtcagccaactttacaaggattgggccattatttagacaaactaaacactctaaaattgaaataaagtggtgtcatttagtcctcctccatttgggccatgatacaactcacaaccttggacttttctccttgaaacttgggcttgtattcaaatagtatggacagcacttg

SEQ ID NO: 234306 - DNA, 392 bp, Glycine max
agctttatcaaagtgagctttgaggttatatttaaactcgatccattgtccataagcgcctttgcgacaacatggtccatacactttatcgatacatgaagagccttgttatgtcctctcccctctacaggaatctcttcttccgcaaacacgatataatttgcggtggttatatgattaacgatgccttcaaaaccctccactgagatatcgtgggctacatgcgcatcattgaggacttttatcaacagcgtacgatgaggctcggagttatgagcatttaagcaacgagatccttgctggagttttattcagtggctcgactaccttaaactagctttgttggatgaagcgaaggaactcatgcgcctcttccaaagtcaccgtctttc

SEQ ID NO: 234307 - DNA, 415 bp, Glycine max
actacgtatcacacgccatgcaaccaacgttcatacagcgcttgctatcactttctaaacaaataggcaaatgcaaaaaactctgcttgctcaccaaccaaaatcacagcttgtcccacttaaagaccccataactgatccttcgatccaatacgttaaacgttggatcgactgaaaaattatactggaagattattatacataagcctactttgcgaccgccgagatctactagcaaccagccaaaactcattctggactactatgtccacagcctaccacacacaagcatttgtctgcacaaagccaaaactctgctgcacctattgtgacagcaaaattctgcataagtgcagattccgaaaatcacccttactctcatacaatcttgcccacatacattcctacaaggacc

SEQ ID NO: 234308 - DNA, 361 bp, Glycine max
atgatcatgttagccacttgatttaatgcatgtatatggttgccttgatttgacatcatgtgttcgatgaaaagttcaagcaaaattacctcatatcaaacgacactggttttgttacctagtagttgtactggatactttagctgatgataggagcagtgctatatggtgttagccaaaattgaccacaagttcactgcaattaactaaaatctaattatgttaatctaattagataagctacattagagggatagctaggggaaaatatgtgtggatctatgtacgtatgtatatatatatatatatatatatgtatatacatacatacatagaggggtagataaatgtcttgtatcca

SEQ ID NO: 234309 - DNA, 397 bp, Glycine max
tgattacaatggatattctgctggtacactttttgtttctttaaaattataataaaccaccaatttcgttcctttcaataataataaaactactatttaagcaattcttgaaatgtcgaatattcgatactttagtccttaagatggtgtattttttgtaaaatttacggaccgaggttattctgctggtactttttcttcttgaattattactccctgtgctagtagctcctagagaaatgaaactatttaactaatttagttatcccctctcctaataattcctagagaaattaaatcattaaaataattcctgaattattgaatattcatcaatcatcacgttagtccttaagttgatgctgatatattttagtagtatgggttacgtaatttg

SEQ ID NO: 234310 - DNA, 363 bp, Glycine max
agcttatgaccatgtgaattgctcatgttgttccattgttcaatttcgagcgtctcgatttattatgcacctgaatcggaccttcgagtgaaagggtatgaccattcgaattgcttaagagctcccattgttcaatttcgagcgtctcgatatattatgcgctagaatcggacctccgagtgaaaagttattaccattcgaattgctggagaggttctgttgttcaatttcgaccgtctcgatatattatgcgcctgaatcggaaatccgagttaaaagatatgaccatttgaattgctcaagagcttccattgttaatttcgagcggctgatatatatgcccctaaacggacctccgattaa

SEQ ID NO: 234311 - DNA, 416 bp, Glycine max
  unsure (1)..(416): unsure at all n locations
cactatacaatacgtcaagctttgagcaattcagatggtaataactgttcactcgttattccgattcatgcacataatatatcgagacgctcgaaattgaacatcggaagcttttgagcaattcaaatggtcataacttctaactcggaggtccgattgaggtgcataatatatcgagacgctcgaaattgaacaatggaagctcttgagcaattcagatggttataactattcactcggaggtccgattcatgcgcataatatatcgagacgctcgaaattgaacaatggaagctcttgagcaattcaaatggtcataacatttcactcggaggtccgattcaggcgcataatttatcgagacgctcgataatgaacaatggaagcatttgaacaattcanaaggtcataacttt

SEQ ID NO: 234312 - DNA, 384 bp, Glycine max
agcttaacaaacttagaaatcaagtgtttatgaattccaaaatatagggggagtaaacgcatgcacattttatctatatacaattgtttgttgcttgcttgaatcttgatttcaggtattgtattgtcatcatcaaaaagggggagattgtagatgcaattggctttgatgttttgatgatgatcatgatgatgtgttgcaattgatgcaaatgggcttttcaagattaaattcaagacaatacttcaagattacaagtcacaacatcaagatgatcactagaatattaggaagggaattcctaattgaattagcaaaggtttggccaagtgatttaaattaaaaaagtgtttctcaaaggttttactctctggtaatcgatta

SEQ ID NO: 234313 - DNA, 413 bp, Glycine max
ttgatggtgtcgagaagaaatcactatgtttgtcatcatcaaaaagggggagaatgtgaatgtatgtatacatgattttgatgatgccaaagaagaatcaaacaaagttgcttcataggataaacatggcttcaagattaatacaagatttcttcaacaaacaaaaccttgcttaaagattaactcaagatcaagccttgccttaaaacaaagtgctgtcaagacattcaaggctctggtaatcgattactagacagtgtaatcgattaccaaaagacagggttgagaaatagctattgaaaatggttttgaacttgaattctcaatatgtaatcgattaccatatgtctgtattcgattaccagcaacaaaaacttctgagattcaaatccagaagtcatgacccttccaat

SEQ ID NO: 234314 - DNA, 376 bp, Glycine max
agcttctcctttccagcaaagtggtattatagcttaggctctgataagaaattcctctatagttatggcgagcaatgaagcaacatccttccaagttccacttctaaagaggagcacctatgataattagagcatcaaaatgaaggccctacacatgaagtttgggaaatggttgaaaaaggctataaagagctacatatgagacttcattatccccagcacaaaaagagactttaaaggattcatgatagagagacaagaagctctcttcctcctctatcaagcattagatgatgatgcgttcgagaagattctaatgcaacattcgctaaggaggcatgggataagctcaagcctctcacaatggagaagacaa

SEQ ID NO: 234315 - DNA, 410 bp, Glycine max
gtgcttctatagtatttccttttgatgtgtttggtattattaaaaaatgatttgttacaataaagtgttgattgtcattgacaagtgtttatcaactgtgtacgataaacagggagttaaaggaccggcaaaacttgtacattggtcggaacctgatgatgatcccttataccaaatggcattgacgttcccaaagcttttcctcaagcctatgcacgtgtcgtgggattcaactgtgtttggggtgtataatgatgaaattcccttgtacataaagcatgaagatatttctgaaatagcacacgttggtcaatgtctcaatatctttgttatacaaatatggattctgtaagtcaatttacatcgcaatacattacataattgattgctgtaaattgatgcataattta

SEQ ID NO: 234316 - DNA, 206 bp, Glycine max
atgaaaacaatgaaaaccccgaaaggtcaaacctttgtaaatcactccggaaaccttcgggagcgtacgaagcgccttgcttggattttttcacggaactaatttcctcacaaattcaaagaagaaaagttccaaggggctgaacctttttacttccttctcccctattataaaaaagggggaaagcttgcacccactcgccagcg

SEQ ID NO: 234317 - DNA, 379 bp, Glycine max
  unsure (1)..(379): unsure at all n locations
taaagtangcccgagtcattcatgcctatgagatgtttttgaagtattggcgatcaaaattgccattccttggattatagggttgaaccaagctcatgcttttacaaaaaggttcatcaagtcaagttgaaatatggaagtaaccgtcctgcataattggggcaaaagatgaattgagtcacatcactgcttcgtctactgccaaacatatttaggattggtgatgtccttgttacttccagtttcaccttgacaaagatgtcatggaccatgttgaacatctaaattgattcaaccacatatacttgataaaaatttgcaatacttcaactatacatcatttgcatacattcatgctttttattgggtgcaatggtca

SEQ ID NO: 234318 - DNA, 304 bp, Glycine max
acgagaggggaagagggtgtcacaaacttattcatcaaaaagcacactacacaaccatgctttttttggtagctcgatactgacaacccaagatattcatgttgcattcttgaagcagcaagactttgcatatttcccaataatccatagagggatattttcaaagccatcatcattgcaacaaataactaccgccagcctttctttatcttgctctcttccttcaagaagctttgttgccaccgaatgatcaccttgtagcccatacaacaacccaatttcatccatattgaaaacatctttc

SEQ ID NO: 234319 - DNA, 398 bp, Glycine max
atctatcacgtacatcgataatttgaatcgttatacttggctgtaatattgctatcacattatatctcaatcttactataagaatatatcagatatagaggaaaagatgagtaccttttcaatgaagtcaatcgtttcgctgtctgatatcttctttccttgctgatccgtgacatgaaatactgtttattccattaggtaaacgtgataaattcgtatcatttttattgacgagacaatattttagctaacatgtccataagaactataagtgtgtctgtttctgtctagtactatatatactacagagagaaatactctttggacattttcatacatagtcaagagataacaaaatatataacatcttgataacaaccagtgttctctatattacc

SEQ ID NO: 234320 - DNA, 455 bp, Glycine max
  unsure (1)..(455): unsure at all n locations
gcttctacactatccacaaagcacaccaacaccttttctaaaacccctgttacacccctctctgaacccatacatcttctgctctcaaaccctntgtctcctcttcaagatgttaagcaatccttgaagagcatagaagaaagcaaaaacattgaataggaagcaaggataatgttcataggctgctattaaccatttggacatatggttcacaaataaaagcaagaagaatgactacaagatgatatatgctataaaaaatgttagggtgccagggtatttagacttggaatggttctttcaacaagggttcaactttcccaatctgctggaagtacaagcactatcaaagctagtgcagatgagagaaacattttatccagagctagtctacacttgtgctcgtgttgaccatgaaggtaacttcttctccactattaatggagtagatatgg

SEQ ID NO: 234321 - DNA, 468 bp, Glycine max
  unsure (1)..(468): unsure at all n locations
ccttgaaactaagctctccccatttccttnatagggggagaggtgaaagggattttgttatccctcctgataattcgagaatcacttgaaattaagaaaaaaaattgtttccgtgaagaaaatccaagccgaggcgcttccgtaacgtttccgtgggtgatttcgcgaagattttcaaccgttcttcgacgttcttcgttcgttcttcatcgttcttcggtcttcaactggtaagttcccgaaatcaaacttttcaattcattctatgtacccttagtggtcctcatttgttttcacgttcatatcatttactttctgtacccccttttgacttgcttttgtcatttgcttaagtcattatcttgcctaatcaaaaaataaaataaatttccaccgatcatttgaattgtaatatcccgtaatntttgttaaaatgaaatccgaccgttcggtcatgccgtaaccacg

SEQ ID NO: 234322 - DNA, 406 bp, Glycine max
  unsure (1)..(406): unsure at all n locations
catgcaacttantctgtctgtgggtggcactttcttcccaaattttgaatgtcttgaacatgaatgccggagntgttccatgaagatggagtgaggtaccgataaaagcatcaaagagggttgcgccgggactcttgataaagcatccgcaaccacgtttgtagcgccaggtttgtattgtatggtataatcatacccaagaagcttggccaagtaacgctactgttcgggtgtctgaataacctttgacatcaactcttttaagctccgatggtctatcatgataatgaattggggccctagcatatagtgacgccattttcgcaccatagaggtgatggcatgctactcgcgaattgaagtcgagcctgttgcatccttgggtaagntacttgccaaaaacgca

SEQ ID NO: 234323 - DNA, 480 bp, Glycine max
caagctccttcaattgcacaaggctcttaatattagaagagtatctcttgtttaatcttcacccaacaaagacattgacaaaaacttatcttctcctttttggacaaagtatgacaagctgggggcaagtaaattttcttcccatcaaaccttggatgcaactgtgatcgtatccccatctcagctagatcttgatgggtattcaagccatccttcatcttgccttgaatgttaaggagcgtcccaatcacactgtcacatacatttttctccacatgcataacatcaatacaatgtctaatgtctacatcagaccagtacgaaagatcaaagataatggacctcttctttcatatgcaagtcttacttttatccttcttttgggtctttccaaatacagtatacatgtgttgaacccgatggtatacctgctcaccagtcatcggtatcggagcaatatcgtgctctcgacttcattaa

SEQ ID NO: 234324 - DNA, 413 bp, Glycine max
  unsure (1)..(413): unsure at all n locations
cacctgnngatgaatcttatncaaaagtggagtgacgttgtgttgacattttttctatcagcacaaattaaaatgcactatctcattgactttgtcacataaacattaatccattcttcattgccaagaaactgagagagtctttctaacatattgtgtaaggcgtcctttttcttttggactccttatttgtgagccgaaataacatattatcatgtggggatttataactttctttaacaactctacttttttatatagcctgagaaaactctcccgtatcctctttctaccacatttatatttatcttctcctttcattcctccgttatgactttaatttaaaagctacaactcccgacaaagttttccattcggccttcaaaccaagtttatttctattaaataaaaag

SEQ ID NO: 234325 - DNA, 371 bp, Glycine max
atcctctaattctcatatataaagtgtggtttgtttcgctaaatgagctcacatagaggtgtacccttttccaagttcattaatctcttcaataaccctattgaaattattaccgagcctggttgtactgttcacatctgcaaacgaagagtcgcttggttatatttatgcaagtctagtttagttccgaaagcccgtttgaatatttgaaaggaaatatatatctatatatatctatatatatatatatatacacatatatatatagctctcgcattaatgcgaaaaactattgtactatgatcttctccttataatcacgtgaaaatatgagttaacatatcttcggcacattctatgttgaattacat

SEQ ID NO: 234326 - DNA, 372 bp, Glycine max
agcttgcatgagttacattctcaccctgttctatcaaattcttaattcttcttgacaacatcaaaaactttatgactctacattctcctcctttctctatcaaattacttaattcttcttgacatcatcaaaatcttcatgatctacatcctctccctcattgatgatgacacaaccacctcgaggctacgagcaacaccaaagaaaaaatatctatttgcatatacttcactccccctaggcattgcaatgattgcctatatgagacaatggacaatttataattttcatatgccaacaaaatgtctcatagaaaataaataattcttaggacacacttatcttttatctttctctcccccagtgtcaaca

SEQ ID NO: 234327 - DNA, 378 bp, Glycine max
  unsure (1)..(378): unsure at all n locations
ggaactcgctaacctgactggctactctcccctgcatgtggaaaaagcccatttggctggctacaccatggaacaccgcagtggcagtggcgtctatcccatgtgtcacagccacaacaaacgcgccaatggggctggcagnttgcatggtttttgcatgcactttacgtacaaaacaacaccatattggaattagtttgaaaacaggcctatttcgggaataagatttgaaaagtgccccctttagggcaatttgccacttgtaatattcttctcttcaagagagatataatctccttactctaagcataagattgttgttgaagagactgtgagtctctagaattgtaaagattacttgacacaagggaagggtat

SEQ ID NO: 234328 - DNA, 337 bp, Glycine max
  unsure (1)..(337): unsure at all n locations
tcatcgatgatgtatatacacggaagccgtttattctctcttcctctaanacggaacgggcctgggaaatggaaactacacagcgaatctacactatgcttatgtcatgtacacttatgatcgaacatataacaacctatgaaggcgcatatttgctgtctacctatattctctctctgacacgcaaggatttcatatacttaaaaggccgcgggcatgtacaaactgcatatcttcatttcttaacaagaaatatgactggacgtagaattgacgttcctttaataaaacatgtgaaatcactagaacaaacagaatatcagattacagtcgggga

SEQ ID NO: 234329 - DNA, 428 bp, Glycine max
  unsure (1)..(428): unsure at all n locations
agctgtacagaagatgctactcttctctttgttcntgaaggacatgccgacaaggaaacacaagtatattcaccaggaaaagattgttgtggaatgaaattgtagtgttgtgattcaaatgatccttccaccgaagcatgaagaccctgggagtgtaaccattccttgttcaattggagaagtcactgcgggaaaggcttttattgacctgtgagccagtattaacttaatgccactctccgtgtgcaaaaggttgggagagttggagatcatgctcactaggatgactttacaacttgttgaccgctccattaccagaccatatggagtaattgaagatgtgctagtcacagtaatacattttatcttcccggcagactttgtggtaatggatatctataataattatgacattccttgaatattaa

SEQ ID NO: 234330 - DNA, 436 bp, Glycine max
gaccttaagcaccgcggctgcagctgaataagattgataccttttttattacgttatccaaagcatcaagtggatggagatcatacacaagtccctttacatctctcccaagtacaaccaatcaacttcatcagattggggtaacctttcaatgttggattagttcaaatttttacttcctcctgaaaaacagaaccattgacttttcacaatcagtgagacaaaattaagttggaagcacgatacgaaaaaaggtcatttatgagtgaaagagatagagagagcactttgcttgataatcaaattcttatcattatatttggaacttatgtgttccattctttcaccatcccatatcttcactactacatgtagaccttaagggtgcctctatacaactaaaaactgtgcaagccatgaattgtctaaccaaatg

SEQ ID NO: 234331 - DNA, 380 bp, Glycine max
  unsure (1)..(380): unsure at all n locations
ctataaanacacaagccccggagaacactggcatggaaaggagagacacncttattcttagtatatctgactgggacagcacagagtgcatgattaccgctgaaaatgaaacagcatggaatgaacatgtaaaggtagtcaatcatctattaatgttatgcaattgtagttattattcaagcaaaggtagtacatgaataacgccgctctatttttttttcaagtcacatgaagaggtcaaacgatatcgattcaaagtcattcctaattgggatgatatcgctgacctatgtgcaaaggatagagctactggactcggagcagaaaatgcattacatgcacatgatatcctgagcaaagaaacaaatgaagatgaagca

SEQ ID NO: 234332 - DNA, 409 bp, Glycine max
  unsure (1)..(409): unsure at all n locations
agcttacaggggagtgatattcgatacttgtcttcttacattnccattattattaatctcgtcatgttttttggtgattctggaaacgggttttaaattattattatgacaataatagtaaaatacttataatttatttgctctctcttctatcccacttccatcctattttcttcttatctcttacttccttttcgcgtgacgtcacatatagcatctatcatttactctctttatttttgttcttttcttcttatcacacaccgttttctaccgtcaatccactccattttgaaatagacaaatataattgctcataataagtttatgacaagtcttgatatattatgaaaaattacaaactagtatgactcacgaactacttgtgaacacaattgttagtgcaaat

SEQ ID NO: 234333 - DNA, 439 bp, Glycine max
tagccctcccatggctgctgcgatcacatatacatcgctttattatgtgcaccaaacttactagctttcaagcgtgaagcatattgcgtattcactacatgcacgacagcattgactatctgttgatggcgcaacttcagctactacacatacctatatgatgtatggcataagagaacaaacaaacatgtatggatgtcatgggcaaactaatccaacgctttttgacagtaaaatacgcatagtagcaatcagtattttgttctgctgtgagcgatagtgtccacgtatgttaacttaaatgagatatattacgtgtatctactgtgattcacaggaggcgaagagagatctatatttggccaataagtttagaaggaagaaatcaaggatagactccctaaacaaagatgcgatctcttttattgcctctagatta

SEQ ID NO: 234334 - DNA, 414 bp, Glycine max
agcttgatggtacgctaagcctcacatctcatgctaagcgcatattgcagaaaattttgtgttgcagaaagcgctaagcgcagcctgttgtgctaagccccagatgctcactggactttacaacttcaagttgggcttagcgcgaggctaggctaagcgcttgggtttttaaactcaaacgttatgtagccacgctaagcgcagctgtgcgctaagcgcgccatatgaattatagtttttttaaaaccaaaggctgaggtactttgggtgataccccaagttacctctacctctgttactgcatttcttgcttccaaatcatacatttcatctgcgtgcctcatttccttgcttcattctgcattccaaccacaatccaagtaagtgagtactcttccatttccattttttcat

SEQ ID NO: 234335 - DNA, 470 bp, Glycine max
  unsure (1)..(470): unsure at all n locations
cagtatcaagagcatcttcgtctaagagatgtgcttttgcttcttctatctttntgatcggcgaattctctgtaattccttgttcttcatcttattctccatgtatatcctccattgtcttgtggtttggtgctcttaagagtagattcaaaacaaataaaccgattaaatcttagatctaaacttgttcttgcatttctatggttcaaattctgtagatctactcttgaatcatgtttttgtgttgattttaggttctatcatttttcattcataatattcttgtattgaacctttagagtctaaatttcttccaaaatattgattagaaaaaaaacacaaaaatctaagtgtaaatcacttaatccatgttgacttagagtcatgtttagtcatagtaattgtcacattatagtctaagntngcggtgaattttattctgttattgaatccacaacatttgncatgta

SEQ ID NO: 234336 - DNA, 298 bp, Glycine max
  unsure (1)..(298): unsure at all n locations
aaagacatttcttcttctttctttcttccaaagccaatttttaaagttccaagcactttctacatcacccacagccaccattagccaccacaaaccatcattgttctccattgacaacccacaccgagaggaacccttcaaccgaagcggaatcttccaacttgacttgcggttccggtagagaacgaaaaccctaatctgacctttcgaggtaaccatggatctatgcttgtttcttgttagaatcatcttggctntgcatcttttctgcctttggaaccgacattgcatgtcttat

SEQ ID NO: 234337 - DNA, 395 bp, Glycine max
agctcagaggtcggtcaaagagacaagtttcaagattcaagttccagggatcaagatcaagattcacgactcacgaatcacgaatcacgaatccatagaagactctatcaagataaatattaacaagatttttcacaaactgagtagcacatgaattttttctcaaaaccttttaccaaagagttgttactctctgttaatcgattacccaattattgtaatcgattgccagtagcacaatggttttcaaaaagctttctgctgaatttacgacgttccagttgatttcaaaatgctgtaatcgattacaatgttgtggtaatccattaccagtgtgcttgaacgtcgaaattcaaagtcaaattccattgatcgttggttgtataggattttac

SEQ ID NO: 234338 - DNA, 366 bp, Glycine max
ggaacgggattatataatcaattcactagcccaacttattgcacaagtgtaaaattgaataaataaaaaatgaaatatcaatgcccataaactccctaaccaactaatgatttgtatgacattttttacgataattctttcaccatgagcagatgggtggatgaagtcattccagatgcaccatgggttatcaatcaagagtttcttgactagcacaaaataaactatgttgctcatgattctctgccgtaagcttaacttaatatttcttcctatatccacatgagattaatctttacttatcttttacaaactttctatcttatgtgcattaagtttacaatattgaaatagttataaatatat

SEQ ID NO: 234339 - DNA, 403 bp, Glycine max
  unsure (1)..(403): unsure at all n locations
agcttgcccagagaaggagtccacggatgaaatgcataccatctgaaaagactggaaagcggtttctaatgactcctctgcggcttccacataaggcatagaggatgggcagctcaccaagatgtcttcctcgcctgatacgatgaccagatgcccttccactatgaatttcaacttttggtggagtgtggagggaacaactcccactgagtggatccacgggcgccccaacagacaactgtagggggggttgatatccattatttggaaagtaacttgacaggtgtgagggcctatctgcactgggagatcgatctctcccctaacctctcgacgggtgccgncgaaggcacaaaccaccattgaactcggctttaagtgggaggcattgaatggtaatttc

SEQ ID NO: 234340 - DNA, 477 bp, Glycine max
  unsure (1)..(477): unsure at all n locations
gacacatgaaactaagctcgagagaggagtgtaaaggggaaactcctgcttttatgtttttccaaagtggtacctggagatatgtcgcggnggtcaagagaccttgcggacgtcaagtggggtgctattgcctaaaaccaagcttgaccaatcccgacccaacccgggcatagtcagtcagtgagaacctgtgatgtacctaaacaggcgagctcctggcagtcaacagataaaaggaacaaagaccacaaagcaaggaggcttgtgtggtggctggccaactgtgaatcttgtgtgatatatgggttatggcctctggtaatcgattaccaagggtgggtaatagattacaaggcttaaaaatgaagacaggagactaagatggtctctggtaatcaattaccaagggagtgtaatcgattaccaggcttgaaaacgatgtcaggaagctatgatggcttctggtaatcgaatacc

SEQ ID NO: 234341 - DNA, 450 bp, Glycine max
agcttctatcagatatggctgctatactgttggatgagaattctgatcgcattgaaagtgcacttcattcatctctcatagataaaactagtgctgcaacatcttcacaatatctaactagggaagcttctgtagatccattggcttcaagcacatgggaggaggtagtatatagtgatatttgtggttcctgacttgctctgttaatgttgtaaaaaatattatatttgataatcgatataaaatgtaggtttccccagaagacgtgcttatcactccagtgcagtgcaaggctttgtggagacaatttcagggagaaactgagtatacagttactcaagctatttcggctcaggtaaaatcaaatcaaatcatataataacatattatattatattatatcatatgctattatatgatactatattcctgtctacttattctcgtttc

SEQ ID NO: 234342 - DNA, 474 bp, Glycine max
  unsure (1)..(474): unsure at all n locations
taagctcatcattgatgaataagaacacatgtactctccatgtttacctcttttgttttataacaacaaacgtaaaaagaaagactaggcccatagattgtcattttcaacccaggaccaatagggcaaagccaatatatatagtttgatattgagattgattatgagactaatccttaattagtctgagacttgatcacatgtaaagctcataatttctttccaaagatgtcatttacgataatcaaactcaacgtgcattactctagcccaataattntttagtttataaaaaatcaacaaaaatacaaaaaaattaataattaaatcttctatttctaatcatagtttctctaattaattgtataattagggaaaagttacgtatctcttgaatcgcctcctcttaggttgtatggctgaatatacgtattaattctatggtcgaactcgttcttgaatcttctatatcta

SEQ ID NO: 234343 - DNA, 440 bp, Glycine max
  unsure (1)..(440): unsure at all n locations
agcttaactcatccagacatggcaaggttacatgctncatcattttcttcacaaagaactatcatgaagcagaaacctagcaaaactacccatcatatctcccaaagccccatacccacgaaaatcaagtgagaaagaagtctacccaaacctgaaatttctaagtcccacacgtagagatgcgcttcacgactctaaaaatgctttcctttcgcgacttggagcagaaatggtgaccaaaggttggagctttgttgggcaacaatggtggatgagagaaaagaaaaaaaaggctgcgtgagagagagggagagagcttctgaaatgtgggctgagtgaggagagagaatacagctctttagtttaaaagaaatgctcttctcttttcctatctatttatttaagctatgccacatgtctccatttgagtggagcaaaag

SEQ ID NO: 234344 - DNA, 458 bp, Glycine max
  unsure (1)..(458): unsure at all n locations
ctgcacgtatcagtcaagtgtatggaccatatcgtagccaatgtgcnctactatattggttccagnnnaaacgtgatgcctaagagcactttggagaaattaccattcaatgcttcccacttaaagtcgagttcatatggtggttcgtgccttcgacggcacccgccgagaggttaggggagagatcgatctcccagtacagataggccctcacacctgtcaagttaccttccaaataatggatattaaccccccctacagctgtttgttggggcgtccgtggatccactcagtgggagttgttccctctacactccaccaaaagttgaaattcgtagtggaagggcatctggtcatgctatcatgcgaggaagacatcttggtgagctgcccatcctctatgccttatgtggaagccgcagaggagtcattagaaaccgctttccagtcttttgagg

SEQ ID NO: 234345 - DNA, 401 bp, Glycine max
  unsure (1)..(401): unsure at all n locations
tgcaagcttaaaaaggaaacatgcatggaagaatataatgacatatatttcctccttgaaaaagatcgtcaatattgtctcaaataaaatttgggccaattctgccatttcgagggtcaaattgggctggaaagtcaaaacctctacacttgaataattgatgtacaaaattgggctttgttttgcgtaattagcttacttatgtaaattaaataggtcaaatcaaggctcattcctttcttctgagtagtaactgtatatattaggggaaactaggtagttacttcattcttacaaaaatagttatataaacttgntgtgcacactctaagatcaaactcctttatctctttttctctcaaaattctccctccccttttacatatgggcttcctttttct

SEQ ID NO: 234346 - DNA, 341 bp, Glycine max
  unsure (1)..(341): unsure at all n locations
cggcgtactttagcgcttatatattctagatatggattntatcaataaaaaatacagctaatttatattcgaaagaactaaacaaattttcaatattcaaattaaatattatagtacagatttcgttatagccaagattaaatcgatacttaagtgttaaaaactaaaatatttactcataaaaaatatattattactttagtaggctcaataattgaatacttacatcatacatgcttatcacacatattgtgcatggatatatatgtatgttgtacgactcgctcatatttctgacttaaacggatcttggtgtgagtataatgggttacgggcccttc

SEQ ID NO: 234347 - DNA, 201 bp, Glycine max
attccagaatcatacttgaaccaacctgcatttcaagacttagtcaagcacaggaagaatatggatatgaacatccaactggcgggctgactataccatgcacggaggatgagttcctaaatgtcacgtctgacttgaatgagctgtggatcatgctaatacacacctagatggattaaatgaggcacatgtgtatagaag

SEQ ID NO: 234348 - DNA, 410 bp, Glycine max
  unsure (1)..(410): unsure at all n locations
attagctgacaggcggagcatgctgatatatatcaataagtcaaatttgatagtgatactgttgcatatattaaactacattgagatttggcaaaagcataacgctattaaacatngtcttgtgatgcattctcattcaggaaacaggtttcaacttctgtacaaaacagaagattcttacaattaaagaatacggctactgttcaaatgtgcctcatctgatctgtctgtgtctccattatcatgatttacatgtcatgcaagtgacacgtgacagctaggaactcatccttcttacatggtattgtgagaccacccattgngtgctcatactcgaattcttcctcagcttgattcaacatatgatgaaaggaaagctcgtcaagcatgatatgcgataacaaaccgct

SEQ ID NO: 234349 - DNA, 432 bp, Glycine max
  unsure (1)..(432): unsure at all n locations
gcgtgtatcatattttatgataagactcttagtagngnnggcggaactgaaatgagtattggctttctgtgatgctctttaataatttatatgctaatgatagctgggatccactatggctctataaatcaattggattcttttgtcgctcttatagtatcatatatggccaaattacatttggtgaatacaattctctctgctcgtattgctactgttgaatgggcaagaatatgaaatcttaacatggtttgactgctgctattattttgccccatgcgttttttccgcagtaaatattattgcccacatctcatcgttagagaaatgtgagtttcttgacagagctctggaggaggttcacataaaagaatctaaaattggaagtatgttctatgtttaaaaacctgcggaacttgataaatgtaatta

SEQ ID NO: 234350 - DNA, 362 bp, Glycine max
ctatggacctttccaggcataatttctttttccgagcataaagcacaagtgcccaggaattagaaacaccccgcttccattgttccaagctgaaccttttccggttactgaaaatatggcggaattgctgcacaagagttactcatgaccaacccgtgcggtacttactatcttggattattgtaagctccaccagatcctgagatacctggggagacgaatcagctggtgaaactaccaccttgagacaagggtttacaagggagagggtgatacactacgacaacctgggcagggacaaagcaaacagggtgcatacaagtaagccaagaaaattctaactcttcctaacactacttgag

SEQ ID NO: 234351 - DNA, 371 bp, Glycine max
  unsure (1)..(371): unsure at all n locations
tttcgaaggaatcatgttgcaaaatgcaacatggcttatgtcaaaaattttaggcttaaacgaattttggtttgtatgtgagatttatcgttttggacaaaattggcttaaaccaacatcttgctaaaaagaattntgtacagaatgtgaagtggacataattggcaacctgtgaattatgaactgagtgtggttttggaaaagatggaatgagatcttaatgaaatgttgataagtttatgttatggtgaaccctcgnggcgttgaacttgataatcatgaatatgttgatgatgtgatgcttataatatgttaaaatgatttccatttgttgttgtgtggattatcgggatgtatgtggatccttaaat

SEQ ID NO: 234352 - DNA, 468 bp, Glycine max
  unsure (1)..(468): unsure at all n locations
tggtaagtgtcttcctaccgattaaagcanagtatgatgcgttttttccataagtagatatcttatggtgaagctcctggagagcttgtgtttgaccaaaggtggtcatcaagtccacatagcctctagtctcttctttcttgcctgcaaagacgaggagtcaactgacatgaggatggacaatgtcaggggagacctcaagtctctaaaaagttttccaatacaggatatcatggaactaccctagacgataaggactcttgacaccatgaagtttgcaatgataatggagaccaccacgaggttgtcttggttgacaaggttgatacccttgaattccctatccgtgaaggtgataggaggaagacttccgtgtagtggtgcgttgacaaaattaatgttgatgtcccagatgacgtggagatggaaatttcgggactagctgtactgtcctccataggaaaatct

SEQ ID NO: 234353 - DNA, 429 bp, Glycine max
  unsure (1)..(429): unsure at all n locations
agcttattgtgaagatcacactttcatatttcatctgaaagggaaagaataaacagaanaacaaccggctacaaaaaaaaatggaatattgatttttgaaaactttttacgtcggcaaaattaaacctgaaattaaaggtgtaaaaccgaaccaagctttaaattttacttgttagaaaaaaaaaatataaaacttagatttaactcatttaataactcatttataatctgattatttttctatttatcaaattcatttgacttctttgatgttagatactcactttacaaagtaaaatagagaattgtaattattaattaaaaaatattgtttgaagttatagttaaatgtatgcatatgtatagtaaattatgtagttatttaaatcttttaagaagtattttgattaaaggtataacatcttattt

SEQ ID NO: 234354 - DNA, 478 bp, Glycine max
  unsure (1)..(478): unsure at all n locations
taagacttgtcttacagaggattcatgatactggcacttatattaattaagaggtaaanggaatccatcattttctatgtagaatgatttgattcttcaacacaatttctgacttaaatctaatgtgtgtatttagtcctcttttttaaactatctatatattgtaaattacaaaagtatatgaggacaataaaaaatactattttcctggcactgaaactctggaagcacatttttccaattataatattttcaccttgcactttgttgtagaaagacacaactacacaagtatgctggtttctgtttcaatgaatagttgtaaaattcttcatctgcttcataacttanggttgtctgtatagtcagtttcacaaataattcttattccactgtttctagacagcatccaaggagcatatntctatttaattttggttatatgaatatatcagcacaatctaatctatgatgctta

SEQ ID NO: 234355 - DNA, 473 bp, Glycine max
agaggaggcttcaatggaggataagaaagagggatttatttatatatgggggagcatgaaatcgaaggaagaataagggagagaagttgaactttgagttgtgtctcacaagactctcattgatcaaagttacaacaagtgttacacatgcttttatttatagactaggtagcttccttgagaagctatcttgagaaaacttccttgagaagcttctttgagaaaacttccttgagaagctagagcttagctacacacacccgtctcataactaagctcacctccttgagaagcttccttaagaagattcctatagaagctagagcttagctacacacacctctctaatagttaagctcacctccttgagatgagaagctagagctcagctacacactccctataatagctaagttcacccccatgacgaaatacatgaaaatacaacaaattccctactacaaagactactc

SEQ ID NO: 234356 - DNA, 442 bp, Glycine max
  unsure (1)..(442): unsure at all n locations
ggccacccagctcgcccaagcgagcaaggttgcttccttctttatattacaaccttctggaggaatcttctggagggcccaagtgggcctggttgctatttgcacccccatatttactaagtacatcccctgcctatttttggtgattcttttnttcgtaaagttacggaaacttaccaatttcgtaacgatacttgttgtctttccgtaatgttacggaaccttgcggattacataatcatcccctttttgactcacggaatgttacggaacctcactaattgtgcaacgatgcttccatttgatttccggtgtgtcacggaaccttacggattgctgcatcaattttcttttctttttcggcatgtcccggaatttcacaaattgcctaatgatgggtgccangcacctcacaaggaccaaaaaaaaatcgcatgtcatc

SEQ ID NO: 234357 - DNA, 442 bp, Glycine max
  unsure (1)..(442): unsure at all n locations
agcttggttttgggcaataatctcccccctgacngccccaaggtctcctgacccccacgacatatcctcaggtaccactctgtggtcaaccaataaaagttggaagactgactcttccacgctttctcacacatggcttattgggttatggggcacccatcatatgtggtactatgtggcgatcgggcgatggcgcaaaacaaatatcccatttccacaagcccaggcataagcacatcatccccagttgcccacctttaaattgagctcacatacacgtacgtagcccttctcctcgttcctctcagcatcgagtccccatcaaccccttcaagccttcacaatctcaaatcaatttaattccatttgacatgaaacaaccttgaaaaaaaaagagtggaggcagaaatctttacacaagattcattcgaattccatagtg

SEQ ID NO: 234358 - DNA, 239 bp, Glycine max
agcttccttgtcatgcagctataagattttttttcatattagggactgaggactggttgacccctggcgagtcatagccaagacaagaggcattgcctgctctacggaaacaaccgatgacatggatctcatccacacatcttctgaactctggctttatcacactccacaattccttagtaaatgtgaaattagaaccgagcggcccaatgcacttatctacaccacgactccacact

SEQ ID NO: 234359 - DNA, 434 bp, Glycine max
agcttcttttgttcagaatcatatattcttcaactgagcaaagtcgatgcaacggaaaatggttatggccaccaattggacccattggttgcagaggtaaacctgcgggtgagagtagagagagtgcaagtgaagcagattagaacaattgatagatgaaagaagcatgaatattctatggtgagtgcaaaattctgctgctgaattgaaaagataatcatgaactcaaggtggatggagcttgaatagtttactaggtcaggaagacaaacaaatttggaaattttggatgaaacttgaagatgcagtaacatacgagagagaattgttgggagaggtgagacagaagtgctctttaattatcataaaaggttaaatgattgaatgactatagtatccttaataaattaattaaaataaaaaacgtaattgtg

SEQ ID NO: 234360 - DNA, 352 bp, Glycine max
  unsure (1)..(352): unsure at all n locations
gaccatanacactcaagcttaatggctgcagaattcttataggatacaggtctgttttctttttctcaacatggagcaaattcttggatttagaagcaacattcgagtggtatttattcgaccaacactacttacaagtttctgatggacgaactaaggtgggatccagtggataagagatctgtgttcttgtggaagcttaagataccacctaagccaaagatatttacctggcgaatcatcgtagaccgcttaccaacgaagctgatcctaacagggagacaagtggagataactgacccaatgtgcttgctatgcaacaatttcgaggaggatgcagcacaccttttct

SEQ ID NO: 234361 - DNA, 456 bp, Glycine max
  unsure (1)..(456): unsure at all n locations
agctgtccttccatgtaaaacgacgcgatcgttaatctctcgtgatctggggttgnatgatactcaaagaactgcgtgatcttgaagatccagcctatggcatcggaaccgtcgaaccttggaacattaagcttcatccggtgcggtgttgtgtgcattcctgatcccgagaaacggtgtcgttctggttgtattggttgcggagtgcgccgatttgccttgaggtgtgacattcgttctgaaaggtcctccatctttgcttcgaacgaagctgcaaatttcgcgaataactcttccattttttccgatgatagaactttcgatctcgtgccttccgccatgctcaaacaaggggtgcgcagaatcaatgaaagcaccaacgataccaagctttcgaggccaatgtaacctcctcgtgaatgccgtgaaatcgagggaaaaacgatgagaagttca

SEQ ID NO: 234362 - DNA, 486 bp, Glycine max
  unsure (1)..(486): unsure at all n locations
ctataaacagtggaaaagttgttaatatcaattatgtaaatattaatcttctaccttgcaaagccagcgcggactatcaacagcaaactgcataccaagtgcaacaagaatacctgngatgctagcaatatacagcattgtcctccacctgaaatatgtttctgttggtgccaaataggcattatttggaaaacaattttctgtttttaaagactataaacacataattggtggaagaatcgctgtgaatttataagtgaaggcttgatttcagtgagccatagagaagtatgttccttttacattaagttcaaaacatatcaaaatgagtctatcagccattgttaccaaacaatattgtcagcagttnttctcaatgctgcaaaacaaggctgtgagcctgtagctctggctctgcatccttgaagaccaatttggaataacagacaatagggataaggcacaagtgtgacacaatacaaatat

SEQ ID NO: 234363 - DNA, 458 bp, Glycine max
  unsure (1)..(458): unsure at all n locations
agcttattcatcatggcttctatcagattctatgagaagattattaggcngatagagggaagagaaagaggcatagagagggaagcgaaaatatgcgttgcccgaggcgagagagagaaagtcacaataaaagctaacgtacaattgtctcatgagagagaaatataaaatanatgtcacattcaataacgagcgtttttcaaataacccgtctttaaactcataattttaaaacgggtattttaaaactatttttgttattaataaatttattacaatttggcccttgatatttttctaaaacggtttttgtcaaccgtcgtcgttaacgcgtcgtaataaatgctatttttagtagtgattattgttgaatacaaatttcaagcttgtgtcattttgatattccacacttgtccctctttgattcaacttatactctcgtgaagaaaataaacatc

SEQ ID NO: 234364 - DNA, 448 bp, Glycine max
  unsure (1)..(448): unsure at all n locations
agcttgagagatggataagaaaaactgatttctgcttaagttttatgtaacattcagaattntacctttcccattcctgtaagtatatccacatctgtatccttggccttcaaggattttattatcaaaaggttgctgcactttcactaattattgaactgtagaaattgagataattcaaaatatttgtttactttcgttgattttcttcccatttccttgtttgatcctcacgttttaccgtctacttgatctcccctggcacaagattcgaatatttgtctctatcacattgaaaaagaaaatgaaaataaaataaatccaacatgttggctcaaagtagatgtttattgtgattcaattattcctttagataaatcangttaacttgttgcgtgtcataccaaattctctctgtaagcaatcaatctcagtgttactactctat

SEQ ID NO: 234365 - DNA, 465 bp, Glycine max
  unsure (1)..(465): unsure at all n locations
tggcaattagtggcataagcantttgttgaaaagtttctttatttaaatgaanaaccgcgtctggattgcatggtttgacctattcactggttcaaacaccggctttcaaacagaatattttatgctgactggaccaacctgtagactggttaatggttaaactgacctgagtctgggtttgaaaattattgttatgacaatatgaaactattatttaaggaaaatttgtcacttaaagtagaaaatttgtgcttttgtcagaggcatctaacctttacctgaatgtgttaaatttcttttaaaggtatactcaataaaattatttgtcttacattcacatttttttaccgatgttattccctctgtcttgaacaatgtttaagaagtcctgttcttggctacttggctgctggtatcttgattgggccttatggtctctctatcattcgtcacgttcatgggac

SEQ ID NO: 234366 - DNA, 377 bp, Glycine max
tcgggcatttcccaatttgaacaggaaagaaatgccacgcatgtttaaaaactatttagcaataacaatagcagcaatagtgagtagtctactattactacttgaccaaaaatcatgttgatctctaatccccctatcttcctgctgtgccacatagccagagaaaagattattacaagttaagtaaccaaatgagagaaaaaaggtaccagggataataataatatattggtttatatattgctattaataataaataaaaatattccttgcatatggatagccaaacctatcaaggaaactgtgttaataatctaaggggaacaatacagctatacaaatttagctgaattcatgttgcaaggatataaactttc

SEQ ID NO: 234367 - DNA, 308 bp, Glycine max
  unsure (1)..(308): unsure at all n locations
ctagccagaagncaattatcagaaggaaattaaatttttttttgttacatatcagagctaggctgctctaaaggctcttacgctgagtgatgcgacatgattgtatatggcctagcactgtctctacccctaactttgaataggaaagacatatgcacttggaacacacccaaaccgtattactcactacctgctatttggggaatgacatacttaagacatctatctcttgatctagacacagagcagctgatgtatgataatgtaccgacataacaagaatttgtaagtctaacctacgaatcatg

SEQ ID NO: 234368 - DNA, 246 bp, Glycine max
aactcgagtactaatctctatccagctgcaacccgggactcttgcatcacacttgttccccatcattcttcgaactccttccacatcataccaatgtctatgggaagcataaatgttagacatgaccccataggttacattcttctctggttctttgatgaagagcttttctgcagcccatttagccattcctatattttcatgtagattgcaggatccaataaatgctcctaatgaatttgattc

SEQ ID NO: 234369 - DNA, 381 bp, Glycine max
  unsure (1)..(381): unsure at all n locations
cccacgccaaaggctatcgacactgcgaagactatatttctattgtaagggtcgncgatcataggtagataagttatgctgaatacacgagagaactgctaacaatacagattgtatacacttccatcactggtttaaaattgttagatattattaaactttgagaatcacttctattttacacaccgtgcccaggagtttataactcctaacacaatagaagtgacagattctctggtgatataaagaggatggcttgcattcctccgaccgatatatagatgagatataaagcacttaaattgccaaatgcgaccaagtatgagtaattaccatgaaacatacaatgaggagagcataaatggacactcctgtggcata

SEQ ID NO: 234370 - DNA, 434 bp, Glycine max
  unsure (1)..(434): unsure at all n locations
agctngcattcaatcactactacaacatttctaaggttatgaagcagatgttgaccgagcaattaattggctcaggaagattccacgagaaaaatgaactcttgcattggatgatggctgacgatgggggctcatgaccaccaatcttgctgagtcgattaattcggtactcaagaaatctacaaataggtgtgctagtaaaatcaacatatgttaggtgtaacacattgttcaacaaaagagggagagaagctgtagcaatgcttgcatctggccaagtttgtacaaaagtactaaacaaggtcatcgaagatgcacggagaaagaaaaacgctcacaatattcttgagtttgatcgacgtgactcataattcttggtccaagagacaataaatccgagaaaggtcagcctcgtgtagattcacagtcaagct

SEQ ID NO: 234371 - DNA, 446 bp, Glycine max
  unsure (1)..(446): unsure at all n locations
acactatataaactcaagcttagctagatacttaatgttaattagaggaatctctttatgcttttatcacgacattcgntnccaaccttaagtccaaacttccctctactaccttggccatccaaactagccctaccctagtttccaccataattgttacagatgcttcgacttcccttccctcatccactgccccgatttatacttccctcaccctacccttattgatccctattacaacccccatctttactatgacctcgtccacaacaatgtctaccatagcattttccaccacaaacatgactagttttgtcccaccaggctttattctcccatgtcatgttctggctaagtttatgccttaactaggtcattctcgttttactttcccaaatttcaattgtacccctcactgtaaaacctncactagccctaaccctaac

SEQ ID NO: 234372 - DNA, 409 bp, Glycine max
  unsure (1)..(409): unsure at all n locations
agcttcttcagcttctgtcgaccctnnttcattctttcaattgataaataagtcttgccatgcacccaccgacatagtttcactagtttgctaagttcaatctcgacctctttcctactagcatcaatgcacttcaatactctgcagtcagtcacataattacaccaacagacaacaaggccagggaaataatagacagtaaatcaatggaacaataggtgaaaagaacttacattggtaagaactgcgcataaaatccaaagatattgtataagaaggttgattgttccgactgactagaactgtttaaaatgagaaaaagccttcagatttaaactttataatgaggctgaattttcttctcttttattttcaagaaaacttaactggcagggaaacaaattatacc

SEQ ID NO: 234373 - DNA, 462 bp, Glycine max
  unsure (1)..(462): unsure at all n locations
cactatatcttacatttccattttttgtcccaagatctttcttttatctctgcaaagctctagattgtgtttcattcacgtttctccttgtctcgtttctcacattctaatactttgctcaattttaaacattattgtacccaagtaaacttacgagcaaagtgttgaaataggattaagtgtaataaaatatctctagctagattaaaggcagtcaagcaaagtaaaataaagttttattcaactgtatactaactacaagaggacagatccttattcttgcagatgagtcagtggaggactctgtagctcactctgactcaaggtccctagctacccttctactcattcgggacatacaggtattcagttttgttgcatttgaaattaagggtatcatgttcacatcactgactattggctcatgttgtggtagncanaacgtctaccatacatagacac

SEQ ID NO: 234374 - DNA, 385 bp, Glycine max
  unsure (1)..(385): unsure at all n locations
agcttcttatcctttctttgcaccacattctatgcttnttggaccctttgaagcattcttgcattgggttcactgaaaccacgtgcgaggaaaggcgtgatactctctattgatggcgctcctctcatggggtagccaagttgtcttatggcaagtacaggattataattgatacaacccctcattcctatcaaggggatgtttgagaacccttcaaatgaggacaaaactccggctcctccttccttctatcaggggaagcaattaacggatgcctctactataccagccaaaagctgatcccaatttgctttccctttctcggcacatgcggtgaccttgtaggggacaaacagggctactttcatgacgaatgatgtgagag

SEQ ID NO: 234375 - DNA, 436 bp, Glycine max
actcaagccctcagggaagtttctcaagaaagcttctcaaggatgtttcttattctatatatagaagcatgtgtaacacttgttgttactttgatgaattgagagtcttgtgagacatacttcgaagttccacttctctccctcttttattccttcaatttcgtgctcccccctctctctttctctccctctttcttttcctccattgaagcatccttccaagcatccttccaagcttcttatccaaggctcatcttggtggtgaagctccttcttccatggcttattccctagtggatggcgcctcctctcacctcttctcggttgtcttccgctgcatctccatggtggaaaatcaccattaaaggacctcattgaagctcatagattcagcctccatagaagccccacaagcaagcttccatcagatggcaag

SEQ ID NO: 234376 - DNA, 335 bp, Glycine max
  unsure (1)..(335): unsure at all n locations
gctgggnagcacatcgcatcattgatcaccaaattgtctccataaatcaaagctgggaccttcattcttgttcatttgcacaaaaactccaaggaggaagagaccatccctatattgttactccaagctccatagaaatatggataccctaactacggctaagaatatctttcgccgatcttatgatcctcgctagttgactaacagggtcgaacaccagttatagcgcatagcagagaaccattcgggcgttcgacaaaaatgcaaacatacacacttgatgtgacaacggtcttttattgaaatactggccctcaaagactaatggtgaaaaa

SEQ ID NO: 234377 - DNA, 320 bp, Glycine max
ccatctagaccatccatgagaatctgcgtcaagaccaaataggacaggcgaaatgatcaaatattctcgccgacaatgttaaaagaatcctgtttgtggtgagatgcctacctcacaagaagactgtggtcctgctgggataacgaacatgtgtatcaataccaccaaaacgctgaagaaactggacataccataccttcttcctagattgggggtgcatctattagcaaacggtctctcgggcgacctagctgtcattgacacaccgatcacaaaccaagcatatcgtggaatgatcatttctgagaacgccatatacc

SEQ ID NO: 234378 - DNA, 468 bp, Glycine max
  unsure (1)..(468): unsure at all n locations
gattcttaagtcacctgcggcatgcaagcttgtatgattatggggttcccatcatttgtggtactaggtggcggncgggcgatggtgcacaataagttttccacatccacaatgcacgcataaacccaccatcccctgttgcccacctccaactgagctcacgtactcccacgtagctcatatcctcgtttctctcaacaccaggtccccatcaatcctcccaagcttccccaacatcaaagtaatacaacattcacacagcacaagctatcacagctaagcaaaacagggcaaaggcagaaaactctgcccaaaacaccaaccaaaatcacagcttttcacatacaaataccccagaaacatttccttcgttccaattcgttaaccggtggatcgactcgaaaatattactggaagtctctagtacttaagcctaaattgtgaccgttgggatctactagcaaacat

SEQ ID NO: 234379 - DNA, 339 bp, Glycine max
  unsure (1)..(339): unsure at all n locations
caatgcgcgcattaacccaccataccctggtgaccacctccaactgaagtgacgtactaccacgtagcccatatcctcgcttatctcaacaccgggttcccacctatcctctcaagcttccacaagatccatgaaaaacaacatatctacagtatgagctatcgcacgccagcggaacagagcacatgcggaaaactatgcatgaacatcatatccccaatcacggctcttctcactcagagaccacagtaacaactcctatgatccaactacgtaagccgtnggatcgactccacaaatctactggaagtctatagtgcataagcctacattatgacc

SEQ ID NO: 234380 - DNA, 430 bp, Glycine max
  unsure (1)..(430): unsure at all n locations
gacctctaagncacctgaggcatgcagctttgtttatataaacagaanaatgtttgactatgacactggaatactattgtatgtcgtaacataccatcatttgaatcttgttgctcctgttcgctacgggtagaaaaagagacagatcttacaataactaacatttcgcccaggtacagaaagggaccttgaaaccttagaacggtcaacatctttctgcgtacaaataaaagtcattaattttctttactttagaagattctgatacctaaggcaaccttagttagatgcgactatgcgcatgaaatatgctttagaaggcactaaacataagtctgaactatatgctttctagaatacattgttaaaaatctcaggtctgattaatttcatatttccctttttggctaaaggcatatattcagtttct

SEQ ID NO: 234381 - DNA, 463 bp, Glycine max
  unsure (1)..(463): unsure at all n locations
catgcaagctntgagagaatagaagcaatncatcttatcatataaccactaagtttaaacgaggnacgactgttgttggggttaagtggaaggctcctcatgatgggatcactcaatgcaacatagatgcaacatttcataacacaaactaacacaaccaactagggtatgtgcggtcataacttcaatggtgaatttgtggcagcaagatttgtgtggaaagaaccttgcacccagccttggtctgactcaggtgataattgagttgaactgtaagttggtggtggataagataagaacattatagggataattattactcaatgtagaaacctatgatcagtttgcttaaacttaagataaacaattttaaaaaatgttnttttaaaaggcttaattatataatccattcattaattataattaaaaattaaaagtttaattgaatttcttaattattaaa

SEQ ID NO: 234382 - DNA, 482 bp, Glycine max
tgttctcctcctcgaaactcttctccagatactgaacctggttatgtatagacgacgcttcttctcgggtttatgaaagtactcatccatgcactcgtccccattgtcgtccatgtcaaacgcgcggaagaaggagccgttacaccccttccctccttctgcttcaaaactcaccatggatctcgaacctgaaacaaaaattgaaggagcagagaggaagagagaagaatcgagaggttgggaagagggttgttggttgcgaaggaagctagtgatgttggaaaaggaacttccactagccgccatgtttactccgaccaagttggatctttaaggaaccattggaaaaggctattaaggtggttggttgatgaataattgagggaaattgttgaatttaagacttgtggcggaagaagctggtgatgatgatttcagtgatgtgggaggtgtgggaacagcggcagggcatactcatcact

SEQ ID NO: 234383 - DNA, 449 bp, Glycine max
  unsure (1)..(449): unsure at all n locations
tgcaacttanaaataaataatacagtttttttacatcttattattttnngtagagtatttaatacgataaacaattaatatttttggtaaaaaatactactacatgtgttagtgttactctctgattntcgaaaagcttgtataaatatttttagaaatatttataactaactaaagaaattgagcaaaacgaggagttcgctttatttgctcgctttggtagatttatcgctttttttttatttcttttcttatcttatttttggcatcgatattacgtggataatttgacgaaaatggctcataagatggtctccccaaacccagattctcttttttaatttatctttcatggatgccaataagtcgatgctatctagagaatccaaaagagtatcctttgggcccccacctccatcaaatacttggcaaggatcctcttgatatca

SEQ ID NO: 234384 - DNA, 491 bp, Glycine max
  unsure (1)..(491): unsure at all n locations
cctttaatctaagctcggcttgtcatattgacaacattntctgatcnttcataatttcttttatcagagggacagctagctgagaactatgtttgatgacttccttatcctcggatttctcagtgtcattgggtgactgagggttgtttctctctcttataaccttaactacagctgccatatgactgcttcctttttgaaactcattgaggatatcatatagaggcatatctgctggaaccctggataatttatgaacaataacttagttcaatgactgagttagaaagacaaaatacaagggcaccattggtcatacctatgaattctccggatggaaacagcactaactggagtctctgtttcatctcttacagctagaacgttgtttacctagcatattaagagtggcaaaatgtctttagcagctagtaccacacaaatatttctcttaagcattttggatacactatatataaacactcactagt

SEQ ID NO: 234385 - DNA, 457 bp, Glycine max
  unsure (1)..(457): unsure at all n locations
agcttgcaaaatggaagctccaaaatgattgggcttacatggagacctgcaaaatanaantaatatgagaaatcaataaacaaatcatttggtatcaagtgaattaaatgcaaatgacacttgacataagtagctgcaaatgcatcaacaatatatatcccaaatagagatgacaatgggtcttatacccattgggtacttgcaatgagtagagtagagtaaatacctatcggatgggtttagtttggataaataactgaaaattttatggtcaggattgttttgattagttttaattgtagccatctattaaaattatatggttgagattcgttactctcatgctttcacctctcacttgatacacacatagagagaaattggatcaaatgacacagctataagttgtattacaccaatcaacttcaaattatatcggaaaatctatgactggatc

SEQ ID NO: 234386 - DNA, 436 bp, Glycine max
agcttctacttatatggcagggcgggctttcttcactttcttgtctccaacgcgagctttgaccaccgctcttccttcccgcgatgcttctctttatatccgcttgagtgggtttatagcctaaaccatatttcccacgatttcctttggcatttatcaagctagttatgccaccgttgtctttgcctaaacccattccgggttcataaccgttccccaacataacacgggccatcattactgctgcatcggataggcaagcttgcccagagaaggagtccacggaggaaatgcttaccacctcaaaagactggaaagcggtttctagtgactcctctgcggcctccacataaggcatagaggatgggcagctcaccaagatgtcttcctcgcctgacacgatgaccaaatgaccctccactacgaattcaacttt

SEQ ID NO: 234387 - DNA, 481 bp, Glycine max
  unsure (1)..(481): unsure at all n locations
tctaaactntatacaagaatgaagctctgataccacttgttgttactttgttctcagatatcttaagaaggggggttgaattaagatattacaaattatttccccaattaaaaattctatttaactttctattcaagttattaattcccttaataatgaatttcttaaatgttgattcaaatagaacaatttgaatatgaatataaaacaataataaatgaaggagtttaagggaagagaaagtgcaaactcagatttatactggttcggccacacccttgtgcctacatccagtccccaagcaaccagcttgagagttccactgtcttgtaaattccttttacaagttctaaacacacaaggacaatccttcctttgtgtttagaattctgtcacaacaagagaccctcggtctcttaatcccttttcagaataaagaagaagagaagaataaatctctcttgacagagatagactgaac

SEQ ID NO: 234388 - DNA, 285 bp, Glycine max
  unsure (1)..(285): unsure at all n locations
agcttcattcaccccagaatcttncccccacattctaagatctccaaattcacaagaatcatgaaaactagcagccctaggtcctcatttgcccttttttgcttccatttgttgcatattggttcatccctacaagaaagtgcactttcccttgattctttggctctccattgatgtattttagggttttgcttgcttgtttttggcaaaatccgtgagacaatgtgtatgtaaatctatgtgttttgtgtgaattgggggggggggggggtgattttccccaac

SEQ ID NO: 234389 - DNA, 481 bp, Glycine max
  unsure (1)..(481): unsure at all n locations
catcaaactaagcttattactcctgtgtgttcttccaaaactctcctcagtctcctttctcattctatccatcctttctttggcgtcataactcattcttctcatttgatcactaattttaatcatcttctccatgagccttgcactttctggagatggtggagtagcatctcctcttgtagaagccatgcgtacaaggaaaagttagtgcacaagtaataaacacaataggacctcaccactcaacttagtgtttcactcaagttcactcgtgtatcactctctcaaggctttttcttttataatatgcactcttgctcctcttcaattcttaagtagaaccttgaagctcanaatcatgaagtattcaatgtgaaatatgtcacacatcacaactcatcagaagaagccaagaatagaaatattttaagacanaactaaggaatttaaagacaagcaaaanaataacgaagagaatact

SEQ ID NO: 234390 - DNA, 429 bp, Glycine max
agctgattttctaattctgtccacttatatccatcataggagagggggcgtagaaacttatatttctagtagtgcttccactcccttctttgaaatcaagcttctcaaacgcttctagaatcaaattcatcaattattacaaattaaaatgtttccatccacttcagtgttctcccttgttacttagagaaattaatgatttggtcttgatctaatgtaatggtgtaaggtagccaacatataatgcgtaggagccaaatagtaataatagtaaaattgtgtaataagatactttatctatgttttaggttggcttcttatgtttaaaaagtttcactttagtctcttgttctcttttcactctcatcttttcactccccttaacctcctaaccataaaagaaacctttcagggttgacatacaatgac

SEQ ID NO: 234391 - DNA, 478 bp, Glycine max
  unsure (1)..(478): unsure at all n locations
tgcagggatattagcttataatgcttacaattagtagtatatttgtttatgantcacgctttcttggggtatctgagcttgatggttcagctttcctcttaattcccacaaaatgctctacctgaatcaagtaaaaaaaaaattttaacagaaaaatgcaaagctattccacaaaagcactttttctaaagcttaaacacgtcctaaattacctttcgatcaccaagttaaacattattaacattaaacattaaacatagttacttacttcttagcatgccaaaatcactttctgccataatcaatttaaattttcttaaaataggttcttaatgcagccataagtcaactctcttacatcatctttggtcaatttccttctctcaaattcaaactcaagatttgaaatgggatgagtggatggttcacagtcatgttcgccaagccagtgaagtacggatcagatgatgcctgatat

SEQ ID NO: 234392 - DNA, 444 bp, Glycine max
  unsure (1)..(444): unsure at all n locations
agctntaaaaatttactcccaagtattgttcatacttcatacccgggaatgtagtaataccttgttatacttcatttttatcctcatagtaaggggtcagaatgttatatttccatagcaatatgagagtttattttctaactcaattgcaacttccattttcactcttactttttattctaattattttgagttttaaaaaatattcctaagaatattaaaatctaaccgaacatatttttaaatttactcaagaatagcattctaggaaagtattcctatgaatgtcattctgagaatgcaatattattccttgaaacaaatgtcaccatataaactatcttttcctccatccttaaaggttaaagctatatagtaaataatacacaattatgtagagtcaagacttctattgatagggcagggctactgctttttatgaca

SEQ ID NO: 234393 - DNA, 480 bp, Glycine max
  unsure (1)..(480): unsure at all n locations
ntgcctatatgctgcccattntcttcccatactcaatttgctatatcgttntgcaccagcttcattaatcttaaaataaaatcgaggctaaaaagaaaagacaaatttatcaaatatcatatgcaaaattttatatatatatatatgaaaaatagtaaagataaggtttctaagtggtgtagatataaaaatttatatataactaattgacatacctttaaaattgtttcaaagcaatcatcaaaataagctttaggtacgcctgaaggttcataccatctatcataatccataggaaataatttgcaatcagctgctagtattccaagaaatcctgtaagcaaggcttgtgcttcaccaattgcttggccttggtcatcaaaattcacaatgatgcgtaactccctagganaactatngactcccctaactttcaccttaatcttcttgatcgtttcttcagagtctttaacaataaaa

SEQ ID NO: 234394 - DNA, 427 bp, Glycine max
  unsure (1)..(427): unsure at all n locations
agcttcttggcaatctttattccagcgattatgttggnttttgcgtaagagcttgaacaacggctcacaaatggcggtgagctgcgatatgaatctggcaatataattcaagcgtcccaagaagccccggacttgtctctcagtatgggttctggcatctcaaggatagccttcaccttttcggggtctacctctatccctttctggcttacaatgaaaccaagcaatttccctgatttgaccccaaaggtacacttagtggggttcaaccttaattgatatttcttaagcctttcgaacaacttccgcaggttgacaaggtgttcttcctcagatttagatttagcaattatgtcgtccacgtaaacctcgatctcttgatgcatcatatcatggaacaaagctaccatggcccgttgataagttg

SEQ ID NO: 234395 - DNA, 479 bp, Glycine max
tatgcgcatatttccctacgaacattcacttgcacatgttattctattaactaagaaaaatgcacccatatacaatcaaggtagcttcattacctagattatttacatgtacttccaaagtgtatttgttatttacatcatacacgccatcttgtcaaaatttacacatgcatactcaaagcatttcggggtaccaaaaattgcacatgcgctcatcttggtatttctaatatctatacatatacaaacttcatgatgaatcttgactacctacgcaataaggagctacatttcatgctcttttttttcaagattttgctacctaaagccatacgcaaattcaagcatatctttctttgctgactaatattgcattcgaatataaaaggtatatctttatgcaatatgttttcttcatgcaacatatatatatatatattttgtgagacattctgactaccaagagttatatatacata

SEQ ID NO: 234396 - DNA, 405 bp, Glycine max
  unsure (1)..(405): unsure at all n locations
caagctagctgcctctccctacccttcttcccctcggatagaaactgtcagatcatcaagactccaacagtttttcctgatgtaggccaagttaatgactgggctaaggcgctcaaaagtaaggctgtcagagacaacccctctagctctacatagggcggcgatcagagtaggaaacccaagtcgagaagagttatactgggctataaaagtcatctggccaaaaatgagagctcctacgttcatgtccatgcgagagactaggccaaagatcagcctagctctgtccactgtcaaatcagaggtatgtgatgtggggaccaggttagagtatgagagaacatccacacctgggctaaagtagtcaaatcttttctgagaatcctcctangatggcccttagca

SEQ ID NO: 234397 - DNA, 476 bp, Glycine max
tctcagatctggacatggaaagacttggcaactgccttcttttgttttaccaatactacacagatatggctcctgatcggaaccaacttcagagcatgaccaaacgggaacatgagtccattatagaatatgctcaaaggtggagagacctagcagtccaagtcatcccacctatgacggagagggaaatgatcacaattatgataaatacgttgcctacgttctactacgagaagctgataggatatatgccggctaactttgcagacctcgtctttgccagagaaagaatcgagtccggactgaggaaaggcaagtttgaatatgcctccaacgctgcccccaacaacaatagaagagccccaatggtgggcacacggaataaggaaggagatacccacgcagtcaccaccgccccaacatggatgataacgccaccagacactcacaactcataccaacacaactacccgaac

SEQ ID NO: 234398 - DNA, 472 bp, Glycine max
  unsure (1)..(472): unsure at all n locations
gagccaatacaaacgacaatgactntttaatcggatgtctgtttgtttcccgcaacatatcgagacgctcgagattgaatgttgaacttctgagataattcaaacgacaataacttttttctcggatgtctgattgagtcccgtaacatatcgagacgctcgaaattgaatgatgaacctcttagctaattcaaacgaccataactattttcacggatgcctgattgagtcccgtaacatatcgagacgctcgaaattgaatgttgaagctctgagccaattcaaacgacaataactttattctcggatgtctgattgagtcccataacatatcgagacgctcgnattgaatgttgaagctctgagccaattcacacaacaataactttttactcggatgtctgattgactcccgaatatatcgagacgctcgaaattgaatgttgaagctctgagccaattgaaacgacaa

SEQ ID NO: 234399 - DNA, 457 bp, Glycine max
acacatgaaactcagctacaggggtgttatattaacactaacgagattacttttttcttaccaagcgatgtgggactaagaccacacaagttttgctgaccaagcgatgtaggacaaaggaactaagaccacaaactctaacagttgtgcatattaaataagacaaaaacttagatgaaatttcttgacaagaataactattaagtgttatttgtgtgggttctgaaataagaactaataactttttatcttgataatatgtataatcgtctaatataaatttctattctacaaattactaaggacaacttcaactataattgacaaataattcaaactttacttaagaacatgtatcataagacaagtatcaactacattgtgtagcacacattacttgcagtataagtgcaactgtaagactcattcatacaccgcatgtgacacaatgtttact

SEQ ID NO: 234400 - DNA, 425 bp, Glycine max
  unsure (1)..(425): unsure at all n locations
agcttccagctagtaataattaaaggaataatagtacttggacactcatgttatagctaggcaaggtttgggagggcaaattgcaataccaaggtgcatccccaaacaggtcatagcctttctagttaggctctcaaattggcaccctagaattgtcttcttattagaggtgttcatgttaaacatatttacctacagttgaagatgataggtacatgttaaaattttttgcctacaattaggagatgtaagtaaaagctaatgacttttacctacacacaatacatagtaggtaaaacctatagtgacagacaattagccgtcattatacgccccctcaaagttgatggaagaaacgtctgtaggacaaagtctatcatacatttacctacanaatttntatttacagtgacaatttttgtctg

SEQ ID NO: 234401 - DNA, 476 bp, Glycine max
  unsure (1)..(476): unsure at all n locations
acctataaaactcagcttgtctagcgttatgcagacggagaccacatgttttctttatcgccaagtaccaagaagagttaggtctagccatggcccacgagcatagaatcgcggatgagtatgctcaagtatatgcggaaaaagaggctagaggaagggtgatcgactctttacaccaagaggcaaccatgtggatggaccggtttgctcttaccttgaacgggagtcaagaacttccccgcttgttagccaaggccaaggcgatggcagacacctactccacccccgaagagatacatgggcttctcggctattgtcaacatatgatagacttaatggcccacataattagaaatcgttaggaaacttgtatggtctctcagaccttgactggatacgacttcctttctgaaatanaatgagttggtcccatgtttctactccaaacagcttgtgcaaatcaaatcactcctaca

SEQ ID NO: 234402 - DNA, 397 bp, Glycine max
  unsure (1)..(397): unsure at all n locations
aagtgttgcaccttaacaggggnggagcaactagcaacagcaaactatgttgaaattgtcaaaacactatttggaaatatggtgaaactttgcatctcgtttaattcctcacctttacctcatttagctttaaaaaaaatgttagcagcactcaattattcttgggtccaatctgcaataagttcatagtgatatgcacatgaatattcaatatattggagagttggaaaaagagtataaaaaaatatatcgatgttacttctctaatacagtaaataaaaaaagaaaaaaaaaggaaagttaattctgctatgttatttatatggcgcaggtcttaatgaagagaaacatgttaccaaataccaaccaagaagatatggtgttacagatgcccttg

SEQ ID NO: 234403 - DNA, 454 bp, Glycine max
  unsure (1)..(454): unsure at all n locations
ctcaagctctgcgccattgcatcgtntatatgattgatatattattattatcatttttgttcttgagatgaaactctgtgatgtctttatgccagacattgtccttttgcacttgaggctatcacagctttaacagaacttggatccactgcaaaggacatcattacattgattcctcaggtttgttgataacaagctgaaagaaattcatttgactgaagctctcaagatgatcctttgattgcaatggaacacatctactgcaaaggacattatgccatttcttcctctcctttggggaattacgaactcaccatcaaagaataaactttaccctgtaggctgatgtgttctataacgttgagaaaggaaaatggggtatctataagactcagtcctctgcgttaacaaacgcactctacttagatggatattgagtcctttccttctatta

SEQ ID NO: 234404 - DNA, 228 bp, Glycine max
tttcatacactccctaaacatagtgcacaatttaaaacactgaggggtatagacccctgcctcaagactttcaaactaaacaacaaatgtcactatcctgacccgacatttagaactcggacttggcctatgtctatgcctatacctcgacctagatctcgacctcgacctacatctcgatctcgactgagctcttcctggggaaggtgaccttgagttcctgaaata

SEQ ID NO: 234405 - DNA, 303 bp, Glycine max
cttgaggacactattgctaccccacagagctccgcgaaatgtgttgcggacacactgtttcttgcgagccctcttggtcaatcagtcaagggctcacgaggtaaatgaagactcttcccggaaccggggacacttctggcgaacgtgtaggaaagcctactagaagtacaactaggcgagatagcctattctaaatcgattgttagagcgaaggactagctgaacctctatcggcgctgttagaaataaattcgttgacgacttttaactaggagagccacctataacctcgtatgcgaacgt

SEQ ID NO: 234406 - DNA, 302 bp, Glycine max
  unsure (1)..(302): unsure at all n locations
aaggattccttttccacccagtacaacgttgctgtataaatgttagggtcaacaacgttttaattttaataaaatgcaaggtttaaaccatttggactatgggatctattggaatacatttggagaagagaaattntcaattcttcaatggaaaatggagcacgtaagaaagaattatcatcagatgacacgcggaagagaatatgacttattatttcatcaatcttgttgcttcatcacacatatagatcttcaagtaggattctgctttatacaaatatcatatgtgattcaacacatac

SEQ ID NO: 234407 - DNA, 446 bp, Glycine max
  unsure (1)..(446): unsure at all n locations
gatccttaagtcacctgcagcatcaagctggggcagacctgtatcttctcctcttattgncattnctgacgcatcatcagatgaagcagctgcccctcctgattcaccacctgcagaaacaactgacccccctgtttccccaattggaggaattgttgatctttctgattcgccatctggagaagcggttgctctcaccgattccccagtttaaacacttttgacattgttgattcttgatgttactttttgctttttggttttttattattttaattatggttttaatatagcatttattttatgtttgtatacactgctacgtttatttatgaatagtaagtttgctctctctgaagcattttgaataatttaactttgtttctatgacatggcagtgaaacacttttatcttttgtgaaaaagggtgtatgtcttattttaat

SEQ ID NO: 234408 - DNA, 467 bp, Glycine max
  unsure (1)..(467): unsure at all n locations
cattaccttgacatatttctaattgtacagngatatgagatttatttgccctncacaaaatagctacagtcgtgaggtcatctttcttcaactatgtcataagatgaactggcattgagtattgttatttgcatggttcattaattttttttgcagcatttatgtttcaaatttaacataaactattatatgctattacgttatgattgtatccgctattggcatgcagagctaaatatgatccacaaagtgatttattggatcacgagatcatgctacaagggaaatgtgttcaacagaaggacatggaggtatagtctataattctgtcggtgaaatcattgaatccagacgattgatcttatcttacttcatagtcaataactaaatttgcagccacatgctacaaaaggattctacttttgaagccataacctctaccctgagagaaatcagtttcataattc

SEQ ID NO: 234409 - DNA, 397 bp, Glycine max
actttcttccaaacaggactgagaaaaggagatttggatcgcgtatacgtattattctcccctacctttgctatcttggatggttattatttaacccatctcctggtttgtctgaacaaaagtccaaaattgatcttctttccactgtgatatgaatacttgtccaataaacaatcagggaactcttactccatgtcctttactttcaactatgctaataattatgcacaaagattccctactcttctgataaaatggtgacatcaaaactcaaaagtggttataagttctaaccttttttatctcaacgtagaatatccatttccagatagctagctgtgaatgaacctttgttggatacaaactggcttgtattactacatgacccttaatgatt

SEQ ID NO: 234410 - DNA, 164 bp, Glycine max
aaaacaaagaagcatgagtgacaaaagaacacaggacagccctcattcaaaataaaacatcactctcaaaattgactctatgcgtacaaaagaggccgcggtcagcggatagcatgtcaataaccatcactctcgacaacacagtaactgcatcaaaagacaca

SEQ ID NO: 234411 - DNA, 387 bp, Glycine max
  unsure (1)..(387): unsure at all n locations
gactcttaagtcacctgcggcatcaagcttgaagtgtgtatctcaccatcttttatttanaacactaggaaaaagtctactatcattgttattatttctttcttcatcattaagggaaacacttgggctgccagatccttccacctttggatgtattctttaaaagatccgcgcccccttttttcacatgttttgtagttgcatcctatccgaagacattatactgacactgcctaacgaaggcaaccattaggtccttccaagaatggactcgggatggttccaagttagtgtaccaggtaacacctaccccagtaagactttcttggaaggaatgtatcagcaattccttattttttgcgtatgcccccatcttctgacaataca

SEQ ID NO: 234412 - DNA, 474 bp, Glycine max
aaactcaagcttatccttatggcttgcctccggacttcaccccccgtgccatccctgtttatataagccaagcccctactttcgaggggcaactcccaccttatgaagactatcccgggcaagacaatgaggaaggagatacccatcttagccccctgctccacctcaaagatccgtccccccatgaactaccccaaccaaacatagttcgccatatcccgacttcacccacacccgtaaaagaatctgttcccttcgtggaagataagggaaagattgaggtgcttgaagagaggttgagagcagtcgagggcctcggcaattacccattctcggatttagcggatttatgtctcgttcccaacatcgtcatccctcccaagttcaaagaaccggactttgataagtacaaagggacgacatgtccgcaggggcatcttcggatgtattattgaaagatggaggcgtattctg

SEQ ID NO: 234413 - DNA, 399 bp, Glycine max
  unsure (1)..(399): unsure at all n locations
agctgcatggngaatttatggtgttntgttgacaacaatgaggaagacaaaggtgatgaccataagctcatagatcaatctaagaacaactcacgtgaatcaagaacaattcaagagttcaagataagaatcaagaataattctcgactcaagaagaaagtctagagttaagaatcaagattcaagggtcaagatctcaagaatcaagatcaagattcaagaatgaagagaagactcaatcaagataagtattaaaaagtttttcaaaactttgaatagcacatgagttcttgacaaaaccttctaccaaagagtgtttactctctggtaatcgattaccagattgttgtaatcgattaccacctacaatatggattgtgaaaagtttccaataaattt

SEQ ID NO: 234414 - DNA, 465 bp, Glycine max
  unsure (1)..(465): unsure at all n locations
tatttaatgagatcaatttaaggagcttgtgcagttttgtgtgttccatagagaaggttnggccataagagttgagtagctcacaaagatacctcatatctataaaaaaaacttcttattcaaaacactctatgttagagctaaaccttgtcgatccaaaaacaagtgtaaacacgttcatcagaggagtcacaatgaagaaggcttccaaaaaggtgtattctatccgtatcccttatgaatagaggaaagactcagagaagcaatatagggatattatttattaccgacatcctatataaacatgggatggtagtgttgaatatgaatcttataacataaaggcaacaaaggtgtagcatatatgttctctatctttgcccaacatactatccttggacttattgagttatatactacactggtgagatccactggcgatagcataaattgtctgtgcaaccc

SEQ ID NO: 234415 - DNA, 422 bp, Glycine max
  unsure (1)..(422): unsure at all n locations
agcgtatcattattcagctcattgcatgttttttctttatggccncncaccgacaaggcagtgtgtttaaaaagcttaattgtatctgtgagtatgtctgtctttgttgtcatgttgtgttctatccttttaacgtagtctcattggtatgaagaatttatttgccttgtcctttgcttgtactccttcattcctctattgagctgtcttcattcggtaaaatgagtntgtttctactcactcttttatctatttttcattggaactccttcattcacatgtgtatataaatatattcctcatctcaatctcgctctgttattgcgggccatgcttttctttatctataatgaagctgaaagacaacattcttgcacttctgatcatgacttcgttcgaacaccttgcctcaatatttgtga

SEQ ID NO: 234416 - DNA, 457 bp, Glycine max
  unsure (1)..(457): unsure at all n locations
tattggggagatccctcgttctctataatattttttcttcttgncngngnctaaggagaaagatgtgttatgcttttgtgatctattaatgagccaccatatctatcaggttcgataacatgagattttgctcagaatgtacaacaaatgttctcctataattcccggaactatatgaactgaggcgcatacacacatgttttttcgagaaatcctatatgataaggagacacatatagagagttggagccattagttaagacacacatgagcacgagcttgagagttgagataccatcatacactagcaataacattcgatgatcatatgtaactaaaggagctaatttctcctcacatatacaaaaccctacataggtagctgttatatcgctgaagcactgatacaccggatccttgctcctatttgctaaaatatatgctttatcctcataca

SEQ ID NO: 234417 - DNA, 429 bp, Glycine max
  unsure (1)..(429): unsure at all n locations
naagcttttgaggaaaattatattgacatttttagngagcttgagtaatcgtagagtgataatactaaaaaatggttcatgcaacttatgcaagtatactgtagttgtgttatgctatcattatacttgctgatgtaatttatgtgcaaagtcctaaccatccattctcttcaactttggactgatatatgcaaaaattaataggactaccttgagtggcaatttaagatagcaacagattgattacctcaagtttgaaaatctggttcttctccttctgatcttgctggtcagcattggactcattggtatcatcttcatcttccctttcacgaactactttgatgcactcacctgtccttggaatgtatccaaatgccttacacacaaagcctgataccgtctatattggtaccctgaaatgcatat

SEQ ID NO: 234418 - DNA, 393 bp, Glycine max
  unsure (1)..(393): unsure at all n locations
cacaanaaactccgcttctaaattctccacttaaacatagacggattctcattattataaccttcaagagtctcgttcagtagctgcttagagggaatgctgtttttactgatatgctgctaattacagattgtctttaaaaccattataggaacggaaaatctaggaccttgaatttgagagttaatagctgatcttatatccgtaattgttatgcacaacgaacgctggttatgaatgcaagtcagatatgatatgctatggtgggagaaatattatgttaacgcttacaaaacatgcttactttcggtaggcagagtccttactttcgtatatgtctaggctttgttagtatatgatagtacaccgccatgtactcatgacgcgatttcg

SEQ ID NO: 234419 - DNA, 276 bp, Glycine max
tcaaatttatatgcttatctctgatggtgacatcggttgctaaatttaacataaattgtcggccccatacttaacagtcttgcaccattgtacctatttcatgaatatcattctcaacctatttgatgaacatatgatcgagagactccttactgagaatatgaatgacacaccacttgacggatattattgatcaataaaataatgaattacagactgagttccaaactgttttatataccttgtcacatctaacgatagagggtaattaactta

SEQ ID NO: 234420 - DNA, 320 bp, Glycine max
  unsure (1)..(320): unsure at all n locations
cgaaggaccactctaaagaaccggctctgagnttgagacactccacacacctaaaataaactgaactcacagagacgcctatacaaagatgcccacagaacatacctgaataatacgcagcacaagcattcctaaataggcgcgaacatatgcaataaagaagaagaacaagagaatggttacatgacagaagactaatacacacaaatacacaagccgccgatgaaagaaacaaaaacgcaatgaaagaaacagggatcaaactaatatacaaganccttcaatattctacacgagacatgcgataatggtcaaagctc

SEQ ID NO: 234421 - DNA, 454 bp, Glycine max
  unsure (1)..(454): unsure at all n locations
cgcttccatcagaatgttcgaatgcggctctatatataaattgaaacacttctaatngaacacgaatgctccaagaaatatcaaatggccatgacttctaacttcgtatccgattgcaacccataatatatttagacgctcaaaattgaacatgaaaggttcgagcaaattcaaatgaccataactcttactttcgtatccgattgcagactattaaatatcaagacacttgaaattgaacctggagtttgctggaaaattcaaactacaataacttttgactcggttgtccaattgaggctatcgagacgcacgaaattgaacatagaaactcggggcaaattcaaattgtcataacttctgactttgatatccgattacagcccataatatatcgagagttgatatttaaatgtccacggtgggtgagttgaatttatttcttggactacaa

SEQ ID NO: 234422 - DNA, 482 bp, Glycine max
  unsure (1)..(482): unsure at all n locations
tactaagctagcccccacttaanacgacaataactttaactcggatgtcttattatttctagtaatatatcgggacgctcgaaattgaaaacagaagctctgagcaaattcaaacgacaataacattttacacggatgtcggattgtgactagttatatcgagacgctcgaaattcagaatagaagctctaagtaaaatcaaacgacaataacttttgacacggatgtccaaatgaataccataatatatcgagatgctcgtaattgataacggaagctctgagaaaattctaacgacaataactttttactcggatgtctgattgagtcccgtaatatatcgagattctcgtaattgaaaatggaagctcgtaccaaattcaaatgacaataattgtttactcggatgtccaattgggtcctggaatatatcgtgacgctcgaaatngaaaacataagctctgagcagattcaaacacaat

SEQ ID NO: 234423 - DNA, 421 bp, Glycine max
  unsure (1)..(421): unsure at all n locations
ataatttgtcaaccaaattaccttcctcatattcacatcattcaaggtatttgatattattatgctagattgactagtatttactatgaacctacattcaatcataataagaaggaacttgcatatttagtaatatcataaaagatatacttaagctccactcacaaaaataaggaaacaaagcatgattaactaacctttgggttgtatatcattaatagttgaggcaaactctgtaacaaccattcttgcactcaaaatcttcaatttcccacaactgggacataaaagtagaaacaaagaggatgttgttagaattcagaanaatgatattatacattgtatgtggacaagaatcatatttgaagtcagaagatcttcacattctggagtatagacttgcaagtcattctcttatgca

SEQ ID NO: 234424 - DNA, 460 bp, Glycine max
  unsure (1)..(460): unsure at all n locations
caagttataaattattttcaaagtaattatgttgtttctacttcagaaccccttgaactacttcacatagacttatttggtccttccacaactatgagtttgggtgggaattactatggcttagtaattatagatgattattcaagactttgcttttgaaaaccaaaaatgaagcttttgatgcttttcgcaaacttgccaaggttattcaaaatgaaaaaggtcttaacattgtttcaattagaagtgatcatggagatgaatttcaaaatgagtcttttgaaaagttttatgaagaaaatggaattcaacacaattttttttccccaagaacacctcaacaaaatggtgttgtggagaggaaaaatagatcccttgaagaaggagttagaactcttcttaatgaaacacaggtaccacagtactcttggactgatgggataaatactatnttctatac

SEQ ID NO: 234425 - DNA, 345 bp, Glycine max
  unsure (1)..(345): unsure at all n locations
gctgcaaattaacaatgaacgagtaagacagtgaataaactctaaatctattattttcttatgggttggcggttaatttccatgtatggcaaatgctatggtctaaggacaagttgtatattggttcttgtgatcatgaatattgtgaatctgctcaaaatttgaaaaattgatgtgttaaaatgaagntttgtataaaggatttttaatattttttttatgaatgtgaaatgtctataaccaattaaaactataacactctactaattggttcttcaatcctatttttaactaaaatattctacataaagattacgactatatttgagtacaccaaacgagatt

SEQ ID NO: 234426 - DNA, 468 bp, Glycine max
  unsure (1)..(468): unsure at all n locations
taagctctaacaagtgcctccacaacctttgccaaaacaacttgattatttgttattttataatgtcaagataaacatgaatgaagaaaaagaagaggtcctccaatatagaatttctagaaatgatgtcaccaaaaaaacataaccaactgaattgaaaattagttaatgttgaaaaaaaaagtgtcacacaacttggatagaagaccccacacaggaggccacttgaaggaatagatgcaacattgactttgaatgattcacaaaatgacatatatacgcaatcaattagattcaaaagttaagttgtccatatgtgttgaaagacataagtaaaatttatcaactatacaattgacaatgtatttaccttaatcttgcctacaaaattcatggcttcttctatgaattcaatgagatatatttggngaggtgtctcactctccaatagaagtataatcttatatc

SEQ ID NO: 234427 - DNA, 283 bp, Glycine max
ttcaaggcgggggatgcaacctctgacccatctatttaatctaagtctttgccagaggcacattagacctctctgttttttaaaacttcacaggttctcctcacaggatacctttcagcaatgccaagcgataatgctttatctggaaccccaaaattaatgagcttttttcctctttttgaaatacctccctccttgtgaaggactggactggattcctgctttgagctataggtggaacctttttcttactaggtggcacgggtcgccaaattccctaaac

SEQ ID NO: 234428 - DNA, 441 bp, Glycine max
  unsure (1)..(441): unsure at all n locations
actaagctcaccatgatgaatgcaacatcctgatgccaaggttttttattattatgttgattgggctcgctgacattgtatttgcgggcatgacaattggtgattctccatctcccatttaacaacatgtgaagtggaaaatgattcgcacgaaaaaatctagtcaaatgacgtctattgcaataaaggaaattgcatataggattgttagtaactttcatttgtcagtggccatttttattaataattcttggatcactaaaccaaatttgcttcatctattgactacagaattcactggaaaagcaaccctcatagggaatctttattgcccatgggcatcacgaagtattgcttgtttctattgngcaaccaaagcactctactcatgtgcgtgattctagagcacgtgttactatcaaacaatactttggaccgact

SEQ ID NO: 234429 - DNA, 392 bp, Glycine max
  unsure (1)..(392): unsure at all n locations
ataataatgataagtgaagtatcatttcctcatagaattatgcgataattgggtaataattagtaaatttaatagactacaagtgtagaaagattaagtaaccaaattttaaggcaattgcataaaagaagaagcaaaaagaaaattagttgagaaatcaatgagataacctaagtccttttttcgaacagttggtatacacaaaaaattgagatgaaatcaatgagagaaanttatcagggtttaactccataaaaccatcgtcgacatctgtggatgaacctaaacatgcaatggtaagtaatactaataatttacgtcatttacctcaatatttgcataataatttgtgtaatctgtttgttttgatgtaacaggaagttttgatggca

SEQ ID NO: 234430 - DNA, 392 bp, Glycine max
  unsure (1)..(392): unsure at all n locations
atattgttccacacactattttttttattacgtccatgaacgagacgcactctccttggcttgctagagnttccgccttctactccaagcacttgctcagtattcctgctacttcattcctactttgtttcactcgatctaattctcatatatgagatcttgaccactcctgctattctcaccatagaaggatagtacccacaaaagaggcatggcttccttcctcctatcgagcatcctaagatcccatcaaactcctctatggctagtgctaacggaaagtccccaaaagtaaagcatctaagaaattggtcatagcattgagtgagagatgtgatggcctcacttgacacttctatcattttcagatcctacagcttcccatatacctt

SEQ ID NO: 234431 - DNA, 443 bp, Glycine max
  unsure (1)..(443): unsure at all n locations
agcttatcacaatcaatgtttctatcatcttgctcaagngttgcagggcccagagcctgagttgttcccttttcaaattcagaaacatagccatactcatcagcattttcatcttccatctcaccctgcatctcattgttatcttctggaacatcaccagatacattaactctttctttcttatattcaagtgcatcacctatacttcgacgaggattagtatgcttctcctgaataaatgaatgatcggtccatggatgatgagatttgggttgattttctccaaatcccccactatttgatgagttgggcatctcaacatccatatcagacatactgctagaaggcaagcctcccaacagagtagagtcaaagtcatgatgactattagacacattcgactctgctgctacattttcagaaccagatgtctgccaatcaac

SEQ ID NO: 234432 - DNA, 472 bp, Glycine max
  unsure (1)..(472): unsure at all n locations
tataccatcctaaccttntcttttctttccttgttgcttcattctttntccaagggagaacttcagcatggacacaaaaaagggcgtataaagatgctaacaaactttccacatacaatttattgatatgagttgcgtataatatttaagtggattaaaatttctattcttatttctaacacatttgcaatttcaacagtgattgttggagagattgccaattttgcagcttatgcatttgccccagctatattggtcacccctcttggtgctcttagcattattatcaggcatgataaaaaaatttagctttaaattgatgcttgactcttggtaaattatgatttttgacgtttgcttgcagtgctgctcttgctcatattattttacgggagaggctacatatttntggaattctccggtgtgttatgtgtgttgtgggatctacgacaattgttttgcatgcacctca

SEQ ID NO: 234433 - DNA, 347 bp, Glycine max
acaccaaccgagaagggacagggactccgcgaatggggatgtgttcataaaggaaagaaaagggcaccattctttggtttgttgctgtttcatccatgtcagcgcctagcctctttagtggcccttccaatgggaatcactggtgaaacctcttactatacaaaaggaacatttcaacacccttctctcctctctatgaattcttcatccttcattgatgacatttgagtgttaaattaaatttgcatttatttattattcatgtgcataaacaaaaagaaaccttcacccaaaacaaaaataagtgtgttacacgacatgtatggcacccctttggatgatgtttt

SEQ ID NO: 234434 - DNA, 312 bp, Glycine max
ccacttataatggcgaacaacttgttggcaagttcgatgccaaccgttgtatattcctttgattgcaggaaaaaagagggaaatcactggcaactcccttctcctggatcaccattcaaagattctgcccaccatgactatattaatggtgagatgtctaccatttactacactgaagtgtgttattgaagatccttgtatcgaaatatagtagagaccgctacatacaagtacgataagcacattgactgacctcataagcatatcatttgcttaccatcatggattcttggggagacaataaacccactg

SEQ ID NO: 234435 - DNA, 419 bp, Glycine max
  unsure (1)..(419): unsure at all n locations
agcttcaaaccacagttacacagagatcttgtgtcttaaaccncgcaaancaatgggnnttctaggtgtgaaaagtgaaatttacaatgaggtaaatttgaagcaaactctcacctcacacaagtccataacatcaatctaaacttgcccaaactggatttacacctaaaattccaccaaatcaaaatttgactcttcaacacccaattttgccctagaaatggctcttggttcactttggtcatttgtttttctctctagctcagcctaacctttctcacatgttctaaatgaaatttcaagctagtattaactcactctaacctccatttaccacagaattcagacttagccttccaacttctaaagattcactctttatccactcataacatcacattttcactgtctaaccctag

SEQ ID NO: 234436 - DNA, 311 bp, Glycine max
ttttctctacatgcacgagagtttggccttggcttgaagcttatgcacgtgtacgaagctctacagagagaaaggtctaagttccacagagttctgagagattttgctgtgtaaagatctgcagagacgatagtgatcgacgccgttcccgaatcatataaacattaccatgcagtggctaggaagagatcctaggtcgtttcccatcgagcaatgatacaccaactcgtcataacagattgtaggaatatacaaatgattggagggggggggggggtgatcatttatcaactatacccttgacaatgctg

SEQ ID NO: 234437 - DNA, 339 bp, Glycine max
  unsure (1)..(339): unsure at all n locations
agcgtgggaaangatttctatacaaaattttttcttataaagcgangaacagggcgcatgaagtaccccaccacaatctagccaacttcgagccttgccttggatatgccactgaggggcaagcaattggtggtacctgtgcgaacctacccttttgcgggcaagcgaagcgaggcttacaggtgcgtcttccaaaggaggaaaatgcgtagagtcgccacccacttttatttgtggaaaacgtnagaacaactgaaggaaaccggtcatgaagaatatttcagattcgggagctgtatttaccttttggggaggtattatcacctttcacgtttgtcc

SEQ ID NO: 234438 - DNA, 415 bp, Glycine max
  unsure (1)..(415): unsure at all n locations
agaactgaggagaaatcaagaacaagctcgttttcttttttttcgcgtgnangacatccacgcgacaaggtttgaagtataggagagcttctaccctataacgcatcgtggcggacaaaagtgggcagtaaacatgaatggtcgtcattatcaatgctgaagggattgtgcgctatactatacatgctcacacattattgcatgccagtggttacgtgagcatgaactactaccaagatatagacgttgtttatacaaaccagcacatctgagaagcttactccgcacaatggtggcctcttaagaatgaagcggctattcctccttctgatgacgcatggacacttagtcctgacccgactacaatatgtgcgaaaggtcgcccacaatcaacaaggataagaaatgagatgga

SEQ ID NO: 234439 - DNA, 403 bp, Glycine max
  unsure (1)..(403): unsure at all n locations
gatgacaagnaaaggaagaatgcatagtttgaactggaaaactcatgatcaagctcctaagagaggcaaccaatgatggaactgaaaaactcatgatcaagcttttcatattgattgcatagaccactacatgtttggtttcagtgcttgattaacaatcgcatgtacatcttaggttgttttttgtttattaatatatagttaagcaaagcaggtacatgttccttgttttagtatgatcaagcttttcgaggaactgaaaagggaaaaaaggtgattaaacacctaatcacatgctggacaacacacatgtggccatactataggaagagcaagatgcgttagctttaagcaaaggatatatgatgcaaaagcggaatatcactatggctatgatcactac

SEQ ID NO: 234440 - DNA, 412 bp, Glycine max
  unsure (1)..(412): unsure at all n locations
caataggcaagcaaaagaaacctctttttnattatcatggaaagcatcaagaaagctgcgatagattcacatagatgttgcaaggcctcacagaacaccttcattgaaaggtaagatgtattacactatatttattgatgacttcaccaaaatgtgttggatttttttcttcaagttcaaatcagaggtggctgaaattttttggaagttcaaagtcaaggtagagaatgaaaacggtctcaagattcaaactttgaggtctgacaatggcaccgagtacacatctgcaaaatataatcaattttgtgaggattatggcattgaacatcaacttaccaggttctataccccacaacaaaatggtgctagtgagaggataaatagatatatcttggagatgacaacatgcatg

SEQ ID NO: 234441 - DNA, 356 bp, Glycine max
ccaccccggaagatataagccaagcccctactttcgaggggcaactcccaccttatgacgactatcccgggcaagacgatgaggaaggagatacccatcttggccccctactccacctcaaagatccgtcccccatgaactaccccaaccgaacatagtccgtcatatcccgacctcacccacacccgtaaaagaatctgttcccttcgcggaagataagggaaagattgaggcgcttgaagagaggttaagagcagtcgagggccttggcaaatacccattctcggatttagcggatttatgtctcgtgcccaacatcgttatccttccgatgttcaaagtaccagactttgata

SEQ ID NO: 234442 - DNA, 460 bp, Glycine max
  unsure (1)..(460): unsure at all n locations
acacaaaaactagctttgggtgaacaggaccactcatttttttattttatagtcgnatctagacaagggctgagagaccatacaagtttcctaacgatttctaattatgtgggccattaagtctatcatatgctgacaatagccgagaagcccatgaatttcttctggggcggagtaggtgtccgccattgccttggctttggctaacaatcggggaagttcttgactcccgttcaaggtaagagcaaaccgatccatccacatggttgcctcttggtgtaaagagtcgatcacccttcctctagcttgtttgtccgcgtatacttgggcatactcgtccgcgaccctatgctcgtgggccggggctagatctaattcttcttggtacttggcgatgatagctagcatgttggtctctgtctcgcataaacgctgagacaagctccttctggaccttgat

SEQ ID NO: 234443 - DNA, 444 bp, Glycine max
  unsure (1)..(444): unsure at all n locations
agcttatgcgcatatttccttatgaacgttcacttgcacaatacatcctattaactaagaaaaatgcacccatatacaatcaaggtagcttcattacctagattatntacatgtacttccaaggtgtatttgttatttacatcacacacgcctccttggctgaatttacatacatgcatactcaaagcattttggggtaccaaaaactgcacatgcgctcatcttggtatttctaatacccatgcatatacaaacttcacgatgaatcttgactacctacacaataaggtgctacatttcatgcttttttttcaagtttttgctacctaaagccacatgcaaattcaagcatattttcctttgttgactaaaattgtattcaaattagaaggtatantatttttgtaatatgttttcttcatgcaacatatttatatatatttt

SEQ ID NO: 234444 - DNA, 460 bp, Glycine max
  unsure (1)..(460): unsure at all n locations
cgcttctttnggtgcatagaatgtggngaaaaactagtaagtgtcttgaatctctgacataagcttcaaccaattaacattgtttgaatgacaactgttgtagttgcaccgcaatcacatagtttgtccaccatggtatgctttatgttcctattggttatagttatggtatgctttatgttcctttggttatagctttggtggtagaatgtttaatttggagtccacaagaggaggatctccatatggtgctgggtttttgctggagatggtagaagacaagcaagtgaaatggagctggagcttgcagagtatcatggcaagtatatatgaaattagcccataaattccattaagccctctaaatcaaacttcttaatgcactcaaacaaaccattggtgacctcaaaatcaaactccaagtcagtgttgtcataaaagaactctagaattaagaagt

SEQ ID NO: 234445 - DNA, 355 bp, Glycine max
  unsure (1)..(355): unsure at all n locations
gagagactatcaacaaagacttcatttgtctggctttcaacattttctgtgaggctataaacatggcttccttggacagagaaggttttattgcttaactgtagaaatcatgttatatattgaggtattgatggtggttcttgccaaagaacttcaaagggaagttccattgcttgtgtccttgagtgttataagaccattctacccatggaaaaactttccccatgtcaaggcttggatgncaaaagctccaagactgttgatgaacgattataacttcatttggtgtctgatgaaatggaagccaactcatgccagttctgccaaagttgatagttctaccaactactgataa

SEQ ID NO: 234446 - DNA, 479 bp, Glycine max
  unsure (1)..(479): unsure at all n locations
tctacccaatggacttaccttgaattaattcctttgatagcctcttttatccttgnttccctttccttgttgtgaagctcactacaagccttaagtgaaaaaccatgatatcaccatatccttaaggaattttggagctttggaattgttttgggaataagtgtagggggtttttgttacattggacaacttgttttgttggctatgcttcatgatgtattttgggccatacttgatgtacattgtatattggttaaatgttggacatgctgaatgaaatgttgtttctcaaaggctatagagtaaaaaaaaaaaaatcgaaaaaaaaaattcgaaaaaagataaagaaaagcaataaagttgagtgaataagatcttaaatggcacaagaatgatgaaactctttggtctactcttcatgtctaaatattatctttacttctttntattntcttatntttattngtaatatgcactta

SEQ ID NO: 234447 - DNA, 427 bp, Glycine max
  unsure (1)..(427): unsure at all n locations
actaagccctacggcagagtgtattagaattcgttgtatgacgaaatgtatttacatttatattggaaagctntatgcaggctgtgagactctagacattcataatggttatttcatcgtccctttttaatatgaaggtagatcatttgaaattcatagaaataggaccatggatgattgttcaaccattatctcatgatccacacatggtaatcaaatattatctctccagctacgaagattgaacagacattggcttggatccatttcaatagtctaaactttatctattatgatgaanacatttttctagttctcaccacaacactgggaaaccaagtgaatgtcagtattaacatagagtacacgactagggagggagatatgctacagtatgtttagaagtggactaatctacctatttgat

SEQ ID NO: 234448 - DNA, 336 bp, Glycine max
  unsure (1)..(336): unsure at all n locations
atacacctttgttatcatttataacaacctcctatataaaggtatatattgtaattntttccacacaattacgggggttaacgtaacgtataaggagcgtcaatattatgcttcttaaacaattataacgattagtgtatatacatacaaaaggaaaaaatatttgcaatctgaaaaaaacttagggaaagtcacgataatttattcctatttatactttttgngaccactcttcaccatgatgatactacatcctgagctaaaacttgatatgggttaattatttgaaaaatggagaatgtagataacagattatttgaacatccttagggagat

SEQ ID NO: 234449 - DNA, 470 bp, Glycine max
  unsure (1)..(470): unsure at all n locations
aagttttctcaagatagcttctcaaggaagctctttttctatttatagaagcatatgtaacacttgttgtaactttgatgaatgagacttgcgagacacaactcaaagttcaacttctctccctttctcttccttcaatttcgtgctcccccctctctctttctctccctctttcttttcctccattgaagcattatctccaagcttcttatccaagggtcatcttggtggagaagctccttcttccatggcttattccctagtggatggcgcctcctctcacttcttctcctttgtcttccgctgcatctccatggtggaaaatcaccattaaaggacctcattgaagctcaaagatccagcctccatagaagccccacaagcaagcttccatcaagtggtatcagagcacaagagcttcaagtacgtgctccttanacctncattaattctttgctgtaccttctctt

SEQ ID NO: 234450 - DNA, 455 bp, Glycine max
  unsure (1)..(455): unsure at all n locations
cctgangcatgcaagcttacatgatattgttaaaccgaaacttgtatatgcagtttattattgngnngagcacaattggtgggagcttaaagaccacaatgatatggggaagatatttttcatcttttcacaatctatntctaaaggactgatcaagttgtatgcaataattgactgatctccaaaagaaatcattgcccagttacgtaaacaaagaaaaccaagatttatcgaagagatcattattttgatgcatggatcaatgttgacaaaaagctctaatgaaactgacaaaactctatgtaatcatgttgtttattgaagaaactaatatgattggtgttgcccgtgtataaattaataggaatctcattcttttgtacattaataagcgtgggatggttacacatataaaaaagttttttttttatattacagtgcaatttatatatttt

SEQ ID NO: 234451 - DNA, 465 bp, Glycine max
ggaccaaacaacaactgggccctgctctttgtgtttatattactcgatccgcatccgaaaccttagtttgagtacgtgggctacagggtgattatgaagttttctaaaaaatttatatacaccaacgatatgtattctacaaggctccaactgataggtgatgtctaattcttttcgagtcatcgagattatcgaacggaatttttctttttaaaacatttcttacacagctggaaatcgaactggtaacaacatgcttaaagaatcaacttatttagcaattgtgctgaattcgagatatatacaacaacttggaccatatcattttataagtctatttcttttcattatgccggatattacttcttaatattctctcttggatgtacgtatttatagccactctattcatgctcaaatataagagaaattgtttgaactaaatataaatttttaaattaattt

SEQ ID NO: 234452 - DNA, 382 bp, Glycine max
agacaagtggcctcagatatcctaaccaagcgcggttgaattaagatattccaaacttttctcctaattaaaaatctatcttactttttacttaagttatgaattcccttaatgacaatcttcttaaatattaattcaaatgaagcaacttgaattatgaatataaagcaataataaataaaggagattaagggaagagaaaatgcaaactcagttttatactggttcggccacacccttgtgcctacgtccagtccccaagcaacccgcttgagagttccactaacttgtaaattccttttacaagttctaaacacacaaggacaacccttcctttgtgttagagattctttcaacaagagactcacaatctcttaatccc

SEQ ID NO: 234453 - DNA, 432 bp, Glycine max
cttcatgtacacttgtccattattttatgtgaacctcggatccctgtcagagacaatactagaaggaattccatgcaaccttaccacttccttgatgtacaactccacgagtttctccattctatacttcatattcaccggaataaaatgagcagatctggtgagtcgatcaactatgacccacacagcattatgcccacaactagtcttgggtaaactagatacaaaatccatagatatgctctcccatttccattccggaatttccaatggcttcaattctcctgatggtcgctggtgctcagccttatcccttttgacatgtcaaacatcttgctacatctttcttcatgccatgccaccaaaaacttctcttcaaatcttggtacatcttagtcattcctggatggaaactaagacgatctttatgcg

SEQ ID NO: 234454 - DNA, 404 bp, Glycine max
  unsure (1)..(404): unsure at all n locations
gatntcattaattaaaattatccaacattcaactctagtacaataataataaaaaataactttttaatgattataatgaaaaatctttactaaaagaaaaataataataattcaattttattttgcaaaggatgagtatcttttcactcttcctcccattttccctccttcctcggtcaatgtctccactcttcaactcttctcattgcatacattaaacctctaattcaaaaccttcaaatgattcttttaaaaactcacttacacactcatttacatttggtagaaattcccaaactcacgctcaaactaattgagaactcaaaccctcatacactccttgtggtcccaaatttgcaaatctcatacattgttgatctgcttgtccagtctagcaacacaca

SEQ ID NO: 234455 - DNA, 417 bp, Glycine max
cataactaagctcacctccttgagaaaatacatgataatacaaagaattctctactacaaagactacttaggaagcctcgaaaacaaggctaaaaccctatactactataatggccaaaatacacagcccaaacaaacgaaagccctattctaatatttacacaaaatagcgggctcatacttagccacatgggctcaaaatataacctatagctcatgagaaccctagggccttccctaggatctatggcccaatctacttggaggcttgtatccaatgcccttgcgggagatgatctcattatttcctccaccttggaagagatttgacctcacaacttgacgatcttcatactctagcgctcttccatcaacacactgtaaaagaacaaaaacatatgtattacagcgtgttgg

SEQ ID NO: 234456 - DNA, 361 bp, Glycine max
  unsure (1)..(361): unsure at all n locations
taacctcattgtttctcacagtttttagtattcggagccaanccaattcttctgtctagactcctcaccacttatgatagccgccgatgatcccattactgcttcccctaagctctctgtcctttcttcacactgcatcacatgccttgcaaactccttggagtaccctcgcattggggtcactgaaaccccatgcaatgaaaggcgtgatgctttcgtctgatggcgctcctctcatggggtagccaagctgtcttatggcgaggactggattataattaatataaccccttgttctcattaaaggaacatatggaaatccttcacatgaagatagagtcctgattcttccttcctccta

SEQ ID NO: 234457 - DNA, 363 bp, Glycine max
ctctccgtggtgtgaagctcactacaagccttaagtgaacaaccatgatatcaccatatccttaaggaattctggagcttaggaattgtttcggcaataattgtggggggggttttgtttcattggataactagttttgttggctatacttcatgacgtattttgggccatacttgatgcacattgtatattggttaaatgctggacatgctgaacgaaatgtctgttctcacaggatatacagcaaaacataaaaaaaaagtctataatgaacaagagaagcataaagtcgagtgaataagatcttaaatggcacaagaatgatgagactctcggttctactctttatgtgaaaagattatc

SEQ ID NO: 234458 - DNA, 403 bp, Glycine max
  unsure (1)..(403): unsure at all n locations
aaaccaagccgctaatcctgattaaccaattggaccgcactcgctgtcatttattgtataagccgccccaggctaatncctgttttcattatgtcttagacgggcttcaaccaacaaaaatacatactatagttaactacatttcatgtctatttcaacaatgctccctaatacattataactttttaattttctacataacttgcatacacaatggaagtgaatgataaaagcgatgtgtatagctaaggggtattagcattggaaattgctctaggagagcaccctgtatatactataaattcttcattatggacatcttcatccaatggcatggacttaacattagacactccttccttaatgattaagctagaccaactgctaccttatcctacaaatc

SEQ ID NO: 234459 - DNA, 254 bp, Glycine max
ctataccattcaaaagcataaaatcaacatgtaactttaccacttttgcaagaactacgtaggtctgatttcctcatcacaattgaagatacgtgggagcaaaagccccgcttttgtcgaccagcccaagagatcgttaatggtccaatgccttaacgtttctctcctttcaagagatcgttaatggtccaacgccttaacgtttctctcctttcataatcaaaagatcgtttaatgtgccaacgccttaaatg

SEQ ID NO: 234460 - DNA, 404 bp, Glycine max
gcttcatagatataccttcttgagggtaccacgtccttcatttccttaggcctctgtaacacacatgcctccatcgcatttaccatcggtcccctatgattggtgaacggatttgtcttcacattcgggccatcttcttggaatgttagccaccctgcgtcaatccagctttgcactttatgcttaagggccacgcactgctcaatggaatgcctcagagtacctccgtgatacgcgcaggtcgcatcggggttgtaccatctcgagaaaggagactagtagatccatccgggggtcaccactgccaactggttggcgattacgaatggtaacaagtccccgtatgaaatcggaatcagggcaaactctggaagcttcttcatgggagggttcctcctcggatt

SEQ ID NO: 234461 - DNA, 356 bp, Glycine max
cccaacataattgtcatttgtagttttttcaatataacaataatttttctctcgcttttattcattatatattaatgaagaactacataatttacaaataaattaataatggtgtcagattaattttataaaattattattctttcatttatttattattttctcttggcctatataaaacaacttaggatgaaaattatattatttaagaaataaacatatctattccgcaccatatctattacaatatcaatttggattaaccctaatttgtataaaaatatggttagagaaactagatgtgaccattagacataaatcatacctactcctcaaaattaggtgacttagcatta

SEQ ID NO: 234462 - DNA, 371 bp, Glycine max
cgctcttctgtcacacacatgtaatatgtttattatagacagagcatgtttcttttcatctactcctgagtcctgagacagtctaactatatatttctactttcaacagaatattatctgacatgggactttccggatcaatggtgctaccagttgtgcaacttaaaatcacttaccgactcgcgaggcccagatcttaaaagaccacactttctttattttgaatgatcacaagagaacatcactcgaatggcatacattaattttctttgataatacagcgattggagcacaacatcctccaaggtgagatccatatcgactcctccaatgccagtatatgtagacactgcaaattttctttccacctc

SEQ ID NO: 234463 - DNA, 441 bp, Glycine max
  unsure (1)..(441): unsure at all n locations
agcttcaacctttggccagtcattttgcttttaatcgngttatgagagcatttcgggggcgtgaagtgcgtggctaccaatgggacttctaaaatccaggtttgggtggacttctttctctcttaaatttcgtgggtatggggttttgggagatatgatgggtggttttgttagtcttctgctgtgtgatgattatttgtgaaggcatttgctgaaaacttgttgaaatcgccatgtttggatgagttagacataccctttctgttttagggtttttgtgatgatgtttgngatgtttatatgctgaaattgctgatggaaatctgttagagacgaagggtagaactaacccacggttataaagtgagaatgtgatgttatgagtggaaaaagagtgagactctgagagttggacgctaagtctgaattctgtggtaatgg

SEQ ID NO: 234464 - DNA, 420 bp, Glycine max
  unsure (1)..(420): unsure at all n locations
agcttatntggttcccaaaatactacagtttttctttcatctgtatgtgngaaagcnattgattggcaacattgcagcaatatgaacttacgggtagcatattgataaaaaaaaatctgtcaaaactcaactgatactgaccaaatgaccatgcctccgattaccaaaataggattttaaatctaatctaatctataatccactactaacaggaaggtcatgatttaaaaaagaacagacctggcgactttcatgatttcccctcagaatagtaatacgctgacgataacgcactttaagggcaaccaaaagctgcattatgacttaattagcaccaaaaatgttacaaaacanataccatatggaagccaaatatacacaatctataaaacgcaattaaaaaatagcattatcaacttg

SEQ ID NO: 234465 - DNA, 262 bp, Glycine max
  unsure (1)..(262): unsure at all n locations
actaagctcggatacaggagtaaggtgccgtatttttttttctgattataatgtaccatattagntaagcaaataaccaactcgatccagcaatatacaccaccattttcttacttatggtttcaaaagtaaaaggcctgcaccaccacctccaattggggacctaatggccccaacctcacatcaatcttccatataaacctggattttcaggttccggtattttaaaaaataaacctttaggttagtgtgttgaccaaaa

SEQ ID NO: 234466 - DNA, 412 bp, Glycine max
  unsure (1)..(412): unsure at all n locations
agcttctacttatatggcagggcgggcttttcttactttcttgnctccaacgcgagctttgaccaccgctcttccttcccgcgatgcttctctttatatccgcttgagtgggtttatagcctaaaccatatttcccacgatttcctttggcatttatcaagctagttatgccaccgttgtctttgcctaaacccattccgggttcataaccgttccccaacataacacgggccatcattactgctgcatcggataggcaagcttgcccagagaaggagtccacggaggaaatgcttaccacctcaaaagactggaaagcggtttctagtgactcctctgcggcctccacataaggcatagaggatgggcagctcaccaagatgtcttcctcgcctgacacgatgaccaaatg

SEQ ID NO: 234467 - DNA, 436 bp, Glycine max
  unsure (1)..(436): unsure at all n locations
ctcaagcttctanactttatacaagaatgaagctctgataccactcgttttcttttgttctcagatatcttaagaaggcgggttgaattaagatattacaaattatttccccaattaaaaattctatttaactttctattcaagttattaattcccttaataatgaatttcttaaatgttgattcaaatagaacaatttgaatatgaatataaaacaataataaatgaaggagtttaagggaagagaaagtgcacactcagatttatactggttcggccacacccttgtgcctacatccagtccccaagcaaccagcttgagagttccactgtcttgtaaattccttttacaagttctaaacacacaaggacaatccttcctttgtgtttagaattctttcacaacaagagaccctcggtctcttaatcccttttc

SEQ ID NO: 234468 - DNA, 351 bp, Glycine max
gcttttggagtagatacatgggaccttcttcatttattttataaaggaagtcatatctagtcaaggtctgagagaccatacaagtttcctaacgatttctaattatgtgggccattaagtctatcatatgctgacaatagccgagaagcccatgaatctcttcgggggcggagtaggtgtctaccatcgccttggccttggctaataatcggggaagttcttgactcccgttcaaggtaagggcaaaccgatccatccacatggttgcctcttggtgtaaagagtcgatcacccttcctctagcctctttttccgcgtatacttgggcatactcatccgcgattctatgct

SEQ ID NO: 234469 - DNA, 460 bp, Glycine max
  unsure (1)..(460): unsure at all n locations
cttacccgttgaagactgaaganaacgaatatctttgttgaatcttgaagaacgggcgagaatcttcgcgtaattactcacggaaacgttacggaaacattacggaagcgcctcggcttggattttcttcacgaaaataattttcctcagcaaattcgagagagagagagaagtgcctaaggggctgaacccttttcttcttcacttcttcccctatttatagcaaaataggggagaagcttgccgcccagctcgcccaggcgagctcagctcgcccaggcaagcaaggttgcttcctccagaagcaacagccttctggaggaatcttctggagggcccaagtgggcctgggtgctatttactcccccctttttactatatgcacccnccttttctattntntttgtaattctttttccgtaacgttacgaaactttacgaatttcgtaacgatacttat

SEQ ID NO: 234470 - DNA, 432 bp, Glycine max
  unsure (1)..(432): unsure at all n locations
agcttcaccttttggttctcctcatagttgttgcatgagaaaacatgctctattttcatctcccactccaagtaggcctccggatcattctttcctttaaatggaggaatgttgagtttaataccatcaattcgngtttgtctaggaacaccatcattccctcttctcctcctttcttcttcattatgatctctattctccatttgattcaacctctcatggagcgcatcatctcgttgtttcattaacctctccaaatgttgcatcaaagcttgcatttggaattgcgaaagccccactccatcattaggattagtacctgacatctcaaacaaacaaatcaaacgtaacaagacaattatagttgctgtttgaatacctcacccactcaagtgtatcacacaattatggcttttctctaatgaaacactc

SEQ ID NO: 234471 - DNA, 443 bp, Glycine max
  unsure (1)..(443): unsure at all n locations
agcttcaaacttgcatcaaaggagttgttcttgtattaaagattcgncttcaaaatcttagaggtgactttgagcgtttgtttatggaggagtccgagtcaatttctgattatttttctcgagtattggccgtagtcaatcaacttaaaagaaatggtgaagatgttgatgaggtgaaggtcatggaaaaaatacttcgaactttaaatccaagttttgacttcattgttaccaacattgaagaaaacaaggatttaaagaccatgactattgagcaactcatgggttccttacaagcatacgaagaaaaacaaaagagaaaaattaaacaaaaggaggctacggagcaactactacaactcaacgtagaggaagcaaactatgcaaattacaagagccaaagaggacgaggtcgcggccaagatcgtggacgtggacgagga

SEQ ID NO: 234472 - DNA, 473 bp, Glycine max
  unsure (1)..(473): unsure at all n locations
tngatctaccaccaccacaaccaccatcatcttagttttctattatttttaatattattagtactttgatttctagccgtgtatttggctatattattatgacatttgaacaatttagtatttcttttatttgcatggtatgactgaacaattatgaattatgttatatgactatgtggttttttatatatttgatctattcatgtttcttgcttcatgattggtgtatactctttaatgaatgccttgtgtatgattagtagtgtatgtatgtttttcacttgttacgcaccttggctttttgttgatgccaaagggggagagaaatagggattaaatcaagaactcacataagtaattaacttaatttcaaagtgaagcttaaactcaaaaacaaagggggagaatatggaaaatatggataaataagtgagtgatcgactagganaaaatatgtgtatgtgtatcttgat

SEQ ID NO: 234473 - DNA, 323 bp, Glycine max
cttcctgctctaattcgctgaccacagagtggtacctggagatatgtcccggggatcacgagaccttggggacgtcaggtggggtgctattgcccaaaaccaagcttgaccaatcccaacccaacccgggcatatccagtcagtgagaacctgtgatgtacctaagcaggcgagctcttggcagtcaacagataaaaggaacaaagaccacaaagcaaggaggcttgtgtggtggctggccaactgtgaactttgattgatatatgggatatggcctctggaatcaattaccaagggtgggtatcgattacaacgcttaaaat

SEQ ID NO: 234474 - DNA, 272 bp, Glycine max
cctgtcacctcttctacctagtcatccgccgcatctccatgttggaaaaacaccattgacagacctcattgaagcttaaagatccagcctccatagaagccccacaagcaagctttcatcacaagaagcaaaggactccattgatagtcagtgaaaatgacaaactattgtgtataaaactagtataaatagtatcaaactctcccaatttatggttattttgtacagttatcactattttatgttaagcatacgtaataaatacttattac

SEQ ID NO: 234475 - DNA, 325 bp, Glycine max
agcttgactactctgtactgaacatattctcggatgaaataaggatcaatgtcaagatgcttggatcgttcatgatgagcagggtttgaagcaagacttatagcagatttattatcacaaaatagtatcacaaagggcacatctacttcatagtaaagaagtaatttgcttaaccaaacaatttcactagtaacagaagacaaggcatgatattcagcttcaatggatgattttcaaacaatgggttgtttcttagaatgccaagaaagaaagttgtttcccataaagacacaaaagccagaagtggatcttctggtatcaacac

SEQ ID NO: 234476 - DNA, 343 bp, Glycine max
aagccctatatgagcatgatcccttcctatttacatacgcatatatctttttattgctcgcatatccttcatctcagattcactgcgcagaagtgacttcagctttcgaatctcatatttgactcaaggtgcagcgaacatgtccgcccatagcgaagccgatagacatatcaaccatgcgtccccctactatgataaacatgtgaaacataaggacgtatgtcgcatccatgagagacaaacaacctaccaaatctcttgtaccacctagcttggagattgctgcacgccatagagataccttttctatgaatcatgcacgtttcgagattgacgatgctga

SEQ ID NO: 234477 - DNA, 430 bp, Glycine max
  unsure (1)..(430): unsure at all n locations
ataaccaccagcttatatagattattggagactagttcatatgttttattttactcgngcaagacgaaattaagccttattataatttaattttgtaatggaatcatacagagagaggattattaaatttatcaagagtactcttttaaagctacttttaatctttatcatttattttcttaaattaacttataagatagtgacttattatactattagatttaaaaaataaatgtgaggatgaaaagtactctacagaatactctttgtgatattgaccctcctcgatgtatggaacttctatggtcaccaccttttaattggtcaccatgcctacatcttttaattgtgaattaatctcatgtgacgctatatggagaccctaccccattcctgtcttgtccttgtgtgtatcgctaacctttgcata

SEQ ID NO: 234478 - DNA, 401 bp, Glycine max
  unsure (1)..(401): unsure at all n locations
agctaatatattatccattatgatactattattgcgagnnnagacaaagcatgaatgattacaacttgttacaactacaatacaccatccaagataggagatataaagaaggaaaagatcacgggttgatccctcctgctaacanttaacatttattgataaaaaaaatccaggaaagaaattaacgaggaatgagttcataatacaaacaatatatgaagcaaagtgtatgatctaaggcaaagagttggtgtagatgtagtcttcattctccaaaactgtatcttccaacccaccatttccttccctgtactcaaagccttgtttttcacagccacctgatcttctctgcataacacaataaaccccagttattacgctataaacattgaaccatataa

SEQ ID NO: 234479 - DNA, 333 bp, Glycine max
aaatatacgaaaaaagaaaggcactggaagacacgaacaaacaaatgataacggttaaaacctttacagaatgtcggatggaaaaaaaattaatggagcgtgagaagaagaagccatggagctatctcaagagatgccaacagcataatggacccacaatggtcctggctaaaagagatttggcgagcctccacctagggctatgacatcgagtcagtattttacaaatagatatctcacacaaagattccaacagcttaatagacccagaattctccagcttaaagagaatcgatgagccttcatcaaagttctatgagagacagaatgaac

SEQ ID NO: 234480 - DNA, 421 bp, Glycine max
  unsure (1)..(421): unsure at all n locations
agctntcaccagatcatataagataaattcattcaggcaatctgcagatatatcctcccaaacgtcaaattctccgcctatatattcaacctttccatcactggcacgtggagtgaatcttcctccatggtgcaatactaaagttatttgtcattcattctacacaatcagaaaccacaaacattgtcatatattaggaaataaaaaacctacctcaaactcaaacataggcacatcacacaacaacatgcaatgtcatttataaaaatagagcatcataaatgaaaataataaaggatcataaacctccctacgaagcgcgaagacaatgcaaatgaaaccccttgaagatataaaacctcaaatcaaaccacccaacattgcaacgaaatgaacgcaaaaaaccaccacctaacaaaag

SEQ ID NO: 234481 - DNA, 495 bp, Glycine max
  unsure (1)..(495): unsure at all n locations
acacataaaactcagcttgaggattatggagtacccatcacatgtggtactatgtggttgtcgggcgaaggtgcaaaacaattctccacatccacaaatcacatataaacccaccatcccctgttgcccactttcaactgagctcacgtactcccacgtagcccttatcctcgtttctttcaacactgggtccccatcaatcctcccaagcttccacaacatccaagtaattccacatccaatcatcatgaactaacaaaaccaagcaaaataggcaaaggcagaaaactctgcccacaacacaaaccaatatcacagcttttcacatacaaataccccagtaacattctcttcgttccaattcgttaaccgttggatcgactcgaaaantttactggaagtctctagcacataaatctacattatgaccgttgggatctgctagaaacgtccagagcccaatctgtactactctttccacaaccagcaaataca

SEQ ID NO: 234482 - DNA, 293 bp, Glycine max
  unsure (1)..(293): unsure at all n locations
agctttacagcagattgtagtaatgacccactatcctataattaaaataacttaatgccattgacctagggaattaaanaaacttaatggctgagtgtaactgaaattgtggcaaccaaaagtcacccccaacaaccaacaagtcagccaccatttggtctcctaaaaggctgatgcctaggttgccaattgggcccttattacaacttgaactaaacctaactaaagcctttttagttgattaaccacaaacatanttttggtcagccaactttacaaggattgggccatta

SEQ ID NO: 234483 - DNA, 271 bp, Glycine max
  unsure (1)..(271): unsure at all n locations
ttctaaacaacctgagattntaatggaaacactcggccagtcggcctctaaactgtctattggtcaacctacacattcttctgttttgcaggttacaggactgtacatctgtggtgagggtcatgaaatatgccaatgtatttccattgataaaaacactctagaagttgactatatgggaaatcaatagagacaaggatatactctatgaggattcttacgcttccatcacggtccttattatcaacaaggagagtggagatcacaccct

SEQ ID NO: 234484 - DNA, 256 bp, Glycine max
acgagacatcttgcttaacaaagtcacggtagcggaaactcacttgtgctttttcttccatgctatatgaagcaaagtcattgatcctgtcaagtctgatgagttggacaatgaagccgaaatatactgtgcctgttggagatgtattttccccttgctttctttgacatcatgattcacatgattgtgcatttggcagagaaatcacatgttgtggtcctgttatctacagtgatgtacccgttgagcgatcatg

SEQ ID NO: 234485 - DNA, 388 bp, Glycine max
  unsure (1)..(388): unsure at all n locations
ctcagcttcatcaaaacaccaanncaacatttgaatggtgtgtttgaggactctganaatgagaacatcanaatgacacttcgatgacgaactagaattaatacatgagagattctgagataactacattcaaatgatgtattgaagtcaagatcatgttgtatatatgcatcataatgaagctgcatcaaagtctacatgaaaatgatgaagatcttgactttaaagactgaactttagaatggttcatattacacctcaaagacaacaacatgttatccatatgctgccacacatacaaagggaacatcataagactaatggtgatagcatttcactaatttccatatgttgtcacacacattgtggacactataatgtgtgtgct

SEQ ID NO: 234486 - DNA, 321 bp, Glycine max
  unsure (1)..(321): unsure at all n locations
ggatcaataataatgcctattggttggacctcccaagagagtatggagtcagcaccacttttaatatttatgatttaattccttttgcaagtggagctgatatagaggaggaggaaccaacagatttgaggtcaaatcctcttcaagagggagaggatgatgcaatcctccctagcaaaggactagttactagagccatgagcaagaggctccaagaggattgggctagagttgataaagaaggccttacggttctcatgaaccttatggtagattnttgagcccatgggccaaggttgggtccactcttctttgtaaata

SEQ ID NO: 234487 - DNA, 422 bp, Glycine max
tatttccagtatggaattctatcaatttgacctcaatctttaatggagagggtaccactactggaaaacccgaatgcataattttattgaggcaatagatctaaatatctgggaagccatagaaatagggccttatatacccaccacaataaaaagagtttcaatagatgtgagttcatcaagtgaaagcataactatagaaaaacctatagatagatggtctgaagaggatagaaaacgagtacaatacaacttattagccaaaaacataataacatctgccctgggaatggatgaatatttcacggtttcaaattgtaagagtgctaaagaaatgtgggacactcttcgattacacattaaggaactacagatgttaaagatctatgaaaatgcactactcatgtgttgaattatttaaa

SEQ ID NO: 234488 - DNA, 395 bp, Glycine max
  unsure (1)..(395): unsure at all n locations
gatcttaagtcacctgcggcatgcaagctntcaactgaatatactacgttccaattgatttcaaaatgttgtaatcgattacaatgttttggtaatccattaccagtgtgcttgaacgtcgaaattcaaattcaaattcaattgatctttggttgtaaaaggatttttacaaggttgaaagaaatctcaaggaccgcaggtcgcttatggactggatgtaagtacgggttgttgtcgaaccactataaaaactcttgtgtgtttgtctcctttttccctagtcttttactttccgctgtgcattttattttctgcttttacttttggttaaggttctcttctactctttattcacttaacaacatattaaaagccctagaagaagtaatttttaa

SEQ ID NO: 234489 - DNA, 388 bp, Glycine max
tagactgagttcagcctaccatcctcagactgatggcctatctgttcggaccattcaatcgttggaggaccttgtaaaagcatgtgtcttacagtaaaaaggaagttgggagagttttcttccattgatagagttcacttataataacagttttcactctaccattggcatggctccctatgaagctttgtatggtagaaagtgtaggacacccctatgttggtcaaagcccggagaatgcctcaccttatgaccataagtggtacaacaaaccactgagaaagttaagttaattcatgaaaggatgagaacggctcagagtatgcaggaaagttatcatgataagatgaggaaagatttggaattcgagggtggtgatcatgtattc

SEQ ID NO: 234490 - DNA, 392 bp, Glycine max
  unsure (1)..(392): unsure at all n locations
atccttaagtcacctgcggcatgcaagctnggcttcccacaatctatgcttaggttccaagaggcaaagcactcctcccttacctcgtgattggcacaaaaaacaaaggattaagcagaagatggattgagctcttgagcactccctangagcatgaacatgaaattacaagagaggagaataagggttctagttgttagagaagacaaagatgatggaaaccatgggaaaagggcttataaattcacctaggagaaccaccctttacctcacataacaccaagcaagcacaagagagaagaaaactctctttctctcttcctcctacaaaacgacatgaagaatgaggggagaagggagatcttctcttctcttatatccctttgggtcat

SEQ ID NO: 234491 - DNA, 426 bp, Glycine max
  unsure (1)..(426): unsure at all n locations
tttgcatcccgattattgataagtgacctctatcaagcacaagaacccttctaagggccattacttaagtcttggtcttacgcgtatcccggtcaaagtatgtcgagctcacttcaacatagatttttgtctaaggtagatccactatcggcaccatcaccatccaaatcgacatggatgagatgaagcttcctttattctccttcctcaatagttaaaaacctagatatgaagcaaacatcttgcattaagcatcacttgtcaacttctcaaaccatggcgctcataatgcattaaatgtgattcattactagatcccggatttgatttcgccacgaacaacctaagacttgacatatggtttggtagagatttcaatgtccattatattggtngttcacccctattgtatcacatgcaactcat

SEQ ID NO: 234492 - DNA, 278 bp, Glycine max
  unsure (1)..(278): unsure at all n locations
agcttacgaggcaccacaaatatcagtgtatctctcccaagcctcttgggaagtgaatctggatctatcaaatctggcttgggtaggtgtagagggtgccttttttttcctagaagccatctgcnaaatataagacaaaacacaagagattagtgcaggttattttcacaaacaatagaaaaataaaactgaaattttgactgggcgcttatcgcagcatgctgagcttagcatgccttatngaaatttactcaagcgctaagcgctgcaagctggcg

SEQ ID NO: 234493 - DNA, 338 bp, Glycine max
attctatattatatacaatgatctacagattatttataaatccgagctacttgcttagagaaaaggtggtgagataccttgccaaaaaaagagcccaacatcagcaaattagagaacaattacagaagtgttcaagattaagcacttgtagaactccacttcctgatcttcatcggcacagatcaaaatgctatgcaacttgcctaatagagttagacaaaagcaggaaaatacaacagctattacactattttcactaccttgacaaaaaaagttcatatagtaagcacttccgcagttccaagaaatattgtgaggttgaaaccttcagaaatcac

SEQ ID NO: 234494 - DNA, 398 bp, Glycine max
ggatcctctataaataccaataaccactaataacacattatactagattatcaggaagagttctatgaatacctgaatccataatgattgatcaacaaacgcaacggaatctgaatccgtaggtaattggtgacttcatgggtcttcctcaaccggaacctctttattccttaataggacatttgtaacttttcagatggatagaagagaaattatatgtgacggctcgatatattggggaccatagtcttcttatagttgtgtaatctaatagggttcccgttatcccctaatgggccaacattgacatctgctcatttaagtccatatcatttgatttggttgctaacgggctcacttaatttgatcacataataaaaaaaccactaatgataaat

SEQ ID NO: 234495 - DNA, 473 bp, Glycine max
  unsure (1)..(473): unsure at all n locations
agctnttacattgaacataaacatcgagttatcagtagcgggttcactcaacaactagtcatgaaacccaaaacagaaaccaatatctgatgtactgccatatatccattatccacaanaataaagctcactctatcaagccaatgccccccaaaattgaaaaggacccaaaagataaactttttttttcaaaagaaccaattacttgcagtgaatgtcatgaaaataatttgaacccaatttcaaattcaaataagaggcacaaaatgccatagcacgccaaagaacacaaaaatcacacaagataaccaaatagtgcattgtgtagagacaactaattccatatcccatatacagtagacaatgcaatgaatgcatcaacantntatttaccagcatatggagttatgaaccaaaatcaaactcataaaggaatcattattgatatttatggagactcaaataactatact

SEQ ID NO: 234496 - DNA, 450 bp, Glycine max
  unsure (1)..(450): unsure at all n locations
tgattntcacttcattgttgtgctctattctcatctgttgttncaaaatcttattttgaactcttgaaggttggaaactggaatctaaactcccttattcttccttctaaatttcatggagactacaagaggtaaggggtgtctctccaattcttgaaccctatgcttgtgggtaaacttcattgaacatcttataattttggtgattgctgccctgttttggatctgtgttctgagctattttccttgagttctttgtgccataaatgagttctttgagtgttaaaacatagagttagccttatatttcacttaaatgagaagtttctagaaaaagttatgaataaaacaagttttagaacattttatcggataaaatctatcatgaaaataatctgctagcgagaactgtatggactggtttcattacagattttacctcaaaatgaa

SEQ ID NO: 234497 - DNA, 454 bp, Glycine max
  unsure (1)..(454): unsure at all n locations
atccttaagcgcctgagctgcagcttatgatgttgaggcggtggattcaataagtcttgataatgacaaagatgatgaccaaaagcccaaagaatgatttcaagattaaatcaaggaacacctcgcgaatcaagagaagtttgatttccagattctagaaaagatgaattccagtttcaagagaagaattcaagaagacttcacaaggggaagtattgaaaagatttttcataanacanacatagcacaaattttgttttcaaaaagacttttcacaaaattttctaagttacctgagttttactctccagtaatcgattaccgggacaagtgttgaataaaatcaaaagatgtacttcttcatgttttcaggttttctaaagttatactctctaatggttcttgctagactgaaagctataagcagacttgcttgctggaaaattttcttaca

SEQ ID NO: 234498 - DNA, 347 bp, Glycine max
  unsure (1)..(347): unsure at all n locations
tgcctcacatcctctcaaataacatgatgcgtatacgtcttgcanttttactgacaataagagaaaacatgtttcgtctaccatcaaaatgagtatcaatattcccctgctctatagtgtttgcactatataaggaacgttccacaatcaatattattgcattattgacgatcatatacttgaacttctagactataaattgaggctatgacaggtcctaaaagatcatcccccatgcttgaacacctcaaaatctcttcaaagaatgtattgtcagttatcatatgagtacttctatattatataaactttctagctttcatatcataaagtaatacaacattgca

SEQ ID NO: 234499 - DNA, 341 bp, Glycine max
  unsure (1)..(341): unsure at all n locations
agcttaaacattcaagtagtgtgcgtctcgatatattacgggactcaatcanacattcgagtaaaaagttattgtcgtctgaattggcttaaagcttatacattcaactttgagcgtctcgatatattacgggactcaatcagacatccgagtaaaaagttattgtcgcttgaattggctcataggttcaaaattcaatttcgagcgtttcgttatattacgggactcaatcaaacatcccagtaaaaagttattgtcgtttgaattggctcaaaaggtcaacatctcaatttgagcgtctcaatatattatgggactcattagacattcgagtaaaagta

SEQ ID NO: 234500 - DNA, 433 bp, Glycine max
  unsure (1)..(433): unsure at all n locations
acttaagccaattcatacgacaataacgttgtgctcggatgtttgatngngaccacgaatatatacgaaacgctcgaaatagaatgtgtaagctctgagcctattctaacgacaatatacttttactcggatgtgcgattgattcctttaatatatcgacacgctcgaaattgaatgttgaagctctaagcctattcaaacaacaataacgttttactcggatgtccgactcaatgacgtaatatatcgtgatgctcgaaattgaatgttgtacctctgagccaactcatacgactataatgttttaatcggatgtctgattgagtcccgaaatatatcgagaccctcgaaattgaatgttaaaactctgagccaattctaacgacaataactttttactcgtatgtctgatgtgatccccggatatatcaag

SEQ ID NO: 234501 - DNA, 404 bp, Glycine max
  unsure (1)..(404): unsure at all n locations
agcttatcgctggagctgacccatcaactatcctaactctntcagactggcaactcctaggctcttgaccttgacttgatagaacctctttttaagcgaaggcgcttgactccatcccatgttttactaaagtgaaacaaaaccagtgcgaatcaagactccaacatctatcatgggtggaatggatgaatgcatgaaaaaatgcatatggcacagatgcattttacgaatataggagcctgtgagattgtccccttcttagatacaacattcgggcagcatgacgcccgatgtatgcatttaagaaggcgacacggacccttcgtctgttcgtgacaatgtgaggggatcaagacgtaacccgtgcatgatgcatatgcgaagaatggcacaacacggggatg

SEQ ID NO: 234502 - DNA, 391 bp, Glycine max
agcttgaggatagagacttcccaagcaatttatcttctctctcagagaggctctctacttggattgagtcaccctatggaggctcactcaagcttgaggatagagacttctcaagctatttatcttctctctcagagaggcttactcaagtttgaggataaagacttcccaagctatttatcttctctctcagagagactctatacttggattgactcactctacggtggctcactcaagcttgaggatagagacttctcaagctatttatcttctctctcacaaaggctctctacttggattgagtcacccctatggtggctcactcaagcttgaagatagagacttctcaagctatttatcttctctctcagagaggcttactcaagct

SEQ ID NO: 234503 - DNA, 424 bp, Glycine max
  unsure (1)..(424): unsure at all n locations
cttgctcttctgctcactggatcgggttccaagaaatctttggtatgttcaaaaggggttgtgttgatctgcaccaacatgcttaatttacgttgaaaaatccattcatttgcgagacttatcttcgaagatgaaccatttatttgaaagctcaatgaatactcatagggtctctagagttcaagctccactaataacctcgacgacgttgtgcaggacgacccaatgttggtgaggaacgatggcgcaacgacggtgaagactcactgatgcagatgtagaatgtgaggttgngagggtgacctccatggcgtatcgtaaattagggtttcaagatgcaaggagaagaaaataaaatcaaaataaggtttttcagtgtaatttttttaccatgctggtaaaaaacataagtcatgcactgtta

SEQ ID NO: 234504 - DNA, 398 bp, Glycine max
  unsure (1)..(398): unsure at all n locations
atcttaagtcacctgcggcatgcaagctttacagcagattgtagtaatgaccctctaacctagaattaaaataacttaatgccattgacctatggaattaaaaaaacttaatggctgagtgtaactgaaattgtggcaaccaaaagtcacccccaacaaccaacaagtcagccaccatttggtctcctaaaaggctgatgcctaggttgccaattgggcccttattacaacttgaactaaacctaactaaagcctttttagttgattaacccaaaacatanttttggtcagccaactttacaaggattgggccattatttatacaaactatacactctaaaattgagacaaagtggtgtcatttaatcctcctccatttgggccatgatacaactcac

SEQ ID NO: 234505 - DNA, 338 bp, Glycine max
actaagcttgtagaaatatcatcacatgacgctctattggcacaaaataagttgctttctaagcaacttgagattctaatggaaacacttggtaagttgccaactaaactgtctattggtcaacctacacattcttctgttttgcagggtacaggttgtaccatctgtggtgagggtcatgaaatatgccaatgtattcccattgaagaaaacactcaaaaagttcactatatgggaaatcaatagagacaaggatatactcaatgaggattcttatgcttccagcagggtccttataatcaacaaggagagtggagatcacaccctgtcaattaatt

SEQ ID NO: 234506 - DNA, 378 bp, Glycine max
cttaagtcacctgaggctgcagctataaagcatgatagatgtgttgtattttgttcgtggtattattgcaaagcacctaacatccctccattggtaggtatctggcaccaaagagcaagcggttagcttctatgatcaatcgcaaagtcaataattggaaaaacaggctatcacggatacgactgttacttcctgcacttcccataatttcattttggaacgagctctttgataaagtaatgggaattgtaggaagtcttaccacggaaattaattaataatacttactaaatttccataagcccaataactctcaatggctaggggaaacatacaccaggcgatgactatgtaagcaaacataaccacctttcacat

SEQ ID NO: 234507 - DNA, 431 bp, Glycine max
ctaccataagtatatgataattgtgaaatccatctggaactcgactctaattatcaatatgctgctaaagtttcagaacaatttatattttgtattaaaactctgtcccagttgttgcacactctataccatggcatgcagcattacatttgatgttctgctagacagagccattaaaatattgcgtatcttccatccatatattgaagttttagacttatctagtacttttaccagaagaaattatgtcagtgaatgctattttatgattttttcctctttcatatttaatatgcctgcatgctcaaccatttattgccgatcaattggttaaaggatttggacaatatttttagatgtatcttggagttagttgacgaaataaaataagatgagaagttgatgtgtctgtaggaatggctaatatttat

SEQ ID NO: 234508 - DNA, 479 bp, Glycine max
  unsure (1)..(479): unsure at all n locations
tgcaggctgcatgcttaatggaagagaatgcataatgagtgtgctagcaagtgacttctcagaggttgtaaactgttcatcaatggctttcaacagatctctgaccttatcatactgggcaactgaaccccggatactagcggatatgttggtttntatgaacataccggagagacgattagatctctcccacttttcataaagatcaacagcatcaggttcgctagtttcagaaatagccggtggctcatccttccttatagcatagtcaatatccatccagcccaaatgaaggagaactctttccttccaaaccttataattatcacctcttcaaaggggagaggcacaagaaatattcatagattgtgaaactgcgaacaaacacacatgctcattaagaaaaatngagactatacanatgtcatgttgttgccatgcaaatcatgtttcaatatatgaatctagtgaacacaaac

SEQ ID NO: 234509 - DNA, 342 bp, Glycine max
  unsure (1)..(342): unsure at all n locations
tgtaatcgattacacacatactgtaatcgattaccagatgatttnttcaaaaaacattctcaacaggcacatctgtttctctgattcttaagtggccatcaaaggcttatatatatatgactagagacacaaatttaacaagagttttgaagaacaacaaggtcttatcctcttaacaagcaaaattgttgtatcctattacaaattacttggccaagacacttgtgattcaataaggaattatttgagtgctcatattgttcaatctatctctttcaagagagattacttcttctcttcttctttattctgaaaagggataaataggccgatggtctcttg

SEQ ID NO: 234510 - DNA, 378 bp, Glycine max
  unsure (1)..(378): unsure at all n locations
agcttnnaagggacagtgcttatggctgatgnttctgatgananagntaacggctctcaatcgcttgtgttctcttcttgaagctttgtttgaagatgttcgggggtgtcatcactgtatccgagctttgaagctacaacattttttggaagtgatggctctgtcagctattgctgaggttgctgaagagatattatctgtgaactgctctcgttgatgagtcttatgtggctcctcaacttgagtgagggcgtaagtttgtggagtattggtttgaagtggatattctggtaaaaaatgatcatgattccagctgaagcacaaaagtatgtgttgaatttgcctaaattgttgtgcgagagtgggcatggatatttg

SEQ ID NO: 234511 - DNA, 384 bp, Glycine max
tatctgatttgtccttcctcagtttgctgaatctatgattccacatcttatcaggcagaattcccacgagcacccaacttcagagctttgaagaacttagctacactggaaatcctgagctttgtggtcctcctgtaacaaaaaattgcacaaacaaggaatggttgatggagagtgcttctgttggacacagtgatggtaatttctttggaacatcacaagtttatatcggtatgggagttggatttgcagcacgatattggggtttttgcaatgttgctttcttcaacaaaacttggaggcgtgcttattttcattatcttgaccacttgagagatctgatctatgtgatgatagtttgaaagtaataagttacttgggaaa

SEQ ID NO: 234512 - DNA, 410 bp, Glycine max
  unsure (1)..(410): unsure at all n locations
gttctgttcgcntgcaagctnnnccttgatgcaggtgtgcttaagattacgcnaagcttggccgaatcgatcctcatggtgatgtctgtatttcaggcatatcaagcgctgtgcaacatgatatgccttttgtattgaatgatgctgtaaacagttgacttccatcctcttaacttcctaatgtcaccagcaagtgcacataagatgttagtactggtttgtgtttgacaaatttgtctacaaaaacactattattatcaatggatataaaataacacgcatcaaacaaactctaacgtcctgagatggatttcacaaaatcggtacgtatagatgggaatcttaactgttcacaagctaataaaaattcagagctaatcaactcgttcggcaactgttcataatgaact

SEQ ID NO: 234513 - DNA, 411 bp, Glycine max
tttctgggtgaaaggtaaaaagatttatgtacaaaatttgaatatactaaccaccaagtctgtatcacctgctatgagatttatttagcttaataataatcgattttaagtttgagcttagttagactataaatatttatcaattgaggcaaccttccgaacactttatgcatgggacaaatatctcccaaatgtaatttaattaaccctgactccaacatacttttagtaaatttcaaacttctgcattgcaatccacggaaaatctcagtttacaaccactctttgtgcttgctttttcttaataagaaaaggagtgaattgttgaatttgtccctataagctagagaccccgaataattgatctctataaaataacaaaatcaactttaatttcacaaggataaaaat

SEQ ID NO: 234514 - DNA, 352 bp, Glycine max
  unsure (1)..(352): unsure at all n locations
ngaagatgtnttgacgctcacatgccaaactgccttgatttgcatttgcataggtcaaatcttggatgcaccatcttaatacatatgatactcgtatcgcatcattcaacatcacgctctccgtgtaaacaagtttcttgaagagacataaactcttatttttaatcgattacaagtccattgttatcaattacaacatgctggttgaagctcgaagagtaaaatcttgtatcggtttaatcgattacacagtggctaatatatgattactctcgtgcgctgaacaatgacaaatttattcaagaatctctgcttttatcaattgcccaatggattaatcaatttacttctc

SEQ ID NO: 234515 - DNA, 365 bp, Glycine max
  unsure (1)..(365): unsure at all n locations
tatcggtttaatcccatacctctattgcaggtcatactgtgccagagtttgcttcnctattattattaattttgctcatgcgtatgtgagagtcgaaacttcctgctgaggaccaaacggttaattaattatacatattggaaccaaaataattgtttaaaattattgggactcaaaagataaattttcacaactttcaagactaaaatggtatttaaaccaaaataaataaactactgcaaataatggtggtgtgatagacacttttatcctaaatggccgttgagactatatcctttcatattgtgcatcgcaccccccttatggataaacttaatcaaccttcatggtatctttacgtttat

SEQ ID NO: 234516 - DNA, 387 bp, Glycine max
  unsure (1)..(387): unsure at all n locations
cagctatgatcttccaccaccgtcgccaccttcatcttagatctttattnttatattattagtactttgattttcagccttgtattttggctatatcattatggnatttgaacaatttactattccctatttgcatggtatgttcgaacaaatattaagtatgttatttgactatatgggttttatagataatcttttatgattgttgcttcatgggttgagtgttagctcctcaatgaatgttggatggatgattagttatggttgattatttcaaatttgttacgcacttctgctttttgttgatgcccaagggggagagaaatgggattaaaatcagaactccatgagtattaatttattttagatatgccaactctaaaccaa

SEQ ID NO: 234517 - DNA, 359 bp, Glycine max
  unsure (1)..(359): unsure at all n locations
ntgatggtgcgcagcccaccatctgttcatagtagagtaccgataatgtgtctaccatcacgattatcgtctccctttccattattgtgggtaccacctgtgccgccagatccctccaccttttgggcgtgttctttgaatgatccgtccccctttttgcacactttttgtagttgcatcctatccggagccatatcagaaatgtactgatactgcttaatgatagcaaccattatgtccttccatgaatggactcatgaaagttcctatattagtataccaggcgacagttgtcctattaagactttctcaagaaaaatgtatcaacagtttctcatattttgcgtatgcccccatct

SEQ ID NO: 234518 - DNA, 387 bp, Glycine max
  unsure (1)..(387): unsure at all n locations
agcttcatananncatcactgtgaagattgctcttatcttaacttaaaggagggtaatttaacaatctatttctcaaatgaaaaattagaagagaaaanatacaaattcctctataatgtaacccccaaaatatattcatgattagcagttatcaaactcccccaaatttaaatctttgtttgtcctcaagcaaaaggaaaaagtttagagtttaccaatcacaattcatgagatgactacatacattccaaaaagcttcattggtcaattctcaagtttacaatggtcataagttcatgaaaggagtagaacaagatgtacttcatatgaaatggttagcaagaatgacaaatcactaggaataatcaccaacacttaatcctcac

SEQ ID NO: 234519 - DNA, 420 bp, Glycine max
tgaagaggatgcattaatggaggataagaaagagagaggtgggagcacgaaattgaatgaagaaaaagggagagaagttgaaatttgagttgtgtctcacaagactttcattcatcaaagttacaacaagtgttacacatgtctctatttatagactatgtagcttccttgagaagctttcttgagaaaacttccttgagaagcttctttgagaaaacttccttgaaaagctaaagcttagctacacacacccctctcataactaaactcacctccttgagaagcttcctaaagaagctagagcttatctacacacacctctctaatagctaagctcacctccttgagatgagaagctagagcttatctacatactccctattatagctaagctcacccgcatgacataatacatgaaaa

SEQ ID NO: 234520 - DNA, 384 bp, Glycine max
ggattcataatcatgaattggccaagtcattaattggacatccatatgtccgacgattgagtaaagctgaaaagacacttattgttgatatgacgaagtcaatggtcaaaccaaaaaacattctgctgactctgaaggagcacaatgccaatagttgtacgaccatcaaacaaatatacaatgcaagaattgcataccgttctttcataagaggaagtgatactgaaatgcaacacctaatgaagctccttgaacgaaattagtatattgcattggcataaattaaaggatgaagacgtgcgtcgtgatatgtcttggtgtcaccctgatgcactgacagtagtaacacatataatttggtattttgatgacatactacaaaca

SEQ ID NO: 234521 - DNA, 398 bp, Glycine max
  unsure (1)..(398): unsure at all n locations
actaagcttatgtttcatattaacanaaattcaattcttaatgggtttggtcaaaccatggccatggacatggaatctttaaaccctaagatgattttcaaaaccatatcaaccttcatcatcaccaccaaacagatcttacaattcctctttcgcaacacgtgtaatccctcaatcacctttcccaagttccctatcactcatctgactcttgagattcatcacaatcgaactatgatgcaacacgacgactcctttgcacaaaaaaagaaacaaataaaatccattattcaaaacctcattgtcaccaacaccatggggggcattcgctaaccatcattgccaacaccccgtttaacaactatcaaaaagaacaaaccacaaaaaactaccaaatc

SEQ ID NO: 234522 - DNA, 381 bp, Glycine max
  unsure (1)..(381): unsure at all n locations
agcttgaaaagggactcggttggctgagagactatccntcaattcccctcttctattgctacaacaaaatccatatttgtgagggtggacgcttgtgtgggttggttgaataaagaaaggtagaatcacaaaaaccttctattcttggacgacgcaacatggacttgattcaacgagcgcatacatggtggtgaaggtgctgcagagaatcgcacagagtggaagcatcataatcatgtccatccgccaactgagttatagaatcctagggcttctcaaccgcaagatcttcttatcacacggccatactgtttgcagcggttcacccttgcagctaccactttacttctcagagttcagtcatccgatgccaaaaaatta

SEQ ID NO: 234523 - DNA, 415 bp, Glycine max
  unsure (1)..(415): unsure at all n locations
ntcttgagaaaacttccttgagaagctggtgtgagagatcttccttgagaagctagagcttagctacacatacccctctaataactaatctcacctccttgagaagcttccttgataagattcctaaagaagctagagcttagctacacacacctctctaatagctatactcaactccttgacatgagaagctagaacttatctacactccccctattatagctaagctcacccccatgacaaaatacaaaaaaaagtccctactacaaagactactgcaaatgcctcggaatacaatgctaataccctatactactagaatgtgcaaaatacaaggcctaaacaaatgaaaaaaacctattctaatatttacaaagataatcgggctcatacttatcccatgggctcaaatcta

SEQ ID NO: 234524 - DNA, 414 bp, Glycine max
  unsure (1)..(414): unsure at all n locations
agctntactctcggaaaggcggttgcgtcattactgatatcaacggcaaggctgaagttacactgagcggtacaaaatccggcacctaccccgtgacagttagcgtgaacaattatggtgtcagtgatacgaaacaggtgactttgattgccgatgctggtaccgcaaaactagcctccttaacctctgtatactcattcgtcgtcagcacgaccgagggcgcaaccatgacggcaagcgtcactgacgctaacggcaacccggtagaaggcataaaagttaatttccgcggaacctccgtcacgctaagcagcaccagcgttgaaacggatgatcggggtttcgctgaaattcttgtgacaagcaccgaggtcggactgaaacagtttcacctctctggcagataacctactg

SEQ ID NO: 234525 - DNA, 417 bp, Glycine max
  unsure (1)..(417): unsure at all n locations
gatcttaagcgactgggctgcagctgtaaaaacgaagaaagataatttttttgaacgaaatgaagatgaaagctaacaaaacaataaatgaattgaaattctcgaatttgaacacttaccggtttaagaccgaagaacgaacgaagaacggtgaagaacggtagaaaatcttcacggattggctcacgaaaatgtctcggaagcgttacaaaagcacctcagcttggattttcttcacgaaaatacgtttttttttacttaaaacagctgaaatgcatagcataggggtcaaggatcctttggaacagccctcctcgacctatttatagaaaaaagggggtggagcttgccgcctatctcgcctaggcgagaagatggcttcctctggaagnttcctgatgcaccccccaatttgat

SEQ ID NO: 234526 - DNA, 371 bp, Glycine max
  unsure (1)..(371): unsure at all n locations
agcttgaaaatcttaatatgtgagtttttaatatcgcgacaatttaaagcttttattcagaggggtacaaatcccttcccttgaagatttgctcattcaatcgtgtgggaggctagagtccttacctcttcattntctccctaaactagaggtcctgtttgtaatacaatgcgagatgctaaatctgtcgttgaacaatgaaagcccaattcaaagattgaggctaaaacttctgtatctggagcattttccaaggcaacaggcattgcctcattggattcaaggggctgctgacactttgcacacgttgtcaattttaaattgtcatagtcttaagatgcttcctgaatggttgacacaatgactcgtct

SEQ ID NO: 234527 - DNA, 433 bp, Glycine max
agcttaccctatatgacactcagttgtcttaccaattcataacttagacactttgaaaggcctgctgactgagtacaaagagacttgccaccgtttggtgagttattaagcactcacttggatgtcaaatcttaaaatcatatacatatctaatatgaatttcatgttaattacaggatgtgccgagtacctgtactcatttatgaaagctgtaagattcacccatatgaacttgaaagaaactacgaacgtaacgattcatttatatcattgtacgaagattgcaaaaattggaaatggatggaggaatttcataattacaagatcttcttatcgaacctcaattatattaagtcccaaatgcactccaactttggttaattaaatttgtgtgaattaaagaaataaactttacaccataatttgaattttt

SEQ ID NO: 234528 - DNA, 372 bp, Glycine max
  unsure (1)..(372): unsure at all n locations
gatccttaagtcacctgaggctgcaagcnttaaagcagaggatgagttttatgtcacggttctaccactatgttgtgaataattaaatatagtttatttgatttgaactaattcaaaaatgaaataatatgaacttctcaaaaaatttaaactgcttatgaaatttccaactaaatactgtacaggaaagcaggcatattctggtgtgtgttttcccatgaataaaaaaatacgggctggggctataccaaatcaagattctgaccatgtgagtagcaacccacacattttatattacatcaatctcttagacctttatttaattatatctttatatttcgtgtctctgttccattaatcatccgntttatt

SEQ ID NO: 234529 - DNA, 413 bp, Glycine max
  unsure (1)..(413): unsure at all n locations
cacctgcggcatgcnagcttggaactgaaggggagatattgaaacattgngcacgagttaataactaaggatctncgttataatgaccatctacgtgcatttatgtctacttttcagtataatttactctcggtctcattatttattctatgctatgtctatggcgtcttgatatatgacatatcatatgattcggttgtttttccaagtgatgtgggaagggttggggagtgatcattatgtttgaatggaaatcatcctcgggtggtaataagatgtaaaattgagtgagaagatttattgtatacacaattgcacaatacaaaagtctcccttgctatgttgaaaatatgttataattcaaagagcactttttctttattatttatcaggtntaattctcaatattcaca

SEQ ID NO: 234530 - DNA, 431 bp, Glycine max
agcttacacaaatgcttgtgtctctttttaagaaaatcttgcccacttctttgacaaggctcatgaggttttctccaagtgtcatgcacatacaatgatgttagttggctgttgctatttgcgccaaagcaaaatcgttactaaacgaataataatattcaattcattcttttcctcttgcaagtgtctgtttgtcttattaaaggctcattctcgatcacactgtcttgcattttataaactatcaatcaacaccttgtatagaaaaaaaaagggactctttaaaggtgataacatcctgtgagagagaaaatataaatattaagggttataccctccaacataaagagagaaaattaaaagtgttatgagaattttttttaagaaataaatacttaaatattactctctaattaatgtataaaatatta

SEQ ID NO: 234531 - DNA, 229 bp, Glycine max
cggtgacgaagtctgtatattctttgtgtggtacgctttttagtgctgaacacgcatatggataagagtttcccaccatttttccatctattttgtagggcatatattttttataactgaagacactggacattgagtataatagattcatgaatgccaccatatatcaacgttttattgtagacttatatttaatggacaaattgattgctatacctactacatattc

SEQ ID NO: 234532 - DNA, 485 bp, Glycine max
  unsure (1)..(485): unsure at all n locations
agctntacattctgcatgtggtattcttaatagagtaccttataaaaaaaatttaaaaaaacatctttatgagctatggagaaaaagagaaccaaatatgaaataccttaaagtgtgggggtgtctattaaaggttaatatccctattaataagaaaaggaaaattgaaaaaaaaaatcttaattgtattttgttggaaattttttacataatatttcttatagattcttagttgttaattcagaagtgactaaaatttctaatgttactattatgcaatctaaagatgtcattttctttgaaaatctgtttccttacaaaataaatcgttaaatctttatatggttgaaacaagctccaaagcaatgactacacaagttgattaagttattcttttgtatgaattttcaattaatgatagtgataaatgttgatatgtgacacaatctgatgataatggatgtgtcatttaatgtgtcgatctg

SEQ ID NO: 234533 - DNA, 405 bp, Glycine max
  unsure (1)..(405): unsure at all n locations
tggtgatatatccatacttcttgatattactaattgcatgcattatgagtgaaccttattttcccgtttgagattcaatacactgattaatacggatagtttggattaatcgatatattgagtcttgaattatctgtttggacagtttgggaagacatttttttatagttgattcatacgtagaggtaaattctcttttgcatgatttgaagaaatttatgtatactgcatttcacattattcttcangtgcatactgactgcggtgattgtgcaccatgtctccgctttcatcttgtgtacctgaagaccaatgcgaaatgctaccgataattcgttaaatctaacaaaagagattgtacctatacgtttgaatcaactataaaaatgttttcctggatgggat

SEQ ID NO: 234534 - DNA, 401 bp, Glycine max
  unsure (1)..(401): unsure at all n locations
ttaagtcacctgcggcatgcaagcttctttgagaaaagtggcttgagaggctagagcttanctacacacacccctctcataactaagctcacctccttgagaagcttccttaagaagattcctaaagaagctagagcttagctacacatacctctctaatagctaagctcaccttcttgagatgagaagctagaacttagctacacaccccctataatagccaagctcacccccatgacaaaaaacatgaaaatacaaaaaaaaagtccttactacaaagactactaaaaatgccccgaaatacaaggctaaaaccctatactactagaatggccaaaatacaaggccgcaacgaaggaaaaacctattctaatatgtacaaagataagcgggctcatact

SEQ ID NO: 234535 - DNA, 383 bp, Glycine max
gattcaagacttcaagatcatgcatcaagaatccaatcctagattcaagatgttagataagaaatcaagaagcagcaagtcgagacttcatatagaataagtattaaaagattgtttcaaaaaccaaatagcatatgtttgtgtacaaaagaactttctcagattttcttaaagtatcggagtgattactctctggtaatcaattaccagcgatcagattggtttgcaaaatgttgtcaaatgatttggaatgttacaaaatgattgtcaaatagtgtgatcgattacactatattagtgattgattacaagtgaatctgaacgctggaattgaacctcaattgcgtagagtggtgaactttcttaaatatattgtggatcga

SEQ ID NO: 234536 - DNA, 443 bp, Glycine max
  unsure (1)..(443): unsure at all n locations
agcttataatatatcgagatgttcgaaattgtataacggaagctcttgagaatttcaaatggtcatatgttgtcacactccggtccgattcaagcttataatatatcgagacgctcaaaattaaacatcgaaagctctcgagaaatacaattgatcattatttttcacaccgatgtcccgattcggcgcatagtatgttgagacgctcgaaattgaacatccgaagctctctagatattcaaatggtcataacttttcacacggatgtccgattcgggcgcataatatgtcgagacgctcgaaattgagcaacggaagcttttcgagacattcaaatggtcatatattttcacacgggtgtccagatcaaggcaatcacatattgagacgctcacaattgaacaatgaagctnctgagaaatcaaatgcccataactatttac

SEQ ID NO: 234537 - DNA, 416 bp, Glycine max
tctacttatgcggcacggcgggccatcctcactatattttctccaactcgaactctgaccactgtcctctacttccgatatgcttctgttcatgtccgcctgaatgggcttataacctaaaccatacttgccacgacttccttgggtttttatcaggctagttatgccaacattgtctttgcctaaacccatcccgcgttcataaccgttcccctacataactcgggccactattaccgccgcatcggacagacaaggttgcccaaagagggagtccacggatgaaatgctgaccacctcaaaagactggaaagcggtttctatcgaatcttctgcggatctcacataatgcatggtggaagggcagcttaccaagatatcttgctcggctgacacgatgaccatatcccccccac

SEQ ID NO: 234538 - DNA, 458 bp, Glycine max
agcttataagttaagtgagtctagccgaatcggttggttatgtcatatttgcacaagttattgtataatttttaacaatgtctttgattcttattaattaaaaaaaattgtagggggagtgagggagtaaattatggttatatttgataaaattagctgaaaattgatagctgaaagttgaaaaattaacttattaaataataattatttggataaaactattggttgaaatagctgcataatataaaatgacatacaaataaaaacaataatttattttaaaaagataataaaaaaatttaataaatatattaaggataaaaatgaaaaaaaatattaaaaattagaaattagaaactaatattttaaaacattattttaagtaatattcacaaacatttaaaagtattaacatttatttattgacaaataaataaattttcacataatacaaaaat

SEQ ID NO: 234539 - DNA, 432 bp, Glycine max
tcacctaatgataattcatctttcattaagaaaaaattgtcgcatacattatatattgtcattcggaaatgtatcacaaaaagaatgtcatatgcgtgtaacgttgtatttgtttttgttagtataatctttatttaattaataaaaacaaattattattataagttttaattcattaaaaatatgatgcatcatattaacattcaatagattaaggcaaaaatacatatcatggtgtaatatatttttagtataatacattatattttcatcacactattaatgaattatactaaaaatataaaattgtaagagatttttaaaagaatttaatataaaattcccaaggaatcgagacaactatgatctctggtgtggatctccttaaataagtaacaaaataaagctatcaataattggattcaaaatgca

SEQ ID NO: 234540 - DNA, 465 bp, Glycine max
  unsure (1)..(465): unsure at all n locations
agcttggcattttttaatgttagagcctttaatattatatttttttcatttataatctttttaagttcgcgcttaccagaatcaaaattaaaaaatataaacttacaaggattaaaaacgagcaaaaaaacttattagaaccaaaatttaaaaaatacaaacttatataaactaaaatgaaaaaaataaacttagaggaatcaaaaattaaaaaacactaacttttaaaaattaaaaacatatttaatccttatttttatttaagttataatttgggtcatacaattgtttcaaccttttgatcatatttcttaaaactaaaccaccaattntattagaagagatgtgctgtcaaaaaatctataataagaatataattctataattatcaaactgaacgaaatttaatttaactaactctattaacatatactacatctctataaaaatactgaaatatgccat

SEQ ID NO: 234541 - DNA, 258 bp, Glycine max
atgcatgacttggtgcgaaagacactctttgtacaattaatacacaccatacaaacttgcgaaatggactttctataatgtttatggaacattttcccaactatatttttggacatacactgtcaatattctcaatctatatgaataatgaacgttctatgcaatcaccacagttaaaatactatttgattaaaacattcttatttcttaagattgaaatgttcaatataactatgtcaatcagattgcagaaaaaaa

SEQ ID NO: 234542 - DNA, 433 bp, Glycine max
  unsure (1)..(433): unsure at all n locations
agcttatcacgtagtgtagctcagcgcgcaacccagtcttagcgcaaagaaagcccacgaggaagcccaaaggcgagcttagcgcgaagtcagcatgaaaagtaagctaccttatgccctataaagggagtggaaacagaagaaaaagacattgagtcttatagctatccaaagcttgagcctatcccttatggaaaaccctccttctttattcattcctcccttctctttcttttagtcatccaacccattctttcatccagattagcccctanagtgtaaagtctctcatggtcatgagaggctaaacctccattggtgggagcctagcagatcaatactcttgcaatgtaactattcttattatctattaaatgcaattnctatttctatacatcttttctcctcttcatcttattggatggctgacatc

SEQ ID NO: 234543 - DNA, 401 bp, Glycine max
ttctacatcggtcgaagatggtcgatggtgtatcacgttcaaactacatctgtcattgaaggaccgtcgtataacacgtgataaacaaagtcgttcatatgactttgtttatcatgtgtttctaagacggtccttttacgatccgcgtataaatatccaccctctacagcggcattagtttcaaagacgcgcgtccaccgtctttgaaggacattttgcaccggtgtaaaatgctatttttctagtagtgaaagtagtcctttaataaaatattgaatttaaaaccaatatatataaatataaaacttcggatttgaattacaaaattgattggttgatggggctatattatccaaatggcatttcatgattggactatataatacacacttgtgtgatta

SEQ ID NO: 234544 - DNA, 295 bp, Glycine max
  unsure (1)..(295): unsure at all n locations
agcttngnntttaagccatatgttgggtgcaantaatcaagaagagaattttctttccttgttcaatgaaggttcaccttgaaaaaactgtgaaacttgtgcgtttcataacaaccctattcatgcacttgngcaatcaatttcgtttgggaggttcatgtcagagtccctggcatgggagaagtggtccagcttctcccacaaccgctacgtagaagaggcagagaggtactcaagacccggttcagttgcacagaagaaggctttctttgaagctcactacaagaaacttgct

SEQ ID NO: 234545 - DNA, 468 bp, Glycine max
actcaacttaagcccattagaaaaaatatctaagatttaagcttgttgtgcaactctcatgggacctaaagttaaaagttcaatatataaatcaagctttcagcttgtgcaactcagcccacataagggattctattatgaaaggaaaaaaaatcacccactaaccaagaggtaaagaaatgattggtcaatcctaaatgcacaccacaatgtataagataaaccaagtagaagaaaatgaataaatgggggaaggaaagttcaacaaccaacccttactctgaattggaaaagaaaaactatcatataagcaagctatgggtctattagataaagaataaaattagaactttaatttaaatacttgtatttgaaaaaggaaaatgctcattgttatgaaaatggtttcgtaaacaatatacaaaagagctaactggttacttttctacattatgcatatgatgcaaa

SEQ ID NO: 234546 - DNA, 336 bp, Glycine max
cccaacttctgtttataccacaggaacaagataggtcctagaaaaatcactgctcctgattgctgatctcctatcatctgggtcggaagcccacccaacatcacagtatgcttgaacagagaagctcgaagagagagaaggctgtattcttactccaagaatgatagcagcagcaccattaaaatatctgagaattctcttcacagctgttcaatgctcttcttgaggatttgacataaactggaacactttatttacagacaactgatttctgatcttgtatggtggctactgaagtgcccaacaactaatctgtaagggtgaggcagagaatct

SEQ ID NO: 234547 - DNA, 285 bp, Glycine max
tttaaactcagctcatagtggccccagacgaaatgctctaaggtctttttgcccgcttggatttgccattccttcaaacgcaaaactacgattgggaaaatggtgtaagccgcttaatctgaatgataggaatctaaacgttctgaaatgatcgtacccgaacgaaatttgcgtatgacagttgcccctctttacttatattctattggaaataaaagggaagcatagataaagacattaatttccttcgagcgatctcaccatctgactgaccactatcgggag

SEQ ID NO: 234548 - DNA, 346 bp, Glycine max
  unsure (1)..(346): unsure at all n locations
agcanggaccagagaagtgaggagatattgtatgtcaagnaaaagctcattgagtcaaatcatcactgaaaacactatacttaaagataacattatcctttacttcatctttcatctcgtgggaacaaccgtgaagatgacttattagaatcagaaattcccaagaaataagggcaatacctactaaatataatcaactattatcttaaaaatacaccgtctctaagaactaacactaaaacaagctggttatgttaataaatacttatcaagttgctaagacacactttagttaaatatgtacaaatatactcacgagtgagatttattgctctctgactatcca

SEQ ID NO: 234549 - DNA, 286 bp, Glycine max
  unsure (1)..(286): unsure at all n locations
tctntcacctaacagctcacccatctaagagagttggagagtctggaaacatactcnccaacagaataagaccaagactatatcacgattagcccttacaataaacatggtaaaaattattcttaacacccagattcgttggactccatttcaaaataaattatgcacaaggatatggctctgcacaaagaataactactaaagcattctcaagttcaatgaaatataagaagatatttgaccgttacccctttataccattaatgcgttcgtattccatttaatg

SEQ ID NO: 234550 - DNA, 195 bp, Glycine max
ttatatcaccgcagcatgcagcttagctgataaatgctgtatgtgctgcctggaagggcaaaggtctgtatggtggtcaccatatgaacacaaaccacaaacccttgcgacaggtacatatttttgattcaaggccagctgggttaccaagttgaccaacgcattcagtctgccctcaagcttcttatattcaaa

SEQ ID NO: 234551 - DNA, 421 bp, Glycine max
  unsure (1)..(421): unsure at all n locations
ntctcataagtcctaaatgacatcgcaagctatgattatctcactntatcctccatgtaccacagaatgcagacttaaccttcctactctcatagcctcactctttttccactcataacaccacattctcactttccaaccctaggttaactctgactttcatctctaacagatttccatgagcaatctcagtatataaacatcacaaatatcatcacaaaaaccctaaaactgaatgggtatgtttaactcatccaaacatggcaatgtcaacaagctttcaaaaaatgtcttcacaaataattataacacaggagaaacctatcaagactacccatcatatcttccataaccccatacccacgaaaatcaaaggagatagaatgccacccaaaccctgtattttcgaaatgccactcgt

SEQ ID NO: 234552 - DNA, 428 bp, Glycine max
  unsure (1)..(428): unsure at all n locations
agcttggtattgccatgagagaatgatatatcaatcaanataaagataacacctttattagtgggttggcatatcaagataaattggagcctgtatagatgatgtccatacatgtcaatgtgttatagcgactaaactagctaattaataattgacacattattaatttatatttaaatgggcagttttttttttattatgcaccactatttatggtttaaaacggcaacatattaattattaattgatttagtttacacaactcgaagatttataatcatcctttcatatagggcacatgatatatgtatattttacactatcataatttccaaatgtattnatcaagatgcctagttgcattgttgttaatttcgggggtagtgacaaggaaaaatatatcatttcctaatatgtcaatatggact

SEQ ID NO: 234553 - DNA, 391 bp, Glycine max
  unsure (1)..(391): unsure at all n locations
cgcttaacttgatccgtggacatgttgtggttattaccggtttcttagtcattntgaccaatatctaacgtgtataatgcttgagaataatcttctgctttcggtaacaatgttgtatatactccacctaagaatggtgaaatacatgactaacttatttgatgtaaattaaccgaatatattaacatgttaataacttattgatggattccaatatggtcgaattggatgcaattcattaaccgaagagagttctatgacacatgaagattataaataaatatatgtgtagggataacatgattcatgcatcgtgattacctttgttgtgaaaaattgtgttctcactggaaacaccgaattgatgtattgaacttcaaaaaaaaggctg

SEQ ID NO: 234554 - DNA, 425 bp, Glycine max
  unsure (1)..(425): unsure at all n locations
agcttgctttgatctgtacaaggtanatcttgaaatanaactatctgctatagccatggtactgcactctcctttggaaaataattgattaatcatgtataatgccttactaaagaggaggaccatgaagtgcacacttgaattaaagagttggatggtgcaggagaaaattctaagggacatactgcatttgaagaattgaagaatggtgggcaaatacacaaaccatcaagtagaattgaagaccttgcctgcacatttgaagtatgtatttttggaagacaatgactccacacctgtgattattaacagctcgttgaagacaacatgngaggatcagctggtgcgattttgaagagacacaaatgcaattggatggccatatctgacttgaaggataatccattctattgcatcgccaaatc

SEQ ID NO: 234555 - DNA, 387 bp, Glycine max
  unsure (1)..(387): unsure at all n locations
ngcttctacctatgacagtgctaatggatgtttccctatataggagaaggtagagagatcgttttagaaggagtgctcttttgatatcaccttctgttataaaatgattttccttcttaaaaatcttcttggaggaatccttttcctctttttccttccccttggcctttgaagagaaggccttactatccttctttttcttttgattttctagtttttcttcctcatccctattatctttcatagttagttgatctttggccacctgtgaaggtgtttgatgatgccacacaaatttaatgccaagatgggtgagggtaatctcattatgtatgccatcttatatgatcttcctatcaaatttccatgggcttcctaaaaaaatat

SEQ ID NO: 234556 - DNA, 348 bp, Glycine max
  unsure (1)..(348): unsure at all n locations
gatgataataatggtgataacaaaagatgatgacaaaggtgatgacaaaaagctcaaagatcaatcaaagaacaacttaagtgaatcaaagatcaatcaaagaacaactcaagtgaatcaaagatcaatcaagaacaattcaagagttcaagataagaatcaagaagaattcaagactcaagaagaaagtctagagacaagaatcaagatcaagagtcaagacttaagattcaagaatgaagagaagactcaatcaagataagtattaaaaagttnttcaaaactttgaatagcacatgagttttngacaaaaccttttaccaaagaagttttactctctgggtatcg

SEQ ID NO: 234557 - DNA, 399 bp, Glycine max
gtattatggtcattcaacaatggatactggtctgactcttaagtccttgatagtacaaggctaagttgtcgcactatcacgaggaatcggtaagttagttgtgtatgtgtgtcttaatgcggtcctgattgagtttagtcttacaagaagaatctacgaacaatgcttaatcaggattaggctaaactatcatgaggaatcgaggtttagtatctcaggagacaccataagaacacatgagcattgttagctagagaatatcttttcagcataaggcacctattatgaagaccaatgtgtttttacttgttttacacatcattcctttcgcgtgattctgtcttgttgcacaaatagattatacaccttttcatattcacacttatcttttcacactat

SEQ ID NO: 234558 - DNA, 438 bp, Glycine max
  unsure (1)..(438): unsure at all n locations
gcttgaagccanaatcatataaactattatcatgggtttacacaaataaattcagacgacaaaaataaatcagaggtaaggatctttaatggaaaaatatattatcccaacctgactctgataccaaatattcttggatttttagagttctcacacagttctcttatgtgagacaaagtaacaataaaaactcgatagatgagagagaagttattccttttgtaaaacaaactttttgataactttttccacaatttcctttgtaaatatctttttctttaatgctaatattacccctaatgaagtgagaagagagggaacctaatttaataaaacctaaaaattcccgtgactttatacattaagtctaacaatatcacttagacatatttcattaagcattctataatacctgaccatatatattaaatatcttct

SEQ ID NO: 234559 - DNA, 438 bp, Glycine max
  unsure (1)..(438): unsure at all n locations
tcaaatcgtgcaccanaatattatccacttatagtacatctcgtctgaagcactaattatcaaaattgagaagaataagacgatcaaatttataatttaatcatttattttttaaaattaaatccctcgtcaatcactaatataccatagttattttattatgaaatttatttcttatcctaaatttaactatttcatagatttgcgtgtggataaaattcattcttaatctagtgttataattttgagtaaaacaaatgaaaatttttaaaatttaatatgacattaaatcaactttttgttgaaaaaccctccaaattttgatggagagctatgattgtataatttcaatgcatggaaaaaggaagaacttttcaaagtcatgaaattcattatttaatctctgacacttccatacaacttatcaaaataaattaa

SEQ ID NO: 234560 - DNA, 278 bp, Glycine max
tggagagaaaatttaccaatttgggattgcagggtgctctaagaaacttcctagacccccactttgttgaaaggagttgcagccactcatactttgtttcctctagagaaaatgaaagaccaagtgaatgaactgttatgtgttatagagtgcacacgacccatgaagaattgtgtggtgtaccaaccatgaatatgacagacgcaatagttgagttgaactggtttctgtaccattaccaccaagtttgtcttttattttgagtgtcaatcatttaa

SEQ ID NO: 234561 - DNA, 425 bp, Glycine max
  unsure (1)..(425): unsure at all n locations
taatcaagataagtatgaaaaggttgttttcaaaagactgagtagctcatggattnttctcanaacatgtttaccaaagagtgtttactctctggtaatcgattactaaattattgtaatcgattaccagtagcaaaatggatttgaaaaagttttcaaactgaatttacaacgttccaattaatttcaaaaagctgtaatcgattacaatgttttggtaatcgattaccagtgcctttaaacgttgaaattcaaattcaaatatgaagagtcacattctttcacataaaagccttgtgtaatcgattacactgatttggtaattgattaccagtgattgtttctgaataaatcaaaagatgtaactcttcaaaaggttttgactttttcaaattgttttaagttttctaaatgtataactcttt

SEQ ID NO: 234562 - DNA, 342 bp, Glycine max
agcatgcaagcttctcagaagagatataacgacactggcccacacatggagtgtcttctcttactccaacctagctccctcatcccacacctcagatctaaatatggatagagctaggttggtctatggcttggtgactaacatggacatgaacatcggagcccttatctcaggtcagatttcttttattgctcagagtaactcctctaggctcggatttcgagccttgatcactgccctatgcagagctagaggagttacctctgacagtctgacttatgagagcctgagcccgggcattaacttggcctacattaaaaataactggtggaatgtggatga

SEQ ID NO: 234563 - DNA, 432 bp, Glycine max
  unsure (1)..(432): unsure at all n locations
nttctcanatagatatcaaaggatgaagggtttcatccaatgggttcataatcatgttgtgcttagaaaatcagttcacaaaacttgatttaaagaaaatgcaaaggtttatactagttcaccccaattcttgggctatgtccaattctcgttaaaaccttgaagggttccactaatcaattctttgatcacaaccaagtattctgtatgcagattccactatactagtttttgtattaggggtagttttgtaatttcacatgcattaagtgaatatttgatgtgtgttgtgggaggtaaatttaattgaactgggagaagctcaatccaattaatatttatatggggaggtgagcattntcttgctacaccccatngccacatcatacagtgacactttgtgcatgtgcttcatgctttacatgccttatg

SEQ ID NO: 234564 - DNA, 339 bp, Glycine max
tcttatccaaggctcatcgtgagggagaagcttcttcttccatggctcataccctaaaggatggcgcctcctctcacctacttttctttgtcttccgctgcatctacatggtggaaaatcaccattaaatgacctcattgaagctcaaagatccagcctccaaagaatccccacaagcaagcttccatcaagtgtgaatcaaaacacacacagagcttcaaattaggtgctccttaaacctctattatattttgctttaccttctcttccattgatgtttcttcatttttctccatggatctccttacatgtcttgtgctaaattttggtaacacgatt

SEQ ID NO: 234565 - DNA, 340 bp, Glycine max
gaagagtcatgacttttcaaagggtttttttaaaatctctttactggtaatcgattataggattctggtgatcaattacatatatcaaaatcaaacacgtttgtgttggtagtcaaaaatatcttcacaaactctctagtaatcgattacacagtttggtaattgattaccagttcaaaaatatctttttgaactgatttagcctttgataaaaaaaagtatttgatactaaaaatgttgaggccaaactaaagcaataaaatgagattctctaacaaaattactaagctcttatcttaaattacttgaacctgtcttttgactgaacaaatcaagtcat

SEQ ID NO: 234566 - DNA, 364 bp, Glycine max
  unsure (1)..(364): unsure at all n locations
tatgcngctaacanaaaaatggaagaggcactttatgtttattggacacatatacaatagcagaggttaacatacctctgctggatgcaataaatcaatatccataatatgctatattcttgaatgagttgtgcactaataagctgaagcttaaaagatatgattgaattagcatgggcagaaatgtcccgaatgattggtaaactatttaccaaatccctgataaatgtaaagatcctgggacatttagcataccttgtattatatggaacaataagtttgacaatgtcttgctatactgacgatctcactgtatcgcgatagcctcggctatttatatatctccatctcttgggccttggag

SEQ ID NO: 234567 - DNA, 369 bp, Glycine max
tcgttttaaacctcgaaaggcatgggactggccgttgtcacagacattatttacaaccagtatcggcgaactatatactttcggccaagattggctaatgtcttcctggatgaataaaatggaacatgcctgtgttggcccatacaaaatgtcggttgagctcgcaaaataaaaacatatgcgacctacattgttaattttttatgcaacaccaaaacaagaaaacttcctttgacataaaaaaaacattaccccgcagcgagtgtttttaaaaaaaattgccccatgtcggctgataaatatcaatcgggctacttcacgaccgatggccgactatggcgcttctatctcatccctgaatgaaatttg

SEQ ID NO: 234568 - DNA, 389 bp, Glycine max
  unsure (1)..(389): unsure at all n locations
gatcctcatagtcacctgcggcatgaagcttncaataaactccactttagttatggtatcngancaaatcacccaacttggacctgttctggctatcctcgcggatacccaacttcaaattcttcgagaaagcatcatagaacttgctgtaggcttccttgttctccgcaatttcattgaacatctcaatgcacttcttcacaagattcttcctgatcaccttcaggatcttgttctgctgcagcagctcacgagaaatgttgaggggcaagtcatcggagtcgacaacacccttcacaaatccgaggtactcgggaatgagctcctcacagttgtccatgatgaacaccctcctgacataaagtatgatgttgttcatctatttcctg

SEQ ID NO: 234569 - DNA, 389 bp, Glycine max
aacttcaaactaagcttacaaatattgttgcttgacaatcatcattattatgtatatcgtgttaaaaaataagcaacggtccatattcaccttataatatcaatgattcacattaattcgatttatatgcattaatttttcatgtgttattcaaaaattttgtgtcactcaataattactatatcaacagttcatattcattttctgatcaaaaacctgttataaagcaaaaaaaaaatcaaaatgcacaatgaaatcatgattttgttgtgttatgtacaacagaaacattatttcattgtgttatgcacaacgaaaatatgattttgttgtatataacataacaaaaattattcttttgttatgcattggtggaggatttaatatgc

SEQ ID NO: 234570 - DNA, 371 bp, Glycine max
  unsure (1)..(371): unsure at all n locations
tactgccctctaatttgaagcaatatttgacattccctttatgtattccctgacattttctttgcctttattcttcatggaaattaagttctgaagaagagtacttgtttccgccttatcgctctttgcaaaacgtttttcaatgtcagcaaggaattctgtggcactagttatatcatttgaaatagtgtccctaaagacctatggaatgtcacgcttaatgatcataagactcatgcgctttaagtgatcccacttctcatgaagttttctctattcagaactacatgaatcccattggagaaggtgggttctcaatcttaatgtaaggtctagatccatacaaccaagaacaattngcatgttctatt

SEQ ID NO: 234571 - DNA, 291 bp, Glycine max
  unsure (1)..(291): unsure at all n locations
agcttccttgcttcgtggatcttgttcttttataggntgactgccaggagctcgcctgcttaggtacgtcacaggttctcactgactgactatgcctgggttgggtcgggattagccaaacttggttttgggcaatagcaccccacctgacgtccccaaggtctcctgacctccgcgacatatctccaggtaccactttgtggtcaacaaacaaaagtaggaagactgattcttccacgctttctcacatcaagcttattggattatggggcacccgtcatatgtggtact

SEQ ID NO: 234572 - DNA, 346 bp, Glycine max
tgttgaataagctacaatttattcatatatcacataataccaaaaccagcttctatcttagagaaaattagcttcaaagtaggtcacttgatcatgataaatgctttaagtcccacatcgggaaagataaccccatgaatccctttctttccctatacatagtgaagaccaacaaaccttatatgtaccaagtaattaagtgggcttagcattatgcgcaaagcccctaatagtcaatatttgtatattttcctttgagttttcaaactcggggagtttagatggcttgagaatgtgtttaaatcacaaacaaagttttggcataacaagagatgtcgtgcaaatc

SEQ ID NO: 234573 - DNA, 355 bp, Glycine max
  unsure (1)..(355): unsure at all n locations
agcttcaagctgctcaattgctccangttgctgcatggaagggcaaaggtctgtatggtggctatcaaaggagcacaaaccacaaacccttgcgacaggtacagatttctgattcaaggccagttgggttaccaagttaaccaatgcatccagtttgccttcaagcttcttattttcagatgatgcagatgggcttgtagctacctcatgcactcctctaatgactatggcgtcatttctggcgctaaactggtgggagttggaagccatcttctcaattaaatttttggcttcagcaggagtcatgtcttcaagggctccaccactggcaacatctatcatacttctcttcata

SEQ ID NO: 234574 - DNA, 314 bp, Glycine max
  unsure (1)..(314): unsure at all n locations
ggtattcttaggaatcacttggactagactcacccaccgtctatcagaaatggngtagatgattccaacttgcaagagcttggtcacctcctttttcaccacatctagaatgatggggttaagtcgtcgttgtggctgcctcactggcttagctccatcctctaaaagtatcctatgcatgcaggtagatgggctaatactaggaatgtttgctaaagtccatccaatagctttcttgtgcttctggagcactaacaacaacttctcctcttgctcggcagtaatggaggcagagatgatcactggaaattttt

SEQ ID NO: 234575 - DNA, 309 bp, Glycine max
  unsure (1)..(309): unsure at all n locations
agcttacacattgatagtttccttttaaatttcattngaatgattatnttggaagcaattatcttaatatatcaattcattggagtctttaattgctctttttgatagtttagttgtaaataaataagtttttcttaggataattttttttaatcaagtttctactaattaaggttaaatttggattataggatcatggtgaagtgatgatggatgaaggagcatgaagcaaaagaggcaaaaaggacaagattttagcaagtggttgcaaagaagcaaatggcactaaagcttgaagttgttcatgct

SEQ ID NO: 234576 - DNA, 363 bp, Glycine max
  unsure (1)..(363): unsure at all n locations
tacccattctgtnttaaggttnttatgatgatgcttgtgtgctgaaatggctgatggaaaactgatagagatgaagggtagagttgacctacggttgaaaagtgagaatgtagtgatatgagtggaaaagtgtgatgctttgaggatttgaaaagccaaatctggatttagtggtaattggaggttagagtgagttaatcctagtttgaaatgtcatttatgactgtgagaaagcttgggctgtgcaaaggaggaaaatgagtgaccaaagtgaaggcaagagccatttctagggtaaattgggtgttgaggagtcaaattttgattcggtagagttttcgtcgtaaaactagtttgagcgag

SEQ ID NO: 234577 - DNA, 363 bp, Glycine max
  unsure (1)..(363): unsure at all n locations
gcatgcaagcttctagncaaagggacgtgagggaaattaattcctttgatagcccccttgagcctgggtgcactttccttggtttgaagctcactacaagccttaaaggaaaaaccatgatatcaccatatccttaaagaattttggagcttcggaattggtctggaaataagatgagggggtttttggttcattggacaacataggttagttggctatgcttcatgaggtattttgggccatacccgatgtacatcgtatactggttacaagttggacatgctgaaagaaatggtgtctctcaaagctatatagccaaaaaataagaaagaagaaaaatctcgaaaaaaagaaaagaaaagc

SEQ ID NO: 234578 - DNA, 374 bp, Glycine max
ttgatcgttgcatctcattctctatctatccatatgtacatcatgcatcatcatgtagaggtaggaacactatttctaaagtgagaaacttcttcaaggcataaaactctctatgttaatcgattaccatggtgttgcgaagcgattacacaagttgcttgtagcttgcaaaaagattctaagtttggcttaatcgattaccaggtatcagtatgcgattacatagcttagttgagaccatgtctattctttcattagtctccacattaattgattaccatgtgatcataatagattaacttcttcttaaatgtggtccctataaggatcaagaacactttaattgattacatcaacaatctaatcgattacat

SEQ ID NO: 234579 - DNA, 395 bp, Glycine max
atactacgcttacaggtgtctcttatataacactaatgagacacatgtttttcttaccaacgttgtggactaagaccacacatgtgttatctaccatgcgatgtatgacatatgtaactataccacaatctctatcagttgtgcatattaatataagacaaataacttatgatgataatgttctcttacaatgaaaataaccttttaaagtgttatttggagttgtttttgaaattagaactaataactctttatcttgataatatggataatcttttaatataaattttattctacaaattactaagtacaacttcaatttaattgaaaaaaattcaaactttactttaaaaatgtatcataagaaatgtatcactacattgtgtacacacatt

SEQ ID NO: 234580 - DNA, 319 bp, Glycine max
gcttggaaaaagctatgttgaccttctcgctaagccaatatgttggcttagcgagcatccgctaatcatttctctcatgggctaagagcgaggaagaatccaaaagaagatgggctgtacagattcgctaagcacactgctccagttcatccgctaagcgagaaaggcgtgctaagccaaaaatcactaacgtgcgctaagtggtccatacgtgcgctaagcacacgagcacgaacaagcccacctatttaagcttgaaatcaatatttgtgaagagagtttggacagggattcagagctttgcatgtctagggtttct

SEQ ID NO: 234581 - DNA, 374 bp, Glycine max
cttacccgttgaagatcgaagaacgatgacgaacgtacgaagaacgtcgaagaacggctgaaaatcttcgcgataatccccacggaaacgtttcggataccttacggaagcgcctcggctcggagtttcttcacggaaccaattattttctctaatttgaagtgatccttgaattaccaagagggctgaacgatattcctcttcatttctccccctatttataggaaaatgggggagatgcttgccacccagctcgcccaggcgagcaatgtgacttcctccagaagcaaccgccttttggaggaatcttttggagggcccaagtgggcctggttgctatttgacccacatttatgctaaatcacccctcagcc

SEQ ID NO: 234582 - DNA, 448 bp, Glycine max
  unsure (1)..(448): unsure at all n locations
tcgaccggatcttaagcgactgcagctgcagcttgacgattatggggtacccatcacatgtggnactaggtggcggncaggcgatggtgcacaacaagttttccacatccacaaagcgcgcataaacccaccattccatgttgccacctccaactgagctcacgtactcccacgtagcccatatcctcgtttctctcaacaccgggtccccatcaatcctcccaagcttccccaacattcaagtaattcaacaatcaaacaacataaactatcacagccaagaaaacagggcaaaggcagaaaactctgcccanaacaccaaccaanatcacagcttttctcacttaaagaccccagtaacaattccttcgttccaattcgttaaccgtggatcgaactcaaattttactggaaagctctagtacataagcctacattttgaccggtg

SEQ ID NO: 234583 - DNA, 396 bp, Glycine max
gtgagccaaaatcctgactcaccataaaccttgtaccctttgtgagaatgccaatccttaccctcggaagcatatatagaatagatgggaatattccattcaaagaataagaaaaggaaaatttccgatgaaagcaaaaaataattgatggaaaattccccaatcatagagtgggagaaagctatatatatgataagaacgaaaattccccattcaaagagtgggagatagcaaatagaaaagataggaaaattcccaatcaaagaatgggatatagtaaaaaggattattaataacgtaagaaagctcctgatcaatgatcgaaagaaaacataataaatgtgctcagaggtctttggaccaaacaatatctgtaacagtcagaattgtcaccaa

SEQ ID NO: 234584 - DNA, 395 bp, Glycine max
  unsure (1)..(395): unsure at all n locations
agcttggagcatcgtcactacagctattttgataatgatngacaaagagatatcagacccctaagcttttggcagacaagggcttgcgttgctagacaattgctagtcatgctaagtcgcgattttttnttattcataaatattagttattattattattagttcttaaaagtgagagaatttaaacctgcgatgttattttatttttctttgatctagatcaatcttatattctttatgtcaagcaatgattatgtttgtacatatcatgcatccaaaagaaaaaataaatacagcccattattatgctttaaattcgtcttgcattggagatatatccgcctaagacaataaaagaggaccattttgcttcaagctctagactaatttaagtt

SEQ ID NO: 234585 - DNA, 388 bp, Glycine max
tgtagatcaactagaaagtcgctttattaaaataatcttttatagaacttttacaaaacaatcatcttcaatcacatcttatgtattgattgacatttaccttgtttgattttttattatcatccacaaatgttgattaatttttgtcactgaaaatttgaatcatgatatcttcttctttgtatttattttttctcatctaattaatcgtataattcattgataagattggtgaattattatttctgaatgaaaccttctacaatttaaacttattgttaacagcttttattttaaataagtagtaaaacgtagtatttgtttaaatataattagatcttaaaatataccattgaatataattttttctacatcacgtatataaatt

SEQ ID NO: 234586 - DNA, 471 bp, Glycine max
  unsure (1)..(471): unsure at all n locations
acctgaggcctgcaagcttacagcagatagtaggatgtatttttaatctanaanntaaaaactcaatgccattaacctagggaattaaaaaaaaacttaatggctgagtgtaactgatactgtggctaccaaaagtcacccccaacagccaacaagtctaccaccatttggtctcccaaaaggctgatgcctaggttgccaatagggcccttattacaactcgaactaaacctaactaaagcccttttaattgattaacccaaaacatattgttggcatgccactttacaaggattggccattatttatacaattaatcactctaataattggagacaaggggagtcatttattcctccttcatttgggccatgatacaactcacaaccttggactttttccttgaaacttgcgctgtatacaaatacatggacaacacttgttaagagcttcttgcttgtctgcttaacc

SEQ ID NO: 234587 - DNA, 334 bp, Glycine max
  unsure (1)..(334): unsure at all n locations
ctccgggatcttaatcaccgcggctcagctgaaatagggaagatataattttagaattnggccaattagatgggtagactgattagattaaaaaaaatatactgaaagtacttatagtagggatttaactctcaaaaaatacttaataaatttcatatatctgcttatttatttattgattttatcatttattgcgcttaacaattaaacatttttctcgactggccattatgaataacatggaatgtacgtccaagaatcttgacttatggacgggttcaattaatcccactgccgttgctttccatagcacaatggtacataccctaccatg

SEQ ID NO: 234588 - DNA, 328 bp, Glycine max
tcagacaggcacacagagagaagaaagcttcatgttataaagatcttagcatgaatcgcgagacaatgtaagagtaacgctctgaactgcataaatatgaagaaataattccccaaacaggacaccaaaggataataactgccaccaccatttagttccaccaaccagaaaatgagcagcaacagttaaatttcattgcaatgggacctagtacccaaaataaacgcatgcgatccagatcaccattcatgcaagatcctagaattctagtacacttgatataccacaataatgcaaactagaaattgaacatttaaaaaacagtttc

SEQ ID NO: 234589 - DNA, 377 bp, Glycine max
  unsure (1)..(377): unsure at all n locations
agcttggggctgctgttcttgttattcccgngagcttgnggggttttgaagagagggggaagaagtttgggtgaggaanacattccccctccactcctttatantttcgtacaggggttgctcgcccaggcgagctcaactcgcccaggcgagctaacctgtacctcttcttttttctttttaggggaaacattaatcttgccccaccccccttacgggttagcgttcgcctactcgaacctacttaagttataatcaggcgtcgattaccttatttaaaacaaaccatagtaatatatactgtgaattcaaaggatactgggctgccttgcagcgacgttctctgcttgttcagtgccgggaaaggacgacgatcg

SEQ ID NO: 234590 - DNA, 431 bp, Glycine max
cttgatggtgcgtagcccaccatctgttcatagtagagtatcgataatgtgtctaccatcacgatcatcgtctccctttccatcattgggggtaccacctgtgccgccagatccctccaccttttgggcgtgttctttgaaagatccgtccccctttttgcaaatgttctgtagttgcatcctatccggaaccatatcaaaattgtactgatactgcctaacaaaggcaaccattaagtccttccaagaatggactcaggaagattccaagttagtgtaccatgtaacagctaccccagtaagactttcttgggaggaatgtattagcaattcctcatcttttgcgtattcccccatcttctgacaatacatctttagatgggtcttgggacaaagagtccccttgtacttgtcaaggtccagcaccctta

SEQ ID NO: 234591 - DNA, 377 bp, Glycine max
  unsure (1)..(377): unsure at all n locations
agctataatgagaataagaacatgtngtgtaaagngntactctcaaacccagggggttgttctacatagacttcctcttatattagtccattgtggaatgcactttttatgtccatttgatataatcttattttagtataacaataaatgacaataaaatgtttattgcctccaaaagagcataagcttttgtataatctataccttcctattgtgagtaaactttaacaactaaccttgccttgttcacataaccttacctgcctcatctaacttgtttttgaacactcatttagcacatacttccttctttccttgggatagttctacaagattcaaacaccatttttcttgaattggtcaagttgcccttgcat

SEQ ID NO: 234592 - DNA, 377 bp, Glycine max
  unsure (1)..(377): unsure at all n locations
atccttgagtcacctgcggcatgcaagctngcggactataccttcgaccgaactctgtcgtgtttctatctaggcccggattcaaggcgggctgcagcaccggctccgcttccctaactgtactggaggcggntgcggnggctttatcctctatggttttctggagttttaacatgacctccgagatggaagccatttgatcttttaaggccgatagatcggccttcatctgttcctgcacgccctcttcattatccatttttctggatcgagtgttataggggtgccttggtgttttcttagttatgatgaaattcctaaagaaataaacaacggtgagtatgccaccaaaacatgagtatgcaaatggatgatcg

SEQ ID NO: 234593 - DNA, 436 bp, Glycine max
tgacacatataatactaagcttcttatatgctgaaccattctatcaataaacacaagttgagtgttattcagaaaattagagagtatctctgtattcttagtgagagtgattctcctaaattcttgagtgattcaagaacaccctggctgtatcaaaggactttcacaacctttgtgtgttgccctcgccggaaagagtgattctttccttcctttcatcttcaaccttgttctttcaaaccacaattccagaaaatccacttctgcccataattatctcgtggccataactcccattttacgcactcaaattaagtgattcttgagcctaaattgaatttcaaaacgagacctctcacctcgttttggaatcacctcatttagagccctgtagcttgagttattgccatttctatatttctgtctatccaccact

SEQ ID NO: 234594 - DNA, 415 bp, Glycine max
  unsure (1)..(415): unsure at all n locations
agcttagctttctctattcaccaataatcttattattgctntattatnttggggaagttgtttatgcaccagtaaacatactcagttataggagatttactatggtaattggtaccctttaggtctatggtgcccaatgcacaagctatcatgcatttaatgataaatgattttataataaaaaaaaattagaagttactgcatctaccggttgcaaaagaaatgcttgcaacttacaccaaacacaggaaaagatgattacccaagtaatggccccaatcataatgttacttacatctacctgaaactctttctatgcctacctaatttaattctccggttatacactngtttactctgattctctgttaaaaaacttcagatctatgaaatcaataaaggatctgaagtgtaa

SEQ ID NO: 234595 - DNA, 356 bp, Glycine max
  unsure (1)..(356): unsure at all n locations
ntctacgctgccagttaacaaggtaagagttctaccttattttgtttctcttcttagtgagttcttaatcagtgcggtgggattgtccgaaggttcttatcaaattattcggtcattttttccacttggctaaccatataaaagtatcaataagaattctaatgtggggcttcattttgttgtggtagttgattgtgctttacgtggttttcaagcttgacgagagttacacgccaagcaaagtttccatccgtgccggtgatggttttcacaacttgaaggtaaatttttattttattggtttgggtttgattgggatgattatggctaattatctggtgttaactttgggaaca

SEQ ID NO: 234596 - DNA, 420 bp, Glycine max
atccttaagtgacctgacgcatgcaagcttataactgggggtccgcatgcattttattccaatgtaaagagttgctaaatggcacctggaataaaagaacatcaagatttacactggtaaagagcaatttatagaaaaataagaggatttgacaaataagttgttaaacaaaccaaagtgacacatacatggaagcaagtgagcacctagtgtaagaatcacaactttgaaatttaaaattgcaaactgctttgggattcgattggaacatgggtttgtgccttatagaaaactagtaggaattatgccccagctatagaggattatgagccactaaaagtagcactgttgcaatctccagaaggtaaaactaaacttttagaaattacaatcctttactacaacaaaaagctcaaaact

SEQ ID NO: 234597 - DNA, 281 bp, Glycine max
atatcacgttacgcggaaatcattacgaggcattaacgatcttttgtcctgtgggtctgaatgaccataatcattatgcgtgtactactgattgtatatgatatcaaaatcaagtggcccatatgcgcaactgccctacttgtgggctgtctctctacaacatgaagtgtggcgaacgcaatgatgatgtaccacggttcatcgatcatgcagatgaaatgagttgggatcttctatgaatgccaaggtttatacgaatgcccactaatccacttgttcac

SEQ ID NO: 234598 - DNA, 253 bp, Glycine max
  unsure (1)..(253): unsure at all n locations
agcttggtgaaataggtgcagtggaacatattcatgacttataattagaaggagcgcattcaaagatggttattataaaataaccatcgttgaatggtagcattctaggatggtgtttacttaaaaatcgtctagaatgagaccattctaagatagttttaactaaacaccgtcgtaaaatggtatggtgtttaacttaaaaaccgacttttaatgatggctttttatcatggtgctnacattatcaccgtct

SEQ ID NO: 234599 - DNA, 361 bp, Glycine max
ttatgtttgactgctcacatggatgtgtgttatgagcaatcttgcttgaatttctaatcatcatcatcatatgcgtgtcatggaaatgatttgggcattcttttattcctgagccacttgctaaacaaatatcccgacatacatcatgttctgccatttgcaggccttttgggccaaacgtcaattttttggccataaccttgacctatgatggaaattaccttgggttataaacgtgcgtcaatagaaaagaaaagaaaaaaatcaatcaatcacagattgaagaagagcaaaagaaaatcgaatagaaagaaagaatagaaaatgagagattctttggaccagacaatgtgtgaacaat

SEQ ID NO: 234600 - DNA, 405 bp, Glycine max
  unsure (1)..(405): unsure at all n locations
agcttgaaatgaggaagtgtggaagggtgttacttcctacttttattcngcgaccacagagaggtacctggagatatgtcgcgagggtcaagaaaccttggggacgtcaggtggggtgctatagcccaaaaccaagcttgaccaatcccgacccaacccgggcatagtcagtcagtgagaacctgtgatgtacctaaacaggcaagctcctggcagtcaaccgataaaagaacaaagaccacaaagcagggaggcttgtgtggtggctggccaccaatgagtcttgagtgagatatgggatatggcttctggtaatcgattaccaagggtagggaattgattacaaggcttaaaagtgaagacaggaagctaagatgggctctggtaatcgattaccaagggagt

SEQ ID NO: 234601 - DNA, 379 bp, Glycine max
  unsure (1)..(379): unsure at all n locations
agctngcctcaaagagatccaggattgattaagcggctgaaggaaccagttctgctcccgaatatgacagtcaccgttttaagatcgctgagcaccagcagcgcttcgaggccatcaaaggatggtcatttttccgggagcgacgcgtccagctcagggacgatgaatataccgacttccaggaggagatagttcgccggcggtgggcatcactggttacccccatggccaagttcgacccagacatagtcctcgaattttatgccaatgtttggcctacagaggagggcgtgcgagatatgcgatcctgggtgaggggtcagtggatcccgttcgatgcggatgctctcagccagttcctgggataccctttaatgct

SEQ ID NO: 234602 - DNA, 420 bp, Glycine max
tgcttgtggcctaaccagttaccttgaaaatttcttgttttagtatgggatgacatgtttcggtagcagtcctttgcatttgggatgatatgttcgagttcaattgcatttttcttctgcttggttcggattattaccgtccttgtgtgtcaatgcgatagcattcttgtctagtgatgttcgcatgtttatttcctactgccagaagttgattgatgaatatggtttatgagtcttaacttcactcttcataatgtattgcttatctgcatcagcaaactaagtcttttggtgtgtggccacctcatgatgtggtactgcgcatattaaaagctccaatttgtttcattggcattatacaatgaatactatattttattttaaatcaaagtcgtagtcctgatagctgttttctaaact

SEQ ID NO: 234603 - DNA, 438 bp, Glycine max
  unsure (1)..(438): unsure at all n locations
gaccttaagtcacctgggctgcaactggagatgatgggaccttgtgttaaagaaacnaggatttgggctacgtgggagtacgagagctcaaatggaggcggaccacagggggatggtgggtttatgcacgcattgtggatgtggaaaaactgttgggcaccattcgccgaccgccacctattaccacatgtgatgggtaccccataatcctacaatcttgagatgaggaagtgttgaatggtgaaacttcctgctttattgttgaccacagagtggcacctgaaatatgtcgcatggatcaggacaccttggggacgtcatgtggggggctaattgccaaaaccaagcttgtccaataccgacctcacccgtgcatattttgttagtgagaacctgggatgtacctaagcaagcgagctcctggcatgcactgataaa

SEQ ID NO: 234604 - DNA, 322 bp, Glycine max
gaacattaaactgtgctttacacaggatcccgatgcggagacaggagtgatattgtctcacaatattaaacaacggagagcctccggtgatctgtatggacggtacatttcaatcaggtgctcgattcggagacatagttgatctagtagctccattctgttcacggatactctccagaaatcagtttggacctgtcagttcacttaggtgtccgattcaaggacataagtgatatagacgctcaatacttatcatcggaagctgtccagatgatcgtatggagagatgtgtaacactgatgctcgattcgcggacataatg

SEQ ID NO: 234605 - DNA, 348 bp, Glycine max
tttacataataatatttctataaaatgaacactctacaaaagattttttaaaaattgcattatgcatattttctatttcatcaacatcttttttttacgccaataagaaaacgaatataataattattttcagaagtaattggtgtgtttagtcaaggactttgggcatagaaaagataattaaataggaaaattattcaaatcttaattaagtctagtccaacaaaaatttatcagcgggtttatttagcaattattaagctcaaactcaaatgtcagatacataacttggaattgcacaccacatctactcagttatggagcccatcaccgatatatagtcaaacc

SEQ ID NO: 234606 - DNA, 361 bp, Glycine max
atactaagctggtcttattctcttcgccacgccactggttttattatcatttctgttatatctgcctgcttccaccttcaattaatgtggtctttgataattgaattattgtattgagtgtttttttctcgctcattgcaggtatatccagatcacatgtgctacctctggggaaggactatatgaaagactggagtggctctccaacaatatagctaacaaggtatgccttaaaaattctgcatctcttgtgttcgttgcttgaactgtataactctgattgatttctgttgtttacttttctggatcatgcttaaggacattttgtggaatgccggtatttcttggctattatataatg

SEQ ID NO: 234607 - DNA, 274 bp, Glycine max
accccacctactaatgaaatccccccttgacctcatcccattggattatcatcctagagcacgcccaaagccttgcaacaaaactcttcatgatattcatcacattctgcccaaaaaatgttgtgaggtcttatgtataaagacactccgaactaagataataacatgcccgccttgtcagtgcctcacctaaatatgcttaggaactttgcttatagagctacatctactctctaataatggcctcctgccatcctctccccaaacattagtt

SEQ ID NO: 234608 - DNA, 388 bp, Glycine max
agctctagaacacctaacttgaaagctcgtctaaacacattccgagaagaatttcgttctttatggcgcaattatagtgaactgtagcttacataaaatttgttggacttggatgtaagtgctttctgccttagaatttgtacatattaatatgcttaacgatttggcgcttatttgaaaagcttgtaaaatgcatctgtccattgaagtgattgagaaacagatctatatcttataggtgttaggttgaatgtgtatcctcttaagttgcatattttctgtcatcacatgataaattaatcttattctcaatcaatatgttcataaatctcattctcaatcaatatgtactatcggaactttcgtctaacaaaatgatacatacata

SEQ ID NO: 234609 - DNA, 404 bp, Glycine max
catttgctataaagacaatacatttgggatgttagtttcacaagataagcttatcttaacacaaaaatggcatgctaatccctccgatttataacgaactcatgcacacgtttaatgtaacacatttatgcacaggggtatgtgtaaaatatcctactatttatgtcaatgtacaaggacatccaacacattctatttaccatacatatatatgtattttttaagagaacacacattctcatgctcaaggcactgcgtcataattcacacctaatcacatcctaaatattttgctatcacaaactacctacacatatttgaagcacatatcataagactttcattggttcactcacatttatttatatgcatattggatagctaattacgtcatgcacatactt

SEQ ID NO: 234610 - DNA, 438 bp, Glycine max
  unsure (1)..(438): unsure at all n locations
ngcctaagggcgcaatagtactcatttattgcaggctanctacactgcgagaatacacgagggaaagattaattctactatcatacaaagacggtcgttataaaacccgtcattgggtaatccagttcaacgacgatgcctatttaacttgtcgttgtaattggaagacgacatcattttcggtaaaaacgccgctgagataaatcgcatagtttctataatgtcaccgcctgttaaacaatgacatttttcggaccaccatccttgatagcgggctctataatcaagacgttgtacgagtgaatatttatattacattcataactatttcctttacttctacgatcattaattttttcatataaaattctaaatctatatatttttgcttaaaaaattcagacacaaagtatgactaaatatttccactaacataaa

SEQ ID NO: 234611 - DNA, 192 bp, Glycine max
ttaactactgctaaaacagagcccggcgatacaggtcatcatactgttagccgaccccaattaacctagatggctccaaaacctcctaggcacagaccaattagggaaactccggggaggtgcaccttgcagtgacgattttagttacctgtgactacagaagcgactcgctataggcggatcttagcaacc

SEQ ID NO: 234612 - DNA, 332 bp, Glycine max
  unsure (1)..(332): unsure at all n locations
agcttgcctcanagaggtccaggaaggacattgctgccgaaagaactagttccaccccggagtacgacagtcaccgctttatgagcgttgtacaccagcagcgcttcgaagccatcaagggatggtcgtttctccgggagcgacgcgtccagctcagggacgacgagtatactgattttcaggaggaaatagggcgccggcggtgggcaccactggttactcctatggccaagtttgatccagaaatagtccttgaattttatgccaatgcttggccaacagaggagggcgtgcgtgacatgagatcctgggttaggggtcagtggatcccg

SEQ ID NO: 234613 - DNA, 455 bp, Glycine max
tctcagcttgctatcgttatgcgagacggagacgcacatgttatctatcatcgccaagtaccaataagagttaggtctatccacggcccacgagcatagaatcgcggatgagtatgtccaagtgtatgcggaaaaagatgctagaggaatggtgatcgactctttacaccaagaggcaaccatatggatggatcggtttgctcttaccttgaacgggagtcaagaacttgcccgattgttagccaaggccaaggcaatggcagacacctactccacccccgaagagattcatgggcttctcggctattgtcaacatatgatagacttaatggcccacataattagaaatcgttaggaaactcgtatggtctctcagaccttgactggatacgacttctttttgaaataaatgagttggcccatgttttacttcaaaagcttggcaataaatcact

SEQ ID NO: 234614 - DNA, 368 bp, Glycine max
  unsure (1)..(368): unsure at all n locations
aataaccttgtgatcgatttggttgtctaattggcactccacggaatgccctacctcggcgtctctcggatcgaaccccgtaatcttaacatcatcttccgccgtaaacccaaatcccttcacaattgtatccttcaaatcctaaaataaaacaaagacgccaaacatcagatacaaaacctaggataatgatttttaaaaaggggaatgaataaattaatggaacatacggaaattgctttggggtaggggatgtcggaagcaagagaggaatgtaggaggaggaggaacgcgatngcgaagccgagaaaaggtttcatggtgtgccgcgaaaagaagaaggtggaattggnttcagaatgatggac

SEQ ID NO: 234615 - DNA, 383 bp, Glycine max
  unsure (1)..(383): unsure at all n locations
ctcatttactgtaccagagaatctgtgctttatganaattccatctaagcttcagatgattgttgtactgacaactatattgccaagtttattacatgtcgtatgtgcatgcgagccattgaaaagcagctaataaaatagcttgcaagtgaggcattcttgaatacagaaggaagtaataaaggacttaaatgttcattcatagaatgaaataggcaatcccatgaaccatcaaatccgaagatagccccctcgctcctgctctcctattcttaatgatctcctgagcaatgacttcctgttcagtgaccaactttcttccataactctcttatttcgccaggcacgcgctatacgcggataaagggccgggaaaatgaagc

SEQ ID NO: 234616 - DNA, 291 bp, Glycine max
  unsure (1)..(291): unsure at all n locations
gaaaatnaaaagctcggcaagcgcctcccctaattgcttttgtcaatatggagcatatctctggtgctaggtataatactcatccatagtacaacataataaatgagttagcactactccaccccaaaccgtttctctttttaagcaaactaatgactatacataagtccagtccaatctaagattaaccttctaaaaacactcttggaatgggcagaccaattagttaaccagataaaacatgtgggctcatattattaagtacgtataaaccaatactttgtatagttt

SEQ ID NO: 234617 - DNA, 371 bp, Glycine max
ccatggaaactatgaaactgaggacggccactcatgtcattgcccattcatgccttttatgaattgaaaaacgctgacattaatggattccctattagaccctagttgcttcgtctcatttattttatagcgtaacgttttgtcatattaagaaatgtaataatatctgttaataaatgttataaaaaatcaatgtattgttaatataccattagtctgttatattaaataatatctatcttgtgatcccttattctatctgctactccataattaaaggtatgatatgataaataatattaaaacttcttataattccaatcgacaccaaatgaaacaagtttttattctcaaactcaacaaatgaaaac

SEQ ID NO: 234618 - DNA, 454 bp, Glycine max
agcttaaagaaattatgtccaagcagtgttgctcttttaatgtgatgaaattcaagggagtgaggtattttagacaaacttatttgatgtaatctgtctctgttgctgaaagatctccttatgtaacttctttgaaccacattttctgaatggcattaagttattcggcaaataaaaaactgtatttttgctattcctttctataaaatatttgtgtgtgtgtgtgtgtataccttgctttaatgtttgtatgttatttatgaaacaagagctgagactgaacttttattcatctggagtccgcaaagtgtgataggaaaacctcatgtatttcttaagaacaataatagggataatccccacttaagcgattataacacagtttatcactttcctctactctatgaaacactacagaattctacctcctgccaaaggcacaaaccttatcatt

SEQ ID NO: 234619 - DNA, 438 bp, Glycine max
atatccctaaaccgttgataatctgacataatgcgccataacactcatttaatattttatgagacttattaaagtctcccaacagtagctatcttaatatgcagattatactaccgccacaccagtgttccactctctgggtgataaataacaaatggtgcatataagcgattaattggtggcacaccaggagatatgatggtacattaattcctatagaaacttctcctcagtgtaagacatttggatatatgtgtgactatcttatgaatgagttgtatgatctatgtaactaaccttattcagtggaaagaacttgctatttactcttaagttcaattaattacgttaactactctgctactcggtgaattgaccgctgcttaataactacgtgctaacttatggggaggcaatggatgacctgaactacatata

SEQ ID NO: 234620 - DNA, 324 bp, Glycine max
  unsure (1)..(324): unsure at all n locations
agcttccacaactactgagaagctccgtcttgctgctcatgaatcgcctcccctcgtagtacgtcatatgcagatttagctgtgtaccgcccgctcggatccgccttccacacccattgatcttgatgttgaggctggattctgtaatcttcaatctctcttaaaaatgctgccgccatgtctatttcattgtcaaataatggcctcctccatctaaaatcccattcccacccattatctccaacagcccncatattttgtatatttggattttgctgtgaagatatcacatacaacctatgataccttgtaatcagcggaacc

SEQ ID NO: 234621 - DNA, 437 bp, Glycine max
  unsure (1)..(437): unsure at all n locations
tcattgacttcaatagagttggtatttatttttcgttacaaactgttaatttcccccatagcacatttttaatgctttgcatatttttaatatttctttacgagtatattaaaacagtattttataaaacttaaggagattttttaaaaaaaaagtttatatattggaataaatgcatgtgcatttttttaatatgtattcacacatatgaaaacaacttaaggcgatataataaaaaaaaaaagtagtaagttaagattaatataacaagataatcttatagcatgactccggataaatgaaatgagtctcgctagggttatgaatcggattatcaattattaaaagagaatcgcatctacaagtaaaaataatagatatgaatgtatatgggaaacattantacatatcattttctttcatcacatatttatcta

SEQ ID NO: 234622 - DNA, 327 bp, Glycine max
  unsure (1)..(327): unsure at all n locations
agctgggcctcatcttatgcaagatacctttttaccctctntaggggcaacaattgtattattctttttgaatgacgcgcttgctatttttgaaaaagaatgcagggaaaaaacaaaaaagagaataggatacctcatattcacgtcgggtttttttggtacagatattcacgttggttagaatagntatagctattttgttaaaataagtttaaatgtataattatttatttgaaaaaataaatattaacgggtttcaaaaaattgtattttttttatagaaaaaattgttagtttgtatttcatgtggtaactttgcaatgggtt

SEQ ID NO: 234623 - DNA, 427 bp, Glycine max
  unsure (1)..(427): unsure at all n locations
tggaagaactaaanacaagatactcttcatggcaatggttggttgtatgttctgatcagtattttccgcattttgttaataacctgtgtttcttttgtagtttgtaatatcacaggctaaaaggtttagtctaacatttggtatcatagccacatctgcctctgccttgtccatttttggttttcggtattttttcgatctgatttcgcttatggtatgaagggccttgtttcttaataataagattataaatctttattttgttcgatttccttaattttggcttttgaatcgtgtaaaatggtgtccaaatgactgaaaatcgaccggggctgcatatgggtcgggtttgacccgctatacgctgtagatgatgaatagagtttaaataaaaacaaacggaatatcctacatcttgtgctaattg

SEQ ID NO: 234624 - DNA, 402 bp, Glycine max
  unsure (1)..(402): unsure at all n locations
agctntattagatgtgcatttagtattctcttctctaagggaagaacggtatgcacttcttgcattgtacatctgtttgattggtgtacaactattggcattgtgctccttcaacgttagcagaatgtttcttggtttcactattgacttggtcatatcaacaataattgtcttttcatccttagtcaattgcccaacatatggatgttcaactaattgttagacaagtggcctcagatatcttaagaagggggggttgaattaaaatattccaaactacttccccaattaaaaatctatttcactttctattcaagttatgaattcccttaatgacaatcttcttaaatattgattaaananaaccatttgaatatgaatatatagcaattataaataaag

SEQ ID NO: 234625 - DNA, 397 bp, Glycine max
  unsure (1)..(397): unsure at all n locations
ngcttanacaaccattcgttcaagagtattctctattttcaacttattggttcatataacattctcttctaatatattagtaaatgcattatttagtttattttttaatgctgcttgtatggtttgaagattattaatttttctattttcatcttttaattattttaaactgctcaaatgtcactttattgcttaattagaaataaacacgcccttatatttttaattaacaaaagaaataaaatacacattatgtgcatgattgcaaaaagaaaagtgacggatgattctggaacaatctaagatcagaaaatccacattttcttaaatcaaatgataattatttctaacctttaactttattatggaaatgctgctttttatctaatatattata

SEQ ID NO: 234626 - DNA, 480 bp, Glycine max
  unsure (1)..(480): unsure at all n locations
gacactatactatactcacgctgtattcaagaacaagcaactatagatagtcatatacgattatcaanacattctatacaggcctacaaagggtatatcttattacgaatggatatccacatgaacaagctaattgtatggccataaaattctaatcaacaagtcttttacaagaaacttactctctggcaaatcattaccagaggaagtagtccattaccagtggtcaaaactgatgtacaacacctattaaaatatgaattctatatctgccctgttgaatcgattacacatatatggtaatacgataccagcagcttctgaacgataaattcaaattttaaagctcggaattgattacacacatactgtaatcgattatcaaaccatatttcagataatattctcaacagcacatctttctactgtggtcttgaatggcatcaaaggctatattttgcactgagacacaatttctat

SEQ ID NO: 234627 - DNA, 361 bp, Glycine max
cctcatcgtatcgtcacagctttataattgggagccaatccaatccttgtgtccggactctcagccacttatgatagcctccgatgatcccattactgcttcccctaagctctctgtcctttcttcacgccgcatcccatgccttgcgaactcactggagtaccctcgcgttgtggtcactgaaaccccgtgcgatgaaaggcgtgatgctttcgtctgatggcacttctctcatggggtagtcaagctgtcttatggagaggaccggattataattaataccaccccttgttcccatcaagggaacatttggacatccttcgcatgaagattgaaatctgattatttcttcctctagcga

SEQ ID NO: 234628 - DNA, 211 bp, Glycine max
taattgtttcctctttctgtcattttctggattaatagcatttacctgaagaaacttgaagtggatattctatttcctcaaaattggagatttatcaaaagtaagtgatttcaactgatcatcttgtgtaacagtttaaattatactcgcctgtctgacattttgcttttttctgatttatgcaaaatattcatgaataaaccggtttact

SEQ ID NO: 234629 - DNA, 198 bp, Glycine max
tgcacttcccgcgggacctttgttccgcggttgttctatcggagccaaaaaatagatataggtcattattgccttgcaaaagtttggaatgaacatattatgaataaccactacgaattctatgcgattttacacctcggtttgaggagtataattcatttaatattttaaatgggttgactggaccacgaactggat

SEQ ID NO: 234630 - DNA, 374 bp, Glycine max
  unsure (1)..(374): unsure at all n locations
agcttcctttaggatagaggactattgattganagcacatcanaacccttctccatagatttaatccacgaccagagtacaaatactgcatcatccagtaatctactcccattaaacgggtggttttggaacactatcttatttctgtggttccaaattgaccaagncaaagccacccaccaacatttccatcttgtaaggttccttactccagctgccccgagtgtgtgctgcaggaaatggtctcttgcgttaattggcagtgttgttcttaaattatcccaagatagagactttcaccacagatgtagggtaccgctacacgtgaaaaatagatgctctgcctcctcatctttatgccacagaatgaacac

SEQ ID NO: 234631 - DNA, 452 bp, Glycine max
tctcaaggaggtgagcttagttattagatgggtgagtgtttctaagctctagcctgccaaggaagttttctcatatatacttctcaaggaagatttctcaagaatgcctctctaggaagctacctagtctataaataaaatcatgtgtaacacttgatgcaactttgatgaatgaaagtcttatgagatacacttcaaagttccacttctctccctcttttattgcttcaatttcgtgctcccaccttctctctttcttttcctccattaaagcatccttttcaagcttcttatccaatgcaattcttggtggagaagctccttcttccttggcttattccctagaggatggtgcctaccctcttctctattccttgtcctccgctgcatctcattgtgtaaaatcaccattgaagaacttattgaagctcataaatacaacttcatataag

SEQ ID NO: 234632 - DNA, 445 bp, Glycine max
agcttcccatggatatacatgatgtgttattattaacatcttcatctaggtaacattctttgggctcctctatctatttgttaggacaattaactgtaattccttggtcttcatcttcttctccatgtatctcctccattgtcttgtggtttggttctgtttaaagaagattcaaaaaaataatccaatgaaatcttaaatctacacttgctcttgcatttctatggttcaaattttatagatatactcttgaatcatgtttttgtgttcattttaagttctgtcatttttcattcataatcttcttgtgttaaacctttagatctcaatcttcttccacaatatatattagaaaaaaaaaacaccaaaatctaagtgtaaatcacttaatccatgttgtaagtttgtgttgaattctgattttgttgattgaattctacataca

SEQ ID NO: 234633 - DNA, 389 bp, Glycine max
gagaatggaatgatcctatcatgacctcatgatgtaaagaaaaatccaccacgctgttttatatgactagcattttgcttatagaataatatcgagattgcttcacacataccaagccttgtttcaagattcactaaagaccaagccttgccttataacaaagtgctttcagacatgcaacgctctggtaatcaattaccaggacgtgtaatctattaccacaagacaccgttgagatatacctcgtgataaacgttatgaatttgaaattcaccatgaatccattaccatatatctgtaatcattaccagcaacgaaactttggaaatcaaattcaaagtctaacccttaaatttaactgtgtatcgatacacaacattgaatctgta

SEQ ID NO: 234634 - DNA, 427 bp, Glycine max
agctagcttattggattgagcccgatttgatatttctgattagagagtgtgagagaagcattatcttaagatgcaagcttagaatgaatgaacatctattttctttttgctctctaatgggagactgacaggacaagaataaacaccttgcattttctatgccctctgtttcttcatcttcatcttcatcatcatcatcaccaatcccaaaatcaccttcctagataaatataattagaatgagtcagaaaccaattaattagttaataagcaataacaattaagaccaggttattctcatgatcctgtttgaaaaccccaaaaaagggtaatgaaaaccaaactaagcaaagactcacctcatcactttccccttcgtcatcgtcttcctcctcaccttctctgtctgcctcgccattctcgaaat

SEQ ID NO: 234635 - DNA, 411 bp, Glycine max
tcagtttttggatcacatgctactgcaatcactgacctcaatggcctgatgagcctacctgttaggttcagcactccttttgctcaactattagagatatttctttatatcattcacaaagagaaatccttgaaatttgtatctcatacgatttgctatgtgattgaaaatcttaattatcaactctcgctgagatttgaataaatatgtctccagcagcaatccacttatactactaaagggttatggatctggcgaaactgcttaagttgatttccttaatgcctcttaagtcttatcacatcagatttgaagtttttggatttgcaacatccattagtacaaaacggctgcagtttctagttaagcatatattggcctttcattcactcaatatctccctttctctta

SEQ ID NO: 234636 - DNA, 448 bp, Glycine max
  unsure (1)..(448): unsure at all n locations
agccttganctgttgagtagctgatgagatctatctttgatctgaaatttaatcatgtttaaaatacttgaattctattacaagttcggtatgtattatcaactctgtcaaatctattgggtcacaattttattgctatttaacatgtaggtcggaaaatgcgaagttgtatgcagaatgcatgatgcatggtttggtttgattccgtagcctatcttgtactctctccttcctagtcaaagtacaagttagctaatcctagttggagttagtacatgttatcaagcatccttctatctttgctggtttattttatttgtgaaacttatctttgttcttcttaatattgccaacgcgttgatagttaatttgccatttgttgtgtctactaataattttacaaactctgacttagtgtcaggctcaagactacttatgcaaggttatt

SEQ ID NO: 234637 - DNA, 433 bp, Glycine max
tggatattgacatttcaagaaggcgttgatggtgcagttgtataatataaaaaacgattgaatttgagctgttgaaggggcagtttttgcatataaggaagggagcataatgatgagagagagtgtggttgtagaaagacacaagattgtagaccaaattgttttgttttgtttggtgcatgacatgaaaagcatgcaattgatgtgaatgggggaagagatagatatagataggcaaacataaacatattatgctgtggtgagtgctgacatagtggcagctgaacaagtgcacagggccacaacaactcttacaatattacagctagtgatcttttctcagtccagaagggtagccatcacagcaggggacagtgatctcaatatctaactttgatttatgcttggattggatctcctctccgaactagct

SEQ ID NO: 234638 - DNA, 330 bp, Glycine max
actatttaacaccatggcaaagcgaacgcgaacacaccgacaacggcaacaagcgttattcaaaggcacgaaagaaacctgccaatcaaactcaaaactatacttgaagactatacttatccattcttctacacataaacaagaagccacgaaccccactatcattggctcccacgagtaaatgaaagaaaacaagggaaaggactccacagtaactaaggacacatcttaaaaaaatactcctagtcttcaaatcatgcaacgaaagacacatttgaacaggccatctaacgcagaattaaagagcctaaaaaaaactcttaacagagc

SEQ ID NO: 234639 - DNA, 282 bp, Glycine max
caactcgtgaagttaaaactaaccaccctcaaatgcccgtcccgtatatcatatatccaacgaatcacaagcgagaactgagcgatgcaaatgcacgcagaatatatcataagtatttacgatagcacacaacacacccatgcgtttttacattagatcgagctaatgagctgatctccaccattatatattgctactatattatattgacagttgacacataaatatatacatatatatagataaacatatacataaagagacatcgatatacatatatac

SEQ ID NO: 234640 - DNA, 446 bp, Glycine max
  unsure (1)..(446): unsure at all n locations
agcttanaacagaggctaactcaaggcttataagacaaggagccgataaattgttgagggaatacattacaaggttcaaaaaagaagtaaggatcaccattctttgtgtccatataaaaaatgcgactctccacttgtatttaccacaatttggagtcgactgacattaaggtagacgtggcctggatggtctctgagatttcacatgtcggacgataggtaccctctgttaggagaacacgaggggggacctacaaaacaaatgactatgatgcttgagtaaatacgtgaatgagttgatattggaatgaaaagggtgagataaaatctgacatttatagcatgagataggagcttcgtgtccttagttgtaggatttgtcacagtggtgtaacaaatcttatactagaagctagcaaattgaatgcgacagagaatcaaggctc

SEQ ID NO: 234641 - DNA, 452 bp, Glycine max
  unsure (1)..(452): unsure at all n locations
tcctcctaagctgnccaaaatcccaanaatgtcagtttcatttcattgaggtctggaaagcagcgtcaaggacctcaacccgtagcaccttcctcatctgcaaatgaacctgcccaacttgtctctaacccagaaaaaggtaatgacaaaaatttacctaacaatttctatgcagatgaatcttccactggcaattctgatttgcagaagcagcacatccctcctcttccattccctccaagagcggtttccaacaaaaaaatggaagatgcagagaaagagatcttggaaacatttagaaaagtagaggtaaacatacctctgctggatgcaataaagcanattccaagatatggtaaattcttgaaggagctgtgcactaataaacggaagcttaaaggaagtgaacaaattagcatgggcagaaatgtctccgcattgattggaaatct

SEQ ID NO: 234642 - DNA, 345 bp, Glycine max
gggagcagcgcacgtgacgatgtccaacgttgttgtggagagaaaccccaacgcagagatcttccactgcctgaattgcatcttggtgactcataactgttacaatgtcttccctggctggggcattgacggagtcatgggtccagtgcaggtgtcaggcaagaggccatggcagcatagagaatgaggagggagacgaacaatatagaaggcgatggtgatgacgacaccattggtgaacacacgaatgagagagagagagagagatatgtttgaatggacacaatatgttcttgttttgttggtagaagggtagattgagcatgagagtacggtgaggaaaat

SEQ ID NO: 234643 - DNA, 439 bp, Glycine max
agcttaatgcacctcataaaatcaaacattttatgtgaagagtcttgagaggttgcatttcaataagatcaaatctgagaatgaagaacgttcaatgtcctcttcactgtgtatattgtgaaacaaacatagaaaatgaatggcacttgtttattgcctgtgatcatgcgaagctcttttggcaataagagacaaatttataggaaagtattgaccgaaagatagatgtagttgaatccttacaatctcttatttttaaccttcttcatgaatctcacgtagacacttgagctcgaatagttgttgtcctatggagtatttggaaatcccaaaataacaagatttgggatgaagttgaaacaacaccaaccgtggcttactctttagccatgcagttcttatcccaatggaaacaagctcggaccacaacaacaacaac

SEQ ID NO: 234644 - DNA, 414 bp, Glycine max
  unsure (1)..(414): unsure at all n locations
tgtgactctnggcaatttctttaaaactagtcactttttanaagttgtgactcttttgaaaactagtcactttaaaagttatgacttttgaaaaactcttcaaaaacaagtcactttaagaattgtgactttcggtaatttatttttcgaaattagtcgctggtaatcgattaccatcataatgtaatcgattacacatcaacaaatgtgactcttcatgtttaaatttgaaaatcaaaacgtttagaaacactggtaatcgattacaagtattgtgtaatcgattacacaagtttgaaatgatttgaaaaagttntatcacaagttgtgactcttggaaattgaaatctaacattttaaaacattggtaatcgattacatgattatgggaatcgattacagctttgtaaatca

SEQ ID NO: 234645 - DNA, 434 bp, Glycine max
  unsure (1)..(434): unsure at all n locations
agcttctacttatgaggcatggcgagcttccttcactttcttggctcaaccgcgagctttgaccaccacccttccttcccgcgatgcttctctttacatctgcctgagtgggcttatagcctaaaccatacttcccacgatttcctttggcatttatcaggctagttatgccgccgttgtctttgcctaaacccattccgggttcgtaaccgttccccaacataactcgagctatcattactgctgcatcggacaggcaagcttgcccagagaaggagtccacggaggaaatgcttgccacctcaagagactggaaagcggtttctaatgactcctctgcggcttccacataaggcatagaggatgggcagctcaccaagatgtcttcctcgtctgatacgatgaccagatgccctnntcactacgaattcaac

SEQ ID NO: 234646 - DNA, 436 bp, Glycine max
  unsure (1)..(436): unsure at all n locations
tggacgaataaggtgatgcacttcggaatcacaactttttgcaggtatgaaaatgttcatgtttttttaattagggttgatgaattcatggattttaattattggatttgcttattcttttttgcgtattttaaatgtagggtggaatctgctcattggactttaaaaagactattacagaataaccttggagacctatgtagtgtttgggatgccatgaacaacatgattaagctacaacacactaaaattaaagcatcctttgaaacaagtacgcatgtggttggacatgtttttaaagttaccttatacaagaggctacttggcatggtttcaaggtatgctntaattggattgttactgagtatgagcatgtacattatgctggaaaaaatccttcttgttgtgggtgtgtgatgagaactactcacagtct

SEQ ID NO: 234647 - DNA, 441 bp, Glycine max
agctgggtagacggtgtatactattacttatcttaacatcgtgtggcctattccagtattcctattaatctaaaatgcaaattaaatgcatactaacatccgattatccttgcgacaaaatgacttattgctttgtggattgttagttgggttaagaaaatatttactattggtcagggagggagccagcatatatatgtagatatatttataggaggacagacgcattataaaaattagagtttattcaataaatatgcaaattttaattaaatgttacataacatattcattaatgttatgtgtgttttacaatgaataaaaaatatatttaccgtagaaggtaaattaaaaatatttgttttaaagatcgactcaagaatacaactccatgataataattattaggttcacatgccacccaacccctttatcaaatta

SEQ ID NO: 234648 - DNA, 440 bp, Glycine max
  unsure (1)..(440): unsure at all n locations
ctcaagcttttttgagnngctaatctctagcgtgtagcacttgttatgaggatgncatccacatacaagagaaggttgagaacacactctttcttccttttcaagatatatacacagctgtcatccctgtttctgatgaagccatacctgatcaagaactcatcaaacttcatataccacattggagggttttgctctagtccatacaaagattttttcaacaaacacaccttggtgtccccttcttcaaaaccttcaggctgattcatgtaaatggtttccttcagatttccatgaagaanagcaattttaacatctagctatttaaagtccaaatcatactgatttaccagaactagcatgattcttattgagcaatgcttcacaactggtgaaaaaatctcattggaatcaattccttcacccatgtaaagcctttg

SEQ ID NO: 234649 - DNA, 439 bp, Glycine max
agcttgcccctttcccctacaatagtgtcaaagtggtgccatggaggtaagccacacaaggcccgacggaaggaaggaaacgtctgtcgtgcatgttaaaggtgatctatcctccgctaggatcactaacatctttggcacgagcgtcatgactaatagcaggtggatcttcatagcacctgagccatcggggtgatccaaagacctaaagaggaaggcaaaggcgggcgtggaagagagcgataaggcgggccaaatttcatatgacgaggtcccggccggaaggtttgtcaaggaagaggacgacttcagcaaaaaaggaatatctgttgaagaagcaatcgagttcctgcgaatcatccaacagagcgagttcaaagtgattgaacaactaaataaaaccccagctaggatctctctgttgggattgcttatgaac

SEQ ID NO: 234650 - DNA, 263 bp, Glycine max
acagggctcaattctagaaggggtgattaaatccaactttcctattaaatcttttgattacccaatccagatctttaaagaattctaatatattcaaataactactgataacagagcatgtaataagattaagaaaaaaggaactcgttaacggtcgcaacttggctactcatccagcaccgtgaagttactacttgaaccttacagttgatcacagaacttttggtaatgttcacaaactatttaaataaaaaaaaaaattt

SEQ ID NO: 234651 - DNA, 301 bp, Glycine max
gcacctgaagcatgcaagcttacttggcttatgtttatcaatgtgaggagggatgtccggggaactaatggccctatatgacaatgaaacacttttaactcctcgaatccacttagcttgtcataaacattatcggtacccgaaaggtgatcggatactcgctgggtggatgttgaaaggacatacctatcatatgcacaaacaaaagaagaaaaatacttattctagagagagaaaaataaggagaaattgcatgaagtcaagtgttctcaatctatattggatgacataaattgcgtac

SEQ ID NO: 234652 - DNA, 392 bp, Glycine max
  unsure (1)..(392): unsure at all n locations
ntatggctggaagctctaatggaagaactaaacttgtgaaaatgtagtcttatgaggctgctgatggataacaaatcaacaattgatttagctaagcatcctatggcacatggcaggagtaaacatattgaaaccaagtttcatttcctgcatgatcaactgagtaaagagaagctcgaattggagctttgtacgtctaaagatcaagttgcagacatattaactaagccattgaagtctatcaagttcaaggaattgagagacaagttaagagtgacatccttgacaaatctgaattaaggagggatgttgatgtatgctgtaattcagatagttagttaagagctgggagataattagtttgtcagctatgaaagttgttatagctacat

SEQ ID NO: 234653 - DNA, 130 bp, Glycine max
actccgaaaggctctcctttcaccagtggggcacaattatggcccaagttcatactttggtggagcttaatgtgaatgaatagaataatcttcttgtaaaggatagaacagcttctgacttcttcctttg

SEQ ID NO: 234654 - DNA, 298 bp, Glycine max
  unsure (1)..(298): unsure at all n locations
accttaaatccagctcctcagggaatctttccaatacttcagtttggcccttaaccccattacttggtttctttaccttctcttccattggagttttttcatatttctccatgcatctcctcagatgtcttgttctaaatgctggtaacatgattctttagagtctccaccgattaaacttgctatagcaagcctagaatcgattttctatggttcaaattacttgaacttgttcttgaacccacgaaatgcggtagacatantgtcttgctatcttttgggcgctgacacctaaacc

SEQ ID NO: 234655 - DNA, 445 bp, Glycine max
  unsure (1)..(445): unsure at all n locations
agcttcccatggatctacatcatgtggtatcaagaacatcttcatctaggtaacattcttttggttcctctatctttttgtttggtcaattaactntaattccttgttcttcatcttcttctccatgtatctcctccattgtcttgtggtttggttttgtttaaagaagattcaaaaaaataatccaatgaaatcttagatctacacttgttcttgcatttctatggttcaaattttatagatatactcttgaatcatgtttttgtgttcattttaagttctgtcatttttcattcataatcttcttgtgttaaacctttagatctcaatcttcttccaaaatatagattagaaaaaaaaaacacaaaaatctaagtgtaaatcacttaatccatgttgtaagcttgtgttgaattntgattttgttgattgaattctagataca

SEQ ID NO: 234656 - DNA, 459 bp, Glycine max
  unsure (1)..(459): unsure at all n locations
ntgatggtgtcgagaagaaatcacatgtttgtcatcatcaaaaaatgggagaatgtgaatgtatctatacatgattntgatgatgtaaaagaagaatccaacaaggctgcttcaaatgataagcatttgcttcaagaataattcgagattgcttcaacaaacaaagccttgtttcaagattcactaaagaccaagccttgccttataacaaagtgctttcaagacatgcaaggctctggtaatcaattaccaggaagtgtaatcgattaccagaagacagggttgagaaatagctgttgaaaaaggttatgaatttgaattttcaacatgtaatcgattaccatatatctgtaatcgattaccagcaacgaaactttggaaattcatattcaaaagtcataacccttatgattataactgtgtaatcgattacacaaacattgtaatcggttaccagtg

SEQ ID NO: 234657 - DNA, 430 bp, Glycine max
agctgggcttgagaagcagaagagaacttttgtcgctaaaggagacatttcacactaagtgaaatttctcttctggctagaattgtgcttagcgagccaactcgctaagcgaattattccctctggatggaattgtgcttagcgagccggtttagctgagtgaattttttcttctgggtggaattgcgcttagtgagccggtgtcgctaagcgaattgttccaatgtatatcaatcaaaatcaacataacctaacatccacaccaaacagttgcacaaggataattcacacaacactacaactaatggtagaatgaaaactattattatgggtgaactctatcaacggcagaaaattctcccaaccccctttttattctaatacacatgctctacaaaggcgcttcaatgactaaatggtttgtttagtc

SEQ ID NO: 234658 - DNA, 468 bp, Glycine max
  unsure (1)..(468): unsure at all n locations
gaaactcaagcttntcaaggaagcnacctannctatgaatagaagcatgtgtaacactttgttgnaactctcgatgaataagagtcttgtcaacatacttcanagttccacttctctccctctttttttacttcaatttcgtgctccccccatctctctttctctacctctatcttttcctccattgaagcatccttccaagcttcttatccaaggctcatcttggtggagaagctccatcttccatggcttattccctagtggatgacgcctcctctcacctattctccttggcttttgctgcatctccatggcggaaaatcaccattaaaggacctcattgaagctcatagatccagcctccatagaagctccccaagcaagcttccatcaagtggtaatcagagcacaagagcttcaagtacgggctccttatcacctcattaatgttttgctgtaccttctctt

SEQ ID NO: 234659 - DNA, 425 bp, Glycine max
gcagcatgcacccacaccgagagggcgagggatattatgttttaccggcattctcaagtctgatcgtgcaatgataccattaactagtcaacatgttctagagcggagtgagggcatcaatactgtattttaaaagacccaaacaaagggaacaaaagtaaaactttcatatggaagaaaagttcgatattgtttgatcttccatactagtttgatctaaatataaaacattgtatttatgttatgcaggtcgagcaaaatgtgtgatagaatgtgtgatagtatcatcgacacacttcttaacattcaaggtaagacaaaggatgctttgaatacttgccaagatctagttgagatggatatacgagactagttacatccaacgtctgatggaaaaaaatatacttgctctagcttgtctaatt

SEQ ID NO: 234660 - DNA, 358 bp, Glycine max
cgaactgatcctctgcttggcgcatgaacaaacggtgcacattcactactcaaatatgggtgggctacacttttgaaacttatccttaaaaaagctatagctgcagcttcgccacataaggtgaatctctttttttatactaaaaatgggaaatcttaacctaatcttcaaattagtgtgcaaccaaccttaagatacgtgtctaataaacatcgaatttacatattatctatgcaccttaagacatttattgatacttaggccctatttcgatcaaacctcggatggttaagttttataattttagatagaatacgatataaagtttaattgaatcttgagacgaaataggcattac

SEQ ID NO: 234661 - DNA, 372 bp, Glycine max
  unsure (1)..(372): unsure at all n locations
agctngcttgaggagatatgtatggagttcgtattttgcacttcaatgaggtccttcaatggtaatatctcaccatgcataagcatgcggaaggcacctgaaaagaggatacggcgatgcccctccactagggaaaagtcccatggaataaagagacttcatcaccagacaattgccttgagataagacgtcttgcatgaggatgctttactcggtagaaaataacgagagaaggggggatcccgaaactgtatgaataaaagagggagagatgtctaactttgaagagatctgatctgacttatatttatcaaagttaccaccagtgctacacatgcttctatttaaagactaagtagcggccttgagaag

SEQ ID NO: 234662 - DNA, 301 bp, Glycine max
  unsure (1)..(301): unsure at all n locations
ggaaccancacccgacgaagacactgtccaagacttatcttcacctttatggacaaaggatgacaagcacggggcatgctaactatcttcccatcacaccttggatgcaactgtgatcggatccgcatatgagctagatctggacgggattaaagccatccttagtcttgccttgaggttaaggagtgacccactgacactgtcacaaacatttttctcgcatgcatgacatcaatacaattgctaacatctatatcacaccaatacggaagatcaaagaatacggacatcttgtttcata

SEQ ID NO: 234663 - DNA, 436 bp, Glycine max
agctttatgaagagatatgtgtgtattacaaaatcaacaatgaattcagtatgtactatattattatctaaaactacattgtcatgcacaactacactatcatgcataactacacttctactcaacctgtgaaatgtcttatctatctcaagatcatatgaatgcaagtcacctgatttggacctagtcatgaatagataaactcattagtgatagcacagacaactactataccaggacattattcacaataattgttgaaatgctatagaaaatggaaaactgtcctaaaatatttttacaaaattccaaaacacaacagtaaatgtctaaaaatgactttctatttttggtgatttttaaaaatcatgaaaatagaaaaaagattccaaaaatggtccacatcaatgtatttggcaaaaatgacccccgatgc

SEQ ID NO: 234664 - DNA, 375 bp, Glycine max
aacccaagctttggagaaaactgggaccactattgatttttaagtgtgtcgatctagcaaggctgaagaccatacagtttcctacgattctaattatggggccattagctatcatatgctgacataccgaaagcccatgattttcggggggagagggtctgccatcgccttggcttggtaacatcgggaagttcttgactcccgtcaagtagagcaaaccggccatcccatggtgcctttgggtaagagcatacccttctctacctcttttcgatatactgactactctcgcatctatgctcgggccatggtactctctggactggcgagatagctactgtggctcgctcctaacgtgaacagcttttgacctga

SEQ ID NO: 234665 - DNA, 428 bp, Glycine max
agcttgtagcagtatgtgctattattatggggagaagcgactatgaaaagggttcagccttcttggcacttctttctctctcgaaattgctgaagaaaattgttttcgtgaagaaaatccaagccgaggcgcttccgtaacgtttccgtgagtaattacacgaagattctcgaccgttcttcaagattcatcgttcgttcttcgttgtgttcagtcttcaacgggtaagtacctcaaactgagctcttcgatttattctatgtacccgtggtaggccacattttgtttcatagtatatttattctgcgttcatttgctttttataccctcttttgacgtgcttaagccatttatttaagtcatttctcgcttaatctaaaaatataatcatctcgcaccgataatttgaatggtatcatctcgtaatc

SEQ ID NO: 234666 - DNA, 396 bp, Glycine max
  unsure (1)..(396): unsure at all n locations
ctgaaacaactcggattttacacttttgtacgcttgaggtaatgatgataggtcattccaaaggttgagaagaatgcttggaatgtcttatgcacattcaatcttcttacgccatctcaagctcaaatctactatgcgattttcttactttttgttatagagttcctggacgtgaaggaaaaccaagtgtcaaattctttggccaagacaaatgcaagacctgtatttttactaatntgtgaaaaagcgactgaataattaaaaagataaaatttaatttaatttcaatgctaatatattaaccaacaatcttttgtcgattctgtgattatttctacaacgatttttatataaattcaactctgttggctattgatagtgtagaatacactgtgt

SEQ ID NO: 234667 - DNA, 444 bp, Glycine max
  unsure (1)..(444): unsure at all n locations
agctntgatgttagtgttgaatgcattataggtaaacagaccaaaagcaagaaattaagtgcatataaggctacaaacgtcttggaattgatacatacggacatttgtgggtcatttcatacactttcatggaatggtcaacaatattttatcattcatagacggttactccagatattcatacttgtttcttatacatgaaaagtcacaatctctggatgtgttcaaaacatttaaagttgaagttgaaaatcaactcaacaaaagaataaagtgtgtcagatctgatcgtgatggtgaatactatggcagataagacggttcaggtgaacaacctccggggccttttgccaggtacctagaggaatatggaatcgtcccacagtacatcatgccggggtcacctagcatgaatggtgtggttgaaagacgaaacataacact

SEQ ID NO: 234668 - DNA, 440 bp, Glycine max
  unsure (1)..(440): unsure at all n locations
ttaactgaaacactaagtaagtttccaactcaattgcttgctgaacaaccttcaccctcttctgttntgctggttgcaggttgtgttatatgtggtggagcacatgattcgggctgctgcattcccacagaagatacaacacataaagtgaactatatggggaaccagccaagaccaaactttaatgcaggtggatattctggattccaacatggccaacaatataatcagcaacagggacaatggagaactcaccctgttaatcagttcaataaagaccagggtggaccatctaatangctaccgcaacaaggagacttttgctcagtcatgcaagtatccatgtccaatcaaaaaagcacagagtcaaccatcaagaatctagaagtccaggtgggacaattggcaaacaattggcagaccgaccgtcaagcactttg

SEQ ID NO: 234669 - DNA, 220 bp, Glycine max
  unsure (1)..(220): unsure at all n locations
cttacgccatcccccccaaggcggtgtggctgatcacctaaaaccccccaccccaaagaagggcctttccncccccgccccaagccaccaccacgaacgccacgaaggaaaagccgaacacaaccacgaaaccaaaaaagagaatgcaacgacgctgcaaacgaacggagaaccccggaaaaccaagagaggccaacaaagaaaacagaaaagcacacag

SEQ ID NO: 234670 - DNA, 424 bp, Glycine max
  unsure (1)..(424): unsure at all n locations
agcttgctcagactttggaatgatggttatgatggcatgatttatttgctttagaatttttccagacctgaaaaattcattgatagctgcaaatacatcatccccaatgatattccaggcttttttgaaaaagagagcattaaagccatcaagcccaggggctntgttgctgtccatgactgatatcacctgccaaacgtcgtccttagagataggattaagtagagcatcgaaacagctaggcggaacttgagggcccacattgcagatagcaggaagagcctcctgctgtacatcttgaacactgaacaactccttgaaatgattcacaaatgcacgggcttattcaggatgggaggaagtgctctggccatcctccacatttatagctgcgataaaccggctgtgcctattacgattcatc

SEQ ID NO: 234671 - DNA, 437 bp, Glycine max
  unsure (1)..(437): unsure at all n locations
tagtaaagctaagcactaacaatctccctctttggtatattntgnctaaaacatacttagacatttcctgagcaggtacgagcagttatgcaagtgggatcagcaactttcattatcagagtaatcaagcacagcggtatctgtagtggcgacagcaaaattctgcaagttgcaagtcgtttccaagatgtcaagacatctcacgtgacatcagctntctgctccccctgtctccatgctcttactgcagcatcttctatcagctactagtagttacagtagcttacatcagtcatcatcagcagcagcagtctccccctcaaaatcatatacatacaactccccctcaacatcatgaatcatgcataatactactattgcatacatagtatcctactactcanaatcataaatcatgcataatacnntatactccc

SEQ ID NO: 234672 - DNA, 426 bp, Glycine max
  unsure (1)..(426): unsure at all n locations
cttgagcctattcaaacgacaatttctttttactcgaatgtctgattgagtcccataatatatcgagacggtcgaaatcgaatgtcgaatctctgagcaaatttaaacgacaatagctttttactcggacgtctgattgagtcccgcaacatatcgagacgctcgaaattgaatgttgaacctctgagacaattcaaacgacaataactttttacgcggatgtctgattgattcccgcaatatatcgagaccctccaaattgaatgtagaagctctgagtcaattcaaatgacaataactttttactcggatgtctgattgagtcccgtaatatatcgagacgctcgaaattgaatgttgaacctctgatccaattcaaacgacaataccgttntactcagatgtctgatagagtcccgcaatata

SEQ ID NO: 234673 - DNA, 395 bp, Glycine max
  unsure (1)..(395): unsure at all n locations
ttgagcanattcaaacgaatataactgtatattcggatgtgcgactgagtcccggtatatatcgagaggctccaaattgaaaacggaagctcatatcaaattcaaaggacaataactctttactcggatgtccaatagagtcccgtaatatatcgaaacactccagattgaaaatggaagctcgtatcaaattcaaacgacaataactttttactcagatctccaatagagtcccgtaatatatcacgacgctccatattgaaattggaagctcgtatcaaattcaaacgacatttacttttaacttggatgtccgattgagccccgtatatatcgcgacgctccacattgaaagcaaagctcttaacaattcaaacaacataaccttttattcg

SEQ ID NO: 234674 - DNA, 450 bp, Glycine max
  unsure (1)..(450): unsure at all n locations
agctnggcttagcgcgtgaagagatggcacttagcgcaaggtttgcgcttagcggataagcaatctgaaaatttttctaagtcatnttctgcttatctcttcacacataatttaaaaaccctttttgtttattactaaacaagctgaaataaatcacaatcacaagcaagatgtcctaactacatgcaagaaataaaaaatgaagatagagaagggaaagaaaagctgggttgcctcccaataagcgcttctttaacatcactagcttgacgcatcatcctgttatccaggatccagtaaagttcccacttcaaggaccttcttctcaggtcttctttcctccatcacatgaactttaaaacaaacattccggttaggtggctctttatcttaatgaaatagatcaaagctgattttctgatcttctatagcccattgcaacatcttttt

SEQ ID NO: 234675 - DNA, 442 bp, Glycine max
  unsure (1)..(442): unsure at all n locations
tctacttatgtggcanggcgggcttccttcaccttcttgtctccaacgcgaactttgaccattgttcttccttcccacgatgcttcttttcatgtccgcctgagtgggcttatagcctaaagcatacttcccacgatttccttgggtatttatcaggctagttatgccgccgttgttttttcctaaacccatcccgggttcataaccgttccccaacatagctcgggccatcattaccgctgcatcggacagacaaggctgcccaaagagggagtccacggaggaaatgctgaccacctcanaagactggaaagcagtttctaacgattcttctgcggcttccacataaggcatggaggatgggcagcttaccaagatatcttcctcgcctgacacgatgaccaagtgcccctccactacgaatntcagcttttggtggagt

SEQ ID NO: 234676 - DNA, 440 bp, Glycine max
  unsure (1)..(440): unsure at all n locations
agcttgaaagagcccgggtagtcaaatagatgttcaagtccatanccatcaaagtctgaagagagtatgatgaactaagggacgtcaatatggccaccgatgaagccatggaatgagaaaccaagaaggcccgaaaggaagaacacgaccaaaacaagttttgaggggctttatagggcagcaatagtgagctcaaacttcgaagaggtgaaaggaatcatcatgggtcaaaggcatgatctggaaggacgagctaaaggcttgccttaggtcgagaagaaatttgtcccaacagttaaagtgagactgaagggaatatgtgggccatcatcgatgagtgcaaagagaagctaaatctagcagcgactcacgagcaaaggctagaggatgagtacgccaagatatcatcagaaagggaagcaagggaaagggtaattgat

SEQ ID NO: 234677 - DNA, 466 bp, Glycine max
  unsure (1)..(466): unsure at all n locations
aaactcaagcttctgtgagacacacggggnataatgcagaggatgttttatggttttgtgagaaaatacattacccactgtctagattctttaaattatacttgctggatggtatagtgaagttactccctaaaaattggttcacccctatgagatttgtaatgtgggtggtgactgcagcctgttgagcttttttaaataaatacagtgaaagattcagatcacatacataacacatttgaatgcctggaaacaaagtactcaaacaaaacantttgcaaatattagactttcaatgttaaatcagacgtagcattataagacggttattatcaaataaccaaccgtctttgaatgtcanatcagaaggagcatttcaagatggttatcatcaaattaaccgtctttgaatgtcgaatcagacaaaacattcaaagaccgttattatcaaataatcgtctttgat

SEQ ID NO: 234678 - DNA, 456 bp, Glycine max
ccgcagcatgcaagcttcagctgataaatagatccatgttgctgaatggaagggctaatgtctgtatggtggtcatcacaggaacacaaaccacaaacccctgcaacaggtacagatttctgattcaaggccagctgggttaccaagttaaccaatgcatccagtgtgccttcaagcttcttagcttcagatgatgcagatgggtttgtatctacctcatgcactcctctaatgactatggcatcatttctggcgctaaactgctggaagttggaagccatcttctcaattaaatctctggcttcagcaggagtcatgtctccaagggctccaccactggcagcatctatcatacttctctccatattactgagtccttcataaaaatattggagaagaagctgctctgaaatctgatggtggcggcaactgccacataatttcttacatctctcc

SEQ ID NO: 234679 - DNA, 365 bp, Glycine max
gttgttcttttatcaagtccatgaaaaaatatctaagttcatttgcgttttgagaaagaccttcattgtttttcattctcacatggtctaaaagaaatccttctgttgcgttctgatcccaaaataagtttaaaaatactggttcatgattctctccaaaacatgttatgttcaagaacaaatttctatttaattcctaaaaaagagttataattttataactatactaacagaatatcaaagcacgcacaaattaatcaaaataaacttgcgtaactttttcaataaatttaaaacgataaataacggtatatagtattgaaatttaataccaagcgatatattaacaccaagacaagttcacg

SEQ ID NO: 234680 - DNA, 451 bp, Glycine max
  unsure (1)..(451): unsure at all n locations
agcctggtagagatagagaatctgccctcttatgtaatcgaggncactttgttcaacagtcatatgaaagatagatatatttacacatttattgacatggcctctgctacacgggagattgatgaaatgggcaacaaaattaagctgccttttaaagaaattatgctcctttgcatgcggctaatagtaaggtatgagcttgattctttggctgaaccactgatgtcgtagaaatctgaggatgttgtttttgaaatgaataactatattggtttacaaccttgcgtcttaatgtttaatggatctaatacaagggatgacactagactaagaattaacgttacacatccctaaggaaaggtgaatcgattgttaactggattgcagcaaattcatccataatctagttgaatatcaagcattattaccatggcagctcaatatgtacaca

SEQ ID NO: 234681 - DNA, 374 bp, Glycine max
aaacttagctacctccatttctatcgaccaccataaatcgttttaatgtctaatataaaattcttggctctaagctggatacttaaactatgacacccttctaccccgaaagacatacacattgtaattgttttctaaaatatgttcgcaactaaataaaaggatgtatcgacttttacaaaaatattctgcaatacaatagtattacatgtcagatatttgtaaacttaaagaaaatggctcaccatatagcataactccatgttaaacaaattttggcaccccaaagctttacaaccctattaaattaatatagagaaaattactcatcattgatacttaataaagaatagactaaatcccatgttcattgt

SEQ ID NO: 234682 - DNA, 350 bp, Glycine max
  unsure (1)..(350): unsure at all n locations
tgcataggaacacactataatctattaatagccctaagcttttctccgccaccagtactttggatatagagtcaatgagagncaactctacacattgcctctaactctgacctcttcttaaaaacaagtacttttattctgcttgctatcactttggcaagcctgtccacttctgctgaaacctaaaacaggaattttcagtctaggagctccatctccacacaataaattgcttagaatgaaaaactcataatcacacagggagaaggaactgatagaagctctcagaccttctctatcatttctgttgaaagaacacctccgtcagcgatttctgattctgagggctc

SEQ ID NO: 234683 - DNA, 360 bp, Glycine max
gcgaccggcaagtgtgctgcgtgtatctatggttaagcttttcatagtagcgctaggctagagaaggacaaatggaacttctaggtcatgctctgcatgggtaccggaatgaacatggcgtgtgcattagatagagacttaccatgcctattcgcctcagcagctcgctcataaaccctgtcagcaccctgacagaacggggggaataacactataaactgaaaagtggtttacgctaaagagagcacaatggccaattaattgaattccagcattgcgcatcgtcaaccacatacccgaccatagaatacgcatcttcatgagaaaacccatgttattaccctgtcagaacttgcacca

SEQ ID NO: 234684 - DNA, 436 bp, Glycine max
  unsure (1)..(436): unsure at all n locations
agcttggctcaacccttccacattgactacttcatcctcataaattttaataattttttatttttactgtccactattcacgaaataatgcacatgataaaaagttatcaatgtaacatttgtaactctatgtttgagatgctttattctccttgtattatacttaagaatgtatatcaaacgcttttttaaagtacaagaaaattagcattagtcatgactcaatttatatgtaatttattaaaaattctcactaaaattttcatgactcaagtattagtgacaaaaagaaaaatttgtcccttaatgctttagaattttgtggtatttctaatgtaagaactcaattattgagttcttaaattttttattagggagtcctttgtttaagaacgagtactcattaattntactctaattaataggaaaacttaat

SEQ ID NO: 234685 - DNA, 456 bp, Glycine max
  unsure (1)..(456): unsure at all n locations
gacctatgaaactcagcttaataattatagatatcagaatcaattataaatcttgtgggataaactacaggtctattgagcctggttgtaatgcattttttaaataaaaatataccttaagaactatgaaagcattgttttgaccctttaagcctcaccttaaagatcacatttgaccctattattccaacatcaagaccttgttgattttattctagcatcaatgtctggtaaatattagcacagggaagatagtttcttaagatgagatttttccaaccaagacaactctgaagtaatttgccaaacacaacatccattatgagaaacaaataagagatatggaaatcagtcaacaaaatgatagacatttcatcatgactatcanaacaattgagaaaacataggtttagaagcaagatatanagagttggttgatgagatgttgaaagatgc

SEQ ID NO: 234686 - DNA, 371 bp, Glycine max
tcagcaacagcaacgacgggtgaggggccttgcttgttccacttccttatttcctcatcacggccacttctcagtggtctctttatttccctcacgacatactaaccctttcttttattatcccactttaacacttccaccaccagcttccattccattagcgctagaagctcatcaacaaactcgttttcataacataaaaaatgattctgattctaaccccgttgaagcacatgcagtgcaccagaagaaggatcaagtggtactagccgaacccaaaactggtgggggttcgataggacttgtaaagaagcaagctctgaatgcttacattaatgggccgcggtctgctgagagttggagacagaaga

SEQ ID NO: 234687 - DNA, 384 bp, Glycine max
gacactctacgaaactcaagcttatccttaaggcttgcctccggactgcactctccgtgccaccccgtatgatttaagccaagcctctactatcgaggagcaactcccaccttatgacgactatctctagcaagacgatgacgaaggagatacccatcttgggcccctgctccacctcaaagaaccgaccccccatgaactaccccaaccgaacatagtccgccatattccagcttcacccacacccggaaaagaatctgttccctacgcgggagataacggaaagattgagacgcttgaagagaggttgagggcagtccaaggccttatcaattacccatcctcggatttgcgggattatagcctcggcccaacatcgacatt

SEQ ID NO: 234688 - DNA, 359 bp, Glycine max
agctagagaataagtgaggccttgtttatggaggctgcaagttttctgcttttcaaatgtaattttcacaataaaatatgtttgacaaaaatagagtttaaatggtttaacttaattttgacacagttttaccattattttcaaaatcaggacaaaagattttgtgaatttggtttttagttttaaaaaacacaccactatcctttcattatccaccgcactcccactgtttcatcgcagcaccacactgctggtggcaacaccattctgtcattgtctgcaccaccattattaccgttactacaagctcactatcgccttactactatcatccctcccactgccacttctacagctct

SEQ ID NO: 234689 - DNA, 435 bp, Glycine max
agcttctatataagctgaaccattttatcaataaacacaagttgagttttattcagaaaattagagctgatctcttttatcttagtgagagtgattctcctaaattcttgagtgattcaagaacaccctctggctgtatcaaaggactttcacaacctttgtgtgttgccctcgctggaaagagagattctttccttccttccatcttcaacctggtttttttcaaaccacaattccagaaaatccacttctgcccagaattatctcgtggccataacccctgttttacacactcaaattaagtgattcttgagcctaaattgaatttcaagacgagacctttcaccttgttgtggaatcacctcattcggagccctgtagcttgagttattgtcatttctatatttctgtccagccaccacttaacctacgttt

SEQ ID NO: 234690 - DNA, 339 bp, Glycine max
tctatttaagctgaaccattttatcaataaagacatgttgttgtttattcagaacattagagtttatctcttttatcttagggagagtgattctcctaaattcttgagtgattcaagaacaccctggctgtatcaaaggactttcacaacctttgtgtggtgccctcgctggaaagagtgaatctttccttcctttcatcttcacccttggtctttcaaaccacaatttcataaaatccacctctgcccagaattatctcgtggcccatactccgcgtttacgcactcaaataagtgattcttgaccctaataaattccaaaccaaactttccctcgtt

SEQ ID NO: 234691 - DNA, 445 bp, Glycine max
  unsure (1)..(445): unsure at all n locations
agcttggatttccttttagtagggaatctatccttcctaagatggagccaaacccagtcccccctcattaagaactaactcctttcttcctctattgcctttaggtgaatagacctttgtttggttctctatttggttcttaaccctctcatgcaacttctttacaaactctgacctaaattccccttctttatgtataagtgaagtgtcaagtgggaggggaataaggtctaagggtgtcaggggattgaacccatagacaatctcaaaaggggattgcttggtggttctatgaacccccctgttgtaggaaaattctacttgaggaagatactcatcccaagatttatggttgcctttcataagagcccttanaagggtggataaagacctattcactacctctgtttgcctatcagtttgtggatgacatgtggtaaataaa

SEQ ID NO: 234692 - DNA, 445 bp, Glycine max
  unsure (1)..(445): unsure at all n locations
tccatcaacacattngcatgtaggaggaatagtgaattgngaagatgacatttcaggacctcgcattcttgctctctctctctcccacgtaagtttctcctctctctctttattttattttatcaaaatggttgggattaggtggaaaatcccattttcgtaggcccacatgtgtttttctaatgggagttgataatggtccctactaaaattgctattggtccttacaaaactttaaaatttgaggaaaaggccaatttaccctctattcagacactccacccctccttcccccttcttcttactattgcttatgttcttctcaaccccatgttaaatatacaatggaaatacaattctattgtaaacttcgttaaaaaaaataatacacaacgcaaacatgattttgttgtggtcttttgtgagacacacaacataattgtat

SEQ ID NO: 234693 - DNA, 430 bp, Glycine max
agctaggtagaggataattcatctcctctcttatgttattgaggtcacttgttcaacagtcatatgaaagatagatatatttagacatttattgaattggtctttgctacaagggagattgatgaaatgggcaacaaaattaagtgccttttaaagaatttatgttcctttgcatgcggttaaaagtaaggtatgagctgattttttggctgaacattgatgtgtagaaattgaggatgttgtttttgaaatgaataactatattggtttacaaccttgtgttttaatgtttaatggatctaatacaagggatgacactagagtaggaattaacgttacagatccctaaggaaaggtgtatcgattggtaactggattgcacaaattcaacaataatcaagttaatatgaacattaattccatgggactc

SEQ ID NO: 234694 - DNA, 455 bp, Glycine max
  unsure (1)..(455): unsure at all n locations
taacaaacctaagggnntttgatactcttgacacactatacagacatgcataaactagtctacctccatttcatatcgagccaccaaaatatctttttaatgtctaaataaatatttttggctctaagttggatacttaaactatgacacccttctaccccgaaagacatacacttgtaatgttttctaaatatgttcgcaactaaataaaaggatgtatcgacttttaaaaaaatattttgcaataaaatagtattacatgtcaaatatttgtaaacttaaagaaaatggctcaacaaatagcataattccatgttaaacaaattntggcaccccacaagctatacaaaccatattaaataaaatatagagaanaattactcatcaattgaatacttagataaatgaataaaactaatatcccaatgttacatctgttcagaaaatccataatc

SEQ ID NO: 234695 - DNA, 449 bp, Glycine max
agctttctaacaaaaatattcatgcatgtggaccttcttctagtaattatgacttacagcagcctcatatccctcttgcattcccacctagagcaattccaaacaaaaagatggaagaagtggaaaaagagatcttggagaccttcacgaaagtagaggtgaacatacctctgctaaatgccatcaagcagatttcaagatatgccaagtttctaaaggagttgtgcaccctcaaaagaaagctcaagggaaatgaaaggattagcatgggcagaaatgtgtcagcattgataggtaaatatgttcctcacattcctgagaaatgtaaagacccaggtactttctgtataccttgcattattgggaacaatgaaattgagaatgccatgctagatctaggagcatcaagtagtttcatgcctctgtccattttcaattctttatctctt

SEQ ID NO: 234696 - DNA, 392 bp, Glycine max
  unsure (1)..(392): unsure at all n locations
tgccttggtaacctgggacctatctggtcatgaatcataaattggcacctggtgccagactctgtggtttatgctcctctgcacancaccacacagacctttgcccttctatgcaataatctgatgcaattgaacagcctgaagcttatgctacaaacaactacaatagacctcctcaacctcagcagcaaaatcagccacaacagaacaattatgacctctccagcaataggtacaatcccgggaggaggaatcatcccaaccttagatggtcgaatccttcacaacaacaacaacagccttattttcagaatgctgctggcccaagcagaccatacattcctccaccaatccagcaacaacaacagcaacagccccaaaaatagcaaaca

SEQ ID NO: 234697 - DNA, 406 bp, Glycine max
  unsure (1)..(406): unsure at all n locations
agcttcaaaatagagagctttaaagtttagttgttgtttgacagttttcatcttttaacttaagagatggcctgagagagagcatggggagagaggctagagctttctcttttaaggagaagaggagctaaaaaaagttgatccaaataaccatacatacacataattattaaaacttagagcatgttgttgtttaatgtgattaagtgcttttaataggcgcatctcagtatattcatatgggtagaaattttatctgtcctgcatagtcctcttcataaagaaaaggagagtcaaggaagaagcaacaagagaaatactggagtttaattttgtcttttgattattccatgttttgtgtagtcttttctaatttttatattattatgntggctaatcttgatac

SEQ ID NO: 234698 - DNA, 444 bp, Glycine max
agcttaaacaaaatatgtacgaattttcttgtgacagggcagccctgcgcaaccacaggatttggggagaaacatttctatgtggatgttgcttgagagagtgagatttaccttagatggtattgaatgtaacaaaattggtgtcagctatgaagcttttaatcaacaaccaaacttttgcgcttctcccttttggacctgcttgcataatcaattgtggaattttcgggaggttggtacttcaacaataattttttcttctttaattcttattctcatcttgcttttttggtttcatttttgtcattttctattcacttctatttttgcaaaatggatttggagaaaaaattcattgataatcattgaaaatttgaaagaaactttcttgtccttaacaggctgacctgaatcgaataagtaggaatcaagtgccactctatg

SEQ ID NO: 234699 - DNA, 451 bp, Glycine max
  unsure (1)..(451): unsure at all n locations
cgtacacatccagccaccatgttgatgaaacttatgatagtgctacttcaagtccaagtgttggaccatatggatacccatccattgatagcacttattccacacgttttcagaaaaagggcatgtgaacatgaggtgagtcagtgcttcttcctccccatggcagaacccatttggtctataaataccatcccattttactcaagctactatcctttcaaccattgcgctccccacgaaaaattcatttgcatcctattaatccttcttaccattgacactggaatttaaaaaaaaaaagaaataaaaaaggaagagaagagaggacaaagtttatcanagtgatcatacctccaaaggatagtgttttctggcaccaacaactcaatntatttnntgaattcaacacaaccgaataagctttcctatctaggattntccccaataagca

SEQ ID NO: 234700 - DNA, 441 bp, Glycine max
  unsure (1)..(441): unsure at all n locations
agctntggagaaccaagccaatcagattgctagacgaaatatagatgggaatagaggtaacaatggcggtaatgacagaccgaggcataaccgggttgagggagtaaagctcaatgttcctcccttcaaaggtagaagtgatccagatgcctacctggactgggaaatgaagactgagcacttatttgcctgcaatgactacactgatgcgcagaaagtcaagctagcagcagctgaattctccgactatgccgttgtttggtggcataaataccaaagagaaatgttgagagaggaacggcgagaggtagatacatggactgagatgaaaagggtgatgagaaaaaggtatgtgcccactagctataacagaaccatgcgacagaaactccaagggctgtcccaagggaatttaaccgtggaagaatattantaagagat

SEQ ID NO: 234701 - DNA, 400 bp, Glycine max
  unsure (1)..(400): unsure at all n locations
tcttcattaaacctcagggatcggttgatgaggagatgaccaanagcaagggcaaggatccacttgaaggacttggaggacctatgacaagggctagagcaaggaaagccaaggaagctcttcaacaagtgctgtccatactatttgaatacaagcccaagtttcaaggagaaaagtccaaggttgtgagttgaatcatggcccaaatggaggaggactaaatgacaccaccttgtctcaattntagagtgtttagtttgtctaaataatggcccaatccttgtaaagttggctgaccaaaaatatgttttgggttaatcaactaaaagggctttagttaggtttagttcaagttgtaataagggcccaattggcaacctaggcatcagcatnttgggag

SEQ ID NO: 234702 - DNA, 440 bp, Glycine max
agcttctaaaagcatttgtatgttcaatattgttctaaagaaaacaaagtgatctgataattaaggaaaacatacctcaggctggtcagtaccagtacccaattgtccaaactgattgccaccaaatgcataaatttgaccatttacagtaacacacaatgtatgccaaagtccagcagcaattttttccactctagttcccaataaagaagaaactagagttggtctcagctgatccacattattcccttgtccgcactagatgaaattcacatgcaaagtaaagaaatttcagatagggcacttaatgctttataaaaaaaaattaagaaataggccacttaaatgctatacaagagtactaaataattataatatgaatttatccctctgggtgaattttattgactgaaagtttattacattaaaacccaaatgga

SEQ ID NO: 234703 - DNA, 404 bp, Glycine max
  unsure (1)..(404): unsure at all n locations
ggattcanatntaattgccacttgtgtagtacgtacgtattntatgttcatattatgctacttttgcattaattgtcatttaaattttgttattttattaataggcatgatcagagaagatccatcaataaaagtttctttgattcaagagaagattaacagtgaatttgcctacaaggtgtcgttcaaaaaagcttggttggcgaagcaaaaagccactgcacttgaatatggcgattaggaagagtcatatgtgaaactttcgtcgtggctaacacacatgcaaaatcattctcctggatcatattttcaaatactacatgaagattttattgttgggaatacggttagtcgcgaacaccgtcagtttcatagagtgttntggacttttggtcaatgtaaag

SEQ ID NO: 234704 - DNA, 451 bp, Glycine max
  unsure (1)..(451): unsure at all n locations
agcttattgagccttaaaatntttgaactttgatgaagccgcatctagagagcaaaggaggctacaactattggagttggaagaaatgagattgactgcatatgaatcttcaaggctgtataaagagagggttaaaacttaccatgataaaaaactactaaagaagaattttcaaccaagacaacacgtgctactattcaattcaaagctgaaattgttccctgggaagctcaaatctaaatggtccggaccatttaccatcaacaaagtcagaccatatggagcagtagagctttgtgatccttaatccaaggatccagacagaacatgggtagtgaatggacaaaggttaaagttgtaccatggtggaactattgaaagattaaccactgttntatccttccaagaataacaaagaactatgcgtcaagctattgacgttaaacgagcg

SEQ ID NO: 234705 - DNA, 332 bp, Glycine max
  unsure (1)..(332): unsure at all n locations
tcaacatcagaccacttgcaggggtgctggtactactttacatggacttgatggggcctatgcaagttgaaagccttggaggaaagaggtatgcctatgttgttgtggatgatttctccagatttacctgggtcaactttatcagagaanaatcagacacctttgaaatattcaaagagttgagtctaagacttcaaagagaaaaagactgtgtcatcaagagaatcatgagtgaccatggcagagagtttgaaaacagcaggtttactgaattctgcacatctgaaggcatcactcatgagttctctgcaggcattacaccacaacagaat

SEQ ID NO: 234706 - DNA, 444 bp, Glycine max
  unsure (1)..(444): unsure at all n locations
agcttaaagcaagttcttttgttaaatgtgtaagatattgacatttaaaggaggaacttaaattttttcacctaagggattaggaattagagaatatcatttttcaacaatgaccgctattaacattgaatctcaagttaggtatcatgctttagtataagaagagtttggttcgatgaaatttaaccctaacaatcttcgtcatttgaattttgtatcattttattgtgtgtttttataaaaccccaaaaacattttaagttgtaactttgctttaatttatctttgttgctgaatgttatgttcaaatactcattgttcatttgttagtttattagtagtaaaaacttgtcaattttgccaagtattagacaagtcctcgtgggaacaatatccttacttattgaatacctcttgaggattngatatatttgtcaataagtc

SEQ ID NO: 234707 - DNA, 431 bp, Glycine max
  unsure (1)..(431): unsure at all n locations
tagaacatcacaagacacatgttcaatatgacaaggtcacatataagaaattnttttataaaacatatgacgggacatgactatcatataatatataatatcaatattgaattaacaaaagacaaatccaaaaccaaaagagagaatcactactacaaaaaacagatttaacatcggcatattaacatcgatttttgacaaaactgatgttaacaaaaacgtggtggcattgttgtaaataaaataagtttattaacatcggtttttaaaaaatcgatgttaacatgcactcgttaacatcggtttttttttctttcaaaaaaccgatgttaggtgacttaatttaaaaaccaaaactggactgcccatgcactctcgcacaccctacttcgaatcttgcactctcgcaacaccatactgaccaccgtcgc

SEQ ID NO: 234708 - DNA, 372 bp, Glycine max
  unsure (1)..(372): unsure at all n locations
agcttatataatttatattaagagatctttgacaattgaagaatcgattcatgtttcctatgatgagtctaatgatatttctccaagaaaggatattttagatgatactgcagaatctttagaaccaatgcacagtcatggacaagattctaaaggaaaaggagaaggaagcaatgaagatcctctagtagaagtcaaagcaaataatgatcttccaagagagtggaaagcttcaagagatcattcccttgacaacatcttgtggacatcttaaaaggggtaacaactagacattctctcaaagatttatgcaataacatggcttttgtatctatgatngaaactaaaaatttaaatgaagccataatagat

SEQ ID NO: 234709 - DNA, 393 bp, Glycine max
  unsure (1)..(393): unsure at all n locations
gacctataaaactcagctttacatagaactggctgcctttactgccatatttatccatatcaaatgttggttaaaggacaccaatagtgctgctaagcttctcataatactgccaaatatgcatctangtgaaagataccctctttgcccttcttataagacttttcaagttgttttgattaatattttttacccaaaacctttattactttacataaatgttatgcactaaaaagataaatgcatgatctctcttataagatagataaaaactatcacattattggcggaaagtattaaggaaaaagaagctgagtccataatttaaggagtttggtaaataaacaaatgtaacaattaagctctactatttactactttttaagtgataat

SEQ ID NO: 234710 - DNA, 280 bp, Glycine max
atgcaaagctatttaatccctattaattcactgaatgcttgtatatcatgctttacctttgtaacatatcatataaatattctcttttactaagccaactccgaatcaaataaaaattcccatgcaacagaaaaagggggtcttttaaatatgacttggtcaatatatataaaatcttataacattaccgtccctaaagaaaaccgaatcttttgtatcatattcatatatcgatattcaaaaggctaaagctagctttaatatttatatatatacatta

SEQ ID NO: 234711 - DNA, 449 bp, Glycine max
  unsure (1)..(449): unsure at all n locations
agcttggacatgctaccttgagactaatctctatagctcagaagcttgacctcataaaaggattaccaaggctatcatacaaagatgatttattttttgaagtatgtcagaaagggaaacaagttagtaactatttttctagcaagaacattgtctccacctcaagacctcttaaactattacatcttgatttgtttgacccaaccagaacaacctctgctagtggaaaaaggtatggtctaatagtagtggacgattactcaagatggacataggtaatgttgttcccttactcaatatgaacatgattattaagtagcacaagtgaaataagctagcaagcaagacanatatcaaggaaggttcatcaagtccattcctcacagtcactgtttctctcataagcacaagtgtttaaggcaattcttcaatttaacaaccaacacaag

SEQ ID NO: 234712 - DNA, 458 bp, Glycine max
  unsure (1)..(458): unsure at all n locations
actcagcttcacaactcagnattctttgtcctatcaagccattgttggctctaaacaaaccaaaagatttgtggtttgtttgcacactaactaactcttaattgtcttaaatatgattatgaaatctaagcacctagccttttctctcaaggcgttcaaggtgttctgagagctttttcaaactttacaagaatgtacagagaacttactttttacaaaagaatttgaatgtcagcgaataggttcgtaacccatatcttcaatgcttcaggtatttataggcttcttcttcaagtgtttgtgctctctaaacaaatataattcttctcttgagctttcgtctgatgtttatgatcgttggagcattaaatgcacgtacttcttcatgctaganaaccactatggttggctttcatgttgaacactatagtagaaaaccacttcctttgagtaaaagt

SEQ ID NO: 234713 - DNA, 447 bp, Glycine max
  unsure (1)..(447): unsure at all n locations
agctntgtattctagataagaatacttcctttattgttgattaatattcttaattcactcttcaaataacaatattgactaagaggagtggtataattttctttcttatgtgcgaattttcttacaaattttggtttccaagtaatacggacatcaataatcaatttcctgccatttgcagcaaattgctttgtagaaaagtcgaagtttaagaaattttcagtagattttcacacgaaaatatcctcaagcaattttctttgtagaaattttatttcaaaaattctcaactagctaggtttcctgcaggtttcaaatcctcaaatagttctgcatgtaattttcaggtgaatctaaaatccacaagtaattctccagcagattataaatcccatataattntcctatagaatttaaattcgcaagtaattttcttgtgaattaaaa

SEQ ID NO: 234714 - DNA, 456 bp, Glycine max
  unsure (1)..(456): unsure at all n locations
aactaagctttagttaagnctttcagatgagaaaaaaaaaacgatatagtatgtttatcgngttaatactcgcagctnttaagtgggaaagcggtagttaagaatccttttttcttctttcaaacaaataaaaggcttaaaaataataataaaaatattaataacatccttggtgttaatactaataaaaaagtcattaattgtaaactagtaataacatttaataaaataaaattttcacaactcanactggatttgattgaagtttgtcccctaaatttgagattaattcgattctatcattaattttttattcaatttaacattctaatttttatgtttctataatctgactccaaatttgatcttntatttagccagtgaaatgatgaaattttttatatgtgaatcgcaatttatcatttaaaaaatctcctcggccatctctaataatcg

SEQ ID NO: 234715 - DNA, 453 bp, Glycine max
  unsure (1)..(453): unsure at all n locations
agctngngttatcttatgatgctgcatcaaataagaaaataacgtttaataatatataataatttattatccaaagatacaggtttggacttcaacaaccctagttcctatacatatacaatagctaccatcctatctagtgttggactgcagttacttcatggctcacaagtcaatcaactgcatgagatagctagctccgcaaaactgcaaagtcaacatttttaacaaaatgttaatcaaataattctcactaggtaaaccactgtactggtaaatagatcaaatagatagatatcacataccttaagatcatcattttcacttaaattaaagtaagactatgtaatagccaaattgaaaacgcaagagatttgatggtcttgggtgatccatggcgaaaaaaattaatcgtgaaaattaaatgcataccaatgaaactcttaagtcaat

SEQ ID NO: 234716 - DNA, 395 bp, Glycine max
tttgtacaagccaacaaacaactacactactgaaattaaatgctgaaatttaaagaatggaaacataaaagctgaaatttaaatgacataatcataaaataactaataataactaaagtgttcagaatgcaaaataaaataaaaattaaacgtcctgctccttctgtggctggtcttcattaagatccagtgctgctggctgagtctcctcaagagcaggtgcagaggatggagatggctgtggggtctgatctagagtggtctcttcctctgctgctgctgctgctggtggctcctcaatcacaagctcctgggctatagaggccccaccccctccagggaagagggctggtctcttggccagccacctgagcataaactcttcatgctataat

SEQ ID NO: 234717 - DNA, 443 bp, Glycine max
  unsure (1)..(443): unsure at all n locations
agcttgaagattatcatgatgaagttgttgattcactagagaatcatttgagtcanaatgaacaaagtgttgtaatgctaacagtttagttggacaaaagaaacttgcacaaatttagtgaaccttagctttgctaagttagtaagtttccattgtattcgagcttactatgtaaacactctttgagtgattaaaatatgtactctatcaaacatctattgtttgtgaaagttaggagtagcttcgtgacaaaaaatacttgggtcttaatcttagggagggattaagggtagggtcagaagtggcctaaagggtacttgttgtagccagaaatggcataaagaatacttggttgtaatcaaagttttgattagtggaacctcttcaagtttgaaggagaattagacgtaaccaaagagttagggtgaaacaatataaaacct

SEQ ID NO: 234718 - DNA, 447 bp, Glycine max
  unsure (1)..(447): unsure at all n locations
tccacataaacctgattcaggagtataataagctaatttaaatcttaattcacaaagtataacaaagtttacacgtacatatggtcaaattgatatttagagaataattgcatactccaaaatgcatataagcattaagaacaataggttgcatgcatcatagaaattccagattgtaatacgtagtgcacgtggcttgagttttatcacaactttaagatcatggaaagtctttggaagagaaaaaattgaaaagttgatcttctgaactgcttgttcagtgttatcagtgcaaatcatgcttctttgctgcattaatattattacctaacatttaacaaccatcaatctaaatgtttaaccaaaagtcagcataccttgagtgacaaagtgtaatgagntaaatgtagataatgaaattaatctgacatgtgtaaatgaaataat

SEQ ID NO: 234719 - DNA, 429 bp, Glycine max
  unsure (1)..(429): unsure at all n locations
aagcttctccgcaagttctattatatggggagaagtgaagtgaaaaagggttcagccccttaggcacttctctctctttcgaatntgcttggaaaaattgtgtccgtgaagaaaatccaagccgaggcgcttccgaaacgtttccgtaacgtttccgtgaggaatttcgcgaaggtttcgaccgctcttcgacgttcttcatcgttcttcgatcttcaacgggtaagtaccttgaaccaagcttttcgattcattctatgtacccgtggtgggacacattgtgtttcgtgtatttttattctcgtttcatttactttatataccccccttttgacgtgcttaagccattttatttaagtcatttctcgcttaacctaaaaataaaataaatttccaccggtcgtttgaattgtattatccgttaacttc

SEQ ID NO: 234720 - DNA, 388 bp, Glycine max
  unsure (1)..(388): unsure at all n locations
acgcaaattctgaagtgttgattntcaccctctcgctaagccaatctgttggcttatcgagccatccgctgagcgcaacaatccttggctaaccgcgaggaagaatctggaataaggatgagctgtgcttgttcactgagcgaaggtccatcccgctaagcgcactgcttcagtccctccactaagcgagtaaagccacgctaagccgaaattcactaatgcatgctaagcggttcaaaagtgcgctaagcgtacgagcacgaacaaagccacctatttaagcctgaaattagattttgaagaggagtntgggccattttttgaaagagcttctgcatgtgagagaatctagagagagaaagggccaagttcgacagagtctgagaga

SEQ ID NO: 234721 - DNA, 450 bp, Glycine max
agccttgatgatatggtcttcaccgactaaaggatctaagtgggtctaaaaagaggcaaatctgatcatcatgctttgataaatgccaaaaaaaactagggcaaatgaagagggtgagaatgagggagaagcctatgctgtgactgccattcctatatggccaagtttcccaccaacctgacaatgtcattactcagccagtaacaacccatctccttacccaccacacagttatccacaaaggccatccctaaatcacactacaaaacccacctaccacacgaccaatgctaaaacaccacttttagcatgaaccgaagcaccaaccaagaaatgaaatttgcagtgagaaagcctgtagaattcaccccaattccagtgtcctaggctgacttgctcccatatctacttgataattcaatggtagccataaccctagccaaggttcat

SEQ ID NO: 234722 - DNA, 397 bp, Glycine max
  unsure (1)..(397): unsure at all n locations
tgctaacccatggaagctcctaatatctttcacactttttggggngggccattcttggatggccttgattttctcaaggtccacttggaccccatttctaccaactaccaaccctaagaaaactatattatctacacaaaaggtacacttctctatatttgcatagagggtgtttttcctaaggattgaaagaacttgcctaagatatcctaagtgatcatctaggcttctactgtataactacaaatctacctatgaaatcccttaagacatgatgcataagcctcataaaggtgtttggtgcattagtgagcccaaaaggcattactagccattcatacaaaccaaacttggtcttgaaagtagttttccactcatcacactttttcattctgat

SEQ ID NO: 234723 - DNA, 445 bp, Glycine max
  unsure (1)..(445): unsure at all n locations
ttaagtcacctgcggcagcaagctagagagtgattattcataatttctgaagcaacccttaaagntgaaataagctgaaagaatgccttcgcttccaatgaatttccattggcagcatcagtatctgctctagctaacttgggcctccactcatcagcaattgctttggcttgctgcttggtttgagggttcagaaagtgatctgcacctgaatcagcccttgccaataaggtggccatggcttccaaaattataatacaggatttgcgcatgccctgtagggcagcaccagatttatcttttagttgggaacgttcactggtggggtaaaacccctccagtaaaatcagcaccaaacgtgctggattaattgcactttgtaatgctacagaaacttcttcacaattaacagacagttttgtcttattctccataatataattca

SEQ ID NO: 234724 - DNA, 399 bp, Glycine max
  unsure (1)..(399): unsure at all n locations
tattgangggcttccaaaaaagaaacaattgaagattgatgctgttgccaaggatgtcagtttggcaaggcttataatctaccatttaaaagttccaattatcaaagaaccattcctttcaatcttatacacacagatctaatggggccgacaaaaacaactagttacagtggatgtaaatatgctatggtgctaatggatgattacactcaatatacttgcgtgtatctcctaaaggagaaaagtgaagttgtacaggagtttgttattttctctgacatggtggagaagaagttcgatgcacaaatcaaatgcttgacgagtgacgctggaggtgagttcaactcaacagatctcacaatcttttttgccttgaaaaaggattcagaggccatttac

SEQ ID NO: 234725 - DNA, 427 bp, Glycine max
  unsure (1)..(427): unsure at all n locations
agctngatgcttctacttgtgatgaaaatattaataacacaaaagagaagatgtacaagctctttgatgaatatgtgagtgtaaagtcaagttcatctactgcatcaagttctcaacaacctactgttgaagaagatttcagtatagaagaaaatcaagagatggaagatccatataatgttagtcttttcttttgtttaattatttaattgttttatgattcaatttatttaatttaatttttctcttatattgtcataggaatatatcaattatgtgagccaaaatgttaatgtcaatggcaagtctgaattatatatctatttggctgagacaccgcttgagccaaagttttttcctaagttggatantttgagttattagagggaccgccaataacgttatccaaatctttgtaaattggcat

SEQ ID NO: 234726 - DNA, 447 bp, Glycine max
  unsure (1)..(447): unsure at all n locations
ttaaacctcaattcctctaattcatgaagttggagcttcctgtgttcaccaactacattcaaatcaaaattcagaaacttcaatgtctagtatgctttatgatcaaactcaataggtaagtggcaagattggcgatagaccaattggaagggagtgagtcttgtaggagctntgtatgttgtatgtatgccccacagagcttcatctaagttntgagatcaatccatccttgattgagcatctgttttctcatagatcttcttgacttccttgtaagaaacttcagcttgtccattggtctgggggtggtaaggtgaggctaccttgtgtctgacactatagtgttggagaactttcttgagttggacgttacaaaaatgatatcctncatcacttatcagttcccttggtgtgccaaaccttganaagatgtttttctttatgatg

SEQ ID NO: 234727 - DNA, 329 bp, Glycine max
  unsure (1)..(329): unsure at all n locations
atactgtttaagaagaggaactgtatgagactgcacctgttgataaaattgaggtgcagaagttggcaatgatgtgccatcaggttgaggatgatggaatctacaagatataccaaatttgcactgccccgttttcaaatagtaggagcactctttctcaccctgtttaaacaaaaggcatggtttaaccaattgcattattttctgtaggtaacatggatgagcagaagagcaaaacgaagagtcataccagccgtaacgggtatccataaatatttagtggagcttgccttaaatatccacctccattntttggatggtgggaatta

SEQ ID NO: 234728 - DNA, 426 bp, Glycine max
  unsure (1)..(426): unsure at all n locations
tcacatgaatgcatataatggtaacttatagcccagtcaatgatcttctccacacctaggaaatcgagttcataggattttatcagcaataaggcagcaaatctaaacatcttatatttagctggaaaaatacattcatacataatattaaaaaagaaaaaaagaactgactttcagttgtgagggtttggtcgttgatgcaaagagtctcaaggtcagggcaatccaatccaatcctgttgagaacctgaatcattagaagaatcttatcagatgtctgataaatggtatggcaaaaatgaattttaantattaagacatgaaacttaagtcaggtacaggtcagaatggagctctatattatttgaaaaatgactatcaagtaatcactttgctagcagtaattggccatattcgaaaggcagt

SEQ ID NO: 234729 - DNA, 415 bp, Glycine max
cttactatgtttgagctcggcctgttttgaatacgtaaggcttgagcttggctcattacctgtcataggcttttttttaaggctcggctaggcttatataaaagcctggcttggcccacgagcctatttaaaagtttgcttaaagacgtctttgattaattaattattttaaaacctagtgaaatactaactaaaaaaagaaatttataaaatttcgtataagtaatgtacaaatccaaaaataattgataaataaaatcatattgaattcaagtcgttaaagcacaaagtatatcaaaagaaaataaaaagagcataatattaaaaaatgtatggattagagatgaattgtagaaaatgaattttattctacgtgaacagtgtgcatggacagtaataaaaactggaattctaa

SEQ ID NO: 234730 - DNA, 438 bp, Glycine max
tatccttatggtctgcctccggacttcaccccccgtgccaccccggaagagttaagccaagcccctactttcgaggggcaactcccaccttatgaagactatcccgggcaagacaatgaggaaggagatacccatcttggccccctgcaccacctcaaagatccgtccctccacgaactaccccaaccaaacatagtccgccatatcccggcttcacccacacctataaaagaatctgttcccttcgcggaagataaaggtaagatggaggcgcttgaagagaggttaagagcagtcgagggccttggcaattacccattctcggatttggtaaatttatgtctcgtgcccaacatcgtcatcccttccaagttcaaagtaccagacttttgatagtacaaagggacgacatgtccaaatgggcatcttccgatgtat

SEQ ID NO: 234731 - DNA, 385 bp, Glycine max
  unsure (1)..(385): unsure at all n locations
gaaataaaaagctcatggtaataaagaaaggaataggaagaaaatcacgtttctctcaatttctctctctctcgttctctcggaggttctgggtcctcgaattcccaatcataacaatgactcatatgttacatactacataaacaaaaaaaatataaataatccaactatgctaaattaccttggtacaaatactctttagaaactattatgacgagttaaataaatgtaatacagaaaacaacaaanaacataaaattaatagttgttcacagaacatnttgcctaataaaatactaatatgtaacccaacaatacagataaatatttaacaaaaaanaaaacttaactagacatatcgatccaacccaactcaccctttgac

SEQ ID NO: 234732 - DNA, 455 bp, Glycine max
  unsure (1)..(455): unsure at all n locations
ataaaactaagctgcagtggtgaccatgaagtctttttctagttttttatcgntngcggcgagnttcattaggtcccatgtcaaccctctaacatgacaactaaaaaatgtgactgaattaaaggaacgttagaccattcaaattttttttccttcttgaatctaatatcactttcatacgacatcttccttatcactgtaatacgaattaatgaataaattaagaggttttttttttttcttacaaggacggtaatgaagatacaatctaagtcctcatgcgtttatctcaaccatcatcactacattgactctaatggttcaaataaataaataaagaagggtttgaatagaagaaaattacttgtttatttcacaccatatattatccaacactacacgggtaatatggaataaatattcaaaaatttaaagtcagatatttctaaaattat

SEQ ID NO: 234733 - DNA, 451 bp, Glycine max
  unsure (1)..(451): unsure at all n locations
accttaagcaccgcggctgcaagcttgatcgagagaaagaaacttctttattgtngannaatattcttaattcactcttcaaataacaatattgactaagaggagtggtataattttctttcttatgtgcgaattttcttacaaattttggtttccaagtaatacggacatcaataatcaatttcctgccatttgcagcaaattgctttgtagaaaagtcgaagtttaggaaattttcagtagattttcacacgaaaatatcctcaagcaattttctttgtagaaattttatttcaaaaattctcaactagctaggtttcctgcaggtttcaaatcctcaaatagttcttgatgtaattntcaggtgaatctaacatccacaagtaattgtccagcagattataaatcccatataattttcctatagactttaaattcgcaagtaatcttc

SEQ ID NO: 234734 - DNA, 313 bp, Glycine max
ctaagctttattaagcttcaagaaaaaagaagacgattatttgtctcggcaaactcgaactttaatgggaagcggagtacaaatctttttttttttcaacaaataaaagcttacaatataataaaaatattaaaactccttgttgtaatactaaaaaaaatattattgtaactacaatacatttaataaataaatttacactcaacgattgatgaactgtccctaattgaataatcatttatataattttataattacattctatttatgttcatatcgactcattgacttatttaccaggaatataaatttt

SEQ ID NO: 234735 - DNA, 458 bp, Glycine max
gcatgcaagcttgggtccttgagtaacaaactatttatgtttgaaagcgcttttctaaagagaagaagaaataatacttctttctctctctctctctcttatctctctttcccttagaggaggttgctgggcctcgaagacccgctactaacaacttttcaaaataaattacacttacatctcattccttctaagtttatgacttatcatataagtatttgctgtttgttctactctccacaaaatctcctttttcaacttcattacactcagcacctctttttcacgatgctaattctattcaactaaagtacatcacatgctttacacatgtttcttaaatgaaattctaagaaacttatgccccttttctttctcacatcatctgatacaaatcaacaacagtataacacgaaatcaagatatattcagattcaaactcaacaacaccaaatcaa

SEQ ID NO: 234736 - DNA, 259 bp, Glycine max
cagccttagggaaaaatgattcccttcccttacgaatttggagctttgattgtttgggaataaactgggaataagtgtggggggcatgcttcattggaagacatgaattttggccatgcttaatgttttattttggccatgcttgatgtatatatatattgcctagatctttctctaatcgtcaatgtcatactgttcaatcaaaagaaatatccattgctgccaattctgccatctcgttctattcatatgaagaaga

SEQ ID NO: 234737 - DNA, 442 bp, Glycine max
  unsure (1)..(442): unsure at all n locations
agcttggangtaaactagatgccttattttattctggtaacccaactggccatgaataaaaaatctgcacttgtcgccaaactctgtggtttatgctcatttgtcgaccaccacacagacctttgcccttctatgcaacaatctgaagcaattgaacagcctgaagcttatgctgcaaacatctacaacagaccttctcaacctcagcagcaaaatcaaccacaatagaacaattatgacctctccagcaacaggtacaatcatgggtggaggaatcatcctaaccttagatggtcgaatccttcacaacagccgcaacaacaaccttattttcaaaatgttgctggcccaagcagaccatacgttcgttcaccaatccagcagcaacaacagcaacagccgcagaaacagcaaacagtngaggctccttccgtaaccttcc

SEQ ID NO: 234738 - DNA, 405 bp, Glycine max
  unsure (1)..(405): unsure at all n locations
agacactcatagaaactcaagcttgttaaaaggggggcgganaataaacttaatgaagatttagttttctaaaaaagcagggaccactaagggtgcatagaatgaattgaaagattcgatttccggaacttaccagttgaagaccgaaggacgacgaagaacgaacgatgaacggtgaagaacaatgaagaacggtgaagaatctccacgaaatcgcttacggaaacgtctcgaaagcattatggaaccacctcggcttggattttttcacggaaacaatttttctcactaatttcgagagatttctcgataccagatgggctgaacccattngctctaccctccttcccctatttataggagaaaagagggaggtggtttccgcctagctcgcccaggcgagct

SEQ ID NO: 234739 - DNA, 451 bp, Glycine max
  unsure (1)..(451): unsure at all n locations
gtcacctgcagcatgcaagcttanggaccaaacacatagaggatatatatgcatnctaccatcaagaatatattgtataaccattaccaccaatttgatgttaatcaatatttagtccttcatctccaaaactgataaagcacttgaccttctaagtccaaaatgtacaaaccactattaaggagctaaacccagctattattaaaaaattattacattctctcacatggtccaaacgttttgactcattatctaaaataagtcagagctcaatttccttaagaaatgaacatgtgaatcatagcgatagttcctcttataatgagtaatatcatccatgtattacaacatgtatactcagtgtggtaataaaacttattgaataaactcaatgtttatttttggtccaaaacataaattntctcaataaatcaatgtgcacctgaatatg

SEQ ID NO: 234740 - DNA, 343 bp, Glycine max
  unsure (1)..(343): unsure at all n locations
actcgaatgacggaatgagagactttgttttananggaacaccaaatgcttggaagccttccaaattctcattctgtaagaactccatatctatgacatttgggtctaccatggaaccaaacgaaaagagggttgggtatcgtatacattgttcctctgatgaaaatattgacccatagggaattgggggaggaattggagcttcctgtgacccacaatgccactgactctcgactcgaaagttcctttttcgcctttttctatgtgtgtgacagccctctaccactcacatatttattaatatatgaatcaacatccaatattattaaaagtgtttctaaaa

SEQ ID NO: 234741 - DNA, 190 bp, Glycine max
tctgtttcttttcttttctcttttgtgttccaagaaatcaaatgtacttcaaagtatcgttgtagttattgactctaaattggaaacttaatttatgccattgcgcttcttaccgacataagggaacttcttttgaatgctccttcatatgagattgcatccaaaattcaaggtacatttcattagttat

SEQ ID NO: 234742 - DNA, 425 bp, Glycine max
  unsure (1)..(425): unsure at all n locations
aactcagcttacatagatttagaatgatgcactatccttattttaagatcttacgccacaacctaggaataaaatactaatggctgaggtactgaaattgtggcaaccaaaagtcaccccaacaccatcaagccaccaccatttggtctcccaaaagctgatgcctacgttgccaattgggcccttattaaaacttgaactataccaaactaaagcccttttagttgattaacccaaaccatatttttggtcagccaactttacaaggattgggccattatttaaacaaactaaacactctataatngagacaaagtggtgccatttagtcctcctccatttgggccatgatacacctcacaaccttggacttttctacttgaaacttgggcttgtaatcaaatagtatggacatcactcgttga

SEQ ID NO: 234743 - DNA, 428 bp, Glycine max
agcttcctttacaacaaagagattagtattatgaaggattgaagaaatacatgtggtggggatgtctcctccacctctagaaccttacaatcactcacaaactcatcttaagctctcaggacgacttcctcttcaagctccattctctgcaggtcttcgcacaacaaaatctctccaaactttgtggattctgacccttctctctctagaatatctcacatgcagaagctcttcgagaatctttcaggcttaaataggtggccttgttggtgcttgcacgcttagcgcaactctagctcgcttagcacgcattagtgaattttggcttagtgctcgtcttttcgctcagcggatggactcaagcgatgtgcttagtgggattagccctcgctcaacgaacatgcacagctcatccttcttccaaattc

SEQ ID NO: 234744 - DNA, 394 bp, Glycine max
  unsure (1)..(394): unsure at all n locations
nttgaagagatgtgacttttcagattatatttcatattttatcntactgggaatcgattacagtctctttataattgattacacagttacacattgagggtcatgacttttcaatttgaatatctgaaagttcgttactggtaatcgattacaagaaaatggtaatcaattacagtatttaaatttcaaatttcaaacttctttttgaaaagtttctatagtaacttgtctctggtaatcgattaccagtggaaaaatccttattttagtaatgataaaatatctacaaactttttgtaatcattttgaaaatcatgttttgaggccaaaccttttcaaccaataagagattctttaacaataataaactaagtcttatcttattttcttgatc

SEQ ID NO: 234745 - DNA, 447 bp, Glycine max
agcttatcaccacactccttcatacctctggccacaccaccaacaacttcagcttcgtgaatctcacttgcgactcccaatttggcgtcatctcgatcctcttccccgcaccgtactctccctctaatgccaccatcctcttcttcataaagaagcgtgatggcactagaaaaccactgagcgccactacgctgaactttctcctcatcggtagggacacatcgttggtggcgctaagctggttcttctgactcttcatgaaccaccccatcgtggaagaaaagatcctcgcagagctaacgttggtgcttacttccactcatggcggcgaccgacgacactggatggaggaggcaatggacttcgaagaagcagagaaacttgtttagttaaaagcagtgttagccgaaacgctacgtgataataagttttatgttaaataataaa

SEQ ID NO: 234746 - DNA, 440 bp, Glycine max
  unsure (1)..(440): unsure at all n locations
tcattaacaatgattgtttcatttaacaatctctgacttctcctgttgatggtttaaatgaagagagttactaattaatggtcatttattacttcattttaaaaaaattattctattaaatgtttaagttgactaaaacatcaattcaattagtagtcttaaacataataatattaaaaacaaatggtactttttgtattttttttttaaatctgaatataaagtgaaggggaggaagagccctatgaaattngtaacgttataaataatgtgtgtcaattcccctttatcatctaattcaatcatatgctgacatgcaacctttcaaaaaagttgaccgatgcatcaattttcaattaataatggtcaacaaatcttaatatataaaatgatcatttctatatatctctcgtaaaaattgatatcgaaatgaatagata

SEQ ID NO: 234747 - DNA, 413 bp, Glycine max
agcttcatgatgatgaacaactattttgttaatgccaaaagcccaaatcattgattcaagattgattcaagacttcaagatcaagcatcaagaatctaatccaagattcaagattcaagagatgaaatgaggatgcacttagtcaagacttcatataggataagtattaaaagattttttcataaaccaaatagcacagttttgttttacaaaagagttttctcaaattttctaagttaccagagtttttactttctggtaatcaattaccagttggcaataatcaattaccagtgaccagtttggttttcaaaatatcttcaaatgatgtgcaacgttccaaaatgattttcaaatagtgtaatcgactacacaatattagtaatcgattacaagtgaatctgaacgttgga

SEQ ID NO: 234748 - DNA, 404 bp, Glycine max
  unsure (1)..(404): unsure at all n locations
tggcattctaacagccaaaggatgtgcactgatatttatctggaatactaatatttatgcagctattatgtgtcatattatgcaacacttattgtattcgtattatgtttaatagcaattctcaaatcagtattgctatgtggaataagaatattgaatcgaacactaacatgggatgttctaattaatattgttgcggtgatgtttgtatgtacaataggaatattggattgaatgctaacacaggatgcatgcctttntgtttatcgattatgtgaacttcttgtgcaccatttgccatatctttnttgaatttctcttataaaaaattgttgcaaatcgataaacaaaaccaatgtatcaagatggggatgaagtggagatgcttgtctccaacagaaata

SEQ ID NO: 234749 - DNA, 410 bp, Glycine max
  unsure (1)..(410): unsure at all n locations
agcttgatagctatgctatngagttattatttgtaattttttacaaccagaaaataggttataatatccatttatatcatgtctaaaaattgtaactgagcctaaccaactctctttcaagggccctagggactgggaagacacagaccatacttgggattctaagtaccattttgcatgctactcctacaagaatgcattcaaagtatgataatatttttatatatttctgtagtcttctatgtctaaaaattctgtttttggttttgattattgtcttgggcaaagcattataagagtgtgtctggtagaggtgatttttagtgtttggtttatcatcaacataacgaatttcccagcaaaccaagtggtgaaaaaatatattgattatatatatggaatataattat

SEQ ID NO: 234750 - DNA, 387 bp, Glycine max
ttggtcaatctgaggagtcgtgtctttatgctgctttttgatggtttctgggcggaaaatcctaatttggttaagccagaaattctgcagcatttgcaaagcagattcaaattaattgaagttatgtacaagcactgcagcttttacaaaaataagcactgcaacttatttaaggcagaaattctgcagcatctgcagtatgtgggtggaaaaagggtgggagtggaactctaaatggagaagacacttgtttgacagagagcttgagatggctgattggtttcgtaatgatgttgctggcagctgtattcagaatcacaaaaaagatgagtggatgtggaaaatagaccctactggacaatattcggtaattaaaggagagactac

SEQ ID NO: 234751 - DNA, 399 bp, Glycine max
  unsure (1)..(399): unsure at all n locations
agcttntatagaatgttcactcctaatttctctacaatcgcatcacctctcaatgagctggtgaagaaaaatgtggcctttacctagggtgaaaaacaagagctagcctttgctttgctcaaagaaaagcttactaaagcacctgttctagctcttcctgacttttctaaaacttttgagctacaatgtgatgcctctggagtgggagttggagttgtattgttacaaggtggacacccctattgcttattttagtgaaaaacttcatagtgccaccctcaactaccccacctatgataaagagctttatgccttagtaacagccctccaaacttgagaacattaccttgtttcaagagaattgtcattcatagtgatcatcaatcacttaagtacatt

SEQ ID NO: 234752 - DNA, 400 bp, Glycine max
ttggagatgcgtttcacacctttcttttatgatgactttcgtagagctctcttcaaactctctcaatagggctccttcaacacttatctgtcaaagttcgaagccctgaccaatcaaataatgggtcttcctcctccgtttatatttaattgtttcatctccagcttatggcccgatattcattgcgaggtccaagttcttcaaccgctatcactggttcaagccgccaccctagccaaacttcaagaggacaagctcaacgattcttgctgaaactctcgccaccgttaagttattactctgctgacatctcccatcaactcgttacctctattccaactttcactacttcaactggctccaccgaaaccaccttcaaaaagcttacattggcagcaat

SEQ ID NO: 234753 - DNA, 451 bp, Glycine max
  unsure (1)..(451): unsure at all n locations
agcttgcagcagataggtatcttccaatctttttgagaagtgtaattatgatagtagcttctctaggtttctgatacttgtttggtagaagtatttgaaattattgagaaaagtgatggatgcaccttcttcataaaaaacaccttgccttttatttcgagtggcaattgtaattcccctctactcactatgtgatatgttggttattttgaaaatcgagatgatactggataaatctgaagtcgtgtataacactttcagattgaatcaaatttcggggttcaaccaaaattgttcaatcggataaaatcagaagattataattcaagagttttattttggtcttgtatgtttgtcacccgttatgccttctgaaccagaatgattatttatgatcaaagaacaggtggttnttggagggtgatggaagttatttctttttaaaaactgg

SEQ ID NO: 234754 - DNA, 449 bp, Glycine max
ctcaagcttcaacttttcgaaaggcaaagtgtttatccgtcacactattcaacccccctttagtgtgtttgaggtactttatcttctctgccaaatctttttttttatttttattttctcatatctgatctgagcttttattgttagatctaaaagctgttgactagtgacaattgtagcaccgaaagatgatgatgtcgtatgagattgggaagctgttgtatggcaacaacaattccacgacctcgcgatgacaaagacttcacaattgaacatgttgcacctcctttcatcactttcccacaataacatttctcattgtgcgttgtggtcaaactagtcacatgagacgaaatgggaggcatgttgtggcattgtcgtcgttgcggctcgctatagtagcatgggagagagatcgatatcgagagagatagcgagacatcaaagga

SEQ ID NO: 234755 - DNA, 342 bp, Glycine max
cacgtttgtaaatttgcgtatcgcgcacaaattattatagccttatatcaatctttggtgcacaagtttattataccccctcccagactaaaatgatcccttccttcatcttcttctacctctcttgcaacctccatggtgcatacacctctatctgcctagccattgtatgccaccgcccaaagcatgtttcgacagtcacttttttcttttacattcatcactacacatatgcacaaaaccaagctttcatcactttctgttcacaacaacattgatcttgagctctttctataaccgcacgctcttactatcagagccgtgcccatatctgggattcct

SEQ ID NO: 234756 - DNA, 425 bp, Glycine max
agcttaaacattcaatgtcgagcgtcttatatatgacgggactcatatcatacatccgagtaaaaacttattgtcgtttgaataggctcagaggttcaacattcaattgctagcgtctcgatatattaccggactcaataagacatccgagtaaaaagctattgccgcctgaattggctcagagctttaacattcaatttcgagcgtctcgatatattacgggactcaatcagacatccgagcaaaaagatattgtcttctgaattggctcagaggttcaacattcaatctcccgcgtctcgatatattatgggactcaatcagacgtccgagctaaaagctactgcctcttgaattggctcataggttcaaaattgaatttcgagcgtctcgatatattacgggactcaatcacacattcgagt

SEQ ID NO: 234757 - DNA, 367 bp, Glycine max
actcagcttgacaaatcaacgacaaacttatatcgttgttggtgaccctctataacaggacgcctcattgaatgtgaactggagcaattctacgatttaactttaccggatgttgattgatcccgattaatcgagacgcttgaattgaatgttgaaggtcgacaaattcaacgacatacttgttaccggatgctgattggttccgtcataatcgaatgctcaaattgatggtgagcttggccattcaacgacaataactttactcgatgctgttgagtccgaatattcggacctgaaatgaatgtatatctagcattcaacgaagaacttttactgatgttgatgagccgtatattcagaccttaat

SEQ ID NO: 234758 - DNA, 447 bp, Glycine max
  unsure (1)..(447): unsure at all n locations
agcttctcggtacatcacgggcctcaatcgttctcccatgtcaaaagttatggccctctgaattggaccagagcttccttgttaggtttcgagcgtctcgatatattgtgtctgaatcggacatccgagtgaaaagttatgacaattttaatttctctagaacttccattattcaatgtcgagcgtctctatatatcatgggcgtcaatcatacactcatgtcaaaagttatggccgtttgaatttctcgagaacttccattattcaatttccagcgtctctgtatattntgctcctgaatctgacattcgagtgaaaagttatgaccaactgaatntctcgagaacttcatttctcaatttctagcatctaaatgtcaaaagctacggctgtttgaatcggaccacactttgattgttcaatttctagcgcctccatatattatac

SEQ ID NO: 234759 - DNA, 390 bp, Glycine max
  unsure (1)..(390): unsure at all n locations
ttaagcacttctctctcttacgaaagctcttagaaaaattgttgccgtgaagaaggaccacgccgaggcgcttccgcaacgtttccgtgagtgagatctcgaaggatctcgaccgttcgtcggtgatcttcattcgctctacatcggtcttcagtgctcaacgggtaagcacctcaaaccaagcttttcaattcattctatgtacccgcagtggtccacactaggtttcatgtatttgtattctccggttcatttactttatatacccacttttgacgagcttaagccgttttatttaagncgtttctcgcttaacctaccaataaactaaatttcaccgatagttgaatttattatctgtaactgtggtgaaatgaatccgaccttcgc

SEQ ID NO: 234760 - DNA, 368 bp, Glycine max
gaatgaagaaataaagtattaatgtgacgttcacatttaacctaacagaatgattatgtttaacatttcaaataagaaaaaaagataaaaatgaattctctaaaaaatagaaaatacaaatgaaaaaaataagacaaaaaattaaatagatatagacttaaaaataaataaatagaggttactacaaatgaaggaaatagactgtaatattataagacactctatacatagtaggaaaccgaatcatggatgcattacactagagacaactgtaccaaggcataattattgatcggcggtcaacctaataggtgtctcttgaggataattcaatcgaataggcagagaatagatacaataataaatac

SEQ ID NO: 234761 - DNA, 432 bp, Glycine max
  unsure (1)..(432): unsure at all n locations
ncantaaannnncttgtgtttaatgacctatcagattgttagcganngaaaatcttgcccagtgtctcaataatctatacttctaacagctattgaattggacatcctaaatggcttcctattttaattgtgcaacaaatcacttccccattaactaaggaacagatccttcaaatcaatgtcttaacactagactgaactggtgaattcaactaacaagaccatgaatcagccaaaaaaatttattagtgtcatgaaagttgcaaacaaagaaaaccacatgacgatagaaaaaaaagctaatgatatccaaagataccaatttgtcactgagtcttaaggttcccatatcatattcaaataaagactcatgtttctcaatgtgtgcctaaacatgagcagacgggaaaaccagaaacaattctttatgta

SEQ ID NO: 234762 - DNA, 395 bp, Glycine max
acttaattttatccaattaatccttaaagtttatcactttgcaaataaacaccataaacttttattgtgtttcaaacaatccttaaatttgacccttttaacacccaggtacctacagtttaatttcatctgaattatattgaagttaaattactaatgaagaaaaatatcagctgattatttatttaatctcaactatttattaagtttaattttataaatcacttttttcaaacactaaaagatatatatatattctaaattcatattccttattatagtttaaatatggaaaaacgagttgtcaaaataaatgaatgattaacatttaagatcaattaaatagaagctttttcttctcttgtaaagggaactcttatcacaaattaaatata

SEQ ID NO: 234763 - DNA, 288 bp, Glycine max
gtccttttgggaggactgacgttgcataaatatgagaatcattctattatatatatataccgcttgagtgtctggacatagcctctattctagctctctaaactgttcttccgattgattgcatgttaacaaaatcaaaagctgataaatgatatactgggttcatctatcacaaggatgtacgggtggacaggacggattgcacggatgtaataatataaagaaatgtatgttcaccccaaaagtaagtttaacatatcgctataatgctaataataaatccttttt

SEQ ID NO: 234764 - DNA, 450 bp, Glycine max
agcttccacatagtcaggttagaccttagattctgtcacagaacataagaaactaaaggtcacatctgttgtcatattaccacctaatacacacacatgcatgtatacacacactctcacacacacactcacacatgtagagagagcaaaccaccacttttatccttttgaagtattactctttttcctaagcagtccccaaagtaataaaatacttactatttaggcagtcttggaagcaatagaaatagtgtcaagtccctctaatattaaaaacctgtcaaactggtccttaaactttactgaaatccaccaacttaaggattaaagtgatggatattcaatatttcagggattaattttattactttagggattacttgggagagagggtaataaatcgaggacaaaattgatggtttattcaagatacatatgcatatatgtatg

SEQ ID NO: 234765 - DNA, 456 bp, Glycine max
  unsure (1)..(456): unsure at all n locations
gaccttagaaactcagctttcacnaccttattattattactgctcttttggttgaaagggncaatccgggtgctggtgcttctttttcggtggttatgngggnttcttcttctccttcttgttattctctttgtggctcttttgagggagagcttgtaactgtgcctagtgattgtggtcatggcaacaactgaagaagagaaaacaaaaattggttttgttttgggggtgttgcgttatgttgtgaagttttgggttacactaactggggtgtgatcagagaagaggggggttctgggtttaagtaatggggcttcaagagattgccacttgattatcatggttactacaaaaatgccacttgctctttntatcaaaatattcattttttcttgcatgaatntattacatatatgtataagaatttatatttaattttatattatgctaaatttt

SEQ ID NO: 234766 - DNA, 428 bp, Glycine max
  unsure (1)..(428): unsure at all n locations
agcttgtaaatatatatnaggtattattttttctgtncncattatgctcttaatggtctttagaggttactttcctcgctgacatcttttgtcttgaatggaattgccatgacaagnttattgttactgtctttgatatttggtagttgatattgggttgcgggaggtaattccgattggattaactcaccatcctttacgtgacaatatgttatgacatttgttgtcggatcacctatgatgtcttgtttccaagggtaatctatatcctttctaatggtataagcatgaaaccaatcaaagaaaaggacattaattttgactctctcgacaaaattctagaacttgtcttggatttgttttctgtttcgacccttgcaatgatggaaaaaccatcttctttgaagctcaatctccggagaaaaaaa

SEQ ID NO: 234767 - DNA, 415 bp, Glycine max
  unsure (1)..(415): unsure at all n locations
tanatactaagcttgatanacgaaatgcctaatagatttaatttcttttgnnntattcaaccaacgactgtaccatcattctaccctataaacggttactgcttcttgtgtactcacacacacatatatatataaatatatatttgttgtttttttcctttacaccagatatattattcattgttcgatgcaatcttattttaatcccatattattattatgacggacaaagttatattccttttaagtatttaataaagtcgtctaaacaagatacaaattaaacatctctaagataaaataactacctatcaattaattcacacatctggngattattggattttttttctctaatacattatgggtattatatttgatatacatttagatttatattcacactgaatttttg

SEQ ID NO: 234768 - DNA, 330 bp, Glycine max
ccaaaatctctttaactttcggactttcttatttacgatctctttcaaacaggctctactagcttttacatttcataccctaagaagtggattccctcttgtcttgaatggtttagaataaagactcccacccttatttatactcctccctcttcacaatgaatggttgagatgacttgtttttaaaaacacttacacaagtgagagatgttacattatttaataatatgtttaagagaatattataaattgaaaacacctttcattacaagtggatcttcttgaatcgagatcgactcacgatactctatcataaacattacttttgaa

SEQ ID NO: 234769 - DNA, 349 bp, Glycine max
agcttgtctcagcatctatgcgagacttataccaacatgttagctatcatcgccaagtaccaagaagagttgggtctagccacggcccacgagcatagaatcgcggatgagtatgcccaagtatatgcggaaaaagaggctagaggaagggtgatcgactctttacaccaagaggcaaccatgtggatggatcggtttgctcttaccttgaacgggagtcaagaacttccccgattgttagccaaggccaaggcgatggcagacacctactccgcccccgaagagattcatgggcttctcggctattgtcagcatatgatagactcaatggcccacataattagaaatc

SEQ ID NO: 234770 - DNA, 389 bp, Glycine max
  unsure (1)..(389): unsure at all n locations
ttataagcgtgggtctgggagacaaatgtcaagtgttctcgatatgcgaagatgatgttccgagtactttggatttggtacgaccatgccctcctgatttctggctgggaaattggcgagtggaagaacgccccggcatttatgcaacgagcataatgtaaacctttacggttttaaaagctctatagttgggcctaggctttagagtttttccttttgttaaggctttgngtcttttgtttttgaatttataatacaaggatctttcttcatctgttcctggtctctacccattctcattcatctacatggttacttctttttctgaaatggcagatccgatgacgagtcccccgaaggtactaatacctgggacccggctattgact

SEQ ID NO: 234771 - DNA, 400 bp, Glycine max
  unsure (1)..(400): unsure at all n locations
agctngctattattaaatgatataatttttattgttacattctagttaaatctaaaaacacagaaaccaaaatctgttgataaaaagataaagatttagtaaaagaaaaaaataaaaaacaaaaaacataggcgggcccacagagcactcagcagtcaccaccgaataccaataattgatcattctcctcctaatcccttctgtatacaagctgtcacctctcactctggctttgccttctccttctcttcttcgccaaatcccaatctcaatcccgaaaaccatttcactgatcccctacccctccccctccctccaacaatgtttcgacacccttaagaaatcaaaaccttcaaaaccaaaaaacatcaaaccatgtttttctttcctcacaatgtct

SEQ ID NO: 234772 - DNA, 416 bp, Glycine max
  unsure (1)..(416): unsure at all n locations
tgctaacccatggaagctcctaatatcttccacactttttggggtgggccattcttggatggccttgattttctcatggtccacttggaccccatttctaccaactacaaaacctatgaaaactatattatctacacaaaaggtacacttctctatatatgcatagagggtgtttttcctaacgattgaaagaacttgcctgagatgtcctaagtgatcatctangctcctactgtacactaaaatatcatcaaaataaacaactacaaatctacctatgaaatcccttaagacatgatgcataagcctcataaaggtgcttggtgcattagtgagcccaaaaggcatcactaaccattcataccaaccaaacttggtcttgaaagcggttttccactcatcacactttttcatcc

SEQ ID NO: 234773 - DNA, 443 bp, Glycine max
  unsure (1)..(443): unsure at all n locations
gctgacacaattcttccctttatatacaacagttcatagggatagtatacagttaatctggtatgtaatgaaaccctcctaccttaggtgatccagctgtagatgctttctgagttaatctgtcaaacaatttctcattctcttcatgcaacctctgcaaaccatcaaaatatcaaatggagcctctcaccagtccaatataaaactatagtaggcatatcaaaattcaatacagctaaagaattaaacaaaaggtgtgtttcatacacactaagttaaagtacaatgagaacagtacaggacaattattcaagttactggacaacttttggttctgtacattatttggtatacaatggacagcacaaacaaaataatataaagtttactgaaataccctttntaatatattagataactgttaatagccatgatcgtgtact

SEQ ID NO: 234774 - DNA, 448 bp, Glycine max
  unsure (1)..(448): unsure at all n locations
tcaggatttcgcaacaccaagaccttttcttatttacacatcactaattattctatcatcggccatacagtaaacacacgggaaaagggagagtacaaaaaatggcatcactatttcctcttttctttttccttttatcaaacattgtgtgcctgtcagacatttttctttcctcggtcatgtctaagtcctcacttctcattccattgatatgcatccaattgaactgaagtgatttaacaaaaaatgcaacggtcaactcaacatttgttaaaactttttccagtacaaaataaaatgtattcataatactccttcgaagttaatagagcagctaccaatgaatntcagtagataaaacctctagattcagtactttggatctcttgctagttcctagtggtggcanaaccttacttttgcttggatattctcatgactcattctt

SEQ ID NO: 234775 - DNA, 450 bp, Glycine max
  unsure (1)..(450): unsure at all n locations
agctagtaaacaggggctgttagaccttgaactaacactattgagagtggatttcctccctggctaggtagcccccagatgtaggtgagggtgcaccgaactgggttaacaattctcttgagttatttacttggttaatctgttcatacagacacacataaactgcatgttctgaagcgtgatgtcgtgacatcctgtacgacatctgtccccagtatcagaatttcaattggtatcagagccaacactcgaaatcacagagtgagatctagggagataaattctgatgaacatggagaaagaaggaggaccagtgaacagaccaccaatcctagatggaaccaactatgaatactggaaagcaaggatggtggccttcctcaaatcactggatagcagaacctgtaaagctgtcatcanaggctgggaacatcccaagatgctggacac

SEQ ID NO: 234776 - DNA, 425 bp, Glycine max
  unsure (1)..(425): unsure at all n locations
ntaattgactcttganatggcaagaaatggcagaattgaccatattttatttgtgacaaaattgaagatctttttcttagatttccgggaactactcacatgcttcatttgaacttttagactctctaccagacaggcaagtcaagtacagaatcttaaaattagttacaattctcaattaagttcaatcatttgtataagatcaaaattgagttaaggtgagaaaagatcaaagaaatgtgaattgagctaaaaagaatataaaaatattaaactacaaatacttaattagtgatcattaaaatgattttttgtttggcactaatgtagcatgtgatcctaattgagaagaaatttgtcaaaagcaactttacaacaacaaactcttaatggaggaagtctttgttgacttatgcactanacat

SEQ ID NO: 234777 - DNA, 418 bp, Glycine max
gcggcatgaagcttatggagagacgtgtatcggtgtttcttatagggctcttcttttacctgcgcagttttctgtctttctgaggataactggatttaaaaaataggaaaaaaaaatatttctaatccctatattttcctgaagtattaattctagttgttgtagtttcaaattatcaaatctatccattgtactttatagaaaatttgtttttaattccttttcacaaatgaagatgatattatttcctacatgacaaataaatcaggataaacaactgtcaagaacaaaggaattccacgttcaaataaatcaaaaatgatggcgaggctatttccaagttcaaataacatttcatggatgctcggttcggatcgttccggatggaaattcaagaatcaccattgttgaccttcta

SEQ ID NO: 234778 - DNA, 343 bp, Glycine max
aatttgacagctcatttgagtacatgcacctaatattccattaataacgatattaaccggaacatgaatattgctgcaccatcgttattgcttttattttcacttcgggcgatatgtagtacttgagactacttgttcattttcactgaaccatagaggaagaaaattgaagtccactgcaagctaccaagtgattttgatgacctatagaacaaataaaatactagcaagcgctggtaataaatactaagggagaatctttacgactaatgaacactcaaaccaattacacccacaaattaaattacacaccgcaaaaagaaattcagttccaggatttacc

SEQ ID NO: 234779 - DNA, 452 bp, Glycine max
  unsure (1)..(452): unsure at all n locations
agcttcgagttatagttgaactagcacttgctgattacttaagtcttgagatatttcagcatgttgcgaagacgcttactttgctggttacattgtttcaggttntggtatccttggtttggctacctctacttgcttaaccttcaggtgctgtgatgaagattgcaacaagctttgcacgaagttacttggtaaaactatggcacaagttttcgggtagaattgagacttgtgaatgtaatgcaatttctgtaatgatattgataagtagggcctattagagtaagaaggccattatagcatgtttgcccgagtaccagtatattgagttattttctctaaccaacatgtattaggcattntgttaggatggacccaaagaggtccaaaagaaggatgtttaagtggctcacagattataaaagataatggtttttaattcataaatatag

SEQ ID NO: 234780 - DNA, 449 bp, Glycine max
  unsure (1)..(449): unsure at all n locations
atgtgttatgagacttccatatggaacacaacattacaccaattttcattcttaagaccaacaacaaattaaacagaaactcacgaaaattgtcaacatcattcctagagctctcaatgatgtgtcacaaattcgcagctagccatatatgtcttgcatgctgataggctaaaaacaaatgctaatcattctcaacgtttgattcacaacacacacattgcaaaggacaaaggacatgcttggttgaaggtttgcacaagttgggagacaccctcaaagaagcctccaaagaaaatgcttgatgttttgcggggcttataacttccaaattatcatccaatctctntccaatttcaagtgtgattgatcaagcatattntccatgatattatggtaagagctatgagcaatagtctccatttgttgagaatttctagaattgttgatca

SEQ ID NO: 234781 - DNA, 425 bp, Glycine max
agcttattctatgttatggaaatgctctaataaatgtgacatcggcgcatagggttttatttcatatgttataattccatgaataatataattattttatgtttttccctttagtgtgaattctcttcattcaaaatgggcgaccttgttttgagccgagataattttatcatttatttgaacaaattctattatgatttcactaaataaatgtaaaccttttacccttttgaaatgtttttatttaaatgtgttctaaaacttttaattaatttcacattcttattctttttattattagtatatatatgagtggggtagagggtgtcacttttatggcagcggaagacgacgaccacaacaacgacggtgcacaatgcagacggaccaggcacagaagctcaaaatcatagagatggcatgga

SEQ ID NO: 234782 - DNA, 439 bp, Glycine max
  unsure (1)..(439): unsure at all n locations
acctataaaactcagcttatatcgaactcanttttgggatttaaaatatcaatatgacaatgaaccttttttgagtctttgtgaagctaatgaaatttcttttcatttttcatgccctcatacttcatctcanaatggaaaagcgacagaaaaattcattctattaacaacattattcgcacattgttagctcatgtttcactacctccctcattgtgccaccatgcattacaaatggcgacatatctcattaacatcttacctggtaaaatcctctcctatcaatctcttttgaaaatgttataccanaaaagacccatcatactctcacttacaagtntttgattgcttatngtatccnntcttttcttccactatgataaataagctncaacctcattccacacgttgtgtctttctaggttacccatcaaatcat

SEQ ID NO: 234783 - DNA, 448 bp, Glycine max
agcttgtcctcagatccctcttattggacgagacttagaccaaacaacattattgtgacaacatatttaaaaccaaaacttaatccaaagatccctcttgtaagactaagtttcaattctgctacattcaagttctaaggcaacaatacatttcctaattttaaaatcacctaactaggcacacaaatggttgattagaccaagagaatacagaatttaaccactgaaagaagcattgaacacaagaaacacaatcaataatatattaaaataattacatcagttgttcattagaaatccccaacaagggtgtttagccagcaataacagaaaaacccctgataataataatgagattacaaaacctaggtatctctgcaaaagttgctcctctagctgcctctaaagctctcttcccgaagtagacactgtggtgtgctctggaatg

SEQ ID NO: 234784 - DNA, 438 bp, Glycine max
  unsure (1)..(438): unsure at all n locations
ngaanggtgtgtaacccttcattgttaaagtaaaacactggtaatgggtctactattattggtatcattttttctccatcattgagggaaacacttgggttgtcagatccctccacctttgggcgtatnttgaaagatctgtgccccctttttgcacatgttctgtagttgcatcctatccgaagccattatattgacactgcctaacgaaggcaaccattaggtccttccaagaatggactcgggaaggttccaagttagcgtaccaggtaacagctaccccagtaagactttcttggaagaaatgtatcaacggttcctcatcttttgcgtatgcccccatctttcgacaacacatctttagatggttcttggggcaagtagtccccttgtacttgtcaaagtccgacaccttgaacttgggaggggtgatgatat

SEQ ID NO: 234785 - DNA, 446 bp, Glycine max
  unsure (1)..(446): unsure at all n locations
agcttatctttcagagtctgaatagctgtcaagcattcatcatcaagcttgaagactgcctctttattcagcaagttgctcaatggtttgacgattttaaagaagtccttgatgaacctctgatagaagcctgcgtattcgaggaaactcccgatacccttggcatttattggtggaggtaaattctcaatgacatcaattttggctttgtccaccttaatgcctcaggctgaaatcttgtggcccaatattattccttcttggaccatgaaatgacacttctccttattcagcaccagatttgcttcaactcatcttcgcaatacgagctctagattagtcaagaagtagtcaaaggaaagcccaaaaattgagaaatggtccatgaagacctttatgcacttntctaccatgtcttgcaaaatagctagcacgtacctctagaa

SEQ ID NO: 234786 - DNA, 430 bp, Glycine max
  unsure (1)..(430): unsure at all n locations
ntgtgtaatcgattacactaatttggtaatcgattactcagtgactgtttctgaacaaatcaaaagatgtaactcttcaaaaggtttttgactttttcaaattggttttaagtttttctaaaagttataactcttttaaatggtcttcttgaccagacatgaagagtctataaaagcaaggctttttttgcattttaattcattctttcacactttacttttccaatcaatcctttacaagccttgaatctctttgaacttcttcttcttctttataccaaaagctttctgaagttttctggttttctaaaccttgaaaacttgtgctattcatccttttcattctcttctcccttttgccaannagaattgccaaggactaaccggctgaattcttgttgtgtctctcttctaccttttccaaaagaac

SEQ ID NO: 234787 - DNA, 450 bp, Glycine max
  unsure (1)..(450): unsure at all n locations
agctntacttaagagttgtccttgccatggttacactaattacacccaaatctccatttttataaaaggaacaacttatgaatatagaagaatgacaaatgcttcaataggaggataccatgtaaatggaaccacagccaaagtaaagaaaaatatagaagatgtagcagctagtgaatgaggttgtgattgcaaccgcacctctccaaaggatgttcccaaagaagacaccgaagatgaatccctcaaacaacaaacacaaataaaagctatgatggagaacatgaccaaaagcatagtaaaacaacttcaaccattgatgccaccaaaacaactaattctctcatgtgaagagtgtggactgcaatgtcgtaacaacaagaaacgggttggcaactaaagatgtaacacccaantttttcgtacaataaattaaaaatatntaaaaat

SEQ ID NO: 234788 - DNA, 320 bp, Glycine max
tgtttgagaagattcctaaagaagcttgagcttatctacacatacttctctaataactaagctcacctccttgagatgagaagctagagcttagctacacacccctataatagctaagctcaccccccatgacaaaaaacatgaaaatacaaaaaaaagtccttactacaaagactactcataatggcccaaaatacaaggctaaaaccctatactactagaatggccaaaatacaaggcccagacgaaggaaatacctattctaatatttacaaagataagcggactcatacttagcccatgggctcgaaatctaccct

SEQ ID NO: 234789 - DNA, 489 bp, Glycine max
  unsure (1)..(489): unsure at all n locations
ggcatgctaagctttgtttataaatacgggaagaantatgatttatgtgtgaaatggaacgtaaatggaagaaatgaaagtctaaataaacacagaaaatggtaattgataagttctcaagaattcgaacaactttactctcgttgaagaaatgaagaaacgtaatgaacgaatgatatgaagaaacgaccggaaaaccatcatgggatttgctcacgaaaacgtctcggaagcattacagaagcacctcggcttggattttcttcacggaaacaattttttttcaccagaacagctgaaatgcatagccaggggatccgggatccttggaacaaccccctttttctttntttataggaaaaggggagaggaggttgctgcccagctcgcccaggcgagctgggttgcttcctttagaagcaaccatgcttctaaaatactctggaaggtccaaattcaaaatttcgaaaattgtatctgcaccccaca

SEQ ID NO: 234790 - DNA, 414 bp, Glycine max
tctcctttattttcctataaatagggggagggatgattgagaaaggggttcagcccttctagtacttcgtaatcacttaaaattagtgaggaaaatcgttttcgtgaagaaaatccatgccgaggcacttccgtaacatttccgtgggtgatttcgcgaagattttcaaccgttcttcgtcgttctttggtcttcaaccggtaagttcctgagatcgaacttttcaattcattctatgttcccttggtggtccccatttgtttcgcgtacttttatttttgtttcatttacttttcgtacccccttttgacgtgtttcattcatttacttaagtcattttctcgcctagtcaaaaaatagaatacatttccaccgatcttttgattagaatatccgtaatttctctaaaatgaa

SEQ ID NO: 234791 - DNA, 433 bp, Glycine max
  unsure (1)..(433): unsure at all n locations
gagcttatattaatgaatctaancatttattctcttagctttcttagtaccacctgagcagttntatttcaacttatttaatagttagtaacttcctctctacgatgttcaaacccacaattatccaaattaaattttaaattgtgtagccacttatctgcaccattcgagaatcagaagcccttcaagtattgcattcccgccatcagaatcactttctggacttcctcatagtattgcacttccaccttccaaggcatcttctagaaatgccggaagtattgcactttcaccttccaaatcattccccataatgaaatggacgcacagttctatggactctccaatatcacaccataagcatcgccattccagaagaaagtccaacaaccaagttcctggcccaacctatccaatccaccctcatactcat

SEQ ID NO: 234792 - DNA, 342 bp, Glycine max
tcaatcatctaccgccagatctgtgctataaaagttttcatgacttgatagagaagctgaaattgaactctcaacctataagactgacttcaatttcagcggaaatgtaagagaagcagtggcattatctaaaaataccccacctggtccacctcccttatgttcaatctgtcaacacaaagctcctgtttctggaaaacctcccaaatggttcagctatgctgaattggagcttgccacaggtggattttcaaaagccaatctcttggcagaaggaggatttggatctgttcacagagaggcttcttcagatggacaagtcattgctgtcaagcaacataa

SEQ ID NO: 234793 - DNA, 343 bp, Glycine max
  unsure (1)..(343): unsure at all n locations
agcttatgcgcatatttccttacaaatgttctcttgcacaagacattctattaaccgaaaaaaaaaaaaaatgcacccatatacaatcaaggcagcttcgttacctaaattatttacacgtacttccaaggagtatttgttacttacatcacacacatctccttggctaaattcacatacatgcatacccaaagcattttggggtaccaaaaattgcacatgtgcacatcttggtatctctaatacctatacatacacaaacttcatgatgaatcttgactatctacacaataaggtgctacatttcatgctcttttcaagttnttgctacctaaagccgcat

SEQ ID NO: 234794 - DNA, 228 bp, Glycine max
gctcggacatacgcgtgaagagctctgaccatatgcaattcgccagagttttccacgctgatgttcgagcgtggcgctttattatgagcctggctcggacctcaacgtgagaagctatgaccatatgaatttggcgagagctttcgcacggcagttccgagcgtgcctatttgttatgcgcacgaatcggacatcacagcggaaagttctgaccatttgaaattgtca

SEQ ID NO: 234795 - DNA, 434 bp, Glycine max
  unsure (1)..(434): unsure at all n locations
agcttgaaatgatgaagtgttgaaagttgaaacttcctgcttttattgnacaccacttactggtacctgtagatatgtcgcgggggtcacgagaccttggtgacgtccagtggggtgctattggccaaaaccaagcttgaccaatcccgacccaacccgggcatagtcggtcagtgagaacctgtgatgtacctaagcaggcgagctcctggcagtcaacatataaaaggaaaacaagaccacacagcaaggaggcttgtggtggctggccanctgtgaaacttgattgatatgtgagatatggtctctggtaatcgattaccaagggtgggtaatcgattacaaggcttaaaaatgaagacagggggctaagatggtctctggtaatcgattaccaggggatgtaatcgattaccaggctttgaaactaagtc

SEQ ID NO: 234796 - DNA, 402 bp, Glycine max
  unsure (1)..(402): unsure at all n locations
tgaagcacttcgggtgtactattcaaagctcgatgcttctacttgngatgaanagattaataacataaaagagaagatgtacaagctctttgatgaatatgtgagtgtaaagtcaagttcatctactgcatcaagttctcaacaacctactgttgaagaaggtttcagtatagaagaaaatcaagagatggatgatccatatgatgttagtcttttcttttgtttgattatttaattgttttatgattcaatttatataatttaatttttctcttatattgtcataggaatatatcaattatgtgagccaaaatgttaatgtcaatggcaagtatctctatttggctgagacaccgcttgagccacaagttttttctaagttggatattttgagttattgga

SEQ ID NO: 234797 - DNA, 335 bp, Glycine max
gcgcaacgcaatggacggggctgttttgatgagcgaaagaacaaccaacctgcagctttaaagattagcgtgcgcttaagaataatgcgacgatggctctcaaaccagccttggttcaagattcacttagaccaagccttgcctacaacacaagctatcaaacatcacggctctggtaatcaaaaccaggaagggtatcgattacccaagacggcgtgagaaaagctgagaaaaacgtatgaatttgaattctcacatgtaatcgacaccatatatctgtatcgattaccaccactaaactgtgaaagtgaattcacagtcatacccctaaatat

SEQ ID NO: 234798 - DNA, 173 bp, Glycine max
catgcaagcgccatctttttagcacacggtgattaccacattttacacttcaccacactgctgcgattcgggtaatgctcacaactacttactaatatattcacacaaaaaaaccactaatttctaatatttgaaaatgtttaactatcattttcatcaaaattgttactttt

SEQ ID NO: 234799 - DNA, 427 bp, Glycine max
  unsure (1)..(427): unsure at all n locations
ggcatagaatatgggaaataaaaatanatgtgtcatgaatcnctgacataagcgggaaccatataacattgtttgaatgacaactgttgtagttggacaacaatcacatagtttgtccaccatggtatgctttatgttcctattggttatagttttggtatgctatatgttcctattggttatagctttggtgctagaatgtttaatttggagtccacaagaggaggatctccatatggtgctggagtttttgctggagatggtacaagacaagcaagtgaaatggagctggagcttgcagagtatcatggcaagtatatatgaaattagcccataaaagctagattgaattctgtgattaaaattccattaagccctcctagctaggtcagcattctagtctgtccaagttggtgatctctaaatc

SEQ ID NO: 234800 - DNA, 160 bp, Glycine max
  unsure (1)..(160): unsure at all n locations
agctttgatggtgtcgagaagaaatcacatgtntgtcatctcttaaaggggagacacaaggttgaaaaatagctgtgaaaaaggttttgaatctgaatttaaacatgtaatcgattaccatatgtctgttttcaataccaacaacgaaactgtggaattc

SEQ ID NO: 234801 - DNA, 441 bp, Glycine max
  unsure (1)..(441): unsure at all n locations
taatagcgacaagtaatcactaaagagctattggtcaataattcatgatgtatagattgcataaaactcagtagaagggttgctagggacttcagataatagaggcttccatttctaatagatgatgggttgttcgtacggtcacctgttgccacttggttgttgttagagtggtgtttgctgagcagtttcttacttagtcattgcaacatagggttgttataacactggtgtttgccgagcttattctagcttaaataattttaatttgtaaacttttaatttgcgaattgaattcaattattgagcattttgaaaccattcacaatgtaaataactntctctctctttctctacttcagctgcacgtgttatattcattctcttagcaatatgggaggattagtagatacttgaatcttgctacatgactttaatttg

SEQ ID NO: 234802 - DNA, 159 bp, Glycine max
gctttcgccatttcgtagtgatgtctggccaaaaacggatcttaaactatttggtttgaaagacatgattaatttacaaaatccattcacacaattgttgaattttatcaagttttggtaaacttgcatgaaactcgtgtaaatttttaacatttattt

SEQ ID NO: 234803 - DNA, 444 bp, Glycine max
tgcatgatttacattctccccctttctcaatgcaaattcttcttatcatcatcaaaatcttcatgatttacaatgtcaacactctatttcattctcttttcccatttccccaactacccaatccccaccgttgagaacaaacacaataacacctccaccattcctcctctcacaaccagccatgtggaccacaaccttgagaacaaggtttttcttacagatggggctgatgataaagggctccatatatgacccaagcatatgacctcattaccatattaatctaaggactattgtaaaccttagcaggcttcaatacctctatcatgttatctttattgttgttttccctaaatgggcttttgttgttataggccctagagtaattaggtttatcttttctttatattagtgactctgtatctgatgtagtttcatgaatga

SEQ ID NO: 234804 - DNA, 441 bp, Glycine max
gaatactcagcttgacctcatgtttccattgggtgatctgaatttttatgtggccaatgcctccattaactcttgccatctaatactctttcccggtgtgcgcaaaggactcactcttctaatctcattattgtcctcaaaatagttcacataggattctctatagcgaaaaaataattatctaaactgtttaaagaacacacaataatacacatcttgatttgtatgactcaaattcacctagatattactgaaaaaattgctaccaaatctcaaatattgaatttgatattccatctctcacaaatattcaccccttctatgtatggatgccgctcactaatatctataatcatatatacatgtatcagaagctcctcgtaaatacatttgtatcctatattattactccctatcacccatctttatttgatctaaact

SEQ ID NO: 234805 - DNA, 166 bp, Glycine max
gcagcttcataagtgagataagtgcattcatctcctaagagtcctcgccgcacacaaataaatgttgtttcttaataaacacctaacaaggggttaaaactacagctatactcaaacgatatccaaatgagctgaaattttgtgagaaacaccataaaatcatgaa

SEQ ID NO: 234806 - DNA, 341 bp, Glycine max
  unsure (1)..(341): unsure at all n locations
cgctctncttagtaagtggttaattaatgtggtggcattgtccgaacgttcttatcaaattattgggtcattttgtccacttggctaaccatataaaagtatcaataagaatggtaatgtggggtttcattttgttatggcagctgattgtgctttttttggttttcaagcttgacgagagtgacacgcccagaaaagtttccatccgtgccggtgatggttttcacaacttgaaggtaaaattttatttattggcttgggtttgattgggatgattatgcttaattatttggtgttgactttgggaacattgttaggagattaagactgtggaactcatg

SEQ ID NO: 234807 - DNA, 161 bp, Glycine max
  unsure (1)..(161): unsure at all n locations
agcttagtgcatgttttatagagaaattaaaaacaatgtcgggtactgtctcctttgacaaaagtaccttatataanaaagtattttattttaaagttacttctttacaaatgtaaataaactcatcctttatttgatcatcttttggatgctaaatacca

SEQ ID NO: 234808 - DNA, 381 bp, Glycine max
caattacaaaatacctttggcctgtttacccccttgtgcatccgaactcgctatcagacatgactcttttaaagttaagcttctaaaatgagtatgtaagggtgtattgtgatcttaaaaagcattataattttaactcactaaaattcaagtatacacccttactctctcctaattttagaaagctctcaaacaagggaaaggtttaattagaaatttccttttccctttttacccacatttccacccgaacttgctatcaaacatgactcttctatagttaagcttctaaaataagcatgcaagggtgtattgtgatcttgaaatgcattatcattttaacctactaacattaagtgtaaatacacccttacttgctca

SEQ ID NO: 234809 - DNA, 167 bp, Glycine max
agcttgacagggttgtgcttacccgtttacacaataaagtgttagcctcctgcttccccaccttaagtttgaccacagttcaattgattccattcattaaaatatatatttccttagaatatataacttggcaataacatatgctatatagtatatatattctaaac

SEQ ID NO: 234810 - DNA, 444 bp, Glycine max
tgtttcttggtaggggttcacacttagttcttggcaccatgtacccttcctgcaagggaaaatacagttagtgacttgattgggcacatgagaaatgataataagtagtaacactgtttgagacactttatgatttttggttaccaaaatattattttttttactccctcaagggtgtgtatacactttgagaaggagaagaaagacaaaaggagaagagagaaaaaaagaagaaaaagatagagagagcagaaaggtaagggtaaaaattgagatatgagaaaaatttatgattgcttggttaatgtcatgtgtgtcccactaagaaaaaaagagtggacctgagtttttcccttagtggagcccaaccgtatatatgttagaaaaagtgtgctgaggacattgctctttgaaacagatatcgaaatttgaaagtaatcattg

SEQ ID NO: 234811 - DNA, 151 bp, Glycine max
  unsure (1)..(151): unsure at all n locations
agcgagtgtattcgtgcattctactaatatatggtattggccatnccaccctacatattaagtcgttactaacaaataatatcaggtgttaatacctgtttgttgatgtgtgcctaggtgcatgaccttattcgtccatgctgtaataaat

SEQ ID NO: 234812 - DNA, 439 bp, Glycine max
  unsure (1)..(439): unsure at all n locations
tgagatgaggaagtgttgaagggtgaaacttcctgcttntattgttgaccatagagtggtacctggagatatgtcgcgggggtcacgagaccttggggaagtcaggtggggtgctattgcccaaaaccaagcttgaccaatcccgacccaacccgggcatagtcggtcagtgagaacctgtgatgtacctaaacaggcgagctcctggcaatcaacagataaaaggaacaaagaccacaaagcaaggaggcttgtggtggctggccagctgtgaattttgtgtgatatgtggattgtggcctctggtaatcgattaccaagggtgggtaatcgattacaaggcttaaaaatgaagacaggaggctaagatggtctctggtaatcgattaccaacgggtgtaatcgattaccacgcttgaaaaatgaagtcatgaaacta

SEQ ID NO: 234813 - DNA, 92 bp, Glycine max
agcttgtgcattcaatattctgatatggtgtccataaccacggtgttcttggagaaaattatccctgcttctaggaccactaccatcagaaa

SEQ ID NO: 234814 - DNA, 316 bp, Glycine max
tttaatttcaaagcaaggaagcatgacttatgcctatggatctaaattttggttttaaatgggcatgaatattacgacatgtttgagagggtttttactagaatttggctgccccatgaggaataccttgcacctaggtagcatggaaaatacccttcaacggtatgaatatatggcataaaaataccttgcaaagtgtgaatgagtagcaagaaaaaaggcctttcaaaatatgtatatttgtggataggtagtataggacccttttttttttaaaaaaatgtacccatgtcaaaagtggcacgaggatgcttcc

SEQ ID NO: 234815 - DNA, 282 bp, Glycine max
  unsure (1)..(282): unsure at all n locations
tgntccaccgcggaagtcacagagagagatcatgatttttncatcncgcagaacatccaacccctgatgtttatatggtctccaaacatcaatgtataaagagttttgttcccatcttttcttctcgcattttattattatcacccacttcctgttcagttttatgttcattaaagtttggtaaaatggtgggtatgacacatatttatgctcaagggtgttgtctgtttgcgttatttttctgatggcttctcctttatttctaactccaacctgataagt

SEQ ID NO: 234816 - DNA, 174 bp, Glycine max
  unsure (1)..(174): unsure at all n locations
agcttacccatctttgcatggttctcatctgagaatcacagaaccctgcantctttccaaccagagtcaaaacactgaaactgacaccattcacactagtacagttcactactccaagaaaactaggtgcctttccactgtcatatgaagcaaaaatctagaaacccaaaagca

SEQ ID NO: 234817 - DNA, 439 bp, Glycine max
  unsure (1)..(439): unsure at all n locations
tcattgaagacaacatcacgactcactaaacacctcttattaccagcctccaaacaccacaacttataccctttcactccctcaggatatcctagaaaaatgcacttgacagctttaggttccaatttgtcttgcctaatatgagcataagcaacacagccaaataccgttagctgttttagactcggtggatggccaaaccaaatctcctcaggggttttaaaattcagagttgttgaaggacacttgttgatgagatatacaacagtcattgctgcttcagcccaaaaaatcttgggtaatcctgcactcaacaacatacatctcactatctccaaaatggtcctattgagtctttcagctaaaccattntgttgaggggtgcccgcaactgtcttgtgccttgcaatgtcattctctttgcaaaactcattgaaag

SEQ ID NO: 234818 - DNA, 432 bp, Glycine max
  unsure (1)..(432): unsure at all n locations
actacaataccccataaagatgaaagatgctgtgtttttcacacccancattcactgcatagaacaacttgttacttccaaactcatgtatttaagcatagctcccatgccattctaagctagatagccaacaaacaaagttgaatgagctttcactcaattaagcgcccttcatggttgcaacataatagaacagtcctctttatgaccactatcaaactcattaattactcgaatcaagatactcgtattaagaagaataggcctattgatgaccatctctctttactgattacgctaaaaacaaacattaagcataaaacaaaaacaataacaatctttaattggaatagaaacaacgcacaaatcacacgaaagggaccaattacatcaaatcccaacacaagagaacaattaactactaaccatgaa

SEQ ID NO: 234819 - DNA, 257 bp, Glycine max
cctcccccccccccccccgcacacccccccccccccccgcctccacccccccaccccccccccacgccccccccacgacccccccgcacaccccatcccccccccccctcccccccccaccccgcacccaaacccgccccccacaccctccaccatcccccccccccccaccaccccccccacacccccccccccccgccccaccaacccccccgcccaccacccgcccccacagactcccccctcaacccccccac

SEQ ID NO: 234820 - DNA, 155 bp, Glycine max
agctaatgtatgccatcgatatgtcaaaaccgatcaattatggttcaaaattgggatgatatagtgaatttgtgtgctaaagataaaggcaccgattatggagctaaaactgctatggatgttgatgaagcggtgagtaaagaaacaaatgaagt

SEQ ID NO: 234821 - DNA, 438 bp, Glycine max
tgccggcgataagctcgtcgattccgaaaactccctctctatccgctccaactgggtctcctccatggtggacttcgtgtggcggaagcgccgcgccctcatggcgcgctccttgatcctccccgtcgagaatttccgcgccaccgtgttccccgtcgtatactccgtcaaggccgtggcctccggtggcgtcgaggtcattagaaaactctccaaggcttcctctacctctgcatccaatgcggatgctgaggttgattcccacgcggagaagctggtgggggtttctgatgtgctcactcacctggctccgttccttgtttcgtcgttggagccggcgttgatctacgaggttgggatcaatatgttgtatctggctgatgtgcctggagggaagcctgaatgggcctcacaatcgatcattgctattctgacgct

SEQ ID NO: 234822 - DNA, 165 bp, Glycine max
gcatgcagcttatgaaatccaactggggataatatttctgttaacacggtatgcttgtagaaggaaaactcggtcactggcccaggcaacatgattgcattctatgctttcttcctctgcagatgcatttctttgtacaaatgggcttttgaactcaccttccac

SEQ ID NO: 234823 - DNA, 452 bp, Glycine max
  unsure (1)..(452): unsure at all n locations
ttataatatcctatgtgtttgcttctttgaacaaagatatatccaattcanaatcctttggaaccttattgactaaaatatagaaaataatgccaacctttttcaagtagcccgctcctaaagctcgtttaaccttcagttttcccttcactttccctgctactatggctttaggatcatcaggatgatcagaaagaagtcgagctctttcagcttcattgtcaacagtgtgagtctatgaagttggatagccttgaatctctcactcgcattcaaattgttatccctgctgcatgttgccaacactgctctgctgtcgcctagattaagtgtttacaaatcattcccatgaagaagcacaagtaaaacacaagatccaatcgaaaccaaatctggatgttcctccatttcctactcaaccatgtacaggaaatcattctcaacctgactaa

SEQ ID NO: 234824 - DNA, 331 bp, Glycine max
  unsure (1)..(331): unsure at all n locations
cccccccccgacnccccccccccccaccccaccccccccccgcgctgtgctctgcacnnnnnnnnnccnccccccacccccaaaggggctttttcccccccccccccccccccccccccaccccccccccccccccccccccccccccacccaccccacccccccccccccccccccaccccccccccaccccccccccccccccccccccacccccccccccccaccccacccccccccccaccccaccccacccccccccccccccccccccccccccccccccccccccccaacccacccgcccaccccccccccccccccccccccc

SEQ ID NO: 234825 - DNA, 155 bp, Glycine max
cacctgcagctgcagcttatggattattagaattttctataactaatgatgacaactgatgagttattatcgtgtgttgtgtacatataagaacataaaattatatatatgagttttctagaaagcgaacaaaaaaagataaaatgatttttaaa

SEQ ID NO: 234826 - DNA, 425 bp, Glycine max
tttcataaccaagacactaaatagtaaataagaggctaaccttttgctcttcatcaagccttaagacattctcatcggctatcttttgttcctttgaagccaattggagtgaccattcctcatatcttcctagaaaaacaaagagattatgtaagaatcctataaaggcacatcataaatgctaatgttttcaaagtctacaagcaccttaagcaaggcagtgtggaagctataaatgttttcaagtatgctgctttttttcctccaaaaactaacattggcgctttagacgttaaagtttactattttgcataatatatgaatattatatacaaatggtttttaataattattgtcatagatgacataatcacataaataaaactgaaaccatttttatgaattgatatttcctcacaacgaat

SEQ ID NO: 234827 - DNA, 174 bp, Glycine max
  unsure (1)..(174): unsure at all n locations
agcttggaggattgtggggtacccattttatgtggttctaggtggcggncnggcgtcctcccaaacttccaccaaaagtaccgctttttatgacctaaagacccgagtgacatttccttctttctaaaatcgtaacccggggatcgactttaaagattactggaaggtcttaat

SEQ ID NO: 234828 - DNA, 436 bp, Glycine max
tcttatccaagacttatcttggcggtaaagctccttcttccatggctgatacccaagaggatggcgcctcctctcacctattctactttgtcttccgctgcatctccatggaggaaaatcaccattcaaggacctcattgaagctcaaagatcaagcctccatataagccccacaagcaagtttccatcaagtggtatcatagcacaagagcttcaacgaggtgctccttaaacctccattaatttttagctttaccttctcttccattgatgattcttcatttttatccatgtatctcctcacatgacttgtgctaaatgctgctaacatgattctttagatctctcaccaattaaacttgctatagaagctagatatgattttctatggtgcaaatatcttgatcttgttcttcgaccatgaatagagttgagt

SEQ ID NO: 234829 - DNA, 165 bp, Glycine max
  unsure (1)..(165): unsure at all n locations
agctttgaaggggcgtagcccacatgtttccatagtttaatctgganagngtatcccactaagactttcttggaaggaatgtatcagtaattccttatcttttgcgcatgcccccatcttccgataatacatctttagaaggttcttggggcaagtagtcccctt

SEQ ID NO: 234830 - DNA, 358 bp, Glycine max
tctcaaagatgtacttgaccgggtgcatgtgggatatcagtcaggtggcatggctcaacatgaagtggcatacacggtgggacgcccaaactaaagcacaacacgttatttccagcggggaggagttcattacacaggccgggaacttcttactcaaatggctgacgacacactatcttttcccggactcaacatggtggcccaggatacaccccattaactgatccaaaatcgtcatatacaagacgagaggtcttaccggcacctgtggcataagcatgggagggttcatgaagcactgtgtgatgctttcaaacgcctcttgacagtcctcgtaccagcgtatggatcggatctt

SEQ ID NO: 234831 - DNA, 296 bp, Glycine max
gctcctctaccgaccaccatacagacactcgcccttccatgcaccaacctgaagcaactgagcacgctacagctcatgctgcaaatattcacaatagacctcctcaaactcagcagcgaaatccaccacaacacagcaatcatgtcccctccagcaacagatacacccccggaaggaggaatcaccctaacctcagatggcccagccctaagcaacaacaacagcagcctgctccttccttccaaaacgctgttggcccaagcacaacatacatctctccaccaatccaacaacag

SEQ ID NO: 234832 - DNA, 166 bp, Glycine max
  unsure (1)..(166): unsure at all n locations
agcttganaaaggctgacaatggtgatgtangagctataaaaaacgttgggacccggttccagttcttcgcgtttctctgcacccgtcggggcccgttttcaaaggtagacaatatatatatatatatatatatatatatatatatatatatatatatatatatat

SEQ ID NO: 234833 - DNA, 331 bp, Glycine max
  unsure (1)..(331): unsure at all n locations
tgtaaagcatcgatangatactgatggggtcatcatgtgtttttatgacgcccacaatttaatgatcatttgctatcgcgcaaagagacacacacagatacacataatctcacacattgagacaaacacgcgctgacactaacacaaacacatactcacacactcatccacgcatacacacactcatacacattaagatacagacacacacacgcactagagtcatacatacataatgtagacagacaaacacacaaacacactgagtacaatgcacacacacaggcacactcactaagacacacacactgagttcttgacacacatacac

SEQ ID NO: 234834 - DNA, 427 bp, Glycine max
  unsure (1)..(427): unsure at all n locations
atccttctatggcnngaagtgtggatcgtacccattatgatcatgcatatgangtacatggggagcagatgactaggacgtggtctcgtgtcttcggagactttatggatatgcatactaaaatacaaagtgtgtttatgaagttttcctttagatcgtgtatagtgatgagtaattcagagctccatgacgtttaactttatagagctgtatatgtctgatcgaggccgtgcccaaatcaaataaacattaaaaatgcagtatctaggatgagatcctatgctgtctctgtcgcaacctatccttcggcgggagggcgacacgagactcacgggtgcgtcttccaagaaaggaaaatgtgcggagtcgccaccaacgtgtatcaaggaaaacgtttgagaaccagacaggtgtggctacgaacttt

SEQ ID NO: 234835 - DNA, 103 bp, Glycine max
agctgttgtcttacagactgaaatttttatcggaaccactgcccccatgacagatcttgtgagcgcggaagatgacgtaaatcttcgcatgtcaacgggtttg

SEQ ID NO: 234836 - DNA, 423 bp, Glycine max
  unsure (1)..(423): unsure at all n locations
tgaaacatgcanagactaacatcgtcttctgtgatcttcctcaatcacggctgacaagatcgttgacacgtggagatttatgtcatcttccgcgctcacaagatctgtcatactgactttttagtcacgctgacggccggaaatacccgagtggttatccgtataaactttttggtgtctataagacgaaaagcctgatagcacgcagagactaacgtcgacttctgcgcccttcgtcaatcgcggccgacaagcccgttgacacgtggagatttaccttatcttccgcgctcacaagatctgtcatactgacttttgagtcacgctgacgggcaaaaatacccgagtggttatccgtataaactntttgctgtctgtaagacgaaaagcctgatagcacgtagagactatacgtgtcttttg

SEQ ID NO: 234837 - DNA, 146 bp, Glycine max
  unsure (1)..(146): unsure at all n locations
agcttgccactattgcactgtcatgctgtaagaataagntagaanagcaccaattagacgccagcatctggcattttttggcattgacttttcatcactacgaaaggttaattatttatcttgaaatgatacttttcacgcacaat

SEQ ID NO: 234838 - DNA, 430 bp, Glycine max
tcttagtttcaaatgatgcagatgggttggtagctactctcatgcactcctctaatgactatggcatcatttctggcgctaaactgctgagagttggaggccatcttctcaattaaatttctggcttcagcaggagtcatgtctccaagggctccaccactggcagcatctatcatacttctgtccatattactgagtcctttataaaaatattggagaagaagttgttctgaaatctgatggtgagggcaactggcacatagtttcttaaatcgctcccagtactcatacaggctctctccactgagctgtctaatacctgagatatctttcctgatggctgtggtcctggaagcagggaaaattttttctaagaatactctcttaaggtcatcccagctcgtgatggaccttggagcaaggtaataca

SEQ ID NO: 234839 - DNA, 156 bp, Glycine max
  unsure (1)..(156): unsure at all n locations
aactgtgatcacatgggcttaggctggttccactattcttttaaactgatgcaatcctaccncctnaagcttattggatagaagactcccagaggattgggctagagcagctaaagacggctttaggcttctcatgtacctcagggtaaatttctg

SEQ ID NO: 234840 - DNA, 440 bp, Glycine max
ttacagcagattttagtaatgaccgactaacctatttttaaaatcacttaatgccattaacctacggaattaaaacaaactaaatggctgagtgtaactgaaattgttggcaaccaaaagtcacccccaacagccaacaagtcagccaccatttggtctcccaaaaggctgatgcctacgttgccaattgggcccttattacaacttgaactaaagcccttttagttgattaacccaaaacatatttttggtcagccaactttacaaggattgggccattatttatacaaactaaacactctaaaattgaaataaagtggtgtcatttagtcctccatttgggccatgatacaactcacaaccttggacttttctccttgaaacttgtgcttgtattcaaatagtatggacagcacttgttgaagagcgtccttggcttt

SEQ ID NO: 234841 - DNA, 175 bp, Glycine max
  unsure (1)..(175): unsure at all n locations
gaccctaagncaccgcagcatgcacttgaaatatattctggatttttaattttttttttntctcaaatgtcataaacatatagccaaatacaaggctttagaaacaaaatataataatctaaatctatgaggatggtggtggaaggtcaaagcattgtcgaacataactaacatc

SEQ ID NO: 234842 - DNA, 429 bp, Glycine max
  unsure (1)..(429): unsure at all n locations
tatttcgttgtgttnttgtagtgtttaggagagaactcttgtggttatttatagagaaaatagttataactgcctgtaatcgattaaatctataaggtaatcaattaattcaatgaagtaatcgattagattatctttttaatcgattaaagtgttattcccaaaaactggaaacaactcaagaacaatgtaatcgattagatactcaaagtaattgattaaagtgttcttgttcacttctaaaacacttatagaaagagaagtaatcgattatatctcatgataaccgagtaaagcagagactcctaaataaatcaatcattgtctaaaaaaaaactatgtaatcgattacgataaggctataatcaattaaaccgatacgagacataactttgcaagcttgaaacaacttgtgtaaccgattacgat

SEQ ID NO: 234843 - DNA, 180 bp, Glycine max
  unsure (1)..(180): unsure at all n locations
agcttcttgaccttgtgatgttcagcatcaaatgaataaaccaacgcattttggtcattttactctgnnctttaaagttcaaagcccatttttcttccttttctcataccctttttcatttcaagtaaaagtttaaatggtggtttgttaaagtatttaaaactcttgaagttttttttt

SEQ ID NO: 234844 - DNA, 445 bp, Glycine max
  unsure (1)..(445): unsure at all n locations
cttatagatgaatggtgctacatttataacattttattatatgatgaaaaaatgaaattaaacttcgtgagaccaaaatgaacgccccatatgttttcaatttcattgatctaattgttttcatgcatgtataatcttgtgtgaaaaattatgatagagttttggattctatttttcttttggtcttccactcaatngaattttaaattgcacgatttaatatctagtaataaaaacattgactacaatatttatggttgatacatattttggttaagaactatcaggtacagtacatttttagtagttgactagaaaggtaaaaagatggaagctaagtcatatttttttttttcaattaagcaaatatatgcttttgtgctttctaccgaaaaatatatgaccatgcatatatatacctttaccaaacaacaaagtaggtggg

SEQ ID NO: 234845 - DNA, 439 bp, Glycine max
  unsure (1)..(439): unsure at all n locations
tcatgaaattnttgtgaaaagttgtgttctaagacctatagtaataattntttaatgccttaatccaataaccaatcggtaaattggattgggttgacaaaaaaaattaaaccaaattcaatttaacccaattaaatttaattagattgaattaaaaaatagacaaaactcgatccaatccaaaacacttacctcctaattactagtgaacaaaaatattaattaacaaaactctataaattatgagtaatgataaatacatatttttatatatcatatattctgttaacacattaattataacttttttatcatatcatattatttattatatttatattttcctctttctcttttatattttttctttaaatataaagaataacaattaagtctatataataaagagtgtatttgattaaaagaataagagaaaaat

SEQ ID NO: 234846 - DNA, 149 bp, Glycine max
ctgcagcttacttgacgggtggaatttctatttagatttttattttggttcttaaactatgctaatattttataaaaatatgttaacattatcacttaagttatattattttgaattttgcactaatgtaattgttgattttcattttt

SEQ ID NO: 234847 - DNA, 438 bp, Glycine max
tcttgaatagaaatcaaaagttcttttagcagcaagacatttcattcttaagtactttaataaaataataaactagtgtataacttccaagtaaaacttaaagatgttgcttcaacaactacttgtaaaatcacaaattctgttatcaaacattttggttttcacttttctaatacaaagtagatgctacttccaaacttaagaagttattttgtaagaactcttagataaaatatcaatgctaagatttttgatcagcaaattttttgcaaacataagataagtacgtaataaactgaaattaaataagaagtagtaaaaaaggatagaagacatgaagtaattatattgattcaccccaacctggactatgtctagtacctacacttgtaggctttctctactaagaccaagaacacaaccattgatgcaatcctt

SEQ ID NO: 234848 - DNA, 173 bp, Glycine max
agcttatatatcaaagatctgataatttataagttgtcggctactcaaactcgggcgataattcagctgctgtttttttgactaaaaaaaataaaagtggaagttgaagcaaacacgtcgacattaagtatttagtcttgaaggaacatgtcaaagcaaattaaatcatcatt

SEQ ID NO: 234849 - DNA, 445 bp, Glycine max
  unsure (1)..(445): unsure at all n locations
ntgactntgatctangagccatgggcatgatgagaccttgattgcgaagagatgttgacaaacaaagagctggaagccctgaatttgtgaggttagatggtgcagtacagaagaattcaagcactcaggaactaggaggggatcttcaacctactccaagagtgatagtagtttagtacagagtttggttgggttggtggacctaaccataagagaaggaatagaggggaataataaaagagagaaaattcaggcaattgcttaatgtggtcttgctcttcatttaagggtgataccttctcttccaagttaagtggaagagggaattaacaagggacaaattcaagtatgtgaaatcccaagctgataagagtagagaggtggaatttctagtgggtgattgggtgtatttgaagaatgaaccttataagttgagaagtcatta

SEQ ID NO: 234850 - DNA, 182 bp, Glycine max
gatcttaagcacctgagctgcagcttatcagacaaaaattagattttagatggagatcaaacaagtatcgattaccaacagttacttaatgttttaattcaaattttaaagcttgtaatcgattacacacatactgtaatcaattaccaaaggagattttcagaaaatattctcaacagtca

SEQ ID NO: 234851 - DNA, 440 bp, Glycine max
  unsure (1)..(440): unsure at all n locations
tgaactgaggaagtgtggaagggtgagacttcctacttttattcgttgaccacagagtggtacctggagatatgtggcggnggtcaggagaccttgnggacgtcaggtggggtgctattgcccaaaaccaagcttgaccaatcccgacccaacccagacatagtaagtcagtgagaacctgtgatgtacctaaacaggcgagctcctggcaggcaaccgataaaaaaacaaagaccacaaagcaaggaggcttgtgtggtggctggccagctgtgaatcttgagtgatatatgggatatggcctttggaaatcgattaccaagggtgggtaatcgattacatggcttaaaaacgagatcaggaagctaagagggcttctggtaatcgattacaaaggggcgtaatcgattaccaggcttaagaaggggtctggaatgttg

SEQ ID NO: 234852 - DNA, 164 bp, Glycine max
  unsure (1)..(164): unsure at all n locations
gctgcagcttggccaaatgctgactatataacttgccatttganatgtataatatctgaacagtacagaattgtcaccaaatgaacaaaaaggaaggaaaggaaaccacgacctaaaatggtcttctccctttaattaccaaccaaaatcccgtgcgctagcga

SEQ ID NO: 234853 - DNA, 51 bp, Glycine max
tagttcagcttatcatcctcaaacagatggtcagactgaacgaaccattca

SEQ ID NO: 234854 - DNA, 169 bp, Glycine max
gatccttaagtcacctgcagctgcaagctgctctaaattacattgatgtttgtatttatgggagaggttgatgttccgtccagctcagggacgacgagatactgatttccaggaggaaataaggcgccggcggtgggcatcactggttactcccatggccaagtttgat

SEQ ID NO: 234855 - DNA, 437 bp, Glycine max
agatattgaacaacggaagctcttgagagagtcaaatggtcttaacttttcacacggatgagcgactcaggcttataatatatcgatacgctcgaaattaaacatcgaaaactctcgcgaaattcaaatggtcataaattttcatacggatgtgcgattcgggcgcatcatatgtcgagaagctcgaaattgaacaacggaagctcttgagaaattcaaatggtcataacttttcacacggatgtccgattctggcggatcacatatcaggacactcgaaattgaacaacggaagctcttgagaatttcaaatggtcataacttttcacacggatgttagattaaggcgcatcacatatagagacgctcgaaaatgaacaacggaagctctggagaaattaaaatggtcataacttttcacactgagggcctattct

SEQ ID NO: 234856 - DNA, 157 bp, Glycine max
agcttgctttcacagttcactctctttattaataggccttctcttttactcggtggagtgcgggttgaagcaatgggaacttgacgagatcacgagctgaatccaacagctgtactttgggcagtacctgaggagcagtgagtgcaggttcctcgtc

SEQ ID NO: 234857 - DNA, 457 bp, Glycine max
  unsure (1)..(457): unsure at all n locations
aagctnttcgattcattctatgtacccgtagggggccacattgtgtttcgtgcattnttattctcgctttggttactttttataccccctgttgacgtgcttaagccattttacttaagtcatttctcgcttaacttaaaaataaaatcaatttccaccgaacgtttgaattgtattatccgttaacttcggttaaaatgaattccgaccgttcagtcgtgccgtaaccacgttggaaatcaaaaagaggtaaaaaattaaatataataatcaaaaaatatttttttagtaaagtaaagcgaanaatcaatcggacgttttctctttgggatttctcattcttaaatcgaattgactaataactaaagtgaaattaaggctaaaatcaactcgcctagtcaagctcgtccacaaaaatagggctttgaagttggcatttcaattcctcactaagtaa

SEQ ID NO: 234858 - DNA, 95 bp, Glycine max
agcttctcttttcatttacgagggtcttgatatattacgcgactcagcactccctcctccccacattccttacggtttcaaatccaacgggaaag

SEQ ID NO: 234859 - DNA, 420 bp, Glycine max
tatgttttcaattacgagcgtctcgaaatcctactgtacacaattggacatccgagtgaaaagttattgtcgtttgaatatgtttagagcttctgttttcaattacgagcgtttgaatatcctacgggacaaaatcggaaatccgagttaaaagttattgtcgttagaattttctcattgcttccgttttcaattaaaagcatctcgatatcctacgggacacaatcgaaaatccgagtcaaaagttattgtcgtttgaatttgctaggagcttcagttttcaattacgagcgtctagatatattacaagactcaatcagacatccgagttaaaagttattgtcgtttgacttttctgagagcttcagttttgaatgtcgagcgtctcgatatattacagggctcaattggacatccgag

SEQ ID NO: 234860 - DNA, 159 bp, Glycine max
agcttcatgatgaatcaagattgattcatggagtttgatgataaattagtaaaggtttaggaataattattcaacccccccttcttaattattctgaggccacttgatccaacagtagtgtagagggcacagccgagagatttcaatgttggcaagcca

SEQ ID NO: 234861 - DNA, 441 bp, Glycine max
  unsure (1)..(441): unsure at all n locations
tcattgtgaatcanaggtgattcacaggtgttttgatgataacaatgatgataacaaaagatgatgacaaaggtgatgacaaaaggctcatagatcaaccaaagaacaactcangtgaatcaagaattattcaagagttcaagataagaatcaagaagaaagtctaaagacaagaatgaagattcaaggttcaaatcaagatcaagattcaagaatgaagagaagactcaatcaagataagtattaaaaagtttttcaaaaactttgaatagcagatgagtttttgataaaacctttttccaaagagtttttactctctggtaatcgattaccagattgttgtaatcgattaccagtagcaaaattggtttgaaaaagttttcaaattgaatttacaacgttccaattattttcaaaaagctgtaatcgattacaatattt

SEQ ID NO: 234862 - DNA, 158 bp, Glycine max
agcttgtaaaatttaaattcaaatgtctaaaagttgttcaaacgttctttctaagatcctaggaactaagtacatcattcttcttgaatttttggattctggacttggatcgtgctcatcttaggcatcatcaaaacttcatatcatatatgcttcta

SEQ ID NO: 234863 - DNA, 440 bp, Glycine max
  unsure (1)..(440): unsure at all n locations
tcctcaggaggaagaaaagatatattaaattgaccttctttgcccaactaacctggtacaaatggaattaacatcatagaagtcaaattattttagtaaaatggatggggaaaaaactagtatttcatacagtgcaagatgtaggcaaataacagtacaaataattgtctaagcatatctttagtatatatgagcatttcaacagccaaaagttctgtacaaaatttaaatagtattttttaatttaaagataattgtgataaaatagcatttaataagcctgcactccattatttcactaccctaatgtagatgctttaacaatgttataacaagatgcttaattattataccacattgataattactgtttttaaaaacatcaattacccctataattgccttatcaatgatgttgtaggttntaattaagtgatctt

SEQ ID NO: 234864 - DNA, 156 bp, Glycine max
cagcttcttatccaggctcatcttgtggtgattctctcttctctcgatgcttcttcattttttctccatgtatctccacacatgtcttgtgctaaatgtttttaacatgattctttagagtttccaccgattaaacttgctatagaagctagattt

SEQ ID NO: 234865 - DNA, 441 bp, Glycine max
tctccccttatttcctataaatagggggagaagtgatatgaaaaaatgtttagccctcctggtaattcgagatcacttgaaattagtcaaaaaaattgtttccgtgaagaaaatccaagtcgaggcgcttccgtaatgtttccgtaacgtttccgtgggtaatttcgcgaagattttcaaccgttcttcgtcgttcttcggtcttcaaccggtaagttcctgaaatcgaacttttcaattcattctatatacccttagtggtcctcatttgttttcacgtgcttttattttcatttcatttactttccgtaccctcttttgacgagttttagtcatttactcaagtcattttcttgcctaatcaaaaaataaaataaatttccacccatcatttgaattgtaacatccgctaatttctgttaaaatgaaatccgatcgttc

SEQ ID NO: 234866 - DNA, 165 bp, Glycine max
  unsure (1)..(165): unsure at all n locations
agcttacttcatcgtatgtatttttntttttaaaatatccgnaccgaccgctcacctatatataaggggactggacatgaagcgttttgtatttctggaaggttttgttctatagaatataggaaagtttagtttgaggctttgagccaaataaaattactataa

SEQ ID NO: 234867 - DNA, 439 bp, Glycine max
  unsure (1)..(439): unsure at all n locations
tccatctctcagcaatcacccttactgcatctcctttgtcctttaacataggacagaaaacttggacttttggaccatgtgcatcatttcctctgctcttgccaagtactaaaaacttgcatctctcctcaacagataaaacccatttagaatcacttctcaacatgtcagcaagcaattcagaagcaatcgaattctcaccaaaatggagagaatccagatttggagcggtaatctcataagcatctgcaagaacccttttacgctctaacttagcacagtcatcattacacatcagttttctttgtctaaggggagcttttttgccatttgcagccacaggttgaagaagcacaggcaacttttgaataatggaagcttcatgtaccacatcagcattataattagcaccagcatcacaaggaacattntctggtat

SEQ ID NO: 234868 - DNA, 161 bp, Glycine max
  unsure (1)..(161): unsure at all n locations
ggatcctctaancgactgcagctgcaactttagataatcaccatgtatacaaaagcatgcggattaagttagactcataccaaattcaaggtgataccaaagtctattttaagacaatgtgttgaatatcccgcatcaactagtaatatgaacaaaatagt

SEQ ID NO: 234869 - DNA, 431 bp, Glycine max
tgggatgttggaaatgctcttgtggaagaggaagataaagaaatggcatttttccaaggctacacgaaatacaaaggctaaaacactcaagtgcttttgctctcggaaaaggaagcgtttctcacactctagatgtcgtatcgaagttcacaacggtcagatcacggacatctgtccattgaaccaccacaccgaatttcgagaaaatccaacggttaaagaatgtaggagggcacttttaccgagacaacttcaggtagcttccttgagaagcttttctcgagaggcttccttgagaagcttcctcgtgaggcttctttgagaagttccctagagaggcttctatgagaagctagagttttaactacccacacccctctaataactaaactcatcttctcgaaaataaaacacggatcaaataacaaaat

SEQ ID NO: 234870 - DNA, 145 bp, Glycine max
agcttgaccaatcccgacccaccgtgcttttcggcaggggtgtaatcgattaccaggctgaaaacgaagtccggaaacttagggagcctctggtaatcgattaccagcctgcgtaatcgattacacagaggaatgggtcactggt

SEQ ID NO: 234871 - DNA, 422 bp, Glycine max
  unsure (1)..(422): unsure at all n locations
ntgagccaaaatcctgactcaccatagaccttgacctcaggtgagaatgtcaattcttaccctcggaagcaaaaaaaaaggggagagggaaaatttccaatcaaagaggaagcaaaaaaggagagaaggaaaatttccaatcaaaggaaaaaaagagaggaaagggaattcccaatcaaagagtgggagaaagcaaaaagaaaagaaagaaaattcccaatcaaagaatgggagaaagaaaaaagagaagaagaaagggaagaaagttcccgatcaaaaaaaaataatatgcagaaaggtctttggaccggacaatatctgaacaatacagaattgtcaccaaatgaataaaaagaaggaaagggaaccatgacctanaatggtcttccccctttagttgccaggcaaaatcttgtgcgcta

SEQ ID NO: 234872 - DNA, 166 bp, Glycine max
  unsure (1)..(166): unsure at all n locations
acctgangctgcagctatgatataaaaatgtctctgatgatgacatttccattggtttggaccccaatggatggccaaaatgaagcatttggaggtgcttcaactgggtcgttggctgcaaggttcaccaaaacattatattgaagtggagagtgaagaattcttg

SEQ ID NO: 234873 - DNA, 436 bp, Glycine max
ctgcaagatgggttttgtcaaacgcgtaggtggtgataatatccagaacagaatttgggccatttggggttttcaaattgacctttttggagagtttcctagcaagttttggggacaccccacatgagttgatgaggtatggcacggtaaagttgtcacctttgtgttggtttccatctaattcagaatcacaagaggttcctgaagtgaatgaactgaagaaaagaaggaaagcattgtgtttgtgttgcagcagagaacccaattggataggggtgcttctgtggtgtgtgaaagatgcagtcaaccttacaatgagaaaattagtaaccatttattccctcgcagatttgagtgaacgttgtcgatgatgtgatgaaggggcaatgcaatacaggccaaagtgaaagcataagcaagtactgtatggcgctgt

SEQ ID NO: 234874 - DNA, 170 bp, Glycine max
  unsure (1)..(170): unsure at all n locations
nagctntgagcaacttcaaacaacaatatctttttactcggatgctgactgagttagcaaattcaaacgacaataactttttactcgggtgtctgattgagacccgtaatatattgagacgctcggacttgaatgccgaagctctgagcaaattcaaacgacaataactt

SEQ ID NO: 234875 - DNA, 426 bp, Glycine max
tcaacattcaatttcgagtattccgatatattacgggacttaatcggacagtcaagtaaaaagttattgtcatttgaatttgctcagagcttcggtattcaatttcgagtgttccaataaattacgggactcaatcggacagccgagtaaaaagttattgtcgtttgactttggtcagagcttcggtattcaatttcgagcgtctcgatatattacgggactgaatcagacatccgagtaaaaagttattgttgtttaaatttcctcagagcttcggtattccatttcgagcaactcgatatattacgggactcaatcagacatgcaagtgacaagttattgtcgtttgaatttgctcagagcttcgataatcaattctgagcatctcgatatatcacgggactcagtcagacatccgagtaaaaa

SEQ ID NO: 234876 - DNA, 162 bp, Glycine max
  unsure (1)..(162): unsure at all n locations
agcttatgccctgttcgcagttttgggtaaaagtcatatacggtacanctaagacttggattttatgatggtatgaacgcacagggaaaacactttttacatatgttaaagatataaacaataaccattttctccatcaattttttttttcaaccaactcat

SEQ ID NO: 234877 - DNA, 444 bp, Glycine max
  unsure (1)..(444): unsure at all n locations
tccctttcgccattcaacttcgactcctcacaatcacaatcaagtttccacctccaattctgtttcttcctttgccaaatcgctcctcccctcaccacgtcgtcttaagcttgatccttccaacaagctctacttcccttgtatgcttccctcttcttccaattcttcttttatccagtcttctatctttcactgtactactttgcatctgctgggatatgattatatatgatccaattttatttgtggcttttacttgtttcgtttcatgttggagaataattctgagtatagatttgattttggatcaattttgacatgtttgattatacatggggaagagttcataattgattttggatccagaactggttctgagttaaagcaattttgagttacttttgtgttcgatccaaaatnttgcattgaattttacttctaact

SEQ ID NO: 234878 - DNA, 164 bp, Glycine max
gatcttaagcacctgcggctgcagcttatactttcattctgagctgttactatctgctgttgagaacattttctcctatttcttaaccctttttgtcaccattttaattactgattagccttaattgtcaaattaattatgcagttttaacatttgggcctatt

SEQ ID NO: 234879 - DNA, 448 bp, Glycine max
  unsure (1)..(448): unsure at all n locations
nttccaaatattgttctctaaaagtgtgaagtggtatcatttcgggaatggtctcgctctgtggntttgtcattgttggctagcgaactgccggcgttgaccaccgagaaattttacggtgaattcagggttaggtgcacctcgttgagtgtgacccagcccaagtggtctcaagagcaaaagctctgtcatgcaccctcacacactgttaccatccgcgtgtgtggatctcacgtgccgccgtaacgccgttgcgccaccatcgtcatctttgtcggttccttctgggttcactccagcacctgtttggctccaattgtcacatcttagaagaggtctgaagtctagccctagtttgtttggcttcttgtttctttagtaactcctctgtgttcgaaaatgtcatccatgcagtcttttgcaatgttgtccagtataggccctacct

SEQ ID NO: 234880 - DNA, 168 bp, Glycine max
agcttcaacattcaacttcgagcgtctctgtttattattcgctcaattagacatgacattcaatttcgagcgtctcgattgttacgggactcaatcacacatccgagtaaaaagttattgtcgtttgaattggctcagagcttcaacattcaatttcaagcgtctcga

SEQ ID NO: 234881 - DNA, 437 bp, Glycine max
  unsure (1)..(437): unsure at all n locations
ntgagcanattcaaacgacaataactgtttactcggatgtctgattgagtcccgtaatatatggagacgctcgaaattgaatgttgaagctctgagcaaattcaaacgacaataactttttactcggatgtctgatatagtcccgtaatatatcgacacgctcgaaattgaatgttgaagctctgagcaaattcaaacgacaataactttttactcggatgtctgactgagtcctataatataacgagacgctcgaatttgaatgttgaagctctgagcaaattcaaacgacaataactttttactcggatgtctgattgagtcccgtgatatatggagacgctcgaaattgaatgttgaagctctgagcaaattcaaacgacaataactttntactcggatgtctgatagagtcctgtaatatatcgagacgctcg

SEQ ID NO: 234882 - DNA, 161 bp, Glycine max
acctgccgctgcagcttttagctacctttgaaattatcgggctcttatactctctcccaatattcatataggctctctccactgagttgtctaatgcctgaaatatcttttttgatggtcgtggtcctggaagtagggaaatttttttctaagaatactct

SEQ ID NO: 234883 - DNA, 170 bp, Glycine max
gatcttaagcccctgcgctgcagcttcttgcgaaaaaatttatcgcagtgtgtaaatgtttttttttgccaaggagggctaatgttttcgtggccgacaaaatgagaacatgccagtgtcggccgacacacaatcccgcacgaaaaaccctagccgaactacattgtaat

SEQ ID NO: 234884 - DNA, 433 bp, Glycine max
tcaacattcaatttcgagcgtctcgatatgttacgtgttatctttatcagacatccgagtaaaaagttatggtcgtttgtattggctcagagcttcaactttcaatttcaagcgtctcgatatgttacgggactcaatcagacatccgagtaaaaagttatggtcgtttgtattggctgagagcttcaactttcaatttcaagcgtctcgatatgtttcgggactcaatcagacatccgagtaaaaagttatggtcgtttgtattggctcagagcttcaacattcaatttcaagcgtctcgatatgttacgggactcaatcagacatccgagtaaaaagttatggtcgtttgtattggctcagagcttcaactttcaatttcgagcgtctcgatatgttacgggactcaatcacacatccgagtaaaaagtta

SEQ ID NO: 234885 - DNA, 151 bp, Glycine max
  unsure (1)..(151): unsure at all n locations
agctgtgnggctggaaaaaaaacttataacacttttgggttgctattattactattaaattctgatcaatttttcctcttcaccaattactctgtatttgttgctattaattcatgcatgcttagggcttgattaattgtctctgcgctta

SEQ ID NO: 234886 - DNA, 441 bp, Glycine max
  unsure (1)..(441): unsure at all n locations
cttgagggtgcgtagcccaccatcttttcatagtagagtatcgataatgtgtctaccatcacgattatcgtctccctttccatcattgggggtaccacctgngccgccagatccctccaccttttaggcgtgttctttgaaagatctgtccccctttttgcacatgttatgtagttgcatcctatccgaaaccatatcaaaattgtactgatactgcctaacaaaggcaaccattaggtccttccaagaatggactcgggaaggttccaagttagtgtaccaggtaacagctaccccagtaagactttcttggaaggaatgtattagcaattcctcatcttttgcgtattccccatcttctgacaatacatctttagatggttcttgggacaagtagtctccttgtacttgtcagagtccagcaccttgtacttgggaggg

SEQ ID NO: 234887 - DNA, 166 bp, Glycine max
  unsure (1)..(166): unsure at all n locations
gaccttaagcaccgcggctgcagcttttaactttgtttttgcattggaattctgcaaaaagttcaagtggagcgtacatccacttggttgttcaaagagaacaagggagggngcatcccttgtggatctttgcttgtaaaggatgttacaaggttattggaaatct

SEQ ID NO: 234888 - DNA, 449 bp, Glycine max
  unsure (1)..(449): unsure at all n locations
tgagacttaattgctntgttcttcccataagcagtattcagcaatgcactctcacacatctccattacaagcctttcttcttcctgaacacacatggtcattaattcattgatagaccatttatctttatgtgtgttgtaggaaatcttaaatggcccatatgcatgtggaagggtgttcaaaatgaaatgcactaggaaggactcagacatatcaacctctagtttcttaagttgagctgaaatatctcgcattttcatgatgtactcacgcacacctttcacactggtgagccgaagagaagaaaacttcatgatcaaggtgcttgctaaagtcttatctaaagtgatgaactgatcatcaatggccttaagcaagtctcagaccttttcatgctggtcaacagaaccacgtatcccagccgagatnttggtcttaatgaacatcac

SEQ ID NO: 234889 - DNA, 156 bp, Glycine max
acctgcggcatgcagctttaactatcgctctccatttttaaattgagaatcctgatttttccttcctttagcgagggaaccatttaacagacgcccctccatgctagccaagagttggtgcaccacaaacaattcttgcgccgctcttttcacatc

SEQ ID NO: 234890 - DNA, 434 bp, Glycine max
tgtctttggcctacatatgatgcatgcatgatttattactcggaggagccaatttcagctaaattggatgaaggcaagagtgatttcgaaaatctgcactattatgcagaaaattgttgttgaaatgtgcagcagaattttgtgcttgtgtagaaaatgcgcattgctggttatgggaaaggtattacatattgggttctggacgttctttagcagatctcaatggtcaaaatgtaaacttatgtattacggacctccagtaaaattttcgagtcgatccaacggttcacaaatcagaatgaagaaaatgttactggggtatttgagtaaggaaagttgtggcgttgggatgtgctttgggcagagttttctgcctctgccttgttatcttggattatgatagttcatgatgctaggatattgaatttcttgga

SEQ ID NO: 234891 - DNA, 141 bp, Glycine max
  unsure (1)..(141): unsure at all n locations
agctntgatcttccaccaccgccgtttcttatcttatggtttggttgatatttttccatgaagattgtatggatgtttaagttatatctgtaaactttaagtttgatacgcactttggctttctgttgatgcccaaggggg

SEQ ID NO: 234892 - DNA, 439 bp, Glycine max
  unsure (1)..(439): unsure at all n locations
tctaaactntatacaagaatgaagctctgataccacttgttagacaagtggcctcagatatcttaagaagggggggttgaattaagatatcccaaattactttccccaattaaaaatttatttcactttcttttcaagttatagattcccttaacaatgaacttcttaaatattaattcaaataaaacaatttgaatatgaatgtaaagcaataataaacaaaggagattaaggaaagagaaagtgcaaactcagatttatactggttcgaccacacccttgtgcctacgtccagtccccaagcaacccgcttgagaatttcactatcttgtaaattctttttacaagttctaaacacacaaggacaatccttcctttgtgtttagaattcctttacaacaagagacccacagtctcttaatcccttagagaatgagta

SEQ ID NO: 234893 - DNA, 163 bp, Glycine max
  unsure (1)..(163): unsure at all n locations
agcaccgcagcctcaactggggatgtgcgctactgtttgtccatttgncttgctgggngccatggcgaacatttctctctcaccatgggaggagctatctttgccgccagatccctccatcgctgcgcatattctttaaaagcttcaccctctttcttgaaca

SEQ ID NO: 234894 - DNA, 430 bp, Glycine max
tctacttatgtggcagggcgggcttccttcaccttcttgtctccttcgcgaactttgaccattattcttccttcccgcgatgcttcttttcatgtccgcctgagtgggcttatagcctaaaccatacttcccacgatttccttgggtatttatcaggctagttatgccgccgttgttttttcctaaacccatcccgggttcataaccgttccccaacataactcgggccatcattatcgctgcatcggacagacaaggctgcccaaagagggagtccacggaggaaatgctgaccacctcaaaagactggaaagcagtttctaacgattcttctgcggcttccacataaggcatggaggatgggcagcttaccaagatatcttcctcgcctgacacgatgaccaagtgcccctccactatgaatttcagc

SEQ ID NO: 234895 - DNA, 90 bp, Glycine max
  unsure (1)..(90): unsure at all n locations
cattggcntaatacataatacattcattaattcaaaaaaaatggcgaatagatccaattatcatataacacacgtttcagttccagaatg

SEQ ID NO: 234896 - DNA, 443 bp, Glycine max
  unsure (1)..(443): unsure at all n locations
ctaactactagcttcttagtaaatgtgagaagtcttgtctttaggtctatataatattatcagcatttgggatattgagaagactaaggtccacctcataaagctacatagaattcttaatgctagtttctaggagctcctgngatatatggttgggttaaatggttatacctaacggtaacgcctgatgcttttctgtatgtgatttatgtggaagtgtttggatgtgtctgtttttaactgtgtatgcaaacgttcttttgttaaataaatggtcataatacataaactacttcatcagatatttattttaatgctgttggcgcaatggtaaagttgcaccttggtgactggttggttatggtttcaaatccgaaaactacccntttgcatatgcaagggtaaggctgtgtacaataaccctctcccatacatttgcatag

SEQ ID NO: 234897 - DNA, 85 bp, Glycine max
gcaatctcaaacaaagaaatggaggaagtggagaaggagaactcggagaccttcaagaaagctgaggtgaacatacctctactag

SEQ ID NO: 234898 - DNA, 406 bp, Glycine max
  unsure (1)..(406): unsure at all n locations
tggactcncccaacgacaatggcatcatctcttgccctgaatcgttcggagttggaagccatcttctcaataaaattcctagcctcaatacgagtcatatcaccaagagctccaccattggcagcatcaatcatactcctcttcatgttgctaagtccctcatacaaatattgtaggaggagttgctcacaaatttgatggcgagaacagcttgcacacaatttcttgaatctttcccagtattcatacaagctctctccactaagttgcctgatgcctgaaatgtatcttctaatggcagtgcgcctagatgcagggaaaacattctccaaacaccctctcaacgtcatcccagctggtaatggacctgcgagcaacgtaatacaaccaatctttngccactccc

SEQ ID NO: 234899 - DNA, 157 bp, Glycine max
agcttatgctaactagatggaaactcattctgtgtcaagacatatgatagctcaaccgggtacatccaccgtagataaacaggaccacaacatttgatttctctgactagatgcacaatcaagtgaatcatgatgtcaaagaaagcagggggaaaat

SEQ ID NO: 234900 - DNA, 426 bp, Glycine max
  unsure (1)..(426): unsure at all n locations
tcactattggctntcaaaaataaagtccatgtgaaccttgagtaatcatctatcataactaggacatagtaattaccaccacaacccatagtgtttcgaaggaccaaataagtcaatgagaagtacttcaaggggttttgaagtataaacaacgtttgtactttgaaaacaagtattaacttgcttccctttttgacaagcttcacacaatttatatttctcaagagtgagttttggaagaccacttactaagtcttttttgactagatgattgagatgatggatgtttatgtgtgctaccctacaatgccataaccaagaatgatgaatcttacttaccaaatgtcataccctaattacaatcggtgaccatgtgttcgtagggatgcgaccttctcttgatcacttctaggtacttgacactca

SEQ ID NO: 234901 - DNA, 169 bp, Glycine max
  unsure (1)..(169): unsure at all n locations
agcttctgttatgaatttcgagcgtctcgacatactattgngcccaatcaacatgttttcgatttcgagcgtcacgattattacgagacttaattggacatacgagtaaaaagttattgtcgtttgaatttgttcagagcttttgttttcgattttgagtgtcacgata

SEQ ID NO: 234902 - DNA, 454 bp, Glycine max
  unsure (1)..(454): unsure at all n locations
tgtagaatggctagacatgatacatgtcagggtttggtttgtgctcaagataaaagggatgccccacattatttccatgacacaaatgcaaaaatgatgatttggaaattttatgcaaaactggtcatgcatgcacctatgtggacactcaagtgtcaaatttttatggtcatgtgatgctagggctcaggattcatttcctctattttaaatcaacccaatgtttccaaaatatgttcttttatcaatttgtgcattcatccgagtccatttcgggcgtccggggaaaacttcacagcattcacccttcaggtgtatacacattnttttcaaaaactagttatgatcaatgaatttttntcaaagaaaagttggaaatcatctcttttcaaaagcatgtcggttnttagctagacaacttattnttcttttttctccttcttttttttttatc

SEQ ID NO: 234903 - DNA, 160 bp, Glycine max
atgcaagctttgactcataaaagtcactcactttcctatatatattgaaccgcggccaagtgaagatcagattacggcaagattgaccaccatagattatgaacccccttcattttggcgacccactagactttttgtgtggtgtgggtatgtcattcaa

SEQ ID NO: 234904 - DNA, 440 bp, Glycine max
tcggtgaataagttaatattaaggtattcctcttttatttatctctaatttgaaggggtaccaattttactctttggtgtcatcttaaaaatttatggtaaatgttctaacagttttttttatacaaaagaaaagtcataagtaactttatataaaaagctatatgaccccccccttctaatttttaagggaatatcaaattggcttttcagctcacctagtaaatatttaatttttaataaatgtatgccttgagttttaattatatctctcagcttaaactttacagcattgttgttttaaaaaaagaggaatcaaattcctatcaaagattctctttcccacattggaatacttttcgtgtatactaatacaaaagagggaatgttaataatatttgattaataatattatattagataagtgagaggaatattgtc

SEQ ID NO: 234905 - DNA, 148 bp, Glycine max
ctcagcttacactttatagtatttcttttaacatagacataatttttttactatgtttattctataaagaattatttaatttttaaaaaatgcaacacataccactcatttttactattctcaatacaagaacctcaaaactcaaaaa

SEQ ID NO: 234906 - DNA, 435 bp, Glycine max
tgtcaaacctaacacctgcgatatattttaaattttttacgggaaacaaaaattacggcggaaaaattaatcaaacccgaaataatatatagaattgtggacatttatttatctatatggttattcaaaacttgacatagaaaaaatatttatctattaccattggtgtaatttatttgtctaagaacttcacagcaactgcaagagaatggctctggtggtgggggccaacgacaaagtgacctcacatcttggttatttggtggctgagtttgattctcttgtgggggatccacgttattaccaactcctccttctccaaagaaaaaaatatcatcgccatgtatgaagaatcgatcaccttggccttcggggatcagttccttacccgcccccctcggtggaccctcttcctcctccacatcaacaacatca

SEQ ID NO: 234907 - DNA, 169 bp, Glycine max
  unsure (1)..(169): unsure at all n locations
agctgtagaaaacaaactttgctacttgtaatngattacagnaacgctgcactcacatctctgaacctctattctctgtgggcgtttatggacatcactctttgttatcatcaaaacaacttgaatcaatcttgattcatcatcatgaagcttgcttctacactatgcc

SEQ ID NO: 234908 - DNA, 442 bp, Glycine max
tttacttcatcatcaaagttctgtctgtgctgctcttattccttcatcagattgccaactgtggtcaaagtaccattgacctgtctcccagcatcagagacagatagactaccagaaagcattggtgtgctcccaccaggtgtttgagatcccatggaagtagcatcttcagaatcataaccacgaggcaacacaaaatcacgtcttacaggctgaactgtagcattctcaggagcaaggctctttctagcagcaacaagactcatctgcattgaaaaagaaatcagagtcttttatagaattctaagttggatatgaaacctttgtgcatatgacttgtaaaaaggacaaaaaaattgtggcagattagaaaaccaacagactcgttaacttatcaggaacacttttttcttaatagcaatgacaaattcaaggctgtatt

SEQ ID NO: 234909 - DNA, 140 bp, Glycine max
caccatgaatatgccgttgatgaagtcttttactttaccttggggctactccatgatatccatactctttccagtaacatagctgaagctagcttgcaaggaaatcactacaagagctgcaagtcttgatggaaggttgc

SEQ ID NO: 234910 - DNA, 442 bp, Glycine max
  unsure (1)..(442): unsure at all n locations
tccattccacagagcatgtatgaggggagcattntagtctttgctttcgcgcagcttaggaaaaacggcatttcttcttctttctttcttccaaagccatttctaaagttccaagcactttctgcatcacccacagccaccattagccaccacaaaccatcgttgttctccacaccgagaggaacccttcaaccgaagtggaatcttccaacttggcttgcggtttcgatagagagcgaaaccctaatctgaccttttgttttcttttgaggtaaccatggttctatgcttgtttctttttagtttcatcttgtctttgcatcttttctaacattggaaccaccattgtatgtctcatgcttcctttgaaaaaccttagagaaagaaaccttggtaacgttatcctttcatgacatgcatgttattgtcgtaacctacactg

SEQ ID NO: 234911 - DNA, 158 bp, Glycine max
  unsure (1)..(158): unsure at all n locations
agcttgtanaggaagctttttgaggattatanatgaanagaaaaggacacatgccggacattttcaaaatgctttcttgatttgcagcagtcatacaaaagtgaaaaaataagtcaataaaaagtatagacataaaggtttccatgagaagaacatat

SEQ ID NO: 234912 - DNA, 448 bp, Glycine max
  unsure (1)..(448): unsure at all n locations
tgtaggcctaggatcttgtcatagaggatttctttgcttcttggaagatgaatggcagcgtaatggagaaggaagagagagaggagacgccacttcaaggagaagatgagtctagaagaagctcaccaccataggaggccatgaataagagcttggaggaagaagaagatgaatgaagggagaggaagagaagagcacgaaattttgtgctctaaaagagctataaaatctgaagtttaattttcaaatgatcaaagttgaaaaaatgcacacacatggtctctatttatagcctaagtgtcacacaaaattggatggaaatttgaatttctattcaaatttcactcgaatttgaaattaaatttgtggagccaaaatttcactaattatgattagtgaattntagctatggttcagcccactaatccaagatcaagtgcaagattct

SEQ ID NO: 234913 - DNA, 167 bp, Glycine max
ggaccctaagcgccgcggctgcaactgcaacaaagctaccatttatagaaaagaatcccttttggtcttaaagactcatttacatccaatggcctttgccccattaagcaaatctacaaggttccaaactttgttactctgcatggaattcatctcatccttcatgg

SEQ ID NO: 234914 - DNA, 434 bp, Glycine max
  unsure (1)..(434): unsure at all n locations
ttgagataacaagtgggaggaaatgtttttctccaatatatacattattctcttgcttcttatcttctcctaaggtctttcatacgcttgagagataaagtattcattgtgtgttagagcttttaatttctttcatttttaagcttcatttattaatgcatgagaagcttgacatgtaattgcttttgacttggttacttttcggaaggaaagaaaatgatttctttcttaaaaagttttgacattctctgaagtcttgtattgctttttgtatatattcacttcagtcttctcctcattgaacctcaagaagtaacttttacttttgatcagaggttatactatacttagaactccttacttttcattaaatgcctaanatttaaacgttatagcatattcaaaaaatagaaagaatatcatacgagaatatg

SEQ ID NO: 234915 - DNA, 168 bp, Glycine max
  unsure (1)..(168): unsure at all n locations
ggatcttaagtcactgagcatgcagcttgaataaactttgcctgttanatgatctctcatgaaacttgaaattaatttgatcttgaacttgttaactcaatcttgaaatcattctttggcctttttgtcatcatctttggcatcattaaaactgcttgaatcaacttg

SEQ ID NO: 234916 - DNA, 439 bp, Glycine max
  unsure (1)..(439): unsure at all n locations
ntaactngntagctctatatatcttttaattccaattaagtntaattcatatcttgttttcataatttcattaatcttttggtttgtaaaagtgactgatgcaaagtcagatatctttgtgttgccttaaattctcttaacaatgatatgagtatgttgttgtaactagcttcagtgttattaactaacgttttccattgttatgggtttgaaaggtggtggaagcaatgacatagtgttagagtccataagccatatgagaagcagggaaagaaccaatggatctcacaatcatcattgccaattatctggttgctaccctcattatccccaacaatatttgatggcaatgcaacaacagctagacaacaacaacaatttttacagtttcttgaattcctcaccagcagcatcaacagctagggaaccatcatcatca

SEQ ID NO: 234917 - DNA, 185 bp, Glycine max
ggaccttaagcacctgagctgcacttgatgatatggcttcacgacaaggatcaaaggtgttgaaaggcgcacttccaatgatgaacatcacctttagcacaaaccaagagcaccaaccaagaaatgaattttgcagcgagaaagcctatagaattcaccccaattccaatgtcctatgctgactt

SEQ ID NO: 234918 - DNA, 182 bp, Glycine max
  unsure (1)..(182): unsure at all n locations
ctggacccaagcncctgaggctgcagcttacncgagggagaatgattactactttaanaaaaactttcccttatttatacaaacttaaacactcttaaattgaaataaagtggtgtcatttagttctccatttgggccatgatacaactcacaaccctggacttttttccttaaacttgggc

SEQ ID NO: 234919 - DNA, 434 bp, Glycine max
  unsure (1)..(434): unsure at all n locations
ntgagcaaattctaacgataatagctgtgtactcggatgttctgaataatcccgtaatatatcgagacactcaaaattgaaaccaaaagctctgagcaaattcaaatgacaataactttttactcagatgtctgattgtggccagtggtatatcgagacgttggaaattcagaatagaagctctgagcaaaatcaaacgacaataaatttttactgggatgtccgactgtgtcccatagtatatcaagacgctcaaaattcaaaacaaaagctctgagcaaattcaaacaacaataactttttactcggatgtccgattgtgtcccgtagtatatcgagacgctcgtaattgaaaatagaagctctgagcaaattctaacgataatagctctttactcggatgtccgaattaatcccgtaatatatcgagacac

SEQ ID NO: 234920 - DNA, 176 bp, Glycine max
gaccttagcacctgagctgcagctgtctgatttctcagttttacagctttgacaatatactgctatggctggacttagttcacgaaatttttctaaattttgataaaaaatgtgcttgcaaggagtgtaggctgcataaaattagttatgaataacaatttaaagtataaatgaaa

SEQ ID NO: 234921 - DNA, 448 bp, Glycine max
  unsure (1)..(448): unsure at all n locations
tctatataagctgaaccattatatcaataaacacaagttgagttttattcagaaaattagagtttatctcttttatcttagtgagagtgattctcctaaattcttgagtgattcaagaacactctggctgtatcaaaggactttcacaacctttgtgtgttgccctcgctggaaagagtgattctttccttcctttcatcttcacccttgttctttcaaaccacaattccaaaaaatccacctctgcccagaattatctagtggccataactcccattttacgcactcaaattaagtgattcttgaggctaaattgaatttcaaaacgagacctttcacctcgttttggaatcacctcatttggatccctttagcttcagttattgccatttctatatttctgtccagccaccacttaacctacgttntaccatcccattcattcatt

SEQ ID NO: 234922 - DNA, 51 bp, Glycine max
tgttatacttataaccacttgggtatttctgccggccccctacttccgagt

SEQ ID NO: 234923 - DNA, 318 bp, Glycine max
aggccacccccttatgcacttctctctctctccaaatagccgacgaaaatcacgtcccgcaacaaaatacaagccgacgcccttccgcaaccgttccgtaacgactccctcagtaattaccccaaaatcctcgaccgctcttcaacatccatcatacgttcatcgctttcttcaaccctcaacgggtaagcacctcaaaccaagctcttcaatccattctatgtacccgaggaggttcataccatgcaccatgcataacagtcctccgattcattcaccttttatacacacctctgacgtgctcaagccacttatcta

SEQ ID NO: 234924 - DNA, 82 bp, Glycine max
ccgcgtattctgattaacaacaaaaaaacagacataattttcgttggaattggtttcccctttctctctcttcgtcttggaa

SEQ ID NO: 234925 - DNA, 449 bp, Glycine max
  unsure (1)..(449): unsure at all n locations
ctaaaaactaagctatggccctangcaagcatgacaggtagccattantttgtatgccacgtaacctagttcatgtttaggaaaaaatattttgacactcaaatgtttataaacacttattgagaaaggagaacaaaagagaaaaatatacgtatgatagaaaatataatgtgataggcaaatagagataaaaaaaaatgaaaattgctagtgggtgtttaaaatattacccttcgtattttaattgtaaagaatgaaaatgtaagttaatgaaaaaaatgataattaatgcaataaaagaacaagtggatatttctcgtactgttggaaagtttccgatcccctggctcaatttttgggatgccagtgatacatatatctgtcgagcagctgatgtaataccatttggtggacataataatctttatggaccaccgtcattgggatta

SEQ ID NO: 234926 - DNA, 153 bp, Glycine max
agcttggactcagccacataaacttattggtgcatccatcatgaactaacaccctctcccaactcctctctttcctaacccttctccctctccttcccctatctacatctgagggtttttttgccatttctggttcaacaaaattgtgattcc

SEQ ID NO: 234927 - DNA, 439 bp, Glycine max
  unsure (1)..(439): unsure at all n locations
tctcatagactntctgagatgttgagggatgtttctttttaanataaaaggccatattggattggagatcgtgtttggaatgatttgttatcacattggaatgcacctgagtatcgttccaagtgtgcacatgccaaaaaaattatgcatctgaaaagggtgggtgtatgcaaacaggtagttctatcagcttgtaggatcatgccattcgcttggtatgtacattaaaattataatacatagttgtttatacatgtttgatttaccacttaatgtttgttaatagtcagaggagcttggtcgatctgtatatgtagatgaggtttttcagcaaactcattcacaaaatgatactggtcaatttgtcgatgatagatctagacggacacatgtgggaccattatcttgcatttttttttattctttaaaattcttatta

SEQ ID NO: 234928 - DNA, 153 bp, Glycine max
  unsure (1)..(153): unsure at all n locations
accctaagtcgaccgcagcatgcnagcttgcgcaagatggttatgatgcttttngttttcannnnaccccgcccccatggaagctaaactgtgttgctaagagaacttggtatatgacttaatgtgtcatatggggcacaaatcatatttttt

SEQ ID NO: 234929 - DNA, 424 bp, Glycine max
  unsure (1)..(424): unsure at all n locations
tagagggaacatnncggcctaaatctgagtggcattgtgtgcanngctggggatcttgctgttgactatgacaaacagcttctacaggttctctctcaccatcaagctaataaattgctccatgcctcttttgaactgatttactgcaatcacattcacatatataatcaattaggcatagtattggtgttaatattctcaataaaaatgagtatgaatatctcaataatatattgcatgtgtagatagcaatttaaaaagtacttttcagtgttgaacgttcctttatggagaagaatatatactatgtgtatctcttagttcgaaagcatctctagaacggaaatactggaaatccaaacttgctaataggctatgctcggtgtttttttttttttgagtattacacaatcaccttaatgat

SEQ ID NO: 234930 - DNA, 159 bp, Glycine max
  unsure (1)..(159): unsure at all n locations
agcgagtgagtggtggtattatctcctctctnaannanngaggggcctccccctcgtcgctgtagaaatgttattatagaataaacccatagaagaatgggattatgattaaagaagaaacgttcaatacatattaaaggcccaaaatataatcccttc

SEQ ID NO: 234931 - DNA, 436 bp, Glycine max
taatgtcgatggatacccagtggagagtctgatgattaacatgactgcactaactcagacatagagtgttttttccttcttgaacttgattcccacctcccacacttttgatgtcactcttgacagggccagactcatctatggaattattatgaagatggacatgaatgtggggtacctcatctcccaccagatctccctcattgctcagcatgacacatccagacatggattcccggccttgattacaactttatgtaaggctaggggagttcagtctaactcgagatccttggagagcatgagtcctgccattaatttggcatacattaagaagaaatgttggaatcttaatgatccaacagtaactttcagaggactaaggaaggccagaggaaagaaatctgaggccccttccacttcagcaccagaggca

SEQ ID NO: 234932 - DNA, 154 bp, Glycine max
aagtcacctgcggcatgcaagcttggctaaatgatattagactcttaaaacaaatatgccattgctcctcctccaagctagaagagatcacctgaaaagattatttgtgagagagatacaatggcttctaagccttttaattctccacacgttg

SEQ ID NO: 234933 - DNA, 430 bp, Glycine max
  unsure (1)..(430): unsure at all n locations
tctaatacaagaaagaccctagagaatgcgtatccgttcacaagnncgcgtggtaagttaccatgtatggtctgaaattatctgctaagcgttcccttttcctttttggggatgaaagggagcataagaatttcattgaaccaaattcattttatcaaataatgtctagcgtacaactggcatcaacttacaggaaactttagccaaactcatgatgtttttgcaatacaacagaaccacaaggaaataaatgacttcactcaaaaaataaaatataggtgaagccaatgaaataataattattctaaagcaaattccttctaggattgatcttccattaacaaatatcgcgacaacaaagagataaatgtctaatatctcttgtcacgagataggcctctttcccaatatgaatcgatgtgtattatgt

SEQ ID NO: 234934 - DNA, 78 bp, Glycine max
  unsure (1)..(78): unsure at all n locations
gggcggcccacccctcatcgtttgacagcnttatcattcaaatctctgtgcattcatcgcgctgattatcactttttc

SEQ ID NO: 234935 - DNA, 161 bp, Glycine max
  unsure (1)..(161): unsure at all n locations
ggaccctaagcaccgcagcatgcaactgtgctgtacatccgttttagcnacnaccgcaacccataccacaacccaccaatcacaagctgggtatggtaagtcccccaccttctcaattccccgagaacccaccagcaatgggctcgttcaatctactggat

SEQ ID NO: 234936 - DNA, 436 bp, Glycine max
tcaacatcagaccacctccagggtgctggaactacttcacatggacttgatggggcctatgcaagttgaaagccttggaggaaagaggtatgcctatgtgggtgtggatgatttctccagatttacctgggtcaactttatcagagagaaatcagacacctttgcaactgtcaagcacttccacatctttggaagtccatgttacattttggcagatagagagcaaaggagaaagatggatcccaagagtgatgcaggaatattcctgggatactctacaaacagcagagcatatagagtattcaattccagaaccagaacagtgatggaatccatcaatgtggttgttgatgatctgtctccagcaagaaagaaggatgtcgaagaagatgtcagaacatcgggagacaatgtagcagatgcagctaacagtgga

SEQ ID NO: 234937 - DNA, 83 bp, Glycine max
cccctcatgatcctgctgatctgcaatatctttacacatatatataatatatatatatatattcgcagggaaaatatatttta

SEQ ID NO: 234938 - DNA, 457 bp, Glycine max
  unsure (1)..(457): unsure at all n locations
gaccttagatactcagcttggntaatattgtgtgtttaaaaggatgcatgcgttaatcagacataacaattgtactcatcccagtgggattgacccggattcgtctcgaatttgaccggataaatcaagttgataagagtcgagttgggtttgaatttttcttgattgagaaagttgagttcaaaatggatcagaaatgctaatctctgcccccttcctattactattctaatataataaatattttaaattagtattttaaatatttcttatgcgtgtcaactaggttttattatgacactttgctagacctgaaagtttagactatgtttctttctattttttgtgttttttgttagattggtggaagatggaacaagactgtatgtctattttanaacactttgtttgatgatactagctactagtctctattataaattctaatggattaata

SEQ ID NO: 234939 - DNA, 175 bp, Glycine max
  unsure (1)..(175): unsure at all n locations
ttaagcaccgagctcagcttaaaaaatggctagcaacttttttttcaaggaaatcaatcatacaatttaaaagccaaaaacataataacatctaccctgngaatggatgaatatttcagtgtttcaaattgtaagagtgctaaggaaatgtgggacactctacaattaaaacatg

SEQ ID NO: 234940 - DNA, 446 bp, Glycine max
tgcctaattatcctaaaattgagaggaattgattattaaacacacaaaatggaagtactaagtatttattacctatagttagcagaaaatacttataacactacaaaataaccataaattggaagagtttgatacaatttacacaagttttatacacaaaagttagtcgtattcaccgactaacaactcccccaaatttacagttttgcttgtcctcaagcaaaaagagaacagttcacttgtcctcaagtgacaacaacatgcagtgactatgtacaaaggtgtatgctacaaaagttactgattgcatgataagagaatgaagtaaaatgcccgcatcacttgtctttcataaggtatacagttatccaatgagaagaataaaatgtaacctgaacaattagatgatgctaattataagacaaatatcaaggaaagtagcttaa

SEQ ID NO: 234941 - DNA, 110 bp, Glycine max
tatcttacaataacttcgttacctttctgcagacagtaaaggtgtttgcatataaataacctctacataagaacatgcacactcacaagcacaaaatgtctgtttgcaca

SEQ ID NO: 234942 - DNA, 443 bp, Glycine max
  unsure (1)..(443): unsure at all n locations
tgaaagtatggaataaggcatgagtgcttgattagtcttagttttcatatattcatccttagtgttaatcaaacatgatagatagatagattgatctcaaagtttcttagaagcaattagtccaacaatgtatagtcgattacaaggtttagtaatcaattatcgattattagagaaagcaacaaaaatcactttacttttaaatttggcaagaagcatcaaattaatagattacttgtttcagtaatcgattacataagccagtttcaaaagaaggaaaactttatggctcgagataattgatttctgatgtgtagtaatcaattatattgcgtttgcaaactcaaggaactctctatgtgacaaaataattgattactacatttgataataaattattccagaacctagaagcttgngaagctccctgtgaaacgagataa

SEQ ID NO: 234943 - DNA, 163 bp, Glycine max
  unsure (1)..(163): unsure at all n locations
agcttgntacaatgaaactgctacttatcaagctaatcactaattaaagtatgacttggcagtgtcaccttatgctcagagctgatttttagcttacaaataaaatataaagttaataacataagacaaaaggaattaagaatgttaagacatgacaatttaa

SEQ ID NO: 234944 - DNA, 447 bp, Glycine max
  unsure (1)..(447): unsure at all n locations
tctagtcaaatggacttaccttgaattaattccttttatagcccttttgagccttggttccctttccttgttttgaagctcactacaagccttaagtgaaaaaccatgatatcaccatatccttaaggaattttggagctttggaattgttttgggaataagtgtggggggtttttgtttcattggacaacttgttttgttggctatgcttcatgatgtattttgggccatacttgatgtacattgtatattggttaaatgttggacatgctgaatgaaatgttgtttctcanaggctatagaataaaaaaaaaatatattcgaaaaaaaaaattcgaacaaagaaaaagaaaagcaataaagttgagtgaataagatcttgaatggcacaagaatgatgaaactctcggntctactcttcatggtttaatnttatctttacttctt

SEQ ID NO: 234945 - DNA, 187 bp, Glycine max
  unsure (1)..(187): unsure at all n locations
gatccttaagtcacctgangctgcagcttgaaaattattggataatttgcctattccattagctcttaatgttaagcatgaaaccaatcaaagaaaggacactaattttgattcttttgacaaattcgtagaacttgtcttggatttgttttctgtttgtacccttgtaatagtggaaaaaccatct

SEQ ID NO: 234946 - DNA, 443 bp, Glycine max
cctataaaactcagcttttttactaccacttgccatccacaaactgatgggctaacaaaggtagtgaataggtctctatccacccttttaagggcttttctaaaaggaaaccataagtcttgggatgagtaccttcctcatgtagaattttcctacaacagaggggttcatagaaccaccaagcaatccccttttgaggttgtctatgggttcaatcctctaacacccttagacctaattcccctcccacttgacacttcttttatacataaaaaagggaaatctaggtcagagattgtaaagaagtagcatgagagggttaggaaccatatagagaaccaaacaaaggtgtatgcaactaaaggcaatagaggaagaaaggagctagttcttaataagggggattgggtttggctccatcttatgaaggatagattccctac

SEQ ID NO: 234947 - DNA, 153 bp, Glycine max
agcttgtcttatataaacaatttaatttgaaataagtatctagtaacaatgcaagtgattaaaacacagttttattaataagttcagtcacccattctggggcatatctcatctcacccattctggggaaaaagaataatccatgacaaaaca

SEQ ID NO: 234948 - DNA, 425 bp, Glycine max
taacaacatgtgatatcctctacaggttttgcttctttcagcatcaccattcttccaaaatagcttatccatcctgcaccaagtccctgaaggacatgttggggtatattggagaggaggtgcccttctgaaaacaattacagagccaggtgctaaatactcctttgttttcttcaatgtatactagcaaaaaggtttgcttcacgttctgggtattaattttccaggtttccatctaaagatgccttttctaactcagtatgaacctgttcaagttacacttcagacggatatggtaagttgattagagcaagttcaggatggaaatttcagtttcttttggctctgtagttcatatttttgaattatggtgactattgcaggtgacagatataccctgtggtactaaaggtggtgttatgatc

SEQ ID NO: 234949 - DNA, 168 bp, Glycine max
agcttcttatccaaggctcatcttggtgttgtgagctccttcttctgcgctctggaatcccaacaatccgagtgtaaaccttatgaaccactttgaatattcttcaatagcttcccggtgttcaatattcaagacgtctcgatatatgttgcggcttaatcgcccctc

SEQ ID NO: 234950 - DNA, 433 bp, Glycine max
  unsure (1)..(433): unsure at all n locations
gacctataaaactcagcttctaaggaggtgagcttagttatgagaggggtgtgtgtatctaacctctagcttctcaaggaagttntctcatagaagcttctcaaggaagttttctcaagagagcttctcaaggaagctacctagtctataaatagaagcatgtgtaacacttgttgtaactttgatgaatgaaagttttatgagatacacttcaaagttccacttctttccctcttttattccttcaatttcgtgctccccccttctctctttcttttcctccattaaagcatcctcttcaagcttcttatccaaggcaattcttggtggtgaagctccttcttccttggcttattccctagcggatggtgcctcccctatcctcttctcctttgccttccgctgcatctccatgatgaaaaatcaccattga

SEQ ID NO: 234951 - DNA, 154 bp, Glycine max
agcttctttgaaaaacttcttgagaactaagcttactacaatgccccgaaatacaaggctaaaaccctatactactagaatggccaaaatacaaggcccacacgaaggaaaaacctattctaatatttacaaagaaaagtagatccaaccttga

SEQ ID NO: 234952 - DNA, 440 bp, Glycine max
tgtcttgtgcagaattagggtacacatactgttacagagatttttacacataattccagagcacaccacagtgcctattttgggaaaagagctctggaggcaacaagatgagcaacttttgcagagatacctaggtcttgtaattagagagagattagaagtttatgtagacgacatgatcgtaaagagtaagcaagtggatgaacacctagccaacttgttggagttgttaatgcaactaaggaaatacaatatgagactcaaccctagaaagtgtactttcggggtacaagtaggaaagtttttgggatacatgttaaccgaaagaggaattaaggtaaatcccgacaagtgtaaagccacattggagatgaggagtcctaagatgctgaagaagatccaatagttgtcacggtggataacagccttgatgagactca

SEQ ID NO: 234953 - DNA, 164 bp, Glycine max
  unsure (1)..(164): unsure at all n locations
agctgtatatatatatctttatataaaactcatacaatcatantttctcatttttgttgagccaattgtgagcctagagcccaccaaggtattatgttgtaatgaagcttattcattgctgaacaatgaatgaccaaaattctaggctcagaaattgactactg

SEQ ID NO: 234954 - DNA, 439 bp, Glycine max
tgtcttcctccacaagagatgacccaactgaatattcctgagccttgtaaaaggtaaagatcattcctccaccaagcaagagaacattaactttctccaacaaggattcaataactccaatcttggaagacaccttcgatccaccgacaatagcagcaaatggtctcttggggtttgacacagccccaactagataatcaagctcctgaaacaattaaaaatacatcagatcaatcaactgtataaattacataattacccaatatatatataatgaagctaacaattacttcctacaaaccttctgcattaagaatcctgcaacagagggcttcaagtatttggcaactccttctgtagaagcatgagctctgtgggcagtgccaaatgcatcattcacatagagatcagctagagaagccaacttctttgcaaattc

SEQ ID NO: 234955 - DNA, 151 bp, Glycine max
agcttgtttacacagcaatgtgtctttatatggtttgataggaatccaaccttccatcccatattttgatggatagtactgaagtcattgtgctgatttaactttctaagatccctccaccatttagaatcccagcaatggactctaccat

SEQ ID NO: 234956 - DNA, 448 bp, Glycine max
  unsure (1)..(448): unsure at all n locations
tatgctgcananatttataatagaccctctcaacagcaaaaccaacaacatcagaataattatgatctttcaagcaacagatacaatccaggttggaggaatcatccaaatctgagataggcaagtcctctacaacaacaacaacaacatgtccctcctttccagaatgttgctggtcaaagcaagccatatgttcctcctccaatgcagcaacaatagcaacaacaacaaagacaacaagcaactaaggcccctcctcaactttccttagaagtgtagtgaggcaaatgaccatccaaaatatgcaatttcagcaagagaccagagtctttattcagagtctaaaaaatcagatggggcagatggatactcagttgaaccaagctcagtcccaaaattctgacaaatggccttcacaaactgtgcagaatccgaaaaatgtgagtgc

SEQ ID NO: 234957 - DNA, 141 bp, Glycine max
agctttatgatgatgaatctgtagtttgagagccaagtttttttctaagttaccagagatttactctctggtaatcgattaccagtttcatgtaatcgattactagtgttagagattgatttcaaaaggttttaactgaat

SEQ ID NO: 234958 - DNA, 442 bp, Glycine max
tatcattgcaattcagtcacctcagttttctcttttcccattgcaagtccgatatcagcttcatgaagggccggggcatcatttgttccatcaccagttacagctacaacttccccaaatgtggtacgaaggtgtttcaccagtgtatgtttgtctagaggtgaggatcgagccataaccttaaaacaaaattaaccacaatatattatttaaagcaccaacgatttccctcttcaagaattgagtcaatcaaatattgttattcatatagcaagtgtatgaagcacctgaattttgggaatcagttcaaacaattcctcctgagtcttctctctaaagtctggaccctcaatggctatgccatcatctgttaaaatcccacattccctggctatggcctttgcagtattaatattgtctccggtaaccattctcaccacta

SEQ ID NO: 234959 - DNA, 143 bp, Glycine max
gcagcttgcagctggaatcttattctattcgagtttctggttatatgcaaatcactattgctcttgaggatcaggaaaaaaccacattcacctgccccttcggtacttttgcctatagaaggatgcctttcggcctgtgcaat

SEQ ID NO: 234960 - DNA, 433 bp, Glycine max
  unsure (1)..(433): unsure at all n locations
ntgtggnggtaatcgacaccccatagaattggcagttacccgtgattaaggccgaaaaccccagtgctttgttggacttttccaggtccaatgggtgtcttggaggttcgatccttgcaaattggtaaatggcgtccgagattagctgggccacattaatactaacctgagttaagatggcgtagaccagttggcacttcgacaggggaagatcaaaattatgatcaccagggaggatgttgttgaggagcagcgtcatccagatctgtgtcagggtggtcatgctagtatgcatgatccacacccgtctctccatgtcacacgttgggcgaagtcctacctcggaacacatagtagctggccgatggcctcgtcatcaaacctcgaagcctggctccttcttttgctaaacttgcaacgttacccctccttt

SEQ ID NO: 234961 - DNA, 160 bp, Glycine max
agctttggttgggaatttctgttgatccttgatgtaaaactgcttccggttagcgcttaagtttgacgaggggattcgaagaacgaagtttaattagaattagcccattcacgtgagacatcgatatttgggataattgtccttagcatagaacacaaaa

SEQ ID NO: 234962 - DNA, 445 bp, Glycine max
tgtaggattatggggtacccatcacatgtggtactatgtggcggtcgggcgatggtgcacaacaagttttccacatccacaatgcgcgcataaacccaccatcccctgttgcccacctccaactgagctcacgtactcccacgtagcccatatcctcgtttctctcaacaccgggtccccatcaatcctcccaagcttccacaacatccaagcaaaataacattcaaacagcacaagctatcacagccaagcaaaacagagcaaaggcagaaaactctgccaaaacaccaaccaaatcacaacttttctcacttaaagaccccagtaacaattccttcgatccatttcgttaaccgttggatcgaccccaaaatcttactgggagtctatagtgcataagcctacattgtgacgcgtgggatctactagcaaacattcagaactc

SEQ ID NO: 234963 - DNA, 210 bp, Glycine max
tcttgaccaatcccgacccaacccgtgcatattcagttagtgagaacctgtgatgtacctaaacagacaagcttctagcagttcacagataaaaggaacttagaccacacagcaaggaggcttgtgtggtggctggccagctgtgaactttgattgatatatgggatatgggctctggtaatcgattaccaagggtgggtaatcgattac

SEQ ID NO: 234964 - DNA, 268 bp, Glycine max
ttgcacatgttttgtagttgcatcctatctgaagccattatactgacattggctaacgaaggcaaccaataggtccttccaaaaatggactcgggaaggttccaagttagtgtaccaagtaacagctaccccagtaagactttcttggaaggaatgtatcagcaattcctcatcttatgcatatgcccccatcttccgataacacatctttagatgagatctcgggcaagtagccccttgtacttgtaaaagacagcaccttgacttg

SEQ ID NO: 234965 - DNA, 357 bp, Glycine max
  unsure (1)..(357): unsure at all n locations
gacaaaaagctcaaagatcaatcataagatcaactcaagtgaatcaaagatcaatcaaagaacaactcaagtgaatcaagaacaattcaagagttcaagataagaatcaagaagaattcaagactcacgaagaaagtttagagtcaagaatcaagattcaaggttcaagatctcaagaatcaagatcaagattcaagactcaagattcaagaatcaagagaaggcttaatcaagataagtatgaacaggttctctcaaaaattgagtagcacatgattcttctcagaacatgttgaccaaagagttcttactctctggtaatcgattaccagattgtngtaatcgataaccagtagc

SEQ ID NO: 234966 - DNA, 449 bp, Glycine max
  unsure (1)..(449): unsure at all n locations
agctttgatggagaagaatacagcgtgagctatttatggcttgcaatctaatattttaaaatgtaagtacaacatcggttatcaataaaaaaaccgatgttaactaaatgatgttaacattaacatcggttttctacaaaaaactgatgttaacctatcttatgttaacatcggttttctcagaaaccgatgttaccaatttaatgttaacatcggttcttcaaaaaccgatgttaaagtaaactaattaacatcgattctttaaataaccgatgttaacaactacacattaattacaattatgccaccgcgttaaccttaacatcgagttttctcaaactgattntaaagtgacgatgttaaatgtaacggtacgacgatcattgaggagggggggtcttccatgaccaaatttgggatgtcttcatcagtaggcatggtcgcttcag

SEQ ID NO: 234967 - DNA, 350 bp, Glycine max
aaagagtggttttcgaaatctgcacttcatgcagaaatttgctgttgaaatgtgtaacagaattttgtacaagtgcacacaaatgcttgtgtatggctggttgtgaaaagggtaagacatatggggttctggaaatttactagcagatcccaacggtcaaactgttgacttatgtactatagacttcagtaaaattttgagtcgatcaacggttaagaattggaccgaagaatgtactgggtattgttgtgaaagctggatttgattgtgtttggcgagtttttgctttgcctgtttgctggattgtagtcatgagattgatgggaatcctgatgtgggagcttggagat

SEQ ID NO: 234968 - DNA, 307 bp, Glycine max
  unsure (1)..(307): unsure at all n locations
ggctagagatccaagggaaggcccttaggttctcatgagccttatggtatattttgagcccatgggctaaatatgagcccacttatctttgtaaatattagaatangtttttccttcgtttgggccttgtattttggccattctagtagtatagggttttagccttgtatttcggggcattttgagtagtctttgtagtaaggacttttttttgtgtatttacatctttttttgtcatgggggtgagcttagctattatagggggtgtgtagctaagctctagcttctcatctcaaggaggtgagct

SEQ ID NO: 234969 - DNA, 243 bp, Glycine max
ttttttttttgagaacacgggacccatcactggaaggacccccccaacccaggtcttatacttgggtcttcctagcactataaagaataaacatatattggggtgcgggtttgaccgaaggaaggtctaaaccctctatggcacttccatgtgaacaggtccacaactcagaggggctcaagaacaaaataggacaccgctggaaatagtaagatggaccccaattcctaaactgggaaggcc

SEQ ID NO: 234970 - DNA, 397 bp, Glycine max
  unsure (1)..(397): unsure at all n locations
tgcagcttaacaatgggagaggacattttttgctgaaagancaatgacaatgcttacaaagttgatctgcccggtgagtataatgttagttccaccttcaatggcttggatttacctttttttgatgcagatgtagaatccgatttgaggacaaatccttctcaagagggagagaatgatgaggacatgaccaagagcaagggcaaggatccacttgaaggacttggaggacctatgacaagggctagagcaaggaaagccaatgaagctcttcaacaagtgctgtccatactatttgaatacaagctcaagtttcaaggagaaaagtccaaggttgggagttgtatcatggcccaaatggaggaagactaaatgacaccactctgtctcatattta

SEQ ID NO: 234971 - DNA, 452 bp, Glycine max
tgaaattgaacaacggaagctctcgatataatcgagtgttcataaattttcacacagatgtccgattcggggaaataatatatcgagacgcacgaaattgaacaacggaagctctcgagaaatttgaatggtcataacatttcactcggatgttcgatccggggacataatttatcgagacgctcgaaattgaacaaccgaagctctcgacagattagaatggtcgtaacttttcacgcgaatgttcgattcggggacataactcatctagacgctcgaaattgaacaacggaagctctcgagaaatttgaatggtcatacgtcttcacacggatgtccgattcgggaacataatatatcaagacaatcgaaattgacaacggaagctctcagaaaatcgaatggtataacgtttacacagatgttcgattctggacataactatctagacc

SEQ ID NO: 234972 - DNA, 381 bp, Glycine max
gaaaactatattgtgaagtaaatgcgggtgaaatcaggtctgaagcgatctccattcttataacactggaaacagatacagtcctttacattttacttaaaaagacaaaaaaaatgcaacaatgagaattgaaataaataaaaaaaaaaaaaacggcatatgaatttcatacacactttcaatttatattaaaattgaaattgtaactatacaaccattatattatggaggcaaaatactacacgtaatggattaaaaaggtagttgggacaactgcccccactcttttaaaggtggatccgtccctatttccatgttctgtggctcgcgagagttaaggaagaactcaaagtataccattcagtttcataccaccattaa

SEQ ID NO: 234973 - DNA, 343 bp, Glycine max
ctactagaaactatatttacgacccacattcaagagaagataacctgaaccgatcacatggaaatagcccaaaataaggcagaggtgccaggagcacctcatttgacagctataaagagacttattagtagtataacaaaacatatatggaacaattttattaagaacaccaaccaccccctcttgaaaatctcacaactcacaagtattggtaatgatttctggcacggttcttttcccaccataatctagcatgcatttccccaaatatttctcggctgtgaacacatgagaacaccaagaataaatctcattgctttttcttaaaatttttccttgaaac

SEQ ID NO: 234974 - DNA, 301 bp, Glycine max
actcatgcttttacaaaaaggttcatcaagtcaagttgaaatatggaagtacccgcctcgcaaaaatggggcaaaagatgaatcaagtcacatcactgcttcgtctactgccaaacatatataggatgattgatgtccttgttacttccagtttcaccttgacagaaatggcatggaccatgttgaacatctaaattgattacaccccatatactgtgtaaaaatacgtaatacgtcaactgtacaccattcgcatacatccatgcgtttcattgcttggatagctcattgcagtcgtgcc

SEQ ID NO: 234975 - DNA, 329 bp, Glycine max
ctaaccttgctacactatgatgggcacattgcatctagtagctgttgttgtttttcaaacaaaacacatatacgcattggtgtgtgatctgttctattaagtgcacggtaacgctttgcattatcaaaaaaaaacacacacaccacccaaaattggttgacgttttgcttgcttaagataaatgaaataatggtagtgcattttgtgcaaactaactttttatggatgcgtctttgtaggaaatggctccaaaaaagcttttatctaatagggctataaaggacaactcaggataaggatctaatgcggctctacaagctaatatagaa

SEQ ID NO: 234976 - DNA, 441 bp, Glycine max
  unsure (1)..(441): unsure at all n locations
agctttggtaagactcatgcaacactctattttgtctgggaatcccatgaacagttgggtgtttacagacaaaagtacatattaaagttggagtgaaatagtcttttttaaaatacatacaaaaacatcagtgtaaatatataaccacacccaaaaccaactggtattgtttagcatcacctaagctcatcaacaggacgttcaattttttacacaaatatatagcaacaaagtgaaaaacggtaactgactataaaatattaagacatgttgattgagaaaacattcaactttcaccaataattacaaaaatatcaatttactttcatttaacttcatgcttcctaagacgtgtatatcaaatgacaaaaacaacattggttcaccatctcatgtatntaaatagaaacaaaacattttgtaaaccatcatttgcatata

SEQ ID NO: 234977 - DNA, 295 bp, Glycine max
tcggctgcaaagataccaggctcattttaaactcttatatatctccgagctaaattttttccgaaaactacgggagaagtcagcatactggggaaatagttttgggatatagctcttgactccaataaccccttgcctattggagatagtggatgcattctatgaatgaacaatgcttgtaaaggaaccagtagtaatccatacattacctttccccataatattcattctttttgcagtttcaaagagggttattgcccaacgaaaggataaatggacaataatgactctacat

SEQ ID NO: 234978 - DNA, 356 bp, Glycine max
  unsure (1)..(356): unsure at all n locations
tatatttttgtatttgcatttgaaaaaatctagagaattatgatacttatgtatccgaatcgaaataatcaggctacataaagaatactatatggttaatgttgcttcctaaagctgcaggtggaaattatccaaatgtgggcattcattggtttcctggcctttctcaaaatcctcatcatcatatataggttgctcgcaatgttttcagtgcttacctattatcctcattatacatatgcacttctcttctcacananaaactggacaggtatagagacacctacttgacttacaaaacattatgtgtattgctggtagtaatgggcatgatattctattgaaagcaatttaca

SEQ ID NO: 234979 - DNA, 381 bp, Glycine max
  unsure (1)..(381): unsure at all n locations
agatgagaaatggtggtggcatctatgaagacgacaagaagtgagcgagagagtttgcaagtgggtaatatatagagtaggaaaaggtagtcaattaaatatgattactttattaaccattaaataattctttaatatttgaataatttattttactatattcactatgctcgaataaaacattaaataaattatttcattaaacaacttgtttacacaatatttaattaaatattactctatccattatgcattgaataggatattngactatattcattatgcatcgaatagttgtttactactataattattcattgaatattgttttagagtggttaatatgcatttaataaagtatttaaaaaactattatctcta

SEQ ID NO: 234980 - DNA, 408 bp, Glycine max
  unsure (1)..(408): unsure at all n locations
gaacagggctcaaaaggctatcaaaggaattaatttaaggtaagtccatctggctagaagcttataagaacaaaattgcctcaatcatttccaaatatgcatgtgaattaggaagcatcaagaagaatcaagccaaggctattgtgcaagcaatcaatggggcaaaacacaccaaatgattatggtggtggatggctcaaattctcacaaaggtaaactcatcactttcaaattgagctttcaaaactatcatgacatgtagaggagaatcaaggatttcaagtcacaaaatgtcaagaacttttatnttcaaaacaattacccatttcttgaaaatatcctataattcgaagaaaaacatgcaaagtcgtacattgatcgatgtcgtacccgaatcatataaacatg

SEQ ID NO: 234981 - DNA, 355 bp, Glycine max
  unsure (1)..(355): unsure at all n locations
tggtccttggtgaagataatggctgcacctatacttctatcatgggtgataccagtccctgtaacaggaattgtatcccaatgccctanaaacacaggcaaacccataggcagtggtgccaaaatctgatcccattcaaattttattattagacatattgtcataacacaaattatacctctgtaaaatactgatataaaatggtgaaagctagtgacactttctttctgatattgattgattgaaatttattaaaaatcatcaactttaatttcatctaatcttagaaagagtattaaaaagaaagtggcactatcattttgtgtatgaaaagttttactcactggaacatgga

SEQ ID NO: 234982 - DNA, 431 bp, Glycine max
tattatttaccaatcaaattttatataaaaaaaggtaaggtgtatataacttcaaaataagtattttaaaaaattaaaaatagaacaggcgagaagataatttttttcattcttattgggattcttgcttaaccggaagttttggtcaaactagaatataagttaccaaagttccttacaaaacagactcgatgttttatgtggtgaggttgatgagcttacaaaaccttttgaaaatttattttaaatgcttccttgcttatcttctcataggttcactccttgtcatgtttatattcgttaggtcctaaatattttgatttgactgttttttagaataaattttgtcttaaaaaatacttattagttaatgtgtataggaattatactctgttgggtagaaaagaaggaaatgaaatgagcgaaagtat

SEQ ID NO: 234983 - DNA, 365 bp, Glycine max
  unsure (1)..(365): unsure at all n locations
ccttgtagtgctctaaaacaatggcaaacatgcgttcacacagatcctagaatgggtgtgtatcattacaggtctctcaattttggcttcatccttagctgagaattccaacttaaaatgatcacgaagttggaagtgaagttgtatgaaaccacattcatccaaccaccacttgaaaagttattcaaaagtgaatcaagaatgcaaatccagctgaacagcgcanacctacaaagttgcacactggaatttcctacgtaatgcatcagatacattaatctctatanttggtccacagaatgcatcatccncttcatttaactgcaaggttntacacacaatataattgagttgaaatgagatat

SEQ ID NO: 234984 - DNA, 358 bp, Glycine max
  unsure (1)..(358): unsure at all n locations
gttacagtttggaatgcttcaactttgttcttcatgcctcatgagaaatgctccatatagctcctaagaaaaccattgtagtgggctccacacaactgacaagctttatgggcactttacagttgtcttgaagtgacagctagcagaacctttctaataagcatattgaaggatcattggaatatccattctgatgttgctaaaaatgaatccatacttgataaattccttagatgaagttaaattgatcttctattctgaaggagcacaacttcatcactcttaacactgttacatagcttcaagcattatggattaattacttanaaagactagtggaagttagttgatgttgtgt

SEQ ID NO: 234985 - DNA, 309 bp, Glycine max
ccctgcgcaagcatatttcacttaaaattagtgaaaagaaggagaaaaatcaagatcgatgcgctttcgtaacgtttctatgatcaatattgtgaacattctttgccgcccttcattcattcttcatagatcattgatcttcaaccggctagatttttattttgaagctttgaattcattctatgcacccttagggatccattcttgctttgtatgatttcctcttcattcttctgctttcgatatacatttctttcgttttaagggaggctagaccgaacgtctaagtctgaatctcacttaatcaat

SEQ ID NO: 234986 - DNA, 443 bp, Glycine max
  unsure (1)..(443): unsure at all n locations
ggccaggtgacacccaatacaagccccccnnnggaggttgatctcgataccgcactcaagnacccagcagcaactgaaacggcaaaacaaaagtttttaagngaaaccagagagaagaaaaaccctaaacccagggggggtccccaaaacctcttccttaaaaagtccatggaggacacacatttacatccatttgatacaacatcataccatgatgggcagcaaaggatattaaaatgtgcactgcttctagacgagcaacatgagcaatagtttcaggggaatctataccctcttggtgtgaataacccttggccacaagcctagctttgttccactcacaaccttacatatttcatcgagcttggttccgaacacccactttgctccaatagcatatttgcctttgggaagttctacaagctcctagacatcattcttct

SEQ ID NO: 234987 - DNA, 398 bp, Glycine max
  unsure (1)..(398): unsure at all n locations
gattatgttgagaaagtggtcaacaccccanaatcgaacttttcaatccattctttgtacccttaaggggccccacttgttttgcatgcttttattttcatttcatttacttttcgcacccccttttgacgtgcttcagtcatttatttaagtcattntctcgcctaataaaaaataatataaatttccaccgatcattcatattataacatcctttaatttctgttaaaatgaattccgaccgttcggtcatgccgtaaccacgtttaaaacaaaanaagaggcagaataataatataataatcaanaaatatcttttagtaaaataaataaaaaaaatcaatcggacgttgtttctttgagaattcctttcttactcgaattgagtaataaccaaa

SEQ ID NO: 234988 - DNA, 446 bp, Glycine max
  unsure (1)..(446): unsure at all n locations
tcctaatgaaacatttattttgattgaacgatgaatnngattggagatggctctggctgtggtagttttacccgatcctcccattccccatatccctatgatacaagaatatgtggttgtttcaataaatccaatcacttcttgcacctgtgactctaatccaacagggaatcgagtaataggcaagacttcgtactccagtttagtaagaacatcgttaacaatttccttcactagttcagcatcattccttcaagttcagttcaatagtaactataatggtcatctattacaaaaaataattaataagattaaaaataatagaagctagaaactatataaagtgtttttttgttatcgccaaatgttaaccgctagtttgttattagtaagaattcctatgtttctttaaccacccaactaacctttcgtctcccaacctatat

SEQ ID NO: 234989 - DNA, 242 bp, Glycine max
  unsure (1)..(242): unsure at all n locations
gcttcattctttcatcttgaactntcactaaatcaaaaggtgtggtaacccctctagagtgcttacattctttttcaacttcggaagaagatcaacttgcttctcctgaaaaaagaaatgatatcctaattatatttatcaaacaaacatccattttaagtattaatcagctcaccaaacacacttcagaacccaatagaacatcaatcattggcaatattattcaattcagggtattatta

SEQ ID NO: 234990 - DNA, 429 bp, Glycine max
  unsure (1)..(429): unsure at all n locations
atgcaagcttaacattaatgtcagcgtctcttatattacgggactcaatcanacatccgagttaaaagttattgtcgtttgaattggctcagagcttcaacattcaatttcgagggtttcgatatattacgggactcaatccgacatccgagaaaaaaattattgtcgtttgaattggctcagaggttcaacattcaattttgagcgtctcgatatgttacgggactcaatcagacatccgagtaaaaagctattgtcgtttgaatttgctcagagattcaacattcaatttcgagggtctcgatatattacgggactcaatcagacatccgaataaatagttattgtcgtttgaattggctcagaggttcaacattcaatttcgagcgtctcgttatattacgggactcaatcagacatccgagtaaa

SEQ ID NO: 234991 - DNA, 377 bp, Glycine max
  unsure (1)..(377): unsure at all n locations
cgcttgatccaattcagatgacaataaattgtttctcagatgtctgattgagtccaataatataacgagacgctcgaaattgaatgttgaagctctaagccaattcaaacgacaataactttttactaggatgtctgattgcgtcccgtaacatatcgagacgctcgaaattgaatgttgaagctctgagacaattgaaacgacaacnaacttttactcggatctctgattgagtcccgtaacatatcaagatgctcgaaattgaatgtggaatctctgagccaattcaaacgacaataacgttttactcggatgtctgattgagtcccgtaacatatcgagacgctcgaaattgaatggtaaagctctgagcttat

SEQ ID NO: 234992 - DNA, 445 bp, Glycine max
  unsure (1)..(445): unsure at all n locations
agctnataagaacaaaagtgcctctatcatttttcaatatgcatgngaattaggatgcatcaacaagaatcaagccaaggctattgtgcaagcaatcaatggggcaaaacacgccaaatgattatgatgatggatggctcaaattctcacaaaggtaaactcatcactttcaaattgagctttcaaaactatcatgacatgtagaggaaaatcaaggatttcaagtcacaaaatgtcaaaaacttttattttcaaaacaattacccatttcttgaacatatcctataattcaaagaaaaacatgcaaagtcgtacatgcacacaaaattgacccanaatattaaactaacaatccgacgaaactaacaacattaacaaattaacaaaaccaacaaaactagcataaccaaagaacactcctccccccatacttaaacaacacatt

SEQ ID NO: 234993 - DNA, 369 bp, Glycine max
  unsure (1)..(369): unsure at all n locations
ntctccactaagttgcctgatgcctgttatgtcttttcttatggcagtggtcctagatgcacggaaagaatttctccaagaacaccctcttaaggtcatcccacctaaaaatggacctgtgagcaaggtagtatagccaatcttttgccactcccttcagagaatgaggaaaagcctttaaaaagacatgatcctcttggacgtcanggggcttcatggtggaacaaacaatatggaactccttaagatgtttatgaggatcttcacctgcaagacatgaaacttgtgcagcaaatgtattattccagtcttgagaacatatganacaccctcatcaggatattgaatcacaagctttataagtaaaat

SEQ ID NO: 234994 - DNA, 442 bp, Glycine max
  unsure (1)..(442): unsure at all n locations
agcctggntntgggcgatagcaccccacctgatgtccccaaggnctcctgacccccgcgacatatcttcaggtaccactctgtggtcaacgaataaaagcaggaagtttcacccttctacacttcctcatctcaagcttgtaggattatggggtacccatcacatgtggtactatgtgtgcggcgggcgatggtgcacaacaagttttccacatccacaaagcacgcataaacccaccatcccctgttgcccacctccaactgagctcacgtactcccacgtagcccatatcctcgttcctctcaacaccgggtccccatcaatcctcccaagctttcccaacatccaagtaatacaacattcaaacagcacaaattatcacagccaagcataacagggcaaatgcagataactctgcccaaaacatcaacccaaatcacag

SEQ ID NO: 234995 - DNA, 375 bp, Glycine max
cgagacactcgaaacttaacaccgaagctcgctgcaaacgctaacgacaataacacttcactcggaagtccgagtgagtcccgtaatatatcgagacgctcgaaatttaaaaccaaagctcgtagcaaattcaaacgacaataacatttcactcggaagtccgattgagtcccgtaatatatcgagacgctcgaaatttaaaaccgaagctcgtagcaaattcgaacgacaataacttttcactcggaagtccgattgagtcccgtaatatatcgtgacgctcgaatattataaccaaagctcgtagcaaatgctaacgacaataacatttccgctcggaaggcccggtcgagtcccgtaatatatcgagacgct

SEQ ID NO: 234996 - DNA, 400 bp, Glycine max
  unsure (1)..(400): unsure at all n locations
gagaagagatcaatcatctatctttcaatcttctctcaacatcattcaatatctttcaactctttctacagaattttctgattctttttcttttcatctttctaaaagtttttgttcaaaactttctcttccaagaaaagttctttgttcaaaaacttgtgctactcatctttttcattctcttcttcttttgccaaaagaatgaaggactaactgtctgaattattttctgtctcttttctcccttacaaaagattcaaaggactaatcgcctgagaattcttttggttcttccctttcccttaagcaaaagatttcaaaggactaatggcctgataattctttgtcccaacacatnggagggtacatcctttgtggtacaagtagagggtaaatctac

SEQ ID NO: 234997 - DNA, 467 bp, Glycine max
  unsure (1)..(467): unsure at all n locations
atgtggcagggcgggtttccttcactttcttgtttccaacgcgagctctgaccactgttcttccttcccgcgatgcttcttttcatgtccgcctgagtgggcttatatcccaaaccatacttcccacgattcccatgggttnttatcagactaattatgccgccattgtctttgcctaaacccatcccgggttcataaccgttccccaacataactcgggccatcattaccgccgcctcggacagacaaggttgcccaaagagggagtctacggaggaaatgctgaccacctcaaaagactggaaagcggtttctaacgattcttctgcggcttccacataaggcatggaggatgggcagcttaccaagatatcttcctcgcctgacacgatgaccaagtgcccctncactacgaacttcagcttttggtggagtgtagaaggcacaacccccactgagtggatcca

SEQ ID NO: 234998 - DNA, 416 bp, Glycine max
  unsure (1)..(416): unsure at all n locations
agggatgaaaagaagatacccctcttcagactttcaaattctagtgtagctttgtcagtgtcaatttcacatagaacatcccccacttctatctgttagaataattagtaccaatgtcgacaagattaattaattcatagaagtcagtctccaaaatgagagcatcagcacaaacaaaagtatgatccataaccatcaaaatataagaactatatactaactgaccttttctccttctttcttcctccattntgcaatattaccttgggtctgaaaccaaaagatgaggtcaacaaccgtacgtggaagccctaaacagaatagagataatacaaagagagagaagaactgtttccccaagcttaccattgtaggagataaagcaggcatcccaaggacttcatgtgaagaatcta

SEQ ID NO: 234999 - DNA, 374 bp, Glycine max
ttattctattggtaaacaaaaaataatgtacagctggatgttatgcatttggcattcattttgcgccatatgatttatgaataaatatgattaatcttgtatgataaataagtaagacttaaaaagaaacgaatgtcatctttatcgttatctacatataattaagggagcaataggaatatatttttttaagacacttccttgtttttttatatgtgaatttattaaaaatacaaaatcaatatagattgattaaaacatgagatgaactataatttataactcttagtttaaatatatttttagacactaaagaacataccatccaaagcatgtatgagagcgcgctcataacatatctctatgattattat

SEQ ID NO: 235000 - DNA, 143 bp, Glycine max
gttttcttaccatcaagaataacacactcattagaaggaaaaggtaagatatccaaaggagtcaaaggattaaagtcatacacaactccgaaaggagaataagaagtagtagaatgaacagacctattataagcaaactcaac

SEQ ID NO: 235001 - DNA, 165 bp, Glycine max
ctggtacactgtgaacttgagaagaagccatgaaaccttaaggtcactcttcctttttacttaattgggccccccttttcttctttcccctaaagatctttaagctttatcaggcattatgggggagccctttcctgttatcccagggaggggctcccctccttt

SEQ ID NO: 235002 - DNA, 445 bp, Glycine max
  unsure (1)..(445): unsure at all n locations
ctgcagctatgcccggaaatgtattatgaaattgattatgccgaagaaacaccatttcctagttaaccatgcattaggtaccatgttcaattattttgtttttaagtgaaacgggtttatgatcccaacatggttggctcgtggtgcctaacacatgaaactaagaatgtagtgtgaagtttcacgcttcccccttctttgtttttggttttgttttggagaggaaaacgcaaggatgagcaaacatgaaaacaaatggtatgcaattttgcagatcaaaaagtttgttgaacgcatatgcatgatgatgccatgactcatgcaaaatgtgaggctggaatatgataacggacaaatgcaggatatgtccattatgatgttatgaagagatgcttatgcgatgcatgatatgaatgcattntacggacatgagagcccgggaaat

SEQ ID NO: 235003 - DNA, 403 bp, Glycine max
taacagaagaaaagaagagtttttttttttataaaaaacaaagacaaaggtgaaggttttttaacacatgctcccaaacgaacatataggccaaaacgaacacatgcgtgctaacaaacatatatgccaaaacgaaccacatacaaacgggtaaaaaaaaagaacaaaatataaacaatggtaggcattaaaactgatgcaatcctaccccgcaagggcattggatataaaactccaagtagattgggccacagatgcaagagaaggccctagggttcttatgagccttatggtagatttctggcccatgggctaagtacgagcccacttatctttgtaaatattagattaaggtttcattatctttgggcctcgtatttagggctccataatgtaggtaggg

SEQ ID NO: 235004 - DNA, 360 bp, Glycine max
  unsure (1)..(360): unsure at all n locations
gcttctataagtnctaatgacatttagactanggaaaattccctttaacctccaaattccactaaagccagatttggccttccaactctcaaagcctcactctttntccactcataacactacattctcactttctaaccgtaagttaactctacccttcatccctaacaggtttccatcaacaatttcagcacataaacatcacaagcatatcataaaaccctaaactgaatgggtaagcttgactcacaccaaacaatggaagttcaacacactttcaacaaatctcttcgcaaataactatcacaaagcatataccacataaaactacccatcatatctctcaaagccccataccca

SEQ ID NO: 235005 - DNA, 288 bp, Glycine max
tttttttccgggtagcacaagacacatttcttttgcccacttctgagattacaagtgtaacgtagtgcacatcctaatcctattaacttcaaaggtgtggatagtctatgacgctttgatataacaggccctatcttaatgcacaaccatgtgtatgggagtctaatacaatttttttttttaacacaaatctggagagggcctctgataagtcacaacttatgtttgaactaatactgccaggataatcttccattcttctggtttgttggaccgaattgataatgt

SEQ ID NO: 235006 - DNA, 111 bp, Glycine max
gcccaggccgagacagaaatggacacgatgacaggggataccttgcccgaatcaactatgagaagaagcaagcgacatgccactaagcggcgcggacctggaattcaccgc

SEQ ID NO: 235007 - DNA, 207 bp, Glycine max
agggcaaagcaagggaagagcaagggaaagaaaacgacagcgaacgaaaagggacgaaaaaaaacgaaaggaaaagcaaggaaaagggaaggaagagcaggggaaagaaacggcaccgaagcgaacgaagaggaaacaaacggacagacaaagaaagaagcacacaaaaaagaagggaagggacagagaagaaaagggaaaaaaaga

SEQ ID NO: 235008 - DNA, 418 bp, Glycine max
  unsure (1)..(418): unsure at all n locations
gccgcagcagcccgaaagaaaaaattatattgtttttgtttcnacaaactctaatcgagggaggaattgttggataacaattccaacttcaaaataaatggagctgacgaagattcaaggagaattttttaagaatttgtctctctgttcaaagattacgatgtgataatatttggattttgtattgctatttagctctatatatagagccaaaaataaaaattctatagcatgttccatctaagatcccttggacgtgtgggtaattctgttgtgcgtagaagagttttntcaacacacttctttctgcttccattacaaatgtcctgcatccaatcttgtgctaatcagttctacatattccaggtggaaaaaaaatcacctttcttttactttcagtctctcttatcttcgatat

SEQ ID NO: 235009 - DNA, 273 bp, Glycine max
  unsure (1)..(273): unsure at all n locations
tgacgccttgaactttttttagngacaccttgcttcaggctataagatctggccacaaactgtggccacatggatgaccacggggtacacgcggataatttactcgccagttacatggtaacggccacattgcaggcttaaagggccatttaatacttcgataaacctaccttggattaacgaccttatgagctaaacatcctcattgccgcagatacttaagagacggctcgagcaaccttgaaatttctaccggatcaatcagaaattact

SEQ ID NO: 235010 - DNA, 380 bp, Glycine max
  unsure (1)..(380): unsure at all n locations
tgctagagggggaggggcacgaaggttataccccaggattatntggacgacgaccngacaacataggatgtcaatgatggccacaagagagcactggtggtatgagaggcgcttaatgacaacatggtcgacattgtggatggcgaggagttatgggtgacaatcaacttgtaatagttcgtacttgatccataatccactcgttaatatagttatgattaaatgcttgtacttgactcaaaataagctattatataatgaccgaccttgactccatagttcgatccattggtctgaactcctcaaaatatatttatagagggttttatattataatgcacggggtatctttttttgtgctacttgggggattttttttg

SEQ ID NO: 235011 - DNA, 327 bp, Glycine max
gctcttataggcgaccacagagtggtacctgaagatatgtcgcaaggcgcaagagaccttgcggacgtcaagtggggtgctattgcccaaaaccaagcttgaccaatccccacccaacccgggcatagtcggacagggagaacctgtgatgtacctatgcaagcgagctcctggcagtcaacagataaaaggaaaacaagaccacaaagcacggaggcttgtggcggctggccaactgcgaatttagtgtaatatgtggattgtggcctctggtaatcgactaccaagggtgggtaatcgattacaagggctaaaattgaagacagg

SEQ ID NO: 235012 - DNA, 370 bp, Glycine max
  unsure (1)..(370): unsure at all n locations
atcaacagggggaaacaatatcaatacaatatcaatgtccagcatatttgttttgacatgaaagtacaataagcatggtgagatccaactataatagtgataatgcatgaaagtgtcatcactcgtacatgacatgtaaagtgatgagatgtttcatgtgcagttgtatttgttgcaattgaacatcaatatttgaattattatggtganaatcactgtccaactctctataataggacaacattgaatgagtcaaattatttaaaaatgacaataaaagctatgaagatgttctaacttattttacaagttctcttatatacttatctaaaagcttatgccaatttataaaagatacactttgatcatg

SEQ ID NO: 235013 - DNA, 166 bp, Glycine max
tcaatacaatttataagcccaacatagtaacacatctgcgttaggaatggatgagtactttagggtatcgaattgtataagcgcataagatatgttggataccctacaggtaacacatgatggtacaatatatgtaaaaagatctatgatacctcacggactcatg

SEQ ID NO: 235014 - DNA, 410 bp, Glycine max
  unsure (1)..(410): unsure at all n locations
tctctatgcttaagcgaggtttgtatcttctcttaagcanngaaaccaggagctcattttctcttgcaagtcatcttgcttacgcctggtctagtgataaacctcaaaattactcatatttcatatgcaatttgagatgtttatttgatactttaggccttgttttgaatcaaatttgttatgttttcaatttttaatatattttagatatgtgtcgtaccctaatttcatccgaggaccattgtttggtggcatgcaacctttgctcgaccgcctcgaggtacttaacacccatcgttaggtaatccgtaaagtttcgcaacattcaggaggtcacaaagaagattgttgcgtaatccataaagtttcacaccattctagaaagaaaatgggtgtcgtacgtaatccgc

SEQ ID NO: 235015 - DNA, 184 bp, Glycine max
  unsure (1)..(184): unsure at all n locations
agagnactttcaatggtttgacttttcaatggttaagtttctaaagtataactttcaaatggtccttgcccgacctgaaagtcataaagccggctttggttgaatctcaaacatcttttaagcacaactttcatccaatgtcatcttcaatcactttctttcaatcatactttcaatattattc

SEQ ID NO: 235016 - DNA, 316 bp, Glycine max
caaaaatgggcaattaacttgaatggcctttactgtctatgcggaaagtattctgcgcttcactatccatgttctcacattattgcagctagcggttacgtgagcattgactactaccaatatatatatgtggttacaccaatgagcacatcttaatagcttactccgcacagtggtggccttttgagaatgaaacggcaattcctccttctgatgagggtgggacacttatccctgacccactacaattcgtgctaaatgtctgtcaaattcaacaatgactaggaatgatacggattgggttaaccttctgcca

SEQ ID NO: 235017 - DNA, 267 bp, Glycine max
  unsure (1)..(267): unsure at all n locations
gtcttcattcgttcttcatcggtcttcagtcttcaacgggtaagtacctcaaaccaagctttttaattcattctacgtaccccggggtggccacattttggttcatggtattttattctcgtgttcatttactttttatacccccttttgacgcgctnttaccgattatttaagccgctttctcacctaataaataataaaatgaattccactgatcattcggttgtaatcttattaatcacttttaaaacgaaatctatcgatcgt

SEQ ID NO: 235018 - DNA, 461 bp, Glycine max
  unsure (1)..(461): unsure at all n locations
gctaaagaggaagcttcaatggaggaagagaatgagagagttggtgggcggnggaattaaatgagattacggagagaagttgaactttgaaatgtgtctcataagtttctcattcatcaaagttgtgacaagcgttacacatgtttctatttatagcctacgccaataactaaatttgtgaatttcattttcatttcttgtgaatctaaaaggaatattcttaaaatatgccaaatgcatcttagcatattctctttagatgccacaagcatggaaagtgtgactctagcacatgggaagcttccttgagaaacaaggaatgtagctttttccttgggaagcaaggaaggtagctttcttgagaagctagaggttatctactcacaccccctccataactaagcttactcccatgttcaaatacatgaatatacaaaaaagttcttactacaagactactc

SEQ ID NO: 235019 - DNA, 379 bp, Glycine max
  unsure (1)..(379): unsure at all n locations
gtcaactctgttcttaaaaatgtgacctaagcacttatgccataatgcntcctgagttgtattatcaattctacgcttagtaccacgcaattctgcattaaagggttcaccatacgaagctacaatgtcaagtaaatatagattatcattaaccatgagtgaactagttctaacaatatctaaattaaaagacaacctgaacacattgtttccaaatgaacacaaataaccctatttgtccaaataagaaactgaaaccaaattttttctaaatgacggtacaacaaaagtgtctttcaaatccaaataaaaaccagtacataataataatctaaagtgccctatagcttccacttccatcgattaccatctccaacat

SEQ ID NO: 235020 - DNA, 419 bp, Glycine max
  unsure (1)..(419): unsure at all n locations
cttgcttctacagaaaggaggaaaatattacttaaataatttgtctcccacacaatattgtgcttgaactcgaccattgaatctaagtaactaaattttcttgaagtttttgtgattcacatattactttcatatccaagtgtggaagcaatgacttccaagatntatttgatgatgccaaagaatcaagagttaagcaaattccaaagattcaagaatcaagatacaagattcaagaatcaagtttcaagaatcaagattcaagaataatcaagttcaagattcaagactcaagattcaagaatcaagagaagactcagtcaagataagtactacaataagttttcaaaacattgagtagcacaagaatttttcacacaatcttttacccaagaagtttactctctggtaatcgatta

SEQ ID NO: 235021 - DNA, 442 bp, Glycine max
  unsure (1)..(442): unsure at all n locations
agcttggctatcatttatgcgagtatgatccttatgctagctatcatcgccaagtaccaagaagagttaggtctagccatggcccacgagcatagaatcgcggatgagtatgctcaagtatacgcggaaaaagaggctagaggaagggtgatcgactctttacaccaagaggcaaccatgtggatggatcggtttgctcttaccttgaacgagagtcaagaacttccccgattgttagccaaggccaaggcgatgacagacacctactccgcccccgaagagattcatgggcttctcggctattgtcagcatatgatagacttaatggcccacataattagaaatcattaggaaacttgtatggtctctcagaccttgactagatacgacttcctttttgaataaaatgagtgggtcccatgtttctactccanaaagcttg

SEQ ID NO: 235022 - DNA, 424 bp, Glycine max
  unsure (1)..(424): unsure at all n locations
ctttaattctattcataatcctgcctcttgtttgaaaattatgagtngatgggggttataactaatcagtgagccaattattcccacataaacgctggcagctaagccctgggttgacatcctacttgtccagttgaagcagggtactaatgtgtagtcatgggctcacatcacgggtagactaaatcatgcaactgttatattaattttctacctaagaatctatagattagaaaccctgtatttgccacctcagtcattcatgattaacatctatgaactggagggaatgactcatttcttctatttaacctacttaggtatgattctttttgagctatggtacaaaaggaactattatttgaacacttgagccataatgattctgatcatatgccagcaaaaacaactatttgcagctata

SEQ ID NO: 235023 - DNA, 433 bp, Glycine max
  unsure (1)..(433): unsure at all n locations
agctggtaggattatggggtaccctatttatgtggtactaggnggcggtcgggcgatggtgcacaacaagtttttccacatccacaaatcgcgcataaacccaccatcccctgttgcccacctcccaactgagctcatgtactcctacgtagcccatatcctcgtttctctcaacaccgggtccccatcaatcctctcaagcttccccaacatccaagtgcaacaacattcaaacagcacaaactatcacagccaagaaaacagagcaaaggcagaaaactctgccaaaacaccaaccaaaatcacaccttttctcacttaaagaccccagtaacaattccttcgttccaattcgttaaccgttggatcgactccaaaattttactggaagtctctagtacataagcctacattntgaccggtggtatctact

SEQ ID NO: 235024 - DNA, 370 bp, Glycine max
  unsure (1)..(370): unsure at all n locations
gtgtccgcataaatcactaanaaccgttgtaaggtccatctccttaaatgggcctctntgctcttatcaggtaacatggactgttcaaagcataaaatcaacatgtaactttacccctttttgcaagaactacagtacgtctgattttctcatcgcaaattgaagatacgtaggatcaaaagccccgcttttgtggaccaccccaagagatcattaatggccaatgccttaacggttatttctttcaaaacaaagagatcggcaatggccaacaccttacgtttttttctttcaaagaataaattatctttaatgggccattcaagttttaatttttaaaacataaaccatttaaaaataaaacttttga

SEQ ID NO: 235025 - DNA, 415 bp, Glycine max
  unsure (1)..(415): unsure at all n locations
gcttgacttgagtcatcaagagtatattatttgagaccatggcatgagttgaattaatgaatccttcaatatctttataaagaatcatcaatcatctatctttcaatcttctctcaacatcattcaatatctttcaactctttctactgaattttctgattcatttctcttcatctttctaaaactttntgatcaacactntctcttccaagaaaagttctttgttcaaaaacttgtgctattcagccttttcattctcttcttcctttgccaaaagaacgaaggactaaccgcctgaattcttttgtgtctctcttctccctttgccaaaagaacgaaggactaaccgcctgaattcttttgtgtctctctacttgggttggttgaactgagaacaagagagggtacatctctt

SEQ ID NO: 235026 - DNA, 384 bp, Glycine max
  unsure (1)..(384): unsure at all n locations
cttcacggtcacatgctatgcaaacatcaaccatntngtctcatattccttctccnttactttttcccaattcacttctcttttgctccaacttctgaatgctttactttcaagataagaataaattttatgggcgtggaaaattactttttgaattctcatattttcattgaataaaatgataaaaacatctttttatgaatataatatgaaaataacataattaaataaatttctttatatattaaaaatattcaatgaaaaattatttctacaaagccttcacatgaccattattttaaggaaaatgttatcaaatactctaaaataatggttaaaaaataacatatttttattataaatgtacaatgatagtctatgaat

SEQ ID NO: 235027 - DNA, 390 bp, Glycine max
tttgacatttccataatgtatccctgacatttcttttgccttgatacttcatggaaatcaagttctgaaggagagtacttgtttccgccttatcgctttttgcaaagcgcttttcaatttcagcaatgaattctttggcactggttatatcatctgaaacaacgcccctaaagacctcaggaatgccacgcttaatgatatatctcatcacaagattcccaatgcaccattaatatcaagtctttggacaatgatattaattgctaatgaaatccttgttgtaagttcaaacattgataataaaagcatgtcaaataacaaacccatctcaatactagaaaaatggcaattagcaaccgaaattagcgaccgaataatttagtccctgta

SEQ ID NO: 235028 - DNA, 410 bp, Glycine max
  unsure (1)..(410): unsure at all n locations
tgggcttattctatntttctcttcttcttctttccttcttcttcttgccaaaagaattcanagaactaaccgtctgagaattcttttgattcattccttctccctcctgccaagagaattcaaagaactaaccgtctgagaattcttttgattctttccttctccctcttgccaaaagaattcaaagaactaatcgtctgagaattcttttcattcattccttctccctcttgccaaaagaattcaaagaactaaccatttgagaattcttttgattccccaaaaaaagaattcaaagaactaaccgtctgagaattntgtgtaagaagcgggtagcttcttggttgtaatagtgaacacaagggagggtacatcctttgtggtcacttcaagtagagggtacatctact

SEQ ID NO: 235029 - DNA, 389 bp, Glycine max
taatttgacaacatttcacagaaatgaatgactcgagcatacttaagctatgcatggcaaatgtaattatgaaattgagatgcctgaagaaacatattttcttagttaaccatgcattaggtaccatgttcaatcattttgtttttaagtgaaacgggtttatgatcccaacatggttggctcatggtaccgaacatatgcaactaagaatgctgcgtgaattttcatgcttccttttttgtttttgttttgaataggaaaatgcaaggatcatgtatgagtaaacatgaaaaaaatggtatgcaaaaaacatgttatatgcagatgcatggtgatgaagtgacttatgcaaaatgcaatgcatgaatatggtaagtgacaaatacagg

SEQ ID NO: 235030 - DNA, 314 bp, Glycine max
  unsure (1)..(314): unsure at all n locations
taactctgacgtgacccttattttcttcctttgcataatngntcaattctttcttctcaatgttggctcgaacttttaaatgcaactccttgatagaatctgcctttttcttaccatcaaaattaacatactcattagaaggaaaaggtaatatatccaaaggagtcaaaggattaaagtcatacacaacttcgaaaggagaataagaagtagtagaatgaacagacctattataagcaaactcaacatgtggcaagcatttctcccacgttttcaaattcttttgaatgatagcatgcaacaaggtggtaaat

SEQ ID NO: 235031 - DNA, 347 bp, Glycine max
gtttcttaagaaagcttctcaaggaagctacctagtctataaatagaagcatgtgtaacacttgttgaactttgatgaatgaaagtcttatgagatacacttcaaagttccacttctttccctcttttattccttcaatttcgtgctccccccttctctctttcttttcctccattaaagcatcctcttcaagcttcttatccaaggcaattattggtggtgaagctccttcttccttggcttattccctagtggatggtgcctcccctctcctcttctcctttgccttccgttgcatctccatggtgaaaaatcaccattgaaggacctcattgaagctcaaagat

SEQ ID NO: 235032 - DNA, 300 bp, Glycine max
  unsure (1)..(300): unsure at all n locations
tctgagtctcggcatgatgacagagtgggtggaagggttcaagaggactgcangtgatcactccaagtgtagaatatttgttacaagctcacttgtttgtcttgaacaacagcaatgaagttttgccatacattgttaagcatgaagctttagtcaaacagaataatccgaaaatgtcaaagaattgggtgttgaaaaagcataacaagactttctgtgattggttaaagatacaattttgcagatgagaatgttcagaacattaagaagctacagagggcctaaagaaagtttaacctg

SEQ ID NO: 235033 - DNA, 284 bp, Glycine max
gcaatcaatgactccaaattgtgtatggcaagaagaggtaagttggagggaactctacttcgtttgagatatacccttgttaggagtaatactcaatcttatgatattgacctatagttgaaacctatacgctattgatatgctgaataataatgaattgtttatttgtgtagatttttaactcattttatttatccactatttatggtaaaaagctttgccttttattgttggcagtaatagcctgattctactaaatttattctgatttttatagcaaataa

SEQ ID NO: 235034 - DNA, 323 bp, Glycine max
  unsure (1)..(323): unsure at all n locations
gagagttttttaatgccatacaagagacttttttgagtctatgttataactcanaacgggcacgttgtaacagggtgaccatattattaaaggtttacaaaagcataagcgtgcttattatgtctaataatggggaaggtgagacctccgcttatggtgcttcactttaaaaagtaaaatcagttccaaagtgtgagccccactcaatcaacattaaagatgataccttactataactgataatatgtaaaaccctggttcgagatataaagaataaacattgacatgacattgttagcatcgttgccttgtcattttaaatt

SEQ ID NO: 235035 - DNA, 452 bp, Glycine max
  unsure (1)..(452): unsure at all n locations
gcttctcanggaagctacctagtgtatatttagtattcatgnngaacacctgttgtaactttgatgaatgagagtcttgtgagacatacttcaaaggtccacttctctccctcttttattccttcaatttcgtgctcccccctctctctttctctccctctttcttttcctccattgaagcatccttccaagcttcttatccaaggctcatcttgggggagaagctccttcttccatggcttattccctaggggatgccgcctcctctcacctcttctcctttgtcttccgctacatctccatggtggaaaatcaccattaaaggacctcattgaagctcaaagatccagcctccatagaagccccacaagcaagtttccatcacgaccccatgtgtcgctaagcgggattgtggttttttatgaaggccagctaagcggaccatgtctcgc

SEQ ID NO: 235036 - DNA, 439 bp, Glycine max
catgcaagcttctcttggaccatgaacaagttatttatttctctttcagaaccatgctatgtgctcgcgactggtccctttcttccctttgcaacttgagttcactattgctaccccataaagctccgcgaaatttgttccggccatactctttcttgcgagccctcttggtctctagtcaagggctcttgcggtaattgcattctcttcccggaacccggcgcactccttccgaacgtgtgtagcagccaacttgaacttctccttggcgagttttgcctttcctaactcgcttttgagagcttggacttcttcgtcctcttccggagcttcaaaattctcttcgctgacgacttttaacttggcgagccaatctaaacctcgtatgcgaactttcagccattcgtggtacccaccaatgatgccattacgaatgcct

SEQ ID NO: 235037 - DNA, 462 bp, Glycine max
  unsure (1)..(462): unsure at all n locations
tctcaggatggtgtctcaaagaagtttctatggaagttttctcaagaaatcttctcaaggaagctacctagtctataaatataagcatgtgtaacacttgttgtaactntgatgaataagaatcttgtgagacacaactcanagttcaacttctctccctttttcttcctctcaatttgtgctcccccctctctctttcactccctatttcttttcatccattgaagcatcctctctaagcttcttatccaaggctcatcttggtggtgaagctccttcttccatggcttattccctagtggatggcgcctcctctcacctcttctcctttgtcttctgctgcatctccatggtggaaaatcaccattagaggacctcattgaagctcanagatctagcctncatagaagtcccacaagcaagcttccatcaacatcttttttgccatatctactacgcagc

SEQ ID NO: 235038 - DNA, 376 bp, Glycine max
aacatataccacagactctggcgacagggacagatatttgattcaaggccagttatgtcagcaagttaaccaatgcatctagtttgccttcaagcgtcttagtcctaatatgatgtaaatgagtttgtagctacctcatgcactcctctaatgactatggcatcatttctggcgctaaactgttgggagttggaagccatcttctcaatcaaatttttggcttcaacaggagtcatgtctttaagggctccaccactgggcaacattatcacacttcttctcattatactgagtccttcatagaaatattggagaaaaaagtgttcctaaattagatgtggagggcagctggcacataattttttatatctctcca

SEQ ID NO: 235039 - DNA, 382 bp, Glycine max
  unsure (1)..(382): unsure at all n locations
ntaactgaaacactaagnaagnngctcttttcaatcgcattctanncttcctttaccctcatctatgttgcaggttacaagttgcacactctttgatggagctcatgggtcangcttgtatattcccactgaagaaacatctcatgagagtaattacatgggaaaccagcctagacaaaattctaatgcaggtggaatttctggattgcaacatggacaaccttaccagcaacataatcaatggagaactcaccctggtaatcagttcaataaagaccagggtggactacctaacaggctacaacaacaagggccgagcttatctgagagaacaacaaagttggaagaaactcttgctcaatttatgcaggtttcattgact

SEQ ID NO: 235040 - DNA, 126 bp, Glycine max
acccgaataaataaacattttatgtagtaactaggaagtgacctaggtcgtttcccacgagcagtgacaagccaaatgttcataatatacttgcaggaacagtaacagtaatgatggggggggggg

SEQ ID NO: 235041 - DNA, 425 bp, Glycine max
  unsure (1)..(425): unsure at all n locations
tgcaagcttcaacctagaggagacggactcatttttttgttggagaanancaatgacaatgcctacaagattgactcgcctagtgagtataatgtaagtgccactntcaatgtgtctgatctatctctttttgatgcagatggaggggccttggatttgaggacaaatccttttcaagaagcagggagtgatgaggacataaccaaggtcaaggaccatgaagcacttgaagggcccatgaccagaggcagacttaaacaagcccaacacgtcatagagacaaggctagtcatttgtatagctgccattgatgatgattgaaggcccaagtggagaaagatgaaggcccaaaggtagaggcactacccagactacntaattgtgctgaaggcccaaactaacttgaaggcccaagttaaataagt

SEQ ID NO: 235042 - DNA, 188 bp, Glycine max
caatctctgaaatttaaaatgaaatgtatgaatgacgacctgatggatgccctgatttgttatacaactaaattacccaaaagcctacccttgaatataatatgatcctttgcaccctttgtgagcctaaatacattttcaaaatggaaccctaacttgaattaataacttctgagaccctgcttgga

SEQ ID NO: 235043 - DNA, 472 bp, Glycine max
  unsure (1)..(472): unsure at all n locations
cacctgccgcatgcaagcttagggtctaggagagcattcatccttttttaaccttcactttttcattcattccttccccatgcttgcccttttttcttaggcactattttctttgaccatttcaatccttacctagtgcctcccccaaatttgaaacaaatatgccttgaaccatcttctgtggatgattctctcctacaacctaaaataaggtagtagaagatttaactgaatagtctcgaggttcaatcaattcattcagctcaaactgggtgcaagggataattcattcaaccacaaggttagctttttggctaagtagctattcataatcaagcatgcgatacaattaatgcattccttcacaatcaatctgacaaccgactaacattttcagacataaatccaatcataggctcattctcttctaatgatggcaaacttgatcaanacaatcatccattcaattcat

SEQ ID NO: 235044 - DNA, 373 bp, Glycine max
  unsure (1)..(373): unsure at all n locations
ttcanaaacctattnttgtggacgagcttgactaggtgttgttattttatccttagnttcactttagttattagtcaattcaattaagaatgagaaatcccaaagaggaaacgtccgattgattttccgctttattntactaaaagatgctttttttattattatattattattttacctcttttttgatttccaacgtggttacgacacgaccgaacgggcggaattcattttaacccgagttaacagataatacaatttacacgatcggtggaaatttattttatntttaggntaagcgagaaatgacttatataaaatggcttaagcacgtcaaaagggggtataaaaagtaaatgaaatgagaataaaa

SEQ ID NO: 235045 - DNA, 354 bp, Glycine max
aatcattctgctttgatgaatgagaaaactggggcaaataaagaggatgagaaagagggagaaacccatgctgtgactgccattcctatacggccaagttccccaccagctcaacaccaacattactcggccaatatcagccattctcattacccaccacctatttatccacaaaggccatccctaaatcaaccacaaaacccacctaccacacaaccaatgctaaacaccacctttagcacaaaccaaaacaccaaccaagaaatgaattttgcagggaaaagcctgtaggatacaccccaaatttcggtgtcatatgctaacttgctcccatatctacttgataatgcaatg

SEQ ID NO: 235046 - DNA, 341 bp, Glycine max
ggtgcaccagcaaaaatgctaggtgcacctagcagcactcgaatgttgctagtatgtgattccctgtattgggtaattacgcacagtgccatgcgcatcacctaataggtaatgggttaaaggaaacactgatggttcaatgttgtgtgggtcaaaagggaattgtgtaacattcacagctttttttttaacagttggattcgtgcaacattccttcatactaccatgtagcaacattccttcatactactatgtagcaccattctttatactgattgaaaatgtaaagttgcctacaatgtttctcgtctttctaatatacaatcaatgactttagtcct

SEQ ID NO: 235047 - DNA, 327 bp, Glycine max
ataaacattaaaatgcaaggactaggaattgaccataggtcgtttcccaacgagcaataataaaccaaatgttcataatatacttgcagtaacagtaacaattgaggggggggggggtgtttgttttgtgaattaaagaacaagcgaactgtagtactaaatgaagagtatcaaaaacgtgttgtttcctctgattcagaagccattctcttgccctaggatatgaagaatttgtccctaacagttaaccacttaattcaaacctatttagtttactaatcgaaaataacttagggtttgcaattccgtattaggcgacgcatacac

SEQ ID NO: 235048 - DNA, 323 bp, Glycine max
aatgtaaatctagagccagcttatgcgcatatatccttacgaacgttctcttgcacaagacattctattaactaagaaaaatgcacccatatacaatcaaggcagcttcgttacctacattatttatacgtacttccaaggtgtatttgttacttacatcacacacatctgcttggctaaatttacatacatgcatactcaaagcattttggggtaccaaaaattgcacatgtgcacatcttggtatttctaatacctatacatacacaaacttcatgatgaatcgtgactatctacacaataaggcgctacattccatgctc

SEQ ID NO: 235049 - DNA, 356 bp, Glycine max
cctgaacctgaatgattatctacagataccttgtttatattctaggagagcatatggttcaaggcaaaattaccccattattggtggagtggaactgcttgggatgcaaagaaaaagattaagcatcaacacacacgacagatatgttgtgtgttaaaaaaaaaactatgaaaagaacagcttcaaagactatgtgtggtcaaaagcatatgaaagtgataagctcgtgagccagctaatttgtttaaaaagatcactttgataagaataagatttgagctctcttagaaactaatgctttgaatcctagaaaaaccaatgaattttgtagccaagcctcactaccagcctatgaa

SEQ ID NO: 235050 - DNA, 378 bp, Glycine max
aaaaaagggaaatctactctaaagatacatctaataatacccataattataacatgtccgttattaaccgccgagcgaataccggtatcttgctaggaattctaatcttccataattccttacaccattcctcttgccgacctcctgtaatagtttccaaaatcagattatatgcgctgcttgtcgaataatttcctgattgatcacctaaccactcccattgatctgatccttgctgctgaatgttcatgccttcgatctcccttaagaaattgatggctgactcgatttcattatcaaacagcgatcttctccacataaaatgccactcccaccctgaatgtagatgatgtcccatctgtctaataggttggttct

SEQ ID NO: 235051 - DNA, 367 bp, Glycine max
aaatcagcccctgactaactttaataaactaatatataaaaagcagctgcatgctattgcttgtgctattcatattgcgatactcactcactcaacgacatttttatcatttaattttggttcggatggaaaatggagtattccaatctccttttttaccagaatgtccttgccttagtatctaatatttttattcttgcatatacacaaaactacttgtgagttttctgagagataatcttatttggacatgagtctttataatcatattactaatataaagatattatatcatctcataaatgaaatagttcaacgtctttttaaaaagattaaacttaatttcattcagaataatgactaatta

SEQ ID NO: 235052 - DNA, 296 bp, Glycine max
accgacacaattgtggaactcgcaacacggaatctatttgtacacgatattttcaacacccttgtccttcccctgcaatccaccatgtgctccttcaaactccacgtgatcaacatctttttataatatccacaacaaactacgatgaccacgtgaaccattaatcattatttgtccctgttacccacattttgagcacgaccgataagaacaataaaaagtcgtctctattgagccgcctcacggtggcggtgcataacgtgaagttgctactaaacgccaccgtactcagccac

SEQ ID NO: 235053 - DNA, 373 bp, Glycine max
tctgctccgccgcccacctcctctgtttcccggaggtccagcccagcctcgagaaacacaccgaagacgtcgatttccaaacctacgataactctcagaacttctccaactacggaacgagtcgacccggcggaaccgactcgttcagaaactacgccaccaccttctccagccgtcccgacaacagtttccgccgctacagccgccgatccgccggccacgaggacagcttcgtcctctacggaggctccatcggcgacatctaccagaccttcaacacctatggcacttcctccgctggcggcgccggcgagttcaaacagtacgccaccgaatcaaacttccccgagcttgatttcaccacctactccga

SEQ ID NO: 235054 - DNA, 370 bp, Glycine max
  unsure (1)..(370): unsure at all n locations
gacatcaggcaaatngtgtgcgtggattgaattgaaaactcaatanccaacatccgtgcggaagtaggcgtctgatttttttcagcagagattgagcaatttttttttaaaacgctcgctggccgataatgttttttttttttacgacagaggatggtttcttcttttggtggtgcataaaaaatttacaatgtaggtcgactaggttttttgtgtgagctcaaccgaccttctgtttgggccgaaactggcatgtttccatttatttggacaggaaaacattagaccatctcggcaaaaaaatatattcaccgatatgatccaaaaaatgaagtggacatcggcaggaacatgactgacgagctgaaaa

SEQ ID NO: 235055 - DNA, 391 bp, Glycine max
gcaagcttcaagagcattatgggattcatatcttatttgggtgacaatagatcgtagtttactcccaggttcctctaaagccaataccgcagctgatattttggttggttgggctgtgaaaactgcttcttcacaatttttttggctttcccctcttgatgcagctagctcttactctcctgatgtagctcatatattacagcaatacatcgtaaatattgaaattgattcatgaatcacagcgtaactattgaaattgagtcatgaattacaataaaaaaaacaacaattaatacaacaatttggccagtttcaggattctcatcattccctccttcttggaaaacatttgcccttaaatgtccagatcatcatcgggttcaagtaccac

SEQ ID NO: 235056 - DNA, 332 bp, Glycine max
  unsure (1)..(332): unsure at all n locations
nttntcagtcatttgaaggatgattgtttgttagaaatcttcgatgctctaatgtagactgtttgtctcccatgtttaagttgtatgtaacttgtgttttcttcacagatggggcatgcatgatgacccttaacactgtaaccactgagatccccatatgctggaaagtcattaatggtacaaaaaagcattgcacgcatttcgaacgtttccttgcgaaacgcatcaaacactataacgccctcgttccacaactttctcagatattcaaccaatggacttagattaacatcaatgtcatttcctggctgtcttgggcccgatatcatcat

SEQ ID NO: 235057 - DNA, 377 bp, Glycine max
aatttgtttcccaaattctttgaaaatgtaaagatccaggtacattcagcataccttgttgtcataccctaatttcgtccggggacctttgcttgatgacatgcgacctttctttggtccttgtgaggtgcttggcacccatcattatgcaatttgtgaaattccaggacatgccggaaaaccaaaaaatattgatgcacaatccgtaagtttccgtgacacaccggaaatcaaatggaagcatcgttgcataattaagtgagattccgtaacattccgtaagtcaaaaaggggatgattatgtaatccgcaaggttccgtaacattacggaaagaaacaagtatcgttacgagattcgtaaggtcccgtaacttta

SEQ ID NO: 235058 - DNA, 401 bp, Glycine max
tcaggctgctcaattgctccatgttgctgcttggaatgtttaaggtctgtataggggtcagcagaagagcacaaaccacaaacccttgcgacaagtacagatttctgattaaggctagctgggttaccaagttgaccaacgcatccagtttgccttcaagcttcttagtttcagatgatgcagatgggtttgtagctacctcatgcactcctctaatgactatggcatcatttctggcactaaactgctgggagttggaggccatcttctcaattaaatttttggcttcagcaggagtcatgtctccaagggctccaccactggcagcatctatcatacttctctccatattactgagtccttcataaaagtattggagaagaaatgttcttgaatctgat

SEQ ID NO: 235059 - DNA, 310 bp, Glycine max
  unsure (1)..(310): unsure at all n locations
acgtttccatgagtaaatacgcgaagattctcgnaccgtcttcaagattcatcgntcgttcttcgttttcttcagtcttcaacgggtatgtacctcaaaccaagcttttcaattcgttctatgtacccgtggtggtccacattttgtttcatgtatttttattctncgtttcatctgttttttatacccccttttgacgtgcttaagccatttatttaagtcatttctcgcctaatctaaaaataaaataaattttcaccgatcgttngaattgtatcatccgttaantttggtaaaatgaattccgact

SEQ ID NO: 235060 - DNA, 341 bp, Glycine max
ccagctaaaaggggttgatcggctttctttttttcaacgaacgctacgccataatggtttgcttacgcgctctctcgctacgatacctaacgggcgctgagacctgacgggcctcacgaacatgacattacttttctgatcttcttgccttaccctaaggtcaccttacaagctcactaaccaacagatgctaacagaagggaaacacctttgcatttgctaattatctaaaatggaaaatgttataacaccaacaaaggtaatattatacctatttaacaaagtctatatatacaacacttaatggaagttgatcattccagtttattcaaagtatcttt

SEQ ID NO: 235061 - DNA, 300 bp, Glycine max
  unsure (1)..(300): unsure at all n locations
cttacaagcgtgcttaaacgcacactatgggctagcgcgaggagactttggngaagatgagtgtaccggtcctaaacgcccgctttatctcactaagcgcaccgcttcagtcatccgtaagcgagaaaggacgcgctaagccaaaattactaatgtgcgctaaggatccataattgcgtaagcgcacgaccaaacaagcccctattaagccaaaatcatattttggaaggagttggctgggattcaagcttgctgttaattttacaagaaaagccagttccgaagtttgaagattgtggg

SEQ ID NO: 235062 - DNA, 248 bp, Glycine max
cacattgaagtggatagacatttatcaaggaaaagatggatagtggtttgaacttgacacctttgcaaggtgaacctgcggatattctcactaaaggattgcgcactccaaatattgatagaacaatatgaaagcatggactggataacaactattctccagcttgagggggagagttggataaatgagcatttatcgatgattttctttcaagatagcttagtaatagttagtatcgtcaacgtttc

SEQ ID NO: 235063 - DNA, 379 bp, Glycine max
  unsure (1)..(379): unsure at all n locations
tgtttggtgaaagcaacaaattccggacatttcattttgntccggcaataactgtgagttgttgaataaataataagaatctaattttggaagtgaaatttgtgttttgtatgagtatattttaatcttgggaaattgaaaacatcccaaaataccaatgtgatcttttagcagattgcatccccactgagtatgcatgtgttttttacccgcattattgtgcttaattactacaaatccttttggttagtaaggttatcttatactaacttgaattggaagtctaagattattggtcagatccacataaatattttgccttttgaatcaagacaaacttgaaattcaatgtttttcccttctgaaagagcatgccgga

SEQ ID NO: 235064 - DNA, 363 bp, Glycine max
  unsure (1)..(363): unsure at all n locations
actaagctgatacagacttcaaagnatattatatcttggaaattatactaatttattncaaanacgggagggtaggagagagtaatctatgaagtgacacatcagaaacaagggaggcctcaaggggaaccaatcccctttttaatgagaatatcatacaccctgtcaattttcatggcattcatcttgaacaattgatgagcatcagattttgcagtgacagtgccagcaagtatttgtagaaacagctgctcttgcatctttagatacatggctggaggcaaccttaacttacagcataaaccgtttcttctgccaatgaaaatacagatgattctagataatcaatgaacttgtttttat

SEQ ID NO: 235065 - DNA, 407 bp, Glycine max
  unsure (1)..(407): unsure at all n locations
tgcaagctntctcttttgtgcaactatcttatttctttttaggtgcagaatgaagctngacaggttcaggtgcaggtgctgctactggtggaggcacttcaatttgcttgccagacctcaaggtgatggcactcacatttttcggattctgcacagtttgtgaagacaatttgttagaattttgggactgagcttggttcaactgagtagccatctgccccatctgccctatctaatttgtcagactctgaatggaggctcttgtctcttgctgaaattgcatattttggatggttatttgcctcactaactcttctaaggaaggttgaagaggggcctcaattgcttggtgtctttgttgggtgtgttgttgctgctcgtggttgtgcattggaagaggaacatat

SEQ ID NO: 235066 - DNA, 382 bp, Glycine max
  unsure (1)..(382): unsure at all n locations
ggacatgcttttggttttgcatgcgaggtctaacatgtcaggtgagggaagcctgtatatttggcaactctgtccttttctaacaggtggagaatgcattgaagacaaactttatgttttgtctgttaatgcanttgcgtgtagtgcacacgtagtactcttgcacacgtgtcactcgtggagtgggcacgtactaaatacgtgttgcgtgggatatgaagttgttttgtggtctccttttgccagtgaccaccgtcactttaaatttctatcttctttctctcgaagtataagttgtccctcacctacacagcaagtgtcgttgcaaacgccaggtgaagctagcaaatcctgatgaatcctgcaagataactgtcttagc

SEQ ID NO: 235067 - DNA, 361 bp, Glycine max
  unsure (1)..(361): unsure at all n locations
tactaccattcacatgaaatttatgtttattatttaatttaactaataatttaaaactggaacgtgattgttttccgtggaggatattttggaattatataatctttttagaaaaatagtttatttaattaaaaatatttcaataataattcataaatgttttattatatttcaagtgaattaattaatataaattttgtatcaaatgaaanatgtcttataattcaattcattgtataaatgagtctagtaagtcaagtcactatgacattgctacaagcccacctttgaaataagaaccttggatagatacaaagatgtgtttttttttaagccgaattgtttacttcatttcatacta

SEQ ID NO: 235068 - DNA, 319 bp, Glycine max
  unsure (1)..(319): unsure at all n locations
atgggggaatgtgctcaaatatgtggggcaattttggaatggtttcttgcttgattangttgaattgggggtttgtatgagatggccctatgcctataatgcattttgaagcaatgggacatgccacattgtccccgttctcttgctattgatgcctaaacgcgcgcccaccaagtgttcggtgaaatgcctcaatggcattagcgcatgatttttgtaggggaaaacaacccatggnggcaattggtttgcacatattttctattttttgggacatgcattcagtttcgaaagggctaaagtaattgccccacatata

SEQ ID NO: 235069 - DNA, 164 bp, Glycine max
  unsure (1)..(164): unsure at all n locations
tctaaactntgtacaagaatgaagctctgattccacttgttatacaagnggcctcanatatcttaagaaggggggggttgaattaagatattcgaaaccttttcccctaattaaaaatctatcttactttntacttaagttatgaattccccttatgacaatct

SEQ ID NO: 235070 - DNA, 341 bp, Glycine max
  unsure (1)..(341): unsure at all n locations
accaaaaccaagggggggagactttaagcctttctcgtacctcgatcanggcaccatgaaatgtacctagggttaaccgaaacaacacagacctangttagatgaaatgaagcttagacatgaagctaacttacattttagtaacttttgttctttaggtctattatttacattttagtaattcatgctcatagtatataaccatggatagatttactatgtagaccctgctgctccgggtgaacttaataattntggccatgtctttctttctagtcaagctcctgagggcatatcattgtgaatggtaagtttggagcaatgctatctataactgtcat

SEQ ID NO: 235071 - DNA, 147 bp, Glycine max
ataaaattatatattaaatgatatgaaggattgtcattcacagaaaaataaaaaatttattcatcaactggtatgtgaaatatatatatatatatatatataaatatatatatatatatataatgcggggaatttttcacatcatat

SEQ ID NO: 235072 - DNA, 389 bp, Glycine max
  unsure (1)..(389): unsure at all n locations
acatcaggaaaatatctgtaatttattatagaatcttaaattacttctaaggattagagtatcgtggatgatcctttangattagtttcttatcgtagaatatcccctaggattagttttacatatttcttactaatcaccatgatttgtttccttatttaagtaatcaggaatctattaatttatataaataaggtggggctttttctcttctctcttttctctctaaaaccctgtaacttcaaattttaggacatacataccacataaattagaattctcagcaaacccagagcaccggcgaggcggtaatcggtccattgaacaagaaacagaaaaagaggggctgctggactgtatgatatcctcatctgaaagcatccctcatc

SEQ ID NO: 235073 - DNA, 222 bp, Glycine max
  unsure (1)..(222): unsure at all n locations
tctatggatcacgnggatgttatttagcatgcttggtgttattccataaagctccagagaaaaagtcagaaaggagaaaacttgagttttcttttctcaaaatgtgcaaaggagtgttagagaagaaaatcagtcatggtttgagtttcccaagaacatatgattaagggagatactcggcgataaatcctcatcacaagagagtatcaaagtcctcttata

SEQ ID NO: 235074 - DNA, 415 bp, Glycine max
  unsure (1)..(415): unsure at all n locations
atatatccacaagagctccccttttacttangatgaacggcacaaattggttgctcaagatcactgtcactcaaactggcgggcaaactttcatgcgattgtagtacgccttcttgatctgcgctggaatggcatctggaaactggtgaaatggaacaaccactcattagtgattagacatacactatgatactaatatataccttgataatgatctctcatgtccctcaattatagcattattttaactgccacaattactctagatataactatcatattagctattttaaaacaacgataattntctatcatataacaatccataatctgagaataagtaaaaaagtttgaaacgactaagtattctaataaaattcttcattnttacattaaagccataagtgcgagaatt

SEQ ID NO: 235075 - DNA, 399 bp, Glycine max
gcttcctaacaaaaattttcatgcaggtagaccttcttctagtaattctgacttacagcagccttctatccctcttccattcccacctaaagcaattccaaacaaaaaaaatggaagaagcggaaaaggagatcttggagaccttcaagaaagtagaggtgaacatacctctgctagatgccatcaagcagattccaagatatgccaagcttctaaaggagttgtgcatccacaaaaggaagctcaaaggcaatgaacggattagcatgggtagaaatgtgtcagcattgataggtaaatctgttcctcacattcctgagaaatgtaaggacccaggtactttctgtataccttgcattattgggaaacaataaattgagaatgccatgctagatctag

SEQ ID NO: 235076 - DNA, 370 bp, Glycine max
  unsure (1)..(370): unsure at all n locations
accggcccaccttcccatttttataaatcatatcatacaccattgggggcattcacccagccactggtgagcgcatgtttgacatgaatgcaagagaatggagcaatgtggcatgccccaattgcttaaaaatacaacctatgcctaagggccttttcattcaaatcctcaattcaagaaaacaagcaccaaagcaaaccaaaactgcctcacaaatataagcatgttctcacaatttaaggcaccanaagatgaagaaaacacatcaatgtgaagcaaaaacatcaaggatggaatacttacttgntggagtgaatagaaacaccaaaaacgaaagcanaatgcgatcaaaagtggcttatgggagcaa

SEQ ID NO: 235077 - DNA, 338 bp, Glycine max
  unsure (1)..(338): unsure at all n locations
tctaatttgagccttggggcccatgaagacccaccttatggaagacttcctagcagaggntgttagcaatgactaaaccaccccaaactgctggaacctctacgtggatggagcttccaacgtgaagggagcatggcagatatcattcttgaagggccctacaatgttacttttaaagcaagcccttaaatttagtttcatggcattaaacaaccacgctgaatatgaggtgcttatagtaggcctaaagctagcaaaaaaagttggacaaggaaactcagttgctacagtgactcgcaacttgtccaacgacaggtggcaaacatatatcatgacaa

SEQ ID NO: 235078 - DNA, 326 bp, Glycine max
  unsure (1)..(326): unsure at all n locations
cactcagcttatatnatgaatctttggtcaacacttttcttcttatatatctcatgattaggttctatttgaaattcttggtaaactaagatcaccatcggcagtaatacataagagccatgaagtaaaaattccagctccatttgctgcttcattttcacctagagggccaaatacaggatctcaacatattctgaaagtactattaccaaaaagctgcaaaaatttctccattatatagttagtggacttatttttgatctttctgtaaactaaccataaggtagtatttaagaactaagtgagttttataatctatttgatgc

SEQ ID NO: 235079 - DNA, 389 bp, Glycine max
ttattagctatggatcacgcagggaaaatctaaagtcattgtacattatttaatcgcatattatcattaatatgagtttcatgtgatagattataaaatgtaacaaagttattgaatcttttttcgtcattcaatatgagggaactttcatattctattaatatttttaataaaagtagcataaagattatgcattctaaaatttatataaaaatattcaaaagataagacaatatgttaatttataatttatttttttattataaactaaaataaaaaatttacgtgaatagtgttatataagaagaaagttaaactcgcgtaacagcttgttaattatgataagactttctaattaaatattatctacatgacagtagatgagaata

SEQ ID NO: 235080 - DNA, 251 bp, Glycine max
ggaacttaaatctcaactatctgaaaatgattagtgacaattttattttttagggacaactggcggtgataacaaagccagcagctacgtatgataaggattaatttttagtatacaatagaaatgatttctaaatgtgatccataattgggcaaagaaaccttctttttggaaaaaattctcgagctaaataagacaatttttatcgaaaaattacattgttaccttcgttagccgatttttattattgg

SEQ ID NO: 235081 - DNA, 185 bp, Glycine max
aaacaaacccaccaggatttttatactgtgttaacacatacccgtgccaaccttcattccccaagcaacctggggtcctcgggaattcctttcaaccttgtggaaaaaccttttacaagcaaagatccacaaggaatggacccttccctttgttctctttgaacctaagggatgtacccttcact

SEQ ID NO: 235082 - DNA, 332 bp, Glycine max
  unsure (1)..(332): unsure at all n locations
gacaaaattcannatatgctattaaatgttgaaatattttttaaaaattctaccgtattcatttttttaatctaggaatgtcttagaaaaggacgtccctctcatcttcaagaatttcctaatcaaaaccttccatgaacttttttataagtaatgctttcatgcattcaaataaagaaaatttcttgttatnttcaaattccaactgtctttttaggcttcgacatagcttgataatttctttttaaaacaacacaaactaaatttaaaaattatttaaacaacctctctattatgtaatatggaattatctttgtctgattctcttattt

SEQ ID NO: 235083 - DNA, 293 bp, Glycine max
ccttgatatacctgacttagactgaggttttcattattttatccaaagaatctgggcttgataaaaatgtaaaaccctctaaggaaaaaagaaggaaatggagttgtaagtaaaattgtacgggcacaacgtgttctttccgacacagatttcttcaaagtaaaaataaaatcctttttctttcctcactaaactactttgtattcttgcaccatgtttgtgtttcaacccacctcttctcttctctttttcctcctcagaatttcatactctgcttctttaattacctcact

SEQ ID NO: 235084 - DNA, 333 bp, Glycine max
aactggaatgcttgttattgacacagtctcttgcacattggctatgcttgaagcaacaactgtactcctttaagatgacagattccagaacaattcactgagcaatcggctgatttcaataagatccttgacgatgtgggaaatattgtaataaacgcttgatgaggaggatagagctcttttgcttctgaattccttaccaaaatcctttgagcatttcaaggatgcaatcctttatggctaagatccatacattaccctaaaagatatccatacctcaataaggaccaaggagatgctaaaacaacaagactccatatctgatgataatgg

SEQ ID NO: 235085 - DNA, 410 bp, Glycine max
  unsure (1)..(410): unsure at all n locations
ttccattcccnccctctctctctaggggataagactattacctttaatagcttcctatatacaaaagcaaaaaagcaaagcatctcttctcactcctccacattgttttgctttcccttgcaagtttcaattcaaccttttctattacttagctgcctctttttcctttatagaccgattaacatacaattaacatttgtcggttgcatctttatgtgcaaaatccacccaaagtttagaatctccatcttatccaataattaaacgattagttaatgtggttaaaatgggtcaagagttcaacctttttagtcctccctgacccaaaacttttgcagctgttcgtagtttgatatgcatgagaaatccatgtcatgtgtaactttctcattaagccccacttttgatac

SEQ ID NO: 235086 - DNA, 319 bp, Glycine max
  unsure (1)..(319): unsure at all n locations
tatgctctacgacaatcaactcggcggcaatattccttttccatcgggaaccttaagagccttcaagtgataagagcaggtgganacaagaacctgtaaggccttttaccacaagaaattggcaattgttccagtttggtcatgttgggtcttgctgaaactagcctttcaggttctctacctccaactcttgggcttttgaagaaccttgaaaccattgccatttacacttccctactctcaggtgaaataccacctgaaactgggtactgcacagggctccaaaacatatatctttacgagaactccctcactggat

SEQ ID NO: 235087 - DNA, 389 bp, Glycine max
  unsure (1)..(389): unsure at all n locations
taatctacgagagggtatggaactcaatagtcggtggtaatctggaagcagagactanaaaaaaaaaagtaacatatagagatgaaaaataatttttttcaaaagaataaaacataaaagcaatcaggaaactaaaatatcctttaatttatatataataagtcataaaataaaataaataaaaaagagaagttgctgaccttgggaatggagccaatgttgcgtaactcctctgtttctcccaacctcagtctagagaatacctcatacattaggcaacctataaaattatgatttttaaatatgtgagagagggatacatagaaaggtaaagacaaaaaatattcaacgaacctataatatttgtccaagttgacatatattaaact

SEQ ID NO: 235088 - DNA, 355 bp, Glycine max
  unsure (1)..(355): unsure at all n locations
gtaggctgctcaactgctccaggttgctgcatggaatgtcaaaggtctatatggnggncagcagaggagcacaaacaacatacccttgcaacaggtacaaatttctgattaaagccagctgggttaccaagttaaccaatgcattcaatttgccttcaagcttcttaatctcagatgatgcagctgaatttgtagctacctcatgcactcctctaatgactatggcattatttctggcactaaactgctgggagttggaagccatcttctcaatttaatttctggcttcagcagaagtcatgtctccaaggggtccaccactggcagcatctatcatacttttctccatattact

SEQ ID NO: 235089 - DNA, 459 bp, Glycine max
  unsure (1)..(459): unsure at all n locations
agcttgaaagtgaacaacagatgctctctatatattcaaatggtcataacttatcacacgtaagtccgattctggcggatagtatatcgagaagctcataattgaacaacgaaagctctcaagaaattcaaatggtcataacttatcacacggaagtccgattaaggcgcataatgtatcgagacgcttgaaattgaacaacggaagcactcgagaaattcaaatggtcataactnatcacacggaagtccgattcagacgcataatatatcgagaagcttgaaattgaacaacggaagctctcgagaaattcacatgatcataacttttcacacggaagtccgattcaggtgcataatatatcgagaagcttgaaattgaacatcggaggctcttgagaaaatcaaatggtcataacttatcacacagaagtccgacttacgcgcataatatatctag

SEQ ID NO: 235090 - DNA, 321 bp, Glycine max
  unsure (1)..(321): unsure at all n locations
catatatgaatggtgaagagtactcacataataggacaatcatatatgctcgtatggagaggcgaactcatcgtcaaaaccacaacataatgcccctccattacaaagaagcgctgtgctcaacaagccatatgttcctcctccaatacagcagcagtcacaacaaagacagcaagcaactacggatcctcctcaacctttcttagaagagtttgtgatgcaaacgaccatccataatatgcaatttcagcaagagacaagagcctccattcacagtctgacaaatcatatgggacagaaggctactcanttgaaccaagc

SEQ ID NO: 235091 - DNA, 267 bp, Glycine max
tactctacatgcaagctgtgcgccttcagacactgagtcactgagaccacactccttataccgtaacctattaagttcatacacttccactctatatctactctctcttcctgccactatggacatatattggggctgaccataaggggaccaacatttgaccctcactgatcgtgcttaaaacttccttggcgagtctcctcataccctacttcacgctactagaggcgagctctcatgccacacttctgtatcttaactgcttta

SEQ ID NO: 235092 - DNA, 393 bp, Glycine max
  unsure (1)..(393): unsure at all n locations
caagagatgataaaagattgttcatactgtggcattacttcaacaaaggtggtccatatcttatatggtgaagtgtcctcacataataagacaatcttagatgttngttgtgggggcaatctcatgttaaagccacatgctaatgccatcaaaataattgaaggcatgtgctctaacccctacaataactcacgggatatcatgaatagaggcatgcaccacgtggagacatatggatcccaaactgagttgggaaagcaaatgcaagatctatcaatgaagattgagatactcatgagagctcaagctcatatcctcattactacaccttcattcccaacctatgataaatgtgggattatgcatgggccaagagaacgcactattgatgac

SEQ ID NO: 235093 - DNA, 416 bp, Glycine max
agctagacaataatctggttgtaaactatctaaatattattataggcaaagcaaacgagtaaataatatatttaattttatcaaaaaaacttttgtaaatattatttcttggcacaagaattatatttttttatataaattattggaccagtacttgtaaggaattgatatacccaatccccaacaggagagattgaaaaaaaaaaatcacatccatcataaataaggaaaaagaacagttttgggagaaaaatgaatacgaaaaacacaaaaagactagagaattttatttgtgggtgggtgtggagggagcttgcccaccctattttttatatcttgttttattaatattagatgttgtatgtcaaaaatacgacattcttatctttaaaaaaaaatttctatccacttataat

SEQ ID NO: 235094 - DNA, 439 bp, Glycine max
  unsure (1)..(439): unsure at all n locations
tctaaactagctcattaaatcataagtgttgggtaaacctaactgttgaagtaaatgaaaaatgaaaaataacataaatgagatatttaaaaaaggtaataagggaattaaataaatattttaagaataaataggaaataaaatataaaaagctagaagttagtgttttaaaaataccacttcaagtaatgttttcaaaaacactagaaactacttaaaaaaccatgtttaacgaacatagcttcaatatctttagacatccaatctggctttcctcttcttttttatgcttactttcttcttttgcttggttttatctttcttattttctttagncatcatagaaatttcacacacacatatatatagagagacaagagatccatcatttattttcttaagatccaatatttataataaataactaatcttaaccaat

SEQ ID NO: 235095 - DNA, 432 bp, Glycine max
  unsure (1)..(432): unsure at all n locations
nagcctattcatcactgcctgagtaagaggttagatatccctcggtggctcccctatcgcctttccttctaaacacctctagtttgacactcggttttacataattgcttggctgacatctgctcccctccttatctcctcattttgttgtcgtaaaatgtcttgtgcctgtaatgcctcatctgcaaccctctttgcttcctcattctaatggcataagaagtcccgggctcttaatgcctcatttgctattctcctaaaatccttgccttttctcctcatctccgccatcaaagtttccaacatcaatggtacaacgggaatccccaatgtggaatggctgttcattattccactcatgttgtcaaagaaacaatgcaaaacaagggcaatgggaaaagttttaccgtaccctcttaatgggtgcaaaat

SEQ ID NO: 235096 - DNA, 431 bp, Glycine max
tatcgtaatttattacacaattatttgtgaggcaatgattgattctttcatgagtctctactattatcaattacgaggggatatgatcgaatacttctcttttaaaagtgtttcagaagtgattaagaacactttaattgattacatcaagaatctaatcgatttcattgttcttgatagctttgcagattttgggaagaatactttattcaattgaaatgataatataattgatcacattgtatatttaattgattaaagatggttataactggtttctctataaatagccaccttgtgttctcacttctaataagttctaacaacttttgaatgagctagaaatacgagctgataattatgatacaaaaaaaaagaagaaaaagtgcttagaaatattgtgaatcataacttctaatatttgattatga

SEQ ID NO: 235097 - DNA, 322 bp, Glycine max
catatatgaatggtgaagagtactcacataataggacagtcatatatgtcgtatgtggaggcgaactcatcgtcaaaaccacaacagaatgcccctccattacaaagaagcgctgtgccaaacaagccatatgttcctcctccaatacagcagcagtcacaacaaagacagcaagcaactacggatcctcctcaaccttccttagaagagttagtgaggcaaatgaccatccagaatatgcaatttcagcaagagacaagagcctccattcagagtctgacaaatcagatgggacagatggctactcagttgaaccaagctc

SEQ ID NO: 235098 - DNA, 455 bp, Glycine max
  unsure (1)..(455): unsure at all n locations
agctngtcagctgtcacttattctttattatatggaaaagtcttaaatcttcgtcacttaaaaaaaattcaattgacaccagcgcaataaagtaacttaactttatttttttataagaagtttcctgcaggattatagagttttagaagatttttcaagaacaaataggaggcatagtgtagatcatgaactccttcaccttgtgcaaatgggttagacatcttttttttattgttgtctagaccatcactattcaaacactaccattagactaatattagacaccttttaatgtaactacattcttatggacttgattaattaagatcacttaagttagaacatcttttttaagataatttatgagttgattgtttaaaagtatattttatgtttgaaggtcaatttaggctagtatattttggggctgatctgggtgggctaacttaacaagc

SEQ ID NO: 235099 - DNA, 401 bp, Glycine max
  unsure (1)..(401): unsure at all n locations
gtttagagcgattcgactaattatggtatattgtacttgacttattanggtttaaggttacatgaccaattacggtttaaggttatttgaaaagatagggacgcttgactaatcgggtttaagggtatttgacaaatacaggattatggttacttgacgaactcggatttaggggtattggactaatgagaggctatgtgtagttgagttaattaaggtttaatgctacttggccaattacggattaggggtattcgacaaaatagggttactttctgctgaattgttgacgagaaagctctgttttacttattagctgctcactcatgtggcacataagatgttggatgtgagattacattgacattgttttattagccctttaatgatgttggatgata

SEQ ID NO: 235100 - DNA, 424 bp, Glycine max
  unsure (1)..(424): unsure at all n locations
agcttcttggggttggctggctattatatgaaattcattgagggattttccaaattggcattgcccctaactaagttgactcgtaagaacgagaagtttgtctggaatgagaagtgtgatcaaagtttccaagagttgaagaggcggttgacgacagctccgatgttaattttacccgaccctaagagaccatttgaagtgtattgcgatgcaagtgggcaaggcctgtggtgtgtgttgatgcaagagggaagagtggtggcttatgcttcatgtcaattacgtcctcatgaagttaactacccgacccatgacttggaactagcagcggtggtctttgccttaaagatttggaggcattatttgtacggtactcgttttgaagttttcagtgatcacaagagtctcanatacttgtttgatc

SEQ ID NO: 235101 - DNA, 435 bp, Glycine max
  unsure (1)..(435): unsure at all n locations
tccgttcccgagagcatctcttatttatagcatttcagcccttgctttcttgtagcttaggaaaaatgccatttcttcttctttctttcttccaaatccatttctaaagttccaagtactttctccatcacccacatccaccattagccaccacaaaccatcattgttctccattgaaaacccacaccgagaggaacccttcaaccgaagcagaatttccaacttggcttgcggtttcggtagagaacgaaaaccctaatctgatctttcgttttcttttgaggtaaccatggttctatgcttggttcttgttagttccatcttgtctttgcatcttttctaactttgcaatcgccattgcatgtcttatgcttcctttgaaaaaccttagagaaagagactttgtanacgttatcctttcatgaaataacatgg

SEQ ID NO: 235102 - DNA, 461 bp, Glycine max
agcttatgccctgcgcgcagatgagggttatagtcatatccaggcacactcaagtcagaaattaaagcttcttcaactaggataacaaaaactacacgcttggaatatagaatctgaactcactttggatttgtgcaatttagaggcagagctaagtagaaagatctaaattgccaggttcacaaaggtaaaacaaacccatcttgtatgaaggaaagtgggatacacaaaagccattataaaatgctcaaatggggactttgcaaatcctataaggccatatacactaacatcaacatgcttgtaacaaagactagtttttggcaatcaaacagtcttccagatcttgtttcacttggatgtttttgtcgatttactaaccaccaacacacatgatggtatgaacgcacaaaggagacacttattacatatgttaaagatatatacaataacgcattttc

SEQ ID NO: 235103 - DNA, 428 bp, Glycine max
tgcgcgaatatagagctagcacaactattttaaggtaatcacgcatattttaaattaccgtcgtcatcggcttctcgtagctacttctattggtaagaactataatccaatctaaatatttaattgattttgatgaaatataaatctaattaattggcgaaagataagcaaattgagacaatgctattgaatttataaagaacacctggcccttgatggagctcgagaactttcctgcatgaattggggtttaattatatataaaagctgtataattctacaaatataatgaaatacgtaacgatcgagtagccaatagttaaaggccgaaaatgatttcacgatacagaaggctaactctataactgttcagcaatttttagtgtagtatatctcttaagaaaatcaaggcttttgcatatataaaa

SEQ ID NO: 235104 - DNA, 462 bp, Glycine max
agcttgcgctgatgattaggagtgttagggcaaatgtgttgaaaggaagtttagtgcacaaattaataatctgaagagattgagagatcttgaggaagtatgatgatgttgactctatagtgaaattcaagatgcttaaggattacctagtggagcttctggtaaaagatgacatttattgaaggcaaagagcgaaaattgagtggctacaagaaggagattctaactccaaattctttcattacatggccttctcttgtagaaagagcaacaatatttcttagcttcacaatgattctggaatgttattaacgactcaacacgatcttaatcaagtagcaaagaattattctgggaaccttttcaattcatattcagattcttttgatgaggtgctagaagttattcatccaagtgtttcagatatggataataacatgttaactgtcccgttccacaaag

SEQ ID NO: 235105 - DNA, 330 bp, Glycine max
  unsure (1)..(330): unsure at all n locations
ngccagaataatgggttggatacagatcattctgggagggttggtcatcttggtaagccttntgagtctcactagattctactcagcaggatttttcctccacaatgaagatatatgccaacacttctacaatctgagggatgtttctgatggttttgatgtcaaatcattctctgatagagttggagaagtgatagacatgttggaagctttgcaggccaagcttgagtcaaaagttcaagaaatggagaaaaacaaaggcaccatgttggacaagaagtttctagaggatcaaatagttagccctcttcatagtgctaatgttgctct

SEQ ID NO: 235106 - DNA, 447 bp, Glycine max
  unsure (1)..(447): unsure at all n locations
agctggcctgcccggagcagcagtaatgatggccctagttatgttggggaacggttacgaacccggaatgggtttaggcaaagacaacggcggcataactagcctgataaatgccaaaggaaatcgtgggaagtatgggttaggctataagcccactcaggcagatatcaagagaagcatcgcgggaaggaagagcggtagtcaaagctcgcggttgagacaagaaggtgaaggaagcccaccctgccacataagtaggagctttataagcgcaggtctgggggacgaaggtcaagtggtcgctatatacgaagatgatgttccgcattggatttggtacgaccatgccctcctgatttccaactgtgaaattggcaagtggaagaacgctctgtcatntacgcaacgaacataatgtaaacctctacgggtttaaaagctctatag

SEQ ID NO: 235107 - DNA, 419 bp, Glycine max
  unsure (1)..(419): unsure at all n locations
tgtgtcggcttgtggggccacactgaaatcctcttcaatggtgcccttcctggactgcttcgtggggagcttcttcgtagccaattctaggttgcctcctagtagcgcttctttaacgtcttgagccagatgcatgatgacgatttgtcgatcacggacacaatacctgctggtacctgcccgggtggttggtcgcctactggtcggccatgtgtcgtacgtaatgctccagcctttgtagatgagctgaggtggactctgcaagtggtggtggtgcatctgttgcccgctactgtgatgccttgccctgtgcctgcctaggggcgtagtacttctcgatgaaagccctgttaataggggcctgatgaccctgctggnggcgatgggcactctataaaactgacagaggcacgtaatca

SEQ ID NO: 235108 - DNA, 460 bp, Glycine max
agcttgtcaatgttgggcaagggatatgcgtccttgtggcatgccttggtgaagtcggcgtactcagattcagtgcacatatgccatttcctattggccttctttaccatgataatattggccaaccaggtcgagtatctgacctttttgataaattgagctttgagtaacttgtcaatctcttctctaactgcctttcgtcattcttctcccatctttctcttattctatgagactggtttggcctgagggcaaatggccaatttgtggcatatgatgctaggatggatacctggcatattagatggttgccatgcaataaatccgcattcctttgtaagacttcaactatatgtctttattcatgattagtgagggccctactgagttgagtgcattgtctaaggtcgggttcaagtatcaacttgacgagttcttcgattggtctagagccttatcg

SEQ ID NO: 235109 - DNA, 393 bp, Glycine max
  unsure (1)..(393): unsure at all n locations
tgtccaaaaaacttgtgatgaggttctggatgtanggattatggcctgaaccacattaaacaaatttgaggtcgtggatgtatgcatgagagtctgaaccacgttaacaatatatattgtgtggatgtagggatgaggacacgaaccacattaaataaatttgggatctttttctatttaatcttatggtgttgccttttgttttgtggtgtgttttctcatcaatatgaataaagagatgtctgtgttttcccacaacagaggagagagaggggaaaataaaaggacaagtggcatgagaggagtgaataanagggattctgctactgattgagaagagcagacatataggaggaggaatggaatggcaatggatattcacgaattacaatt

SEQ ID NO: 235110 - DNA, 447 bp, Glycine max
  unsure (1)..(447): unsure at all n locations
agctntagcaactctttctttntgtttattcaaaacctctaatgctcttaatctctcctcatctaaatcaaccaactcatctaacatcattttccaataatggtcgattggaatgtccatttgtttctgtaccctggctgattgcaaatgtatttcgaccggaagtacagcatcatgcccataagtcagtcgaaatggggtagtattagttgattccttaagagaatttctacatgcccatagaacttgatctaacgttttattccaatttcttggcttttgggcaatgtgttttttaatcaagttaattacaatcttattggctgcttcgacctgaccatttgcttgcgcgtaatatggtgttgaggttaataatcgaaagccagtttttagagcaaattctttcattttcgtccataaaaactgaacctgacaatgtaattgttc

SEQ ID NO: 235111 - DNA, 413 bp, Glycine max
  unsure (1)..(413): unsure at all n locations
ntaattaagtattgatttgggttataattgttggttcacttatttatactatggatgaatatataagaatttatttgcatatatattaattttataaatcttgtagaatcttacgttttgagttatgatttcacgtttttacaattctgcgactcctttccaagtcggaatagaatcttgagtttgactaccctgatcttaatacaagaatttgttgactagaaagtgatttaaaaatacagatttatgacagtattttatttcatttttggtttctgccaactgttctttgacagacaagccggagacgacaagtcaaactcaaacgggaaaactgataactgcggagagaagtctgagtttgttaatgaanaaactgtatgttgacatatgcatagctagtaactctaatc

SEQ ID NO: 235112 - DNA, 290 bp, Glycine max
tctaatgactataacattattactggcttctcgaccgctgatagttgcaccccataatccttattgagataatccgattaagcacgagtcgtgtatccctaggctccaccactgggaggggctattatacttctcatctatattactgaatctctcattatgatattagaataaacactgctccaaagtctgatggtgaaggcaaccgtcacatttttgttaagtctatacaaatctgatacagctctttccacagagaagggaatacctgagaatccttcctgatggct

SEQ ID NO: 235113 - DNA, 390 bp, Glycine max
ctcgtgcgcttagcacttttatggaccttttaatgcatgttagagatttttggcttaacacacctttctcgcttagcagatgaactaaagtacttctcttagtgaaataaagcggtgcgctcatcgaacctgttcaactcatcttcttccagagtcttcctcgcgctaagcccaggagtgttgcgcttagtggatgatgtgccatcattttcttctataatctaaacccttcttgcaccatttcaattattgattggccttaattgtcaattaattacgcagctttattatttgggctcatctagctcatttgatgttttaatctatttgcaggaattaatgaaacactgcgcttaatccggagtttatttgtggacttgaagaaggcaa

SEQ ID NO: 235114 - DNA, 435 bp, Glycine max
  unsure (1)..(435): unsure at all n locations
agctngagcttcaggagatgtatgatccttgtgcttaagtgctgttcaaatcgtttcaaacaagaatttcttgagaaaaaatcaaacctcaaatatttttaactttcgcagttgaaaactcagagataacagatacacaaacatagtaaaattggcaaatttagatgccctttttttcccctttaaaatgtgttattgtctagttatgaatgagaaaagttcaaaagttagaagtacatgacttgttgaccattcattacatagtaaatggaatgtaacactcttttgttctttaaggaaaatgaaaggcttgataatgataaaacttataccacaaatattctgatttttttagaaatatactaaaattgtaagatttatggcctgagtattcttaattaagaaactagtttataaaataatgttagactactt

SEQ ID NO: 235115 - DNA, 427 bp, Glycine max
  unsure (1)..(427): unsure at all n locations
gcttagcatttgccaattgccatgaagtaatctccttcttgttcgtctctcatttttttggagnggnatcacagcattgaactaagatgatcgttccaatgggatgatggttttgattgctgcagataaagtgtgtgattgtgagtctctggtcccatgagttaaactacaacgactaaaaaaaatattgtcgtaactttaaggatcaaaaggataattaaaccttttatttttttattactttttttaacaacgggttatatatatgcagcagtttattctaaacaatggactacgtctgaaatctttgaattctatgtaagaaatgttatttcanactttttatcagtcttcatgtcaatgatggcatgctccattngaattctatgtctaattaagctctcggtcttccgtttttgcaccttat

SEQ ID NO: 235116 - DNA, 365 bp, Glycine max
  unsure (1)..(365): unsure at all n locations
agcnagatagataatagtgattctctgattggtgttctaaatgggcggggaccgcccaatacacgctagacaggaatttttctgatcattgccctttattacttatatccaaatgcgtcgattggggacctataccttttaggatccttgattgttggctcacagattcatccttcagggagatcgttcatcaaagctggtcttccaacatcaaagtggttggggaggatttatactaaaggagaaaattaatagactcaaagctaacatcaagaattggaaccgagatcattttggtgacacgctcaataagtttaagaagatagaggaagacttaaacaaattgtgcgacgacaccattgata

SEQ ID NO: 235117 - DNA, 430 bp, Glycine max
  unsure (1)..(430): unsure at all n locations
tttatacaaaagttagtcgnataaagtgactaacaactcccccaaatntacagttttgcttgtcctcaagcaaagaaagaacagatcacttgtcctcgagtgactaatacagtgaccaatcaaaagaaaatggtgtttgattcatcaaggacatcaaccatatgacctgaatatcatggaatgcttaaatcaatcacttctcacaagcatgcagcttttcaaagataggagcacaagtattagagtcacaactaaaataagctagtaagcatgacagaaatcaagggagaatcatcaaccaaaacctcacagtcattgtttcactcaactcaagtgtttaggcttattccatcataaacaaccaacacaagttccaacctttgcatttcatctcctatcatacagaaatgaacacattaaaatgaaatcc

SEQ ID NO: 235118 - DNA, 319 bp, Glycine max
catggctaattccctagaggatgacgccttctctcacctcttatccttagtcgaccgctgcatctccatggtggaaaatcaccattaaaggacctcattgaagctcaaagatccaacctccatataagccccacaagccagcttccatcaagtggtaatcaaagcacaagagcttcaagtacgtgcgccttaaacctccattaattatttgctttaccttctcttccattgtagcatcttcattttttttctccatgaatctgctcacactgcatgtgctacatgatttcacatgattctttagagttccaccataaac

SEQ ID NO: 235119 - DNA, 447 bp, Glycine max
  unsure (1)..(447): unsure at all n locations
agcttatgtagatatgatagatatgaacctttgatataagatttcggccaatatttttattcaatggtgtggtgcaaactcatgctgtagctcctccgatccatagcatcagaagtttgtcttcctcctgtatgaatgtttccttcacccacatcttaagggaagggaacaagattgcagattggcttgctaagtttggggcttcctcaagtgattcgttcaagctgtggaatgtgtgtcctccttgtcttaggcagatgccctatgaactntgtatcccaggggtagctgattttttttccttctggtgctcttagtttgttatttcccattcattaaaaaaaaactcaatcaaacttcatagcaagttgtttcatgttgtcacatttgtattatctctttgctaagctttctgcatattagagggccgaactaatattatttaaa

SEQ ID NO: 235120 - DNA, 439 bp, Glycine max
  unsure (1)..(439): unsure at all n locations
tgtatctgacagctganaattctttcacacggtgcanatgtaattagagttttccaccctagtctttatcctaaaacaaaagttaactcaatttaagttggaccaaccgtttgagcttatggtcattgagcccatctacatatgctcctaccatacgttcaatgtcaattacaaaaatatagtgaaaagttaattaagcatattataatttattttaatgttgttgtaattgaagagtatgagtatttgtattttaatttatatttaaatctttaaatgaataccactgaatatatagatcaattaatacgagaatttccagtttaataagtgacttcgaattataaatctaaaatatagntacttacatttatacttgaaaaaagttttttatcgtgcatgataatcttcctcngtntgagtataatttttctctcaa

SEQ ID NO: 235121 - DNA, 436 bp, Glycine max
tgtcagccgcgattgacgaatgatgcagaagacgacgttagtctctgcgtgctatcaggcttttcatcttacagacagcaaaagaaagtttatacggataaccactcgggtatttccacccgtcaacgtgactcaaatgtcagtatgacagatcttgtgaaggtggccgacaaaagcgaggctcttgctcctacgtatcctccaatgaggaactcagacctacgtagttcttgataacttgtgagacttgaaaaagtctccaccggaagatgctgacatctccggaaagggcgcagatgaccacattggcctctgctcgtcaatcacacttggggtcactgaatgacgaggtgcggataaccgtaaggtgtctccgcgaactaccagctcttgggtcatggtaacaaaaagcggtgcggtcgacaaaaagcgaacc

SEQ ID NO: 235122 - DNA, 454 bp, Glycine max
  unsure (1)..(454): unsure at all n locations
agctngaatatagggacagattgcagagatagttccatgggttacgtttaataatacgtcttgcataggatggcatgggtttacttgcataaattgcttccttaaaaatctcttcaagatacatgctgcataggtgaaattctacaagtggatagaaacacgcaaaaacctctcttcattcactgcaagtgtttggatccggatcatcttttcctgcttaattaattattggatgattttaacaaaagttattgttaattattgctcaacaaagatattagatttccaattaattaaattctatcaaagcaccaaattcattcttattattatgcatgattttcctagcaatttcgtccaatatataaaaccttatatatatatcctctgttgaagcaggcgaagcaactccataatgcactagattctttttaaaaccctataacctatacca

SEQ ID NO: 235123 - DNA, 425 bp, Glycine max
tagatagatgaagtaagttagcaagcattatttctttctcctacacaaataaaggccaacaccatacccatgtccaccaccacacaccaagattctattccaatcgcccaataattacttcctagctaattctctataaaaatccaataaacacttgaaaaagcataattcaaagaaatcccctcaatccaagagtcgtgccaaaacaaaaatctgctcacttgatcttactcttttagaaatgacacttaaaaaccacatattataagacacacaaggcattccctcaattaggtaaatatctctcgacctaaacaaaacatcctttacatcctttctagttgaaccatctcgagagcagtcttgtaaaattgatgaccgccatatttgattaaaattaaacaacttggaccaaatgtcttttg

SEQ ID NO: 235124 - DNA, 451 bp, Glycine max
  unsure (1)..(451): unsure at all n locations
agctntgcncganactaagacaaattggattaagataattatgtgttttaattaaaatgatcaagttgttaccctcaagggatgcaacattggggggacaaccacgaattacagccttgcaacaagttttgtagacacttgagtgtgacattgaagaaatttcacattcgacataagcagtagagtaaaacaaactccaagagcaacagttacagaaatttgaattgatttttcaggactttcaacagatctttcgaaggccaagaggtttgcttctcataagagaccacgatcgtgcaaatagtattacaagcaggagaaaatccagtgaatgtgagatcatatcagtatccttttgccacaaagatgaatgagagaacaatcagttcgtgatctattgaacacaagacatattaaacataatactagtccattttctagtcaaataatt

SEQ ID NO: 235125 - DNA, 421 bp, Glycine max
  unsure (1)..(421): unsure at all n locations
tctcaggaggtgagcttagntatgatagaggtgtgtgtagctaagctctagcttctcaaggaagttttctcaaagaagcttctcaaggaagttttctcaagaaagcttctcaaggaagctaactagtctataaatagaagcatgtgtaacacttgttgtaactttgatgaatgagagtcttgtgagacacacttcaaacttccacttctctccctcttttattccttcaatttcgtgctcccccctctctctttctctccctctttcttttcctccattgaagcatccttccaagcttcttatccaaggctcatcttggtggtgaagctccttcttccatggcttattccctagtggatggcgcctcctctcacctcttcttctttgtcttccgctgcatcttcatggtggaaaatcacca

SEQ ID NO: 235126 - DNA, 455 bp, Glycine max
agcttgttcttgattgttcctaagttcttttcaagctttgaacaatatacttgtccttcatttaactgtctttgggcttggcagccactctcaacaaagtactttcgacacctactgtacgttgatgtgaccaatgctgttatgggaatgttgcgacaatccttcaaaaccttattgatacattctgagaggttggctgtcatgtggccatatcgacgtccttctctatcataagtcatcgtccatttctccttggaaattagatcaatccatgttgctatggctggactcatttgacgaaatttttctaaattttgatcaaaaatgtgcttgcaaggagtgtaggctgcataaaattagttatgaataacaatcttaagtatatatgaaacttacttaaacgtgaccatctaatatgaaatcttacccaatttcttcaacatttctttttgttt

SEQ ID NO: 235127 - DNA, 432 bp, Glycine max
tctcaatatggccactaatcaaatcgttatattcagagatgtgaaattctttgagaatatattcgctttcaaaaaccaacaatccaacaacagtgacagagagttgttcgacccctatgtcactcctaatctcatcacctccaatatctcagatgacacaaatatcacatctatcacagaaacaccacaacatactccataacctgctcagttagatcctgctacaactattcaacttgaaattcctattgaagaacccctaagaaggtctaccagggtttcaaaccctccaagacatctcattaattatcattgctagaatgtgaccaacattaataaagtcacctaccctatatagaattacttagactactcaaaactttctaattcccataaacactacatttgccaaatgtcataaaactatgaagc

SEQ ID NO: 235128 - DNA, 423 bp, Glycine max
  unsure (1)..(423): unsure at all n locations
cctgaggcatgaagctggacaanntagatgccggcgagatgtttctctagtttattagacaccctcttcctaagaatgaataaaatgttcctcgaccaaagagagagattggatgaatagaaaaggagcaattgtgctaattcacgttcaacgaatatcacttcattcacaccacaaacccggagttagacaattcttctggtttatgaactttatacaggaccatacaaatacaatgcaatgaacatttcggtgatggattagaaatgacagtcacaacatttttttttttgtttacagttcttgtttatgtcaggcagattgctatctgtacaatgtaagcttgcagaatgcagggtttggcatttcattacggtgctcgttcggcaccaagtggtatgaaagtttctgttcccaatgcat

SEQ ID NO: 235129 - DNA, 419 bp, Glycine max
  unsure (1)..(419): unsure at all n locations
tcacattggagaagcnttatccactgttcctacaattgtggggncntatcttntctttattaagtcctcatttacaagcgcaaaatccttaaacatatttgttcatctttcaacttcattcatgtgacaacacgaattaagttattctgtctggagaaccaaaagatgttttctgctaggtttttgtttctgtcattgcataaattcgaggattagcagacttgcatatttgtttagtgactttgaactgactcttgaagccttcttatggtaagctggctcttgtatgaataagtttcttgagatgaaaaaagaatttcctctcttgattgcagggaaaaaatgtactagcaatggttttcggtgacagtgaataacacaaacatatacatgcaaccgcgttgtgagtttcaaaccac

SEQ ID NO: 235130 - DNA, 427 bp, Glycine max
agctttaagaaggacattgatttctatttatttactgccaacaatccaatccagttaggatcataacattaacttctactggaatgagtttgtcttcaaacgcatgaaaaaagaattacactaattaaccaggtgctttcgacgatacaatatgtatatactttctaaagtaattagcaacagacataaaaaacaaagtttgtcttgggggagagagattttacatagctccaaaaaatttcagccccaagttacacttcatagaatgttaactaaacaattttattaaatgctaatgtataacggtcaaagccattgaggtagatgatgacacctcaaagcaggtgaaaacacaaaaaaaaaatgtgtttgtgggctaagagtgcttatgccaatttaaaagcatagagatacacaccctcataat

SEQ ID NO: 235131 - DNA, 459 bp, Glycine max
  unsure (1)..(459): unsure at all n locations
tactcaagctttaagcaattattgctatagtatgaagatttcatgttttaatcaaaatatgttataaagaacaatgcaattcgattactcaatttgacctatgaaatcacgcaaagcttttgtgttaattagttgcattgtagcgtttagagtaattgttngaacaacaactaanaaaaaataattgtttgatcaatttcaataaacgtcaagagagaaaaaaaaagagagttcgatattaggtttgataaaaagtcttctaatacactatttattattaattaaatttcttaaaaactgattttgagctataaacataatgagggatcttgtgtatgtatgttggaactgagcttgattatcctgtatcgagattctaggaataaaacttctcgatgcatgaattctataagattnttattcttgcacttaatgtttgaatttaattattctttgata

SEQ ID NO: 235132 - DNA, 368 bp, Glycine max
agctgtgagccaagatattgactctccattttccttgacccacggtgagaaagtgaattcttaccctcggaagcgagaatagatgagaaggaaatctctcaatctgtggataaaagagaaggataatctccaatctacgagaattccgcatacagagagaaggaagattttcaatctatggaaaatagagaggacaggaggttgctcttcttagagtgggagaaagatataagaacataatgattatctccaaccccacaatgggagatagttaaaaggatggaaagatagtctctcaccaataaactaaaataaatgtgcgaaaaggtttgtttgaccccacaatatctgaacaataccgaattgca

SEQ ID NO: 235133 - DNA, 367 bp, Glycine max
gagcttcaatggagaatgaagaagaacagaatgttacgtgatgtagagagatagctgtctgaaaagtgtggggctgagtgaagagagagagagagttgctttttaattttaaaaaggctgttttctcatttcttattattttattataaactatgccacatgtctccatttgagtggagcaagaagggcccacttttccttttgattgtgacccatactcagccacaaaagtgaagaaaatctggcctttgaaacgctaaaatcctgcctcggtttgcatgtcgttactctggttccagttacttcgtgttctctgcgtccgtcggggccagtttttgaaagtaccaacatatatatcataacgctc

SEQ ID NO: 235134 - DNA, 443 bp, Glycine max
agcttacttatccttggagatgtaataatgctaatcatcacgtttggttgttattgtgagccaggatttatgaatccaactggtagttgattgtttacaacttacaaatatagctctagttttgaagccccacatatatattcatcaaagcttagccatttatattttacctatttccctgtgaatatgctaccttcgatttaattccttatttttgactgacaagattttaccatcattccttatatctgcttcggttgtttggtttgaatctgatatatttgtacgaattattgacttatataaattgctataggtggactttataatggggattctttctctccttgtgatgaagcaggtgaatatattattgctatctggttttgtaattattcaattgctcagtgacttacataaatgaactgatcagatatggaaat

SEQ ID NO: 235135 - DNA, 436 bp, Glycine max
  unsure (1)..(436): unsure at all n locations
tataaaactcagcttctccctatttgctataatagggggagaagtgaagaataaaagggtttagccttcttgggacttctctctctctcgaaattgctgaggaaaattgtttccgtgaagaaaatccaagccgaggcgcttccgtaacatttccgtaacgtttccgtgagtaattacgcgaagattctcgaccgttcttcaagattcatcgtattttcttcgttttcttcagtcttcaacgggtaagtacctcaaaccgagcttttcgattcattctatgtacccgcggtggtccacattatgtttcatgtatttttaattctcgtttcatttgctttttataccccctttggacgtgcttaagccatttatttaagtcatttctcgcttaatctataaataaaataaatntccaccgatcgtttgaattgtatca

SEQ ID NO: 235136 - DNA, 427 bp, Glycine max
  unsure (1)..(427): unsure at all n locations
agctntactcgatcgaattgttaataataaatgaatcggttaattaatattaaaggcttaaacttgaactttactcagctaacattatatgatatatctgagagcacacaaagaccaaacctgaagatgccattaatgcagcaggtgtagaacaacggtggttgcagagcttctttgtggtggctgacagcagcgacgctgtcaacgcagggttgcgcaacagcatcaacgtttattctccgacttcaaaaaagcgttatctaggtcgggaaaaacaaagtggtttcattccgtgaccgattattataggtttntgtttttgttgcaattgagtcatcaaaactttggaaaattgcatgaacccaacaatatcacacatggcatggcattttgagaggagaacgtgtctgatatatacgaaatttat

SEQ ID NO: 235137 - DNA, 438 bp, Glycine max
  unsure (1)..(438): unsure at all n locations
taaagtatagcaagctntagcttgaggttgaaggggtgttaaaatatatgaaaaacatccaacaatgtctggattatatctttagagtatcttagattatgttttagcctctgaccacccaatagttacgtccaaatgatgtgcaaacactaatattagtggagactggagaggagaaatctgaccaaaatggaaaaacttgaacaactaagtactacaataaaaaacatggcataatagtgaaaattggggaaaaaatgagcttaatagggagtcaagcaacaatgctaaccaattggacacaatgattactcaaatgaaaagttataagattgtagtgcttaacaacaagctgagtccaaatcagagggccgcatcttatatcgagaaagcaaggatgaagaatagtgatatcgaattcaaaaaagcactgtcagc

SEQ ID NO: 235138 - DNA, 375 bp, Glycine max
  unsure (1)..(375): unsure at all n locations
gttttacctaaacccaaaagtaaagcatctatagggtgcagacacatcattttattttttggattggatgggccatggatcataatggtaaagaataagaactctcttttgatgcacatccaatgtgggagattataacgaataagaattactgaccaacaagaataaggtctgtcaaatatattagatggtgcacaccgatcagaacatagccctaacttgacattctggggagtctattgcaaattcacgatatctttatgttagctntctctaaaagtgctacatgtaacatccccattttcttatattgcgaagttatgtgcagaattgcttcttgttggttcggtatggaacggaatagtattatttctt

SEQ ID NO: 235139 - DNA, 434 bp, Glycine max
agcttgcattacaatatcttaatgatcaatttagccaaacacctgtattggccttacctgatttacaaagacttttctagtggaggtggatgcctcaagagtgggggtcggagctgttctcatgcaagatcaccatcccatagcctctataagcagaagcttaaatgttcatcagcaatccctgtcaacctatgagaagaagttactagttgtggtgtttgctgtacacaaatagaggcattacttattacctaagcagtttgtaatcaaaactaatcacaaaagtctcaagtatattctcgaccagagacttttcacagctgtccaacaaaaatggttggttaaacttatggaatttgatttcattattgaatacaagccgggaagtgagaaccaagctgctgatgcactttcaagagttgaatgtgctacta

SEQ ID NO: 235140 - DNA, 430 bp, Glycine max
  unsure (1)..(430): unsure at all n locations
tctatataggctgaaccatnttatcaataaacacaagttgagtgttattcagaacattagagtttatctcttttatcttagtgagagtgattctcctaaattcttgagtgattcaagaacactctggctgtatcaaaggactttcacaaccgttgtgtgttgccctcgctggaaagagtgattctttccttcctttcatcttcacccttgttctttcaaaccacaattccagaaaatccacctctgcccagaattatctagtggccataactcccattttacgcactcaaattaagtgattcttgaggctaaattgaatttcaaaacgagacctttcacctcgttntggaatcacctcatttggatccctgtagcttcagntattgccatttctatatttctgtccagccaccacttaacctacgtttta

SEQ ID NO: 235141 - DNA, 302 bp, Glycine max
  unsure (1)..(302): unsure at all n locations
ctaagatcctctcggtagagaaatagttcttcantcattgcttttgccatgcatgattatacgtgatcttatgattacagtaattcttatagccatctaataaagacaaatgcggactcatccgatttttggtaaagagatatcctccaaagaaaaaataacaaataaaggcattgtattccctaacaaaattttatatttacaacttttcatcaataaacatatatcttcattaaaaaaaaaatcgatgtttcacgaatatgtattttattaatgaaaacatggatatatatctatgtata

SEQ ID NO: 235142 - DNA, 437 bp, Glycine max
agcttgagtttccctacacatgaacaggatataaattaatgggttgcatcggaatcgaatagcacaagtaaaggaatcccatttatgaaacatttaccttggattagatctttggatttcgaagcttcagcaccattaagggtaaagactcttcatgtggccttcggatgttcagtttggtcattcaggcccccaccattctactccttcttgggatatggacaatctctttgaatatgccccctttgtctacaattaaaacagatcatgcctttatcaggacaatttaaggagatgtgccatggcttaccacatttgtaacaagtgatctgagtggggaatgtattgggtatgctaccactaccacccaaaaaccccatagcaacagtcctctgatagttggggcggataccatattgcttatgaagggtcgagta

SEQ ID NO: 235143 - DNA, 411 bp, Glycine max
  unsure (1)..(411): unsure at all n locations
tgtgctntcaatatcctgatgaggatgttccatatgttctcaagactggactaatacatttgctgcccaagtttcatggtcttgcaggtgaggatcctcataagcatcttaaagatttccatattgtctgttccaccatgaagccccttgatgtccaggaatatcatatctttctaaaggctgttccttattctctgtaaggagtggcgaaagattggctgtactaccttgctcccaggtccattaccagctgggatgaccttaagagggtgttcttggagaaattcttccctgcatctaggaccactaccatcagaaaagacatttcangcatcatgcaacttagtggagagagcttgtatgagtactgggaaagattcatgaaattgtgtgcaagctgtcctcaccacc

SEQ ID NO: 235144 - DNA, 463 bp, Glycine max
  unsure (1)..(463): unsure at all n locations
agctntacggatcaactggagttgtatggtttacagaccactccactcatgcacacccagaaaaaatacgtacctcgtatgtcgatgacgacgaaccaaccaccgcaacaatgaacattgaccccttcaccttcacccaagctcacctatctcaataaaaaaccacagcaaagagataaacggaagaacaaaaaagcatggaggcgtaaaacacttctcacccagctttttaaggaagatgataaaagagggacatttttggcatttttttaaatgctgggtgcacaagcaattacgctggtgcctctagcatcacccatgatactattgttcaatggttgtttctcggtccaatgtatggtccatgaagccactntgtttggggatttgtttatagtgagttttttttttttttattgaatacataggtaggagttctgtgtgagccaccatgtaacttctg

SEQ ID NO: 235145 - DNA, 426 bp, Glycine max
  unsure (1)..(426): unsure at all n locations
tgtgactctgggcaatttctttaaaactagtcactaaaaagttgtgactntngaaaaaatcttcagaaacaagtaactagaagaattgtgacttttggaaatttatttttcgaaatcagtcactggtaatcgattaccattaagatgtaatcgattacacatcaacagatgtgacttcattntaaattttgaaaatcaaaatgtttagaagctctggtaatcgactacaagtattgtgtaatcgattacacaagttgaaaatgttaaaacacaagttgtaactcttgaaatttgaaatcttaatgttttaaaacactggtaatcgattactaccttctggtaatcgattaccagagagtaaaactctttagtaaaagaatttgtaaaaaattcatgtgctactcaatgttttgataaaacttttta

SEQ ID NO: 235146 - DNA, 458 bp, Glycine max
  unsure (1)..(458): unsure at all n locations
agcttnttcatgtttagagattactagatagagaattgtccctgttccacagagttttgagagcttttgttgtgcaaagattggcatagaactgatcatgaagaggaagtcatcctgagagcatgagatgagtctgtgagtgattgtgaggttctataggtggaggagacatccccactacttgtatttcttcaatccttcatttttatcttctctttattgtaaaggaagcttcccagatatggagagctaaatcctctataggttcttccttgtaggtacttgatgtaaatacttgtatatcaatttaatgatgttttatgtgttctctatgctattagtacgtcatttcagtgtgcttttgccttgatcacatagatgcatgcttttttaagatcattcaacagtgganactggttggattttataacttgataagacggggctagtttatcgtg

SEQ ID NO: 235147 - DNA, 426 bp, Glycine max
  unsure (1)..(426): unsure at all n locations
ntaagatcaaactctnttctctctntntttctcaactattcttcatttttcttcctcttttcacttttgttcctttttcttgcacaaatttcattgctcttccactggtgatgatcatggaaggctaaagagtcaatcaatccaaggatacactccaagcaagactgaatttgagttttggattagtatttcaattttgtgtgcttcttcttcttcttcttcaatcctatttttaattttcatgattttgaatgtgattaagattcaaaataaattaggttatagattcatttcctaatttcaaatttaatcatagattgtttggatgatattccaaccaaatttgcgatttcaatgaatttagggattaatttgattgaactaactctaatgacattgattgaactttcacaacatgatcaattc

SEQ ID NO: 235148 - DNA, 467 bp, Glycine max
agcttttggtcaagaggctggtataaacaacaatggccttcatcatttccaattcatacattttattctaaattccagagatagatgcaaaaattattactctaagctagtcgttctctcaacaattaagttcacactctcaccgggttatgatcaagcttttctttcacaatcaacctgtctactaactaacatttctaaccgtgagcctactttcttgttctttctcaactaacatacacactttctcaactcatgataaaacacaatcttcatttcaatcatgcattccacaatcaattcacaacaccaattccacaaaaatattcaaatgtttgcactgcatactcagagaatcaagttaagctgttcagtatgcttcaaaacatgcatactaattatccatagaaagacaaatatataattataaatgtaaaccaaaatcaccaaaaacaatgtactaaaat

SEQ ID NO: 235149 - DNA, 427 bp, Glycine max
  unsure (1)..(427): unsure at all n locations
ntgtggagtagaaacatgtgatctacatcatttattcctaaaaaagaagtcgtatccagtcaatgtctgagagaccatacaaggttcctaacgatttctaattatgtgggccattaagtctatcatatgctgacaatagccgagaagcccatgaatctcttctgtggtggagtaagtgtctgtcatcgccttggccttggctaacaagcggggaagttcttgactcccgttcaaggtaagagcaaaccggtccatccacatggttgccttttgatgtaaagagtcgatcacccttcctctagcctnctttttcgcatatacttgagcatactcatccgcgattctatgctcgggggctcgggctagaactaactcttattggtacttggcgatgatagctagcatgttgagcttccgtctcgccata

SEQ ID NO: 235150 - DNA, 440 bp, Glycine max
agcttccaaatatcatttttcttgaatttttctagttcttcttgcatggcttttacccaattcttatcttccatagcatcattaatatgcttggtttccacttctaaaatgagagttatgaaaccttgttgtctaagagatcctcttgtttggactttggttgaggggtctccaatgatttgactctctagatggttcttgcttagaatttgtccagttggttctctttcttcttgaggttgtccttttacttgatcagacacattcgttcctgtagattgttctaccaatggtccaatgtcttcattcagtcttaaatttgcaaaagattcatcaagctctgacacttttgtatcaggctttgtgttattaaatcttacaggaataacttcttccatgactaaagtcttggagttgtaaactttgtatgccttggatat

SEQ ID NO: 235151 - DNA, 433 bp, Glycine max
  unsure (1)..(433): unsure at all n locations
actcgcccnccattccttatattcagaaataattacaattcaagaatttctctttgtcccttaatcatttctaatttctcaaatgggcaatgcagaaaatgcttatttcaaacatatccaatatccatctcctcaaacaacctccaaatgttcttaatctccaaaagtttaggtaactaaaacaaaggatattttttaatatgaagatatgaagaaaaattgagattcctatcatctagaataaaatcgaaaatagggtgtgcgagcatgtttgcacgggtggacagacattacaaatatctcacgacttaacttccaatctgttaaaagaatgtaagtcccatcataaatcacatgatagtcttttgataaaagagtctaatctttaaatgcctttatttgatgagaataataatacctaccagatagatga

SEQ ID NO: 235152 - DNA, 430 bp, Glycine max
agcttgcttctacagttgcaacttggattttttttgagtagaaaacctttccttcctcatatgaatccagacccaatgtcttggttcaaaaataactctgacgtgacccttattttcttcctttgcatattgttcattcttcttctcaatgttggctcgaacttttaaatgcaactccttgatagaatctgcctttttcttaccatcaaaattaacatactcattagaaggaaaaggtaagatatccaaaggagtcaaaggattaaagtcatacacaacttcgaaaggagaataagaagtagtagaatgaacagacctattataagcaaactcaacatgtggcaagcatttctcccagtttttcaaattcttttgaatgatagcatgcaacaaggtggtaaatgtcctatttagaactttagtttgtcca

SEQ ID NO: 235153 - DNA, 452 bp, Glycine max
  unsure (1)..(452): unsure at all n locations
gacctatgaaactcagcttctaaggaagttntctcaagaagcttctcaaggaagttttcttaagaaagcttctcaaggaagctacctagtctataaatagaagcatgtgtaacacttgttgtaactttgatgaatgaaagtcttatgagatacacttcaaagttccacttctttccctcttttattccttcaatttcgtgctccccccttctctctttcttttcctccattaaagcatcctcttcaagcttcttatccaaggcaattattggtggtgaagctccttcttccttggcttattccctagtggatggtgcctcccctctcctcttctcctttgccttccgctgcatcttcatggtgaaaaatcaccattgaaggacctcattgaagctaaagatccagcctccatagaagcccacaagcaacttccatataagccattccataag

SEQ ID NO: 235154 - DNA, 417 bp, Glycine max
  unsure (1)..(417): unsure at all n locations
taagcttaaacatatactgccttatttaattggcttggtcttgcgaccacgatcaacaaagtactttcggtacctgctatatgttgacttgaccaacgttgttgggtatgttgcgacaatccttcaacaccttattcacacattctgagaggttggttgtcatgtaaccatatcttcatccagatgtatcgtaagccatgctccatttttcctttgaaatgcgatcaatccatgttgctatggctggactcaattgacgaaatttttctaagttttgatcaaacacatgcttgcaaggagtgtacgctgcatcaaatttgttaccatcannaagtgtaggtagatatgaaactaaaattaacttcatgtataaaataaaccttaccccaattcttgaacatctcttttttgtttcgc

SEQ ID NO: 235155 - DNA, 453 bp, Glycine max
  unsure (1)..(453): unsure at all n locations
agctngaactaggcgagttgattttatccttagtttcaccttagttattagtcaattcggttaagaatgagaaatcccaaagagaaaatgtccggttgattttccgctttattttactaaaaggtatatttttgttattatattattattttatctctttttgatttccaatgtggttacggaacgaccgaacggtcggaatttattttaaccaaagtttacggatcatacaattcaaacgttcggtggaaatttattttatttttaagttaagcgagaaattacttaagtaaaatggcttaagcatgtcaacagggggtataaaaagtaaatgaaatgagaataaaaatacacgaaacacaatgtggaccaccacgggtacatataatgaatcgaanagcttggttcgaggtacttacccgttgaagatcgaagaacgatgaataacgaatg

SEQ ID NO: 235156 - DNA, 369 bp, Glycine max
tatgctgcaaacatttacaatagacctcctcaacctcagcagcaaaatcaaccacagcagaacaattatgacctcttcagcaacagatacaaccctggatggaggaatcaccctaacctcagatggtccagccctcaacaacaacaacagcagcctgcttcttccttccaaaatgtttgtggcccaagcagaccatacattcctccaccaatccaacaacaacaacaaccccagaaacaaccaacagttgaggcccctccacaaccttccctcgaagaacttgtgaggcaaatgactatgcagaacatgcagtttcagcaagagaccagagcctccattcagagcttaaccaatcagatgggacaaatg

SEQ ID NO: 235157 - DNA, 371 bp, Glycine max
  unsure (1)..(371): unsure at all n locations
tctatacatttcagtccactcaattatacaactctcatctatttcaaacacaaccattcatttcaaacaaaacacaccactgaatatcaaattcaactagttcactgttcaaacaagctttttgtacaagcaatcaatactaaaacaacaaaatattaaaagactgaaatttaaataactgaaacataaagcaaactaaataattaataactaaattgttcatgatttgcagaaattaaacaaaacaaanattaaacatcctggtcatcctgtggctgatcttcatttaaatccagcactgaagcaattggtacatcctaaagaatgggctgctctggctccatggttggttctgatggcatagtgtcctc

SEQ ID NO: 235158 - DNA, 242 bp, Glycine max
ttcttctcttcacattatgaacgatgagagaaaactcttctgagcttttacatgcaaaagttatttttctttaattattcaatttatatttacaaaatcttatactaattatctgaaaatttgctaacctttttctctttagatttaagagagaatgcattgattcttaaatttattatcttcattgtaagaatttccaaaaatagtttcatttgatgtaaatgcaacctaaacaatacatt

SEQ ID NO: 235159 - DNA, 422 bp, Glycine max
agcttccatcaagagggagcttatcacattagctttaagtaggcgttctctcaacctccattaattattagctttaccttctcctccattgttgtttcttcatttttctccatgtatctcctcacatgtgctgggctaaatgttgtaaacacttttttaataatctttaccaattaaaattgctatataagctagattcgattttctatggatcaaatttcttgtttttgttcttgaaccatgaattgtgttgagtttatgttcctttgagtttagttatgctattttttgagactgaaacctaaaccataaagatctaacataaacattaaagtaaagaaaacctccaaaatctacaatgacttgttcaactattgtagttttgtcatacaagtcatgtctagacatgaaacttgtcacat

SEQ ID NO: 235160 - DNA, 239 bp, Glycine max
  unsure (1)..(239): unsure at all n locations
aaccaacagtagccccattggaccccaaagcaatcctaggtgcaattggccttattacactagaacaaaccaacaagccttttagttatcaacccaaacatatttttggtgagccaactntacaacgattgggccattatttagccacacttaacactctaaaatgaaacaaagcgcgccatgaaacctccccatttggccatgatacaactcacaccttgaacttttatcttgaaact

SEQ ID NO: 235161 - DNA, 459 bp, Glycine max
  unsure (1)..(459): unsure at all n locations
agcttgtgnnngataagagaatctataatactctgttattcttgctcacaaactcgtctgaaaattgaaatattggttttatggatagataaaacaagcattaggtggacgggttcgcctcctattatcaggagctgctcctttgcctatgcatgtggaggagtttttgagggtcacttttggagctactatgtcacaaggatacggtatggtatttgaatcttttgctaaaaagtgcacgtggattgttttatatcatttttatgacagctcttcaatagtaaattttaattctgttaatctgttgtagcatgattctggcattccttgatttgaatttaaatntctggttcttatattcattctatagtagacttagtcacatgttaatcatatttctaatccacttgcctatgtgggtgtgtagccatctaattatgcaacgttaaattattatca

SEQ ID NO: 235162 - DNA, 408 bp, Glycine max
tatgaaatcaaagaaatagagatgatgtaatgaagtgaatccatataattaaccaaatgtaatgtaaaaatcataaaagaacaaaaaaaaatcattaataatacaattttaaatatttcaataaaatctctatttttatttctttatttcccaacaacacttgtaagcattggtaaaaaaaaaaattaaaaaatcaacagtaatgaaaaaaaggactatttattccttctaaagaatcacgaaaagttcatgttgtctactatatattgcgaattgcgaagatgataaattttaatctataataatctcagtattttcaccactaaacccctaatttaaagataaacttcaatctataatctcaataatttaaccaccaaaaccctaattccttgaatcctcatcgac

SEQ ID NO: 235163 - DNA, 460 bp, Glycine max
agcttgtatcgctataggcagcagcgggtctgttgtagtatcgccattggcatcagcgatacacttgtatcgtcattggtagcagcacaacaaaagttgagtcactacacccatgccgctattcaaactggcgagacatgttgactaagcatgtcgccattaggactggcaggacatgccaacgtgggcagtcccgccattggtgcctgcggaacacgtaggggtggtacccatgtgggtttgcactgtttcagtctgaaaaagatgggtaggcttgcagtaaggggttgcagtgtgcagatgggtaagcttaaggtttgcagttctgaaaagcttgcatgtgaacgttaaaaatttgaacgttgggtaagttttcagctataaaaaaattgcttgaaccttgattgtttacgctcgcatttcatttctccttactgagttctctttgtggttttctaga

SEQ ID NO: 235164 - DNA, 407 bp, Glycine max
tgacattaaacttgatcttgaactagttggctcaatcttgaaatcattctttgggctttttgtcatcatctttttcatcatcaaaactacttgaatcaacttgattcatcatcatgaagcttacttttacaaagtccttcctgagcagcttccatggggccccctctgcattcagcataaatcctcaccctgaaatacataatttagcggccaaatgctgagggtctggataagtgctgcagaagcaagaataagctgaatacctctcctctagctctaggaccactgggatctccaaaaactcattaagagtcgcaacatctaactttattaacttcccccgtaccttacattggctaaagaaaaagtcctcaagatcatagaggttggcttaaaattccttgacc

SEQ ID NO: 235165 - DNA, 463 bp, Glycine max
  unsure (1)..(463): unsure at all n locations
agctnngaattggtttagacatgattgatcatgatttgggacttgtaggaattgatttgggcaagattggatgagaggaagtgtgattttcgaaatctgcacttatgcagaatttttgctgtgaaattgtgcagcagaattttgcacaagtgcagaaaaatgcttgtgtgtggttggctgtggaaagtctagtgcagaatgagttctggatgtttgctagtagatcccaacggtcaaaatgtaggcttatgcactatagacttccagtaaaattttggagtcgatccaacggttaacgaattggatcgaaggaattgttactggggtctttaagtgagaaaagctgtgattntggttagtgtgttgagcagagtttttctgcctttgccctgttttgcttggctgtgatagctcgtgctgtttaaatagttgtttgcttggatgttgtggaagcttgagagga

SEQ ID NO: 235166 - DNA, 408 bp, Glycine max
  unsure (1)..(408): unsure at all n locations
tcctcggagccatttcctgcgaaggcaaacatttggaaagttagttntaccagtgggacactactcttaaaacaaaaatgacatacaacctcctcccataaatacaaacatcaatgtaaatttagagcaagcttatgcgcatatttccctacgaacgttcacttgcacaagacatcctattaactaagaaaaatgcacccatatacaatcaaggtagcttcattacctagattatttacatgtacttccaaggtgtatttgttatttacatcacacacgcctccttggctaaatttacatacatgcatactcaaagcatttcggggtaccaaaaattgcacatgcgctcatcttggtatttctaatacctatacatatacaaacttcatgatgaatcttgactaccta

SEQ ID NO: 235167 - DNA, 455 bp, Glycine max
  unsure (1)..(455): unsure at all n locations
agcttanaggcaggtacaaataggtgctatgcccattattgatcatcgtccccgcatccggctaaagacattaaagaagcactcctagaaggtagcctagtatctctaattttgctctttaaaaatcctccttttacttgtttgttttcttgagttatgtcttgaattcacctaagtttatatgcaactatagaagtttaggaaatgtatacataacaaggaataatccaaatttttgcaaagggttttgcaaaaaaaataaaattagttagctcgcctaggcgagcgtgtctgacgagaattttaaaagatggggggtgaagcaattcttcaccctatttcttccccaacattcaaaatcacccaaaaggttacgggagttttcgaatccagcagccccaagcctccatttgagcatttttgctttcatgtttgcatttctgttcatctcctac

SEQ ID NO: 235168 - DNA, 426 bp, Glycine max
  unsure (1)..(426): unsure at all n locations
tcttgaaactctgggcttcttccctcaacacctgtcataagaataaaaacatatatattattggtgtttggtatgttggagtaaggtaaggtctgaaaacccatttcctgngcatcttccatgagggaacatggntcctcaccaactcaatgagtggtgctacaagtatatcaaaatatgggaaaaacttttgtaaaagattgttaagtcatggaagtcccaatttttttatatacttggtggagtgggccactcaggaatgacctttattctcttagggtttgtgggaacccattgatcgacatttaaaaaattaacgaaagtaatgcaataaaatgtacctctttatatcttcatgttgattactcctaccaaanagtatgacaaccctacagtgtcccatatgagcacctatgctttgtattt

SEQ ID NO: 235169 - DNA, 454 bp, Glycine max
agcttctgatatatattcacttcctttaatatatgatatgatgccaggagttttctgacagaaaaaaccagcaaactgttaaccgactctaacagttagtccctgtactgagtaaggttgcaaattcacaaaaactagtggaatgaagtcatacttgaaacagtgaaagcaaatggacatattgtggccaaatttatgctacacctgaacactgaacatacattctgccaccacgggctatggaatgccctgcaatgtggccactacagcctctatggaaacctccacgactaccaaaaggctggtagccgagatttgatgaccctgagtgaagtgattaggcaaaatgtgcatgaggaggattgtaagaggataatacaccggctgataaggaagattctgaatgaaataccaatgtcgttgcctcttttttgaacttttcaagataagcttt

SEQ ID NO: 235170 - DNA, 410 bp, Glycine max
ggtaggattatagggtacccgtcatatgtggtactaggtggcgatcgggcgatggtgcaagtcgactctccacatccacaaatcacacataaatccaccatccccagttgcccaccttcaactaagctcacgtactttcacgtagcccttatcctcgttcctctcaactccgggtccccatcaatccctccaagcttccacaacatccaagcaattcaacatctaacatcatgaactatcaaaaaccaagaaaacagggcagaggcagaaaactctgcccaaaacacaaccaataccacaactttccttactcaaataccccagtaacattctcttcgttccaattcgttcaccgttggatcgactcaaaaattttactggagggccctagtgcataagtatacattttg

SEQ ID NO: 235171 - DNA, 414 bp, Glycine max
agctagcacagatgccttgcaattagtataagaaaatgctaattgcttctcccgaaactcaaaaataattacttaaggaaacgttgcaggtcatgcgggttaatgctgtgctgtgtttgagggtggggtcgttgagatttacattcatgaaataagctactgccaagaatcatgaaataagctactgccaagaatcatgaaataagctggtcaagttagtatacataaaacgtttagatcataaaacacataaaatgtttggatcctcctttttttcccatggccatgcccacttgttccaccaccaccactctttcctctataatgtttttttcctcctcctaatgccatgttagcatcaggtttcacttgcatctcttctggcaagggaagaatatgatccacacatttacg

SEQ ID NO: 235172 - DNA, 439 bp, Glycine max
tacggatccttgaaactaagcttaggcacaagtcctgaaggattatgtctgtagatccgttcacaaaggcacctgaggaatgtgttgtagcataacaaatctgggttaaccccatttgatttcatctctttaataattctcctagcttccttcacattcctctgcacagaccacccataaagaagacttctatatatgcaaggttttgtgcctgtaatcttgtcgctgtgatgccaaactaccccttcagccctcttaccatgccctttggagcaaagggcattaacgatagcagtaactgtaaattcatctatagaacacttatacttgtctaagttctcgaaaatacccaatgcctcatcttcttttctagtttaaccaatctctgctcaagactaaaagtctaccattcatggctcgaccctccttcttgagatct

SEQ ID NO: 235173 - DNA, 198 bp, Glycine max
  unsure (1)..(198): unsure at all n locations
tgaccccccccagcctgttatcagctcagcccacnaagacgcgcaaaggaaagaacttgtttccgggggaagggggcaaaacaacccaaagaaaggaaaaagggaaacccccagccagggaagcacaaaagaaaacgcgaacgaaaaccgggcaggaaggaagaacgaaccaaaacaagaaaagaaaaacaaccaacg

SEQ ID NO: 235174 - DNA, 361 bp, Glycine max
  unsure (1)..(361): unsure at all n locations
tcgacatcagaccacttccagggtgctggtactacttatattgatttgttggggcctatgcacgttgaaagtcttggaagaaagacgtatgcctattgtgctgtggatgatttctccacatatacctgngataattttattagagagaattcttcatcctttcaactttggtaagagttgaggctactactctaaagagagaaagactgtgtcatcaacaagaatatgagtgaccatgggagagaaattgaaaacaggacgctcactgaattctgcacatctgaaggcattactcatgagttcctttgaccctttacaccacaacagaatgggatagatgagaggaaaaacacgactttgc

SEQ ID NO: 235175 - DNA, 452 bp, Glycine max
  unsure (1)..(452): unsure at all n locations
ctcgtccgggatccttaagtcacctgcggcatgcaagctttgacaacactttaaccttggattcatccccacttactatacgtatgctgaatcgctttaggtatttcaaattcgcaagatctgatatttctgcggggagtcttgctcgaactgtccaagacaaaacccttcagaacccgaagccgaatcaggttctcaataccctttggcattctgtccaataaatagcattgagacaaatccaaatgtatgagatatctcaatggtgaaatatcactaggtagtgtttctagattgtgacaggccttgagatctanagcttctaggttctcaacttgaaaaatgaagggtggtagctcaaatattcttcatatcccaccaaggctaagatgcctcacattcttttgatccctatactccttcacgaattctccacactcctctccaatatg

SEQ ID NO: 235176 - DNA, 400 bp, Glycine max
tcctctctaagcttcttatccaagacactctcttggtggcgaaacttctccttccatggcttattctctagagaatggcgcctcctctcacctcttctcctttatcttttgctgcaactccatggctgaaaatcaccattgaaggaccttattaaagctcaaagatccagcctccatagaagcttctcaagcaagcttccatcaacactaacacaccagcaactaaacttccactagacctttctaaagtacttaacttcagaatgctttgagctgtgaagaagtgttaagaatgatgaagctacgctacattagaataagatatcaatatgaacttcttcacggaaattcatccacgtgtggaatcattctcaacacacatcaaaatggctattctgat

SEQ ID NO: 235177 - DNA, 268 bp, Glycine max
aatggaccaacaacatgctcggccgcagaatacgccgccaacttccgtgaacacatccgaagatgccacttcggacaagacgtcccttagtgcctataagacggcacgactttaagcttgggaggaacaacaatattgagcacgagacgtatgtccgatcaatccgagaatgggtaagtgtcaaggccctcgactgctctcaacctctgtataagcgcctcaatttttctcttatcttccgcgaagggaacatatacttttacgggtg

SEQ ID NO: 235178 - DNA, 341 bp, Glycine max
gcttatatccaggctcatcttggtggtgaagctccttcttgcatggcttattccctagaggatggcgcctcctctcacctattctcctttgtctttcgctgcatctccatggtggaaaatcaccattaaaggacctcattgaagctcaaagatccagcctccatagaaggcccacaagcaagcttccatcaagtggttatcagagcacaagagcttcaagtaggtgctccttaaacctccattaattttttttctttaccttctcttccatttttggttcttcatttttctccatgtatctcctcacatgtcttgttctaaatgtttctaacatgattctt

SEQ ID NO: 235179 - DNA, 416 bp, Glycine max
tgaaagaatatcatctcaaggcctgatatttctttctgatgtgtacaatcaactttgaatctaagatgaattccggaaaattggcctgaaattattctaacttaagtttctactcaccaagaatacgagacgtatgaaataagaaattatcagaattaagaagaaatttaaataacaaatggcatcaaggcaatacatatctggacaagaaatgcaagcaaacctggcaagcagagactgtattacagccgcacaatgaatggccatttattttgtccacgatatcaaaaacacccggcccatcactccgctggttaaatttcatttagaattctgaaatggatttgtgaggtgttttattattgaattgggattaacagccaagaagaaagaggaataccatggtaaaattaact

SEQ ID NO: 235180 - DNA, 378 bp, Glycine max
gatcggagcctccaattcattgtctgtgtgcgaagaaaattctccctccaaagaccatacttcgcaaatctcaatggtgtggatgtgtggaaatacatttctaacatggcgttctaatatcacaatgatccaacgtgtaacacaatcaggatcatagttttaccaagataggtttgcgcgtacgtgggataaaaatagctacgtgcgagggacattttcctcactgcagaaattatttcgaatattccaaaggtgggtatgtgcacaaataagttccaaaaatggtcttccgatttcatgatgatcccacgagtaacgaggttgggatcatcatttcattgggatacgattgcgtgtatgcgagaaaaaaagaggatt

SEQ ID NO: 235181 - DNA, 426 bp, Glycine max
gcactataccaagcaaaacaagttttccattagcttgagactccaccttcactgatcgttgatactactagagcgaaccggtgctcttatcggccgtcgaacactctcctgcgccaccgtgtgaagacctctcacactctccttatctgcccaaacaaatcttctgcagactttatccagatcattataaacgattcatgagataaaggaggatggcagggtgtacgacgcaagggcatgtaagaccactgtactcaagagaacccttcctacagaagacagggttctcatgttccaagcatccagtctagagtaaactctatcaataacatgtgggaaaaccttctattaacgctatcatgacggatacgtacacccatatactaacctatgtcatatcgtcttccaaaccctatacaatgactg

SEQ ID NO: 235182 - DNA, 429 bp, Glycine max
  unsure (1)..(429): unsure at all n locations
tctttggacctcgaacaagcaattaactcctctttcagaaccatgctatgtgctcgcgactggtctctttcttcccttcgcaacttgagttcactattgctaccccatagagctccgcgaaatttgttccggccatactcttccttgcgagccctcttggtctcttgttcaagggctcttgcggtaattgcattctcttcccgtaacccggcacactccttgcgaacgtgtgtagcggccaacttgaacttctccttggcaagttttgcctttcctaactcgctcttgagagnctggagctcttcgtcctcttccggtgcttcaaaactctctttgctgacgacttttaactttgcgagccaatctaaacctcgtatatgaactttcagcccattctgggacccaccaatgatgccaatacgaaatgcc

SEQ ID NO: 235183 - DNA, 383 bp, Glycine max
ttctcataatagttacgttttatacccacttttgacgtgcgaaagccatttacttaagtcatttctcgctcaacttacaaataaaataaatttccaccgaacgtttgaatagtatgatccgtcaaccttggctaagataaattttgacctgtcggttgtgccgtaaccacgtgtggaattacaaaaagagataagctaatagttaatagcccaactgtccttttagtaaataaagcggaaaataaccggacatttctctttgggattctattcttaacgaattgattaaactacggtaaactaatgtaaaatcactgcctagtaagctcttcacaaaaaaggttttgaagttgtctttcaattcttataacaaaaggatcgtt

SEQ ID NO: 235184 - DNA, 419 bp, Glycine max
  unsure (1)..(419): unsure at all n locations
tccatcatctggtctctgtagatcttcacacagcanaatctctaaaaactctccggaacttggacctttctctctctagaaaccctagacatgcaaagctctgaatcctagttcaaaatcccttcacaaaatctgatttcaggcttaaataggtggccgtgtttgtgctcgtgcgcttaatgcacttatggaccacttagcgcatgttagtgatttttggcttagcgcgcctttctcgcttagcggatgaactgaagcggtgcgcttagcgaacctgtacagctcatcttcttctggattcttcctcgcacttagcccaggagtgttgcgcgtagcagatgctcactaagccagcagattggcttaacgagaaaatgaaaacaacacttttcaaagcttgctaattaacctgaaaatga

SEQ ID NO: 235185 - DNA, 450 bp, Glycine max
agcttcgaagacaagacagaagaagagattcgctctttatatcactctctacataaaaggctctctgtgtaaattctcgcaaagcttataaaagctctcaaaacactctaataatttctatagaaaagactaagcgatgaatctgttcatatgtcaatatgacggaagactattagtcattatgcaatcaaaccaacaaatcttcttacttgtgttaaagccaatagtggcttggtatgacaaacaatactacttgtaacaacctaggtgtaaagcttgacttaataagctaacagtagcattgataaatacttgtaacttgttgaagttagtgaaactttgtggtttatacaaaactacacgcactctcgatggttgaaatgaaccactataaattctctgtgtcttattctgcgtattttctcttctatttttgaacaaacctagggt

SEQ ID NO: 235186 - DNA, 426 bp, Glycine max
tgtaggattatggtgtacccatcacatgtggtactaggtggcggtcgggcgatggtgcacaacaagttttccacatccacaaagcgcgcataaacccaccatcccctgttgcccacctccaactgagctcacgtactcccacgtagcccatatcctcgttcctctcaacaccgggtccccatcaatcctcccaagctttcccaacatccaagtaatacaacattcagacaacacaaattatcatagccaagcaaaacagggcaaaggcagaaaactctgcccaaaacaccaaccaaaatcacagcttttctcacttaaagaccccagtaataattccttcgttccaattcgttaaccgttggatcgactcgaaaattttactggaagtctctagtacttaagcctacattgtgaaccgtgggatct

SEQ ID NO: 235187 - DNA, 235 bp, Glycine max
aactataaatgtaccaaacgccccctgctagaataatgatccacgccccctctcattcccgaactgaatgatacaacgccgcactgcatcctgcctcacacgccccactcattctatatttatatgaatacaacattctattatctatatagatataaggcacagatataataattatatatgaatacatatatataaacagatgggatatatatataaatatatagtcacttat

SEQ ID NO: 235188 - DNA, 308 bp, Glycine max
ctgcacttaaaaaatgtctatcaactttttttcagaagaaatcataaagacctcatcttaaggagaggtaccctaccgaaaccgattgcgtattttatgagcataactaaatttggaaccataaaaagggcttatatcccccacagaaagattacttcatgagccatcaggaaactacataaaacctaaatatggctaaagatgaaacatacatcattagaccaaacatatacatctactggaagaagaaatttacgttaaatgtagaggtaagaattggaactctcataaacatgaagactcaattt

SEQ ID NO: 235189 - DNA, 335 bp, Glycine max
  unsure (1)..(335): unsure at all n locations
aagcactaagtatttattacctatagntagcagaaaatacttataacactacaaaataaccattaattggaagagtttgagtcaattttcactagttttatacacagtagtttgtcgtattcaccgactagcaactcccccaaatctacagtgttgcttgtcctcaagcagaatgagaacacatcacttgttctcacgtgacagcaacatgcagtgactatgtacaaaggtgtatgctacaaacgttactgtttgcaagataagagaacgaaggtaactgccctcatcacgagtctttctttgtcgcatccggtatccaatgagaaggatataat

SEQ ID NO: 235190 - DNA, 293 bp, Glycine max
acaactattcagacctctagtaatacgaacacataatggtcatcacggagcccaacactatcagacatcgccttgaagcacaggtgggaaaagaccagggctagagtggaaccacttaaatgtcataattgtgtgagtgtgatgtgcacacacgcgcatgtgtgcattgtagcccgtcgactatatatatgtgcgacaaaggaaaagagagggccctataagcctgtaaacttgagaagcagctgcacgacctctaaaagaattagtgttatcaccatccaaacttgcgggtc

SEQ ID NO: 235191 - DNA, 426 bp, Glycine max
  unsure (1)..(426): unsure at all n locations
actaagcttgaggattatggggtacccgncatatgtgggactaggtggcgatcgggtgatggngcgaatcaactctcccacattcacaaatcaaacatgaacccaccatcaccagttgcccacctttaactgagctcacgtacccccacgtagcccttatcttcgttcctctcagcaccgggtccccatcaacccctccaagattccacaacatcctagcaattcaatatccgaacatcatgaactattcaaaaccaagaaaacaaggcagaggcagaaagctctgcccaaaacacattccaataccacaactntncctactcaaataccccaagaacattctcttcgttccgattcgtaaccgctggatcgactcaaaactttatagagggccctagacttaattatacatttgaacgttggatc

SEQ ID NO: 235192 - DNA, 236 bp, Glycine max
aataaattcactctacaattttattcataagcaaaaactatcgagacatgcatggtatattacatctaatgagggaactgggtatttcccaacaatgcataagtcacataggcaggggattctaaactctatacatcaggtcctatctaacgaaagacagaggaaacaaattaattgtttcattcactgacatcaaccaagtcaaaatttgctactctatatttgtgagcctaacc

SEQ ID NO: 235193 - DNA, 321 bp, Glycine max
tcctcgcggggcgagccatccacaacactgacgcttctgctgctgctcacttctcctttctcgctcgcacactatgaccataaagttgtaccgcagcaaaactggtgaatatttcctattcttcttccagctccatctattcttcccatcaccttattcactacgtacgctattgctcttatatttaatgagtagctactacgtcttcctgccctcttaacttccttgtcttctctccaatccatcacgtcccttctgtgttggatcaccactgctcacgaacaccgggttttggatacatacatgtgcatatgaggggat

SEQ ID NO: 235194 - DNA, 408 bp, Glycine max
  unsure (1)..(408): unsure at all n locations
taagctctatctaagccatatctctagtcgatgtgtttactaaacacttctctctgaggntgcaattaagacttctcccaaagaggctgcgttagcttttcaacagaaacaataacgctgcatttgcttttaacactgctaatttattctggtacttaataactgtgtcgcggcatataaattgaatgtttttcttagttcataactatgttatttcgaatgtgaaatttatcgaagaaatgcatctttttgcattaccatttaacttattctttgcatctaaaccctctcaaatgtatatgcatgataatgataatgagaaatattattttccctttcaggaaattcgtgaattggaagaacttcagcgaacactgtatacatttcttcatgtgattactacacatg

SEQ ID NO: 235195 - DNA, 262 bp, Glycine max
  unsure (1)..(262): unsure at all n locations
ggttgccncccgaagaagaatcccgagcgcacccccacattgattatttcacgcccattctggttcacctcgaattgatcactgaaaagttatggaagcgccttgaccttgattatcctatccattctccttcttatcattacttgtaagtgaaatatgcttgccgagggtgccgagatccttctctcagcctcccttgtcccttttatagcaaaaatggggtgaagcttgccgttgagctcgtccgagcgagctggttgct

SEQ ID NO: 235196 - DNA, 414 bp, Glycine max
  unsure (1)..(414): unsure at all n locations
aactcaagctgatactgaatngagtatggcacacacattgcatgtctgatatgccttttagaggctngaaaagtgcgataaaatgagttgtgttntctgcgttttctggaaaacgcactcgctaagcgagaatgctgcgctaagtgagttcatcaatactcattgtatataagctntatctgaagaactcgccaagcgcacttactgcgctaagcgagttcatcctttgaggatgaacattcatcctcttgctgaactacatgtggctaagcgaagctgaatcgctaagcccaggtaacttaaccattttttttgtgatagtcgagcgctaaactgagcattcctgagccaagcaccattggttgcggcatccactgagctaagtgagcttcactcactaagctcccataactt

SEQ ID NO: 235197 - DNA, 417 bp, Glycine max
  unsure (1)..(417): unsure at all n locations
ttanaatggcctccgtgatagaagctatttatcttttttgccgataggncggccttcatctgttcttgcactccctcttcattatccatttttctggatcgagtgttataggggtgccttcgcgctttcttatttatggtgagttcccttaagaaacaaacaatggtgagtatgccaccaaaacatgaatatgctgatgatcagagcacttggatccacctcaaggcccttttttgataacgtgatgagttgtataacttctccgtttataaaaaggaacaaagcttttatctatccaagatcatacaaaagtgttacaacagaacctagcggtttctaattatatggggccatcaaatctatcatgtgttgacagcaattgattatcccgtgaattttcctcggggctgttcacac

SEQ ID NO: 235198 - DNA, 430 bp, Glycine max
  unsure (1)..(430): unsure at all n locations
tttttgcgaattctaacttataaaattaatttgacatattntattctcatttttcttaaaaatcttataaagtttaccttcctcgctgaattaacgtgagatgttgatataagcacaaaaatttgaagtaaaatttatcatttctttacaatacaaaatggattttcttcctattttaaaaattaatgtctttattttatagatgatttttattgttatctttgatttaactcttcatccgcaggccacacaaaacacacgcaaacaaaaaaaagtaaaacatatttgttaggttgatgcttcttgcaccttctttntgcttatgggatattcgaaatgtaaaattatattcagaaatgtatcactttttggactttcagaaaatgatcaatctcaaacataaaagaacattctgataatggtgtatgaa

SEQ ID NO: 235199 - DNA, 419 bp, Glycine max
  unsure (1)..(419): unsure at all n locations
taacagctagatttgagatatcgtctcatcttgaatttttatnagtntttgatgatgactttgttattgttgttgattctgtttttttttatgttttggtcaagttaattaatttaaatttcaaataattaagatagaagaatagattgtttaggaatttcagattgattgtaagcctatatacataggcattctcaatttatgaatttaaatgattatttttctacattgttaatttctttgcgagttctcactatttattttacaaaatatttctaacaataacaatatgctttgggctcaatgccatgtagtagtttgccatanaaccaccctgcgcgctacaggcggtaagcactccaaggaatgtggcatcatctaatccaagtttaaacccgaacgggaagttagagaattta

SEQ ID NO: 235200 - DNA, 318 bp, Glycine max
  unsure (1)..(318): unsure at all n locations
agcctgactaggcgagcagagaagagccttagtgtctccttagttatnacgccattcacttaagaatgagatatttcatagagaaaacgccccatcgagccttcgctttattttactaaagcggctccctaagattattatattacaactttacctgtgtgttgatttgcaacgaatttacaccccgatcgaacggtcagaattcattttaaccgacattaacggacgatacaattcaaatgattgccggaaatttattttatttttaaattaggcgagaaatgactcaaataaatgaccgacgctcgtccgaagggg

SEQ ID NO: 235201 - DNA, 429 bp, Glycine max
  unsure (1)..(429): unsure at all n locations
tcttatccaaggctcatcttgngggtgtagctccttcttccatggcttattccctagtggatggcgcctcctctcacctcttctcctttgtcttccactgcatctccatgggggaaaattaccattaaaggacctcattgaagctcaaagatccagcctccatagaagccccacaagcaagcttccatcaagtggtaatcagagcacaagagcttcaagtaggtgctccttaaacctccattaattttttgctttaccttctcttccattgttgnttcttcatttttctccatgtatctcctcacgtgtcttgtgataaattgttgtaacatgattctttatagtttccaccgattaaacttgctataaaagctagaattgattttctatggttcaaatttcttgttcttggtcttgaaccatgaaatt

SEQ ID NO: 235202 - DNA, 460 bp, Glycine max
  unsure (1)..(460): unsure at all n locations
agcttgtaaagaatgaagtcttatcaagatcaactctcttgatgatttaaaacttaatgaggagattgatactttaagtcttaatgtcaatttcggtccattatattttgtagttgtttcgctttggaacatttaagttttaaaagtttcattatggttctttacgtttttgcaatgtatcattttggtccttttttataattctctgttagaaacattaatgttctgttagtttttaaattctaaaatgagttaatgtcacttttggtccatcatgttttaaaagtttcattcatcctttgtgttcttgaattgtatcgttttactcattttttcaattttttgttagaaacattagtgttttaaattttaaaatagttaagctaacataatgacagctaaaaaccactactatcttntttatattcaaaaaagtaaaactcattaggtaaatgtcgca

SEQ ID NO: 235203 - DNA, 367 bp, Glycine max
  unsure (1)..(367): unsure at all n locations
ntaactctcagcccanaactcccttcacaaaatctgatttcatgcttaaataggggggcttgttcgtgctcgtgcgcttagcgcaattctgaaccgcgtagcgcacattagtgaatttcggcttatcacgtgcttttctcgctcaacagatggactgaatcgatgcgcttagtgagatgaagcggtgtgctcagcaaacctgtacagctcatcttcttccagattcttcctcgcgcttagccaatgagtgttgcgcttagcggacgctcgctaagccagcagattggcttattgagaaggtgaaaaacaacacttttcagagtcgcctaattaaccctaaaatgagagaaaatgattatttaacaca

SEQ ID NO: 235204 - DNA, 417 bp, Glycine max
  unsure (1)..(417): unsure at all n locations
tgtgtcaaactggaatgaacncgcttctgtggagattttttggatttnccaccaccacaagacaggtcaccaccacttcctgtaagtcctgaattatggcatacttctacagagccacacctagatntcacatctatctccatatgactagcgtcattttcatgaagcacagcaaccgggcctttctgcgtgcctttatttactttcttctccttcaaacttggctttgtgttggattcctggtttccttgcgattattataatacaaggaatcaaacacacgggtgttaacctctctttccctcaattgctatttggaggtagccactgccaatgagttgctacctccatttccattcttcttcactccttaaaatcaagcttatttattgttaacacagaggtctcattgctgtt

SEQ ID NO: 235205 - DNA, 422 bp, Glycine max
  unsure (1)..(422): unsure at all n locations
tgcaagtgtaaacatctacaagaattagatcaatgcgatcccttnggaactctccacccacaataaggcaccactactcagtactcatccaccacaaaacaactttcttcaccaatttcaggaccagatgatgagcttaattgtattgggtatgtggtggtccaaaaagtagttgtgagttggtttctgatttatagaataagcaaagagaaagagtgggtggtgtctcagttatgtcactgtgaagtttgtttcacttcacattcacttggtgtgacatgatgaaacgtagatgagtacgcaatgcgtgtgaaattattactgaagtagctagctttcactagtgtagtatttattatgtgaacgtgaaacattcttctactgcgctctttatcttggctcttcaaagatgccgtttaaca

SEQ ID NO: 235206 - DNA, 477 bp, Glycine max
  unsure (1)..(477): unsure at all n locations
atccttaagtcacctgcggcatgcaagcttcaagaaaaaaggcctcagcaaatttcttatttccataaagaaattctatcaatagacctccaatctttaatggagagggttaccactactggaaaacccgaatgcaaatttttattgaggcaatagacttaagtatttgggaagccatagaaatagggccatatatacccaccacagtagaaagaattacaacagatggtagcacatcaagtgaaagcataacaatataaaaacctagagatagatggtctgaagaagatagaagacgagttcaatacaatctaaaagccaaaaacataataacatctaccctgngaatggatgaatatttcagggtttcaaattgtaagagtgctaaggaaatgtgggacactctacaattaacacatgaaggaactacaaatgttaaaagatctatgataaacacactaacccatgagtatgaac

SEQ ID NO: 235207 - DNA, 419 bp, Glycine max
  unsure (1)..(419): unsure at all n locations
tgcagaagggcccgcctttggaggactcccttcanaatcacttgaatagaattcacttggcctaggtgcctgaatgtttagattgttggagttggaagaaaggtgctcttgtacaatctacagggaaagtatgaacaaacttccagcagttagggtatgtatattaagtagaaaagaatgaatgaaagatcaattaataataaccaaagtcatcatttcactcaacgagacagcaaatccaaaagtatagaagataaaaaaaatagtaaataatgtcatcttgaaattttaaagtgacaaataaatagaaacaatattntcttcaaaaatataacaaatgcactagtcaatgttttccaattaccagatcaccaacttcagaaccctctgagtggaagagaatagggcgacatcgttta

SEQ ID NO: 235208 - DNA, 484 bp, Glycine max
  unsure (1)..(484): unsure at all n locations
tcgtacccgggatcctcttagtcacctgcggcatcaagcttgacagatgccttgcaattagtataagaaaatgctaattgcttctcccgaaactcaaaaataattacttaaggaaacgttgcaggtcatgcgggttaatgctgtgctgtgtttgagggtggggtcgttgagatttacattcatgaaataagctactgccaagaatcatgaaataagctactgccaagaatcatgaaataagctggtcaagttagtatacataaaacgtttagatcataaaacacataaaatgtttggatcctcctttttttcccatggccatgcccacttgttccaccaccaccactctttcctctataatgttnttttcctcctcctaatgccatgttagcatcaggtttcacttgcatctcttctggcaagggaagaatatgatccacacatttacggaagctaaaatcatcaacagattcaccctccctga

SEQ ID NO: 235209 - DNA, 432 bp, Glycine max
tcaggcacaagtcctgaaggattatgtcttagattccgttcacaaaggcacctgaggaatgtgttgtagcataacaaatctgggttaaccccatttgatttcatctctttaataattctcctagcttccttcacattcctctgcacagaccacccataaagaagacttctatatatgcaaggttttgtgcctgtaatcttgtcgttgtgatgccaaactaccccttcagccctcttaccatgccctttggagcaaagggcattaacgatagcagtaactgtaaattcatctatagaacacttatacttgtctaagttcttgaaaatacccaatgcctcatcttcttttcctatgttaaccaaattctctgctacaagactaaaagtctcagcatccatggctcgaccctccttcttgagatctcccatcaaa

SEQ ID NO: 235210 - DNA, 400 bp, Glycine max
ctctacaagcgagctgccggcactgcgagctgatacacatgattctatgtctgcacactgcccaaactagacaaagacctaaggcatctgataaatgacggcctctcatttttgtaaatggagtacatcagaaaaatatccctgccttctgcgaggggaagcaccagatgtatgaatggcgctacatcctgtaagatactaatggtaatcttcatgtattctgcggaaccacgagaatagctattccaatgaataattttctttcccttggtactttaatgaaatatttcagagggacccacaaaactcagaccctaaactctggctgagatatgctcttctgcagcataaaaataccagtggaacaggtgtgatggaaagctacaccatagcaataatt

SEQ ID NO: 235211 - DNA, 369 bp, Glycine max
gtgtgctgatgtggctacactgatagagctgtcgacaatttttatgaaatgaaaagttctgggacttggcagcctgacagttggacattttcatccttgattaccatttattcccgcaatggtaaagtttcaaaggtggaagggatgttgaatgaaatgatccaatctggatttcaacctacaatttttgttatgacatcactcatccggtgctattggaaagcaaagcgaactgatgatgttgtgaagatatttaaacagctcctggatttgggcattgttccaaatgatcacttctgctgttgccttttaaatgttctgactcaaacaccaaaagaagagcttggttagctaacagaatgcattgag

SEQ ID NO: 235212 - DNA, 373 bp, Glycine max
gacgatcgactaagggtgatgacacctaagctcaaatatcatccaaagaacaacccacgtgaatcatgaacaatgtacgagttcaagatcacaatcccgatgaaagttctagacgcatgactcacgactcacgtatgaagactcatgaatcaagattcaagaatcaagactcacgattcaagaatcaagagaaggcttaatccagataagtatgaaaagctcctctcaaaaattgagtagcacataatttttctcaaaacatgtttaccaacgaggttctactctctggtaatcgaataccagattgctgtaatcgattaccactaccacaactgtgttgaaatgtgtttcaaattgaatttaccacggccca

SEQ ID NO: 235213 - DNA, 376 bp, Glycine max
caatccatatatagatcgttgcaacttgccaactttattacaactttccaatgttgtgaatccttcacgttgcgtcatgtacactgtaacgacccgccttgtcgttatgatatcaccactttaaaccgtgagaaacttcatattttcaatgagaactctgttaatttgcttatgaaaaatgagaataattgtttttctcaacatacattcaccaaacaacgcaccatttactcaagtgaatatatatatataggaatagtgactcaatacacatcatacacataatggaaagttaatttgtgatttacatcttcaaatcaacaaaaagaattacggaaccagctatggaggaattgattaacaaaacacaactctc

SEQ ID NO: 235214 - DNA, 372 bp, Glycine max
acttatctatataacccgggaccacgcacttcctcgtgtgcttctgcagttactgaggaaaaaatatttacagttcaaccaaacgagaagaaactttaccttctttggaagccacagatctgaatctgctctcaacagtacatactgaggtgaatgtacaaagatttacagctattaacatttgtttcagtcatccataatctagaatacatcatatattaaaacctacctttaccgaattcggctattcgtaaggcaactaaccgcaagcacaaaatctctaatgtatctagaacgatgactgacatacacttccccttctgtgtaccaccactgacttaaaattaaacttccttctgcttaatgcgtatc

SEQ ID NO: 235215 - DNA, 266 bp, Glycine max
  unsure (1)..(266): unsure at all n locations
ggcagctcacaggattcattctatnggaagctaattggtcactcattaatagtttctattgcatatgatagtgatctaatacatgttgaccctgtcgtattctttgattccctaggttattcaactgatgagatttctgcttgcgcgagnttaatttgatgataggagtaggacctaagaatatgtatctcaatttttaaataatattttatacgttcctcattattggtctctgttgtggacctttttcttcttctttctaatga

SEQ ID NO: 235216 - DNA, 311 bp, Glycine max
cgctcgaaatagaatactgaagctttgagctaactcccacgacaataatgttctgcatggatggctgacagaatccagtcatacatatagaacctctgaaattaattctgaagctctcgactaattcatactacaattactctttgcctggatgactgatcgagtcccgctatctattgagatgctcgaaatgaaatttgaacctcacaactaattcaaacgacaataacttttacttcgatgcttgatgagaccccgtatattgtccacgatcgaattgaattcttgagcttctgactattctaacgaca

SEQ ID NO: 235217 - DNA, 408 bp, Glycine max
tcatgacgatgaatgaggatcaatcttgttgtttgaccatgaccaaaaacccaaaagaatgatgtcatgattgagtccactagttccagatctagattgatttcaagattcacgaaaagacattcaagaagaactccagaattcatgattctagaacagacatcacgaagaatcaagattcaagagaagatgaattcaccagggaagtattgaaaaggatttttctaaaaccaatcataacacaggtttgttttacaaaaagagtttttccaaatttttctaaggtactagagcatttactctctgggtatcaattaccacgttcctatattcgataccagtgataaatttgattcaaaatgttttactgaatttgaacgctccaaatgattttaaatgggtgaatca

SEQ ID NO: 235218 - DNA, 424 bp, Glycine max
  unsure (1)..(424): unsure at all n locations
gtttaaattcacttaatcattaactattgccacttgagtgattntgaggccttggctaatcgtatgggggagggagggttaaacccatccttcttgctaagttgttttatcttaagactaaagctggggatcaaacaggaagtgcttgcacatcaaccaagaactctcacctaagctgcaaggttagctcatttgcaagaggagaaattacaggatttgttccaattagctcgtccatgatacttgcttccttctccttacgccgtcacgcagacttttacaccttctgcttacagaaagatttcagactcttctcccatccaacaacttccatcgttgatgcccacactccattctttagcgaaccaaccatgattaaagtacaagcacatntaaagatgttgagatatctgatatggatgat

SEQ ID NO: 235219 - DNA, 411 bp, Glycine max
  unsure (1)..(411): unsure at all n locations
ttagggtaggagattattaatgaagatatatgtgcttttcttatattttctattggtgctgctaatattgaaaacaaagcagttagattagttaaattaattcatctaattagtcttttttttgtaccaaaataaaagtagttagatgaaataatgcaattaaaactattaggtaaaccaaaaaaagagagaaaagaatactagctaacaagaatctaaaactactttttgataatatttatagtttttttttaggcaagtcaatttgtctatccttccataaaaacggaacaaactaaaattttcaacctacattagccattttttttaataagtttgataagtcttggggagtgaaaccttggggctctctttatcaattctctatctttatttggntaatcaacaaac

SEQ ID NO: 235220 - DNA, 393 bp, Glycine max
agctttgtgaatcgatacactaattgttattctattaccatgttcgtttctaaataaatcaaaaagatgcaactcttcaaaaggtttttgactttttcaaattggttttaagtttttctaaaagttataactcttctaaatggtcttcttggccagacatgaagagtctataaaagcaaggctttgatttgcttttcaatatacttttcacattcatttgatcaatcctttacaagccttgaaactctttgaacttcttcttcttctttgtaccaaaagctttctgaagttttctggttttctaaaccttgaaaacttgtgctattcatcttttcattctcttctccctttgccaaaaagaattcgccaaggactaaccgcctgaatcttttt

SEQ ID NO: 235221 - DNA, 411 bp, Glycine max
tgtagagttgagtctcgtatcagtttcatcgattaccgatatctctttatcgatcgcactattgattgtgatgtaagctaaattggagcttgtaggcctaggatcttcttcaccaatggatttctttgattcttggaagatgaatgacaatggaatggagaaggaagagagagaggataccccacttctatgagaagatgagtcaagaagaagctcaccatcataggaggctatggataaaagcttggaggaagaaggagatgaatgaatggagaggaagaaaagagcacgaaattttgtgcttaaaaaagctccgaaatcttaaggttaattttcacatgacaaagttgaaaaatgcacacacatagtctctatttatagcctaagtgtcacacaaaattggaaggaaaa

SEQ ID NO: 235222 - DNA, 368 bp, Glycine max
tatgaggcttatacgaggtatatagagctcgaatcaatgctatcgagctacatctaaagaaaaatcaatgtctcgagaagacagcaataccaactctccacatttcagcttgagtatatcaactggaaccgatggtcttacgagcgagaatgcaacttcttctgccacatctagaacttcctttgattttaaccagacaatgagtatgaaggaagaaagcagtagaaattcagattgccataccccaggaagctccaagaatctcagtccaaggagaacaagatcagtagatttcaaagaccaccttcgttctttctcagaatcctctggctcggagaaatctatttgggcaaaatgctggagctata

SEQ ID NO: 235223 - DNA, 393 bp, Glycine max
catagcacttcaactattgtcggatggggctgacgctagacgcagccaacactatgggagatggcagagctgaccctacacttttttcgcattgggttgggtgagcctgagaattatctgtaaaccggacggagcaagttgatccgtcaaagcttacacatcacgttgatcgctaggacttctgtctatcaagttgatccatgaaatggtcacgactcatgaatcattaaacctgttttccttaattgtcgcgtgcaccaacactaatgctgggtgtgcctaacataggagatataactttatgctatcgacacactgggcctgaagtgcacaaacgtcatcccttagacctacattttatattatttgcggctcccgtccattatatacaca

SEQ ID NO: 235224 - DNA, 379 bp, Glycine max
  unsure (1)..(379): unsure at all n locations
agcttgcctcanagaggtccaggaaggacttggcggtcgaaggaactanttccgccccggagtacgacagtcaccgctttagggagcgttgtcaccaccagcgcttcgaagccattaagggatggtcgtttctccgggagcgacgcgtccagctcaaggacgacgagtatactgatttccaggaagaaatagggcgccggcggtgggcaccactggttactcccatggccaagtttgatccagaaatagtccttgagttttatgccaatgcttggccaacagaggagggcgtgcgtgacatgagatcctgggttaggggtcagtggatcccgttcgatgccgacgctatcacccagctcctgtgatatccgatggtatt

SEQ ID NO: 235225 - DNA, 420 bp, Glycine max
tctccataccaagttgtcgagacaactttggagcatattcattcttggcaccccaagataagacatcatcatcaagaagttcaccttccaaggagacttcaaaatgcttgcacacaagagtcattagctttccataaggaacacactagaaatgaatttgatggatttggttgcccccttgatcatgtgattaatgattaggtgaggcaaactgggagtaatctttttttcacagtcagtaaatgactagaagatcatagttatttacttcttgaaaggtaccaactttgggcagcacatagtgcatgcacatccaatggataatccttccaaaagattttagagatttggatttgaagtcatctctcttgttctccagaaacttcttttgaacttttgtctttctaagtcccttgcccc

SEQ ID NO: 235226 - DNA, 429 bp, Glycine max
agcttgtggatctagccgtgatcgatccttttcttgcttatcaccacaacaaggaaagcccggtcattgttgttttagcatatgcgtatgatacattcaacttaagatgcgagaaaagcaatgcaagaattctctgttgtatgcctgctctttatgtatggttggtatcccacgtctttaatcatggaagtagatctatctgtcccctacaaggtcattgtatgtacttaggaaaggatgaaacaaattgtgaagaactcttggcaggcataatgggagcgtccattagttggttcccacggtggaaagaagggggggcaggagtattatgctcatgtgaaggatttcaaaatgtccctttgatggagatgaggggttgcatcaactataaccctgtgttggccatagacagttaggatatcctatgag

SEQ ID NO: 235227 - DNA, 404 bp, Glycine max
  unsure (1)..(404): unsure at all n locations
tctctccctctnttctaaggcgattctcctctggcggtttcgtagcttgaacccaatccgaacctttcgcgattcttcgtgaactccaccaaacttgctatgccattctcgtttcagcctaaacccattatgggctcttatccgtgccccaacataacccgagccaccattaaagcggcaccagatgagcacggctgcactaggaaagactccacgtaagcattgctcacaacttccagtgcctggaaggaagtttccaatggctcctctgtaccctcaacataaggagtagaagaaggacaacttangagtatgtcttcttctctcgaaactataatcagttttccctccaccacaaattttaacttctggtgtagtggtgacgggactaccccaaccgaatg

SEQ ID NO: 235228 - DNA, 376 bp, Glycine max
tatgacagtcaccgctttatgagcgctgtacaccagcagcgctttgagaccatcaagggatggtcatttctccgggagcgacgcgtccagctcagggacgacgagtatactgatttccaagaggaaataaggcgccggcggtgggcaccactggttactcctatggccaagtttgatccagaaatagtccttgagttttatgccaatgcttggccaacaaaggagggcgtgcgtgacatgagatcctgcgtaaggggtcagtggatcccgtttgatgccgacgctatcggccaactcctatgatatccgttggtgttggaagagggccacgaatgtgagtatggccagaggaggaacccgtctgatgggttcgatg

SEQ ID NO: 235229 - DNA, 440 bp, Glycine max
  unsure (1)..(440): unsure at all n locations
agcttgtagaaaggctagacatgatacatgtcagggtttggttagcttcaaagataaaagggatgccccacattatttccatgacacaaatgcaaaaatgatgatttggaaactttatgcaaaactggtcatgcatgtacctatgcggacactcaagtgtcaaatttttatggtcatgtgatgctagggctcaagattcatttcctctattttaaatcaacccaatgtttccaaaatatgttcttttatcaatttgtgcgttcatccgagtccatttcgggcgtccggaaaaatttcacagcattcacctttcaggtgtagacacattntccaaaaattggttatgatcagtgaattttttcaaagaanaagttggaaatcatctcttttcataagcatgtcgggttttcagctagacaacttaatcattcttttccatc

SEQ ID NO: 235230 - DNA, 339 bp, Glycine max
  unsure (1)..(339): unsure at all n locations
tcgattcattctatgtacccgtagtggtccacattgtgtttcgcgcatttttattctcgttntgtttactttttataccccctcttgacgtgcttaagccattttacttaagtcatttctcgcttaacttaaaaataaaataaatttccaccgaacgtttgaattgtattatccattaacttcggttaaaataaattccgaccgttcggtcgtgccgtaaccacgttggaaatcaaaaagaggtaaaaaataatataataatcaaaaagacatctttagtaaaataaagcgaaaaatcaatcgggcggtttctctttgggatttctcattcttaatcga

SEQ ID NO: 235231 - DNA, 440 bp, Glycine max
  unsure (1)..(440): unsure at all n locations
agctntagccttaagttgttccaagttgttgattcccttatctctaacacaaaattctttccaagagccaacaaatggctcagcacatgtgtaaaatggttttgcacatctgaaatgctttttctcgataacattctaaacatttcatattcttgaatgagagttttctttcttgccctctttacttttgtagntccttcatgacttacttggagaagcaagataaaactcatcaagggttaaaatggaggcaagaatatctttagctctaacattatattgagcatgtctactttctttcggtgtacatgaattaaagtatttttctacctctnttccatcaacaacaaccttaggaatatgaggaccatttacaactacatctcctactcccctatcaacggaatcaagaaaaactctcatgcgtactttcccaaatg

SEQ ID NO: 235232 - DNA, 327 bp, Glycine max
  unsure (1)..(327): unsure at all n locations
tagttgctatgaggctccgcaacatgatcgtggcgaccattaccatgaacgtggcgacgccgaacaacanagtcttcgcactacaggggctcatattgctgcacctgcctctattcgacgactatatttagaaacaccagggaggagagataatgctggatcctggaaaacaaagttgttagataacgacatcattttttacttttctttctttaacacaaaactatctttcacgtgtaatctcggctagacaaagattacacgtgacatgcttgcgtgccagtcacgcaggcagatgacggatctcacacaaaaattttcaaatat

SEQ ID NO: 235233 - DNA, 363 bp, Glycine max
  unsure (1)..(363): unsure at all n locations
accttacaattcacacaactgttatacttcgtgcttgcgagattgcttatgcgctgtctctattcttatagatgatagctgctacaagaataagctgcctctctctaacggaagacgggatagagcaggaggggcatctgctttcattaagttgatgaaaaatggtgtntcattaagtcctccaaatccattcattgaagagaagaaatatcaacaagatccggattctttgataactgtgatatcattcctcttgggaggttctgtctttctcaatctgcgcacagctgtatggggtgtgttctactctctactacaacaaaaaaagttctaccaataaaactgttacagaaagcaatttgt

SEQ ID NO: 235234 - DNA, 429 bp, Glycine max
  unsure (1)..(429): unsure at all n locations
ngtgaaagctgatatcaatgggaaagacaatgtgctattcttctacactntntgtatatacagaagcattntctactttttgtatgtatactttagttatgattcaggacatagggttcttcttaagtctggttgaaaaacttagctgttaatgttttttttttggtcggccaaaataatatattttaaatataatcagtaccagtggtactatcattacaaatatttagactaccagccacatggttccaacatcagactaagatcagtcccaaagggaaccaatagctgggtacaaaatctgttaacagtccatttcctatgaattctaccccgctgtatttacaaaaactgatgaaatgttagtcgaccaatagctgtanggaagtgcttcaaagctcctcatccatgtccagagtgttaaaaaat

SEQ ID NO: 235235 - DNA, 184 bp, Glycine max
caaacacgatgataactttataagttatgacttccatagggattgcgtgttcacctagtgccttttctcacagcaccgggcaagccaagattttctttggcgaggtccatggcctggttgcctgctggaggaagacatcatttacctggcccttaattaccttcaagtctactgcaggaattcc

SEQ ID NO: 235236 - DNA, 439 bp, Glycine max
  unsure (1)..(439): unsure at all n locations
ntgagccanaatcctgactcaccatatttcttgacctatggtgagaatgtcaatccttaccctcggaagcaaaaaaaaaaaggagagaatgaaaatttccaatcaaagaaaaaaaaaagaggaaaggaaattcctaaccaaagagtgggagaaagcaaaaagaaaagaaagaaaattcccaatcaaagaatgggagaaagtaaagaaagaaaagaagaaagctcctggtcaaaggaaccagaagaaatgtgcagagaggtctttagaccggacagtatctgaacaatacagaatcgtcaccaaatgaacaaaaagaaggaaaggaaaccatgacctacaatggtcttctccctttaattgccaaccagaatcagtgtgctagcgacttgttcgcctcgcgcaaaaccaaaacagaaaaggaataagccaacataaaaaa

SEQ ID NO: 235237 - DNA, 455 bp, Glycine max
  unsure (1)..(455): unsure at all n locations
agcttgaggcaacaactgcagtatttgctagaaaaccacaggtaaaagattagacacccaacagttgaatatttgtcattgaagcatgtcagaaatatggaaattagcgagtaacacgaactcttgaacacatattgaaatacgtatgtgcaatgatttttgaacacctcaattttttaaacacttctatatcatctgttaatttcttcctatcatgtcataccatntatcatacattcatacttataatttatctttttttatctctcttactaagtgtcaaatagtatttgaggtatctaaaaatcattttagaatgttatcttctcaacaataagttattatatagacttaataatggattctagacaagtttaagggggaaaattataccgagtgcatacggtacttcttgttaaggtagttaatgttgggtgagatgaataatgatcatg

SEQ ID NO: 235238 - DNA, 436 bp, Glycine max
  unsure (1)..(436): unsure at all n locations
tatgcttntctttatattgtcacacagatttcatattcttaatggctgctgttttttcagacacttcctatttttcttgatggccttgttactgcatggggcgctatcctaatttctgtgacattaattcttttgtttggtgaggtgagaaagttctgtccttatatgattttaagtataatacattcatgtcacagattaagtgcttgtgttgtttgtttagaggttggaacctggaacaaaaatctggtggcacagcacccgttttgtttggttcacgttttttccatttgtgaaagacattttttgttaattagaatcaattccagttaaagtgggaaccagtagcttctcattcctctaatgttatgtttggcaataaaaaatgttcagatgctattatcgataaatgtaatgaatataactctacctttta

SEQ ID NO: 235239 - DNA, 478 bp, Glycine max
  unsure (1)..(478): unsure at all n locations
gaccagcaggcatgcaagctttanaaacttacattctatcctatgatcccttatcatttttaatgctttccctaatgttttttacagcaagaccgactactttcaacccctcttgaacactaaggattaaaaagcgagcacaacatcagatatgaaaaaattcaccaccacttactaaaccattagtatgcaaaagtctttccttcaaatagtcttgcattttatcattggaagaagcatcatctagagttaaggaaaatattttctgctcaatcccccattcttccaaaaaaaccatatataactttagccatctcactccccgagtgtggaggaagaaaatgagaaaaattaaccattttactattcaacttccaatttgcatcaacataatgcgcagttaatgaaatataacctcagaatacaagatgccacacatcagatgtcaagctattctactatggacttatacacatgc

SEQ ID NO: 235240 - DNA, 416 bp, Glycine max
  unsure (1)..(416): unsure at all n locations
tattcaggatatgggatgtcactctgtttatgtttgcgaatggaagcttgaatggagaagacacctttntgacaatgaggtgcaagcggcagccagtttcttggatgatatctcgcagggtcatattgatcgttggacatcaaactgctgggtttggaaaccagaacctaatggccagttttctacaaggagcgcatactatatgctactagaaggagcagcagatcagactgtgggtgaggctttagaggacctatgacagctcaaaatccctttaaaaccaacaacatttgcttggcgattgatcaaagatagaatcccaactaaagggaatttgtggagaagacagctggagaaaggcttttgccagccctacaactattggtctggtaatttatcaacaacattttttgatt

SEQ ID NO: 235241 - DNA, 375 bp, Glycine max
agctttcgaaccttgagcgagaagggcactcactgttctataaaaagacccggaacaccaccgtgataagcacaggttgcattacgatagaccatcggggaaagggaaattaatacaccttcctggggttcaccacaccatctgttttctgataaaagatggtattcggtacaaatatgtctttgttatcggggtgaactttgagagctttctttccatgaaattccttcttgggggaagctaatggggctgcacaaatccctccacctctgtgagtactcgatgaaagattaatgctccatcttgctcatgttttgcaattgcgttctatcctgagccatggcggtgtcgtattgatactgcctgatgaaagca

SEQ ID NO: 235242 - DNA, 440 bp, Glycine max
  unsure (1)..(440): unsure at all n locations
agctntgaactccagtctacacgtaaacatgttttctaccaattttatgtgacaaaaaagtcttctaaaaaagtaggaatgatgaaaggatgctttgaattgaccatatacagtggactgtgacgtccaaactaattaacatagaattgaacacttacaaaaaaaaaaagttattacttttctttttcaaattcatacaatagggactaaaagacgaagacaaacaatcaatactagacttgaaaaagacatacctgagttgggtagaaatgaaagaaaactttgaaatttaaattgaaagaaacacttgaaataagatcgagttcctttcaagagatgctgaatgtctaaggatatatacaacacgtggaaaatcttccttgactacctttcataagcgagtttgtattatttaatttgatatgatcgaaatggttata

SEQ ID NO: 235243 - DNA, 465 bp, Glycine max
agctttaagttgcatagcgcctatgagatatcttgttgtgccaacaaacccttaactcgcctctgttataatccttcgaatatgaacccggagctaagtgttatctgatacccgttgttggggaaccgaagcgggataaacattaaagagaattacaccaatgggccatgagcaattatataagtaaacttgacaccacaccttaacccaaaaccttaaagctcaagtttatgagttctttctttacttatatggtgttcaaccttttcattcttacacaatgtgagacttcacctcacacttgtacttcaacataccgacatatgcattcttataccaataacttgcactttagttaagtgtgccctcctaactaaaataattacaaacttaaaatacgcacaactctgtaataatacattcagcataaatattatttataacatcataacaagcacaacgaac

SEQ ID NO: 235244 - DNA, 384 bp, Glycine max
  unsure (1)..(384): unsure at all n locations
ttgaagttngcgatgaatgcattcatggtcaatgaacgttacacaccttcaaacctgtgccaatgcggcttcagacgttttgtaacggatacacacaggcattgtggggccatttcatacaccattgtggaacggtcaagaacatttgagtgtataacctagacgatcactctctgatctgcgtactacgatacttattcatggagaagtcacctagccctggatgtgttcattacatactgagctgaacttgatattcatctcaaccaagaatttttgtgtgtaatagcttgccgtgaaggtgatactggaatcgtcccacattacaccatgccggggccacctacatagaatggtgtgctgagagactaacgaagctcttaa

SEQ ID NO: 235245 - DNA, 467 bp, Glycine max
  unsure (1)..(467): unsure at all n locations
agctngctgntgtagctaagtctacaatttatattgtaagaaacatgatgacaagtgtaagtcatgacttgtgatgggtgaagcaattaacttacatgtaactatgccctcaattttagctcaacatgcttggactaccattggcatttgcaaaatataatatcgatagacatgtatgcttcacatatatcatgcctaacccaaactgaattgaagatattaaatagtaataatgacagcatacttttaagcttttacaatcaagttaaaaaatcaccatttaaaatgtagaagcttanaaaatcttaattttcgatttcaatcaaaactagtaatgaaagtcatatttctctttttataaaacataaaataaagccaattaactacgatatttgtgcacttcagatatagcttactttgccaacttcaaaacctaattgcaacaattgactttgcaatcttgctat

SEQ ID NO: 235246 - DNA, 410 bp, Glycine max
  unsure (1)..(410): unsure at all n locations
tctagaattataaagcctacatggcttaaaagtttcattatatcttaataatatattccatatctgacttaggatcaaatntccttatattgcttctagtattgagaatgaaacatcgctatccaaaaggataaaaatatgaaatattaggtttttgtcctttctacaattcatcataaggagtcttttcacaataggtttaatatatattatgttttgaatgtaatgggaagtatttactactntagcttcaaagtgcctcaaaatacaattatcattcaacatagttgtagccatttcttgtcatatatgagctatttttttctctcaacaaccatattatgttgaggtgtatttgagttgaaaatttgtataaataccatttttttacataacaatatgaaaaattt

SEQ ID NO: 235247 - DNA, 401 bp, Glycine max
  unsure (1)..(401): unsure at all n locations
agcttcttatccaaggctcatcttggtgtgtgaagctctttcttccatggcttattccctagtggatggcgcctcctctcacctcttcttctttgtcttccgctgcatctccatggtggaaaatcaccattaaaggacctcattgaaggtcaaagatccagcctccatagaagccccacaagcaagcttccatcacttatcctttcatttctctcccaccagctatcaaccttcccttgccttccaccattcagccacattccttggagctgaaactactacctgagtaccttaaatatgcctatttaaatgttgctcagaagctcctagtcatcatatccaacatcctttcacttgagcatgaggataagtcgttgcacgtnttgagaggccacaaaatg

SEQ ID NO: 235248 - DNA, 452 bp, Glycine max
tatgcatggaaaatgtaattatgaaattgagatgcccgaagaaacaccatttcctagttaaccatgcattaagtaccatgttcaattattttgttattaagtgaaatgggtttatgatcccaacatggttggctcgtggtgcctaacacatgaaactaagaatgtagtgtgaagtttcacgcttcccccttttttgtttttgttttgtagaggaaaacgcatggatgagcaaacatgaaaacaaatggtatgcaattttgcagatcaaaaagtttgttgaacgcatatgcatgatgatgccatgactcatgcaaaatgtgaggctggaatatgataacggacaaatgcaggatatgtccattatgatgttatgaagagatgcttatgcgatgcatgatatgaatgcattttacggacacgagagcccgtgaaattatctcttcttacttgcg

SEQ ID NO: 235249 - DNA, 400 bp, Glycine max
agcttcttggtttcctaatgctctggatgctagaattgttattgatccatataaacagagcatgtctttcaaattaaagcagaatttatgcatgaggcatttgagttgagcatccttattgaattttaatttgactccccccttttccccttttcaatactcgatatgaagggaattgatttattatgcatggaatggttgacgaatatcatgtgtgtttgtgttaaattagatagtgattcgtgactaatgtagatccccgtatcctggtatcttccatctgctcatgtttttttttttggaagagtgatgatattttgacactcttttattttaaacatcccaccaacaactcatatttctttatttcttcctattacatcatatcacatatcctacc

SEQ ID NO: 235250 - DNA, 411 bp, Glycine max
  unsure (1)..(411): unsure at all n locations
tcactctgggctcctctatttactcctcctcactctgccattactccagaggcttatgtcagctatgcagatcttattcagtatgatattcatgggcgaagcttaacctctgttactcctcctcgatctgccactactccagaggctgatgtcagccttgcacatcttatgccgcaagatattcatatgcaaagttttaagtctgaacaaataaaggaaacatttgatgtctcgagaaatagcattgagcttctttctactgtgntgtcttctacaatgcagcataatgtgttgaaggtaatttactttctgtctagttgcatttgtatgttcctttttggttgctctcatcagaggtgacatcgataaattttgaactaaaatattctatttatggatacaatttcattt

SEQ ID NO: 235251 - DNA, 397 bp, Glycine max
  unsure (1)..(397): unsure at all n locations
agcttgtaggccttggatcttcttcatctttggagtcttttgcttcttgaagatcaatggtagcggaatggagaaggaggaaaggtgattggagatgccacttcagggacatctaactnggtcactgcaccccccatgtacatacacaacacacattatcacaatgacatcatcaacatcaacatcatctcatttcaatattgatgtaatcctaccctcaagggaattggatagaagactctaagaagattgagccagagatgcaggagaaagccctttgattctcataagccttagggtagattttgggcccatgggctaagtatgagcccacttatctttgtacatattagattagggtttcattatttctgggccatgtatataagactccata

SEQ ID NO: 235252 - DNA, 408 bp, Glycine max
  unsure (1)..(408): unsure at all n locations
gagatcctgtgacctttggagtatcaaacattagcttgatctctntgctacaggtgtttggtggatttccaagcccacgtgataactttggagtttcttttgggagagttgtgttctgttatcaaactcttccttagtaggctccatgttattttgattgggcatgtaaattccaggtttggatacatgtaacaattgaattataccttgacatgcgaatgatgtatattttaccccgagtcgatccctcgcactcgagacctaagaatatttaccgaatattgatcccttgcatatgaatttaataccctatcattagaatcatgatctcttgtttttgcaatcaatacattatgcttatttcctagcaatgtaacatagtgaaggattccattcttctcatattta

SEQ ID NO: 235253 - DNA, 406 bp, Glycine max
  unsure (1)..(406): unsure at all n locations
agctttanaagcgccgtaaggccctcttatttatcgttcatcacaagngaaacacatcccatgctctcgtcggaaagtgggttcctccggcgtcaagcgtttcaccatgggtggcggagatggtggtgatggcaaaagaggcagaattgtggtggaacgagggggtgggggtcacagatgtggaggcagacaaaggtctgtcatctgctgctcctggagcttcgcaaggtcggcggcctggtcgacagtcataggctgatgggcctggactgcgtggcgaatcttcggcgtcaaacctgagatgaagcaaggcaacaggaaaggggctggcaagccgataattttattagccaagtcttcaaactcctttaggtaagtgagcactgaacccgtctgagtgagtttg

SEQ ID NO: 235254 - DNA, 431 bp, Glycine max
  unsure (1)..(431): unsure at all n locations
gaatgcattaacaaagatacttatcatgagttttgcttataactagnnnataagcgataatancnnnagtgtttgttactttttatatatcttgagtgactctcattatgtcactgggcacgtatatgctgcaaattattgatatttaaagggaagtgcaaaaacacggtttggacgtatacaaaccaaaactgaatcagtnnttcctcgaactaatggaaaaaaaataataataattagatcactttagttaactgaattgtttctataaaatagatttagttaaacgaatagatttttacctagatcattttcttttnnnaaanantgtcgnnncgnattaaaaccaattaattcttagaatccttttaaaacgggttgaaattagttcgatgtaaaccaatcttctaattnnnntgtccattgaatat

SEQ ID NO: 235255 - DNA, 394 bp, Glycine max
agctggtgaaattgttcaattgatatttttatctctcaaaatgatatatcatatttgttagtacttaaagagggtgaagttcaccactttttgaaaggatagtattcaaataaaagtgaatatgagggagagtgaggagagtataggtataggaaaacataattttcacacgtttatatagagagaggggtttagggaaaagacaaagtttgtgtcttttttttaaagaagatttaaataaattttcaaattttgttttaggttttcaataaattttaatctgtgttaagttctaattaaaaaaaggtatttttttttaaatttttgtggtcagttgagtgaatatgtgatagttaaaataattaaaatgtaatttctggtggctaaaaagttg

SEQ ID NO: 235256 - DNA, 381 bp, Glycine max
gggatgatatggaatctctgcaatgtggagaacaatattatatcagtagaaagaatacttcaatatactattattcctaacgggcctccccttgttgtagaagacaatcggccagatccttcttggccctcgtatggtgaggttgacatacaagatttgcaggcagattgagtcatcatgtcaataaaggtttttacttttactttagatttatgaaactcatgctaagctcttcttttcctaaatggttataagctaccattgaaacagaaatattctgccaacatatttcatagcatacattttacacgatgtctgtgctatgtttggaatgatgagttgccatgatgaaggtttggtatgatccacatcttccactgg

SEQ ID NO: 235257 - DNA, 395 bp, Glycine max
agcttcacaaaagtttatatggcttggatttagcaccgaggtagtggtacaagaagtttaatgagtttatgagcaactcaggattcaaaagatgtgacatggaccattgctgctatgttaagaaatatactaatagttatgttattcttgtcgtgtatgttgatgacatgttgattgcaggatctagtatgacagaaattaacaagttgaagcagcagttggcagaaaactttgaaatgaaggatcttggtccagctaaacaaatccttggtatgagaattcttagaaacagatcagaaggaatcttgaagctgtctcaggagaaatatatacacaaattgcttgacaggttttaccttggagattctaagaccaggaatacccctttgggatct

SEQ ID NO: 235258 - DNA, 390 bp, Glycine max
catgatattataacacatcacggagaggcgctggataccaaggctacactgatattgctgcccattcaatcaatgaattctgttcaagctaatgagagcatcttgaacactctctttataacgcggctgacgatgaacaccactctctttatagggggaacctctatgggacttccgtctatgggtcagactgctggtgccatgcacaagtcaaacgatatttcacttgagatgacaatgttctacctgcaggtgttaatgattttgcttctggacatgtcagatgttcatcagtgactaaggatgacctctcctggccagttcatgtggacaaactaaggacttttcatgaccgtaactcattattgggcttcatttcgacattggtat

SEQ ID NO: 235259 - DNA, 323 bp, Glycine max
atgccatttttggtttaagaataagggtccactggtaaaactaactttccaaatgtttgccttcgcaagaaatggccccgaggaagcttgccttaaagaagtccaagaaggacaaggcagccgaaggaactagttccgctccggagtatgatagtcaccgctttaagagtgctgtacaccagcagcgcttcgaggccatcaagggatggtcgtttcttcgggagcgacgcgtccagctcagggacgacgagtatactgatttccaggaggaaataaggcgccggcggtgggcaccactggttactcctatggccaagtttgat

SEQ ID NO: 235260 - DNA, 408 bp, Glycine max
  unsure (1)..(408): unsure at all n locations
ctcagcttctcaggaaggtntctcaagagagcttctcaaggattctacctattctataagtagaaacatgtgtaacacttgttgtaacttctatgaatgagagtctagtgagacacaactcaaagttcaacttctctccctcttttattccttcaatttcgtgctccccccttctctctttctttacctccattaaagcatcctcttcaagctacttatccaaggcaattcttggtggtgaagctcctttttccttggcttattccctaatggatggngcctcccctctcctcttctcctatgccttccactgcatccccatggtgtaaaatcaccattgaaggaccttattgaagctttaagatccagcctccatagaagctgcacaagcaagcctccatcaatagc

SEQ ID NO: 235261 - DNA, 197 bp, Glycine max
accggacccaagcacgagagcactgggggaattttttttttcccagcagaacgtgggttattcaactcacaaatggggaaacaggctttaaatactgaaggatggaatactaatttttcattcagacaatttgatgaaagactattaaatcatgatgaattaaattcgtgattataaattcgatctttattaacatt

SEQ ID NO: 235262 - DNA, 317 bp, Glycine max
aggcctacataatctaccaaccatacagcaactaatgcatcattcagcagggatagctaaatgactgatgtctaaggttcggacaggagaaattgataaaaggtccggatgttacgaggagatataatatgttgagtgaaaatcccataagatgaaccatacgtatttgatacattttccaaaggtacaatggtgcttgaacggcgcctgatggatatgattaatcttcatctgaccacagaaggatacctgcaatgtatgaggagcttacaatgattgataaaaacatactgtggagctggtggcatgacctaccc

SEQ ID NO: 235263 - DNA, 260 bp, Glycine max
cgagcagcaacggggaaaaggggaaaaattaccatagaacaaaagcacgacaagcacaaacaaggaggaaaacaactaagaggaaggacaaccaccacaacaaagggaaaaagaaaaccgagatcaaacaccaaaacgcgaaagacggacaaaacataacgaggagtgaaccactcaaccacacaaaaagctcgagacagacaaacgaaaacacaaaaaaagcctcaaaggcccagaagaaccccaaaccaacaaaaaaa

SEQ ID NO: 235264 - DNA, 326 bp, Glycine max
ggcgtgctgtcaatattctgatgagagatgttccatctgtactcaagaccgcactaacacatttgctgccgtagatccatggcccaacatgatgaaaccctcataagcatctaaccgagggacatgttatctgttccaccatggacccccctgaggcgcaggacagcttatcattgataacgcctgtttacattctcgtaatggaatgacaaaccattgactgtgctccctggctcccaagtgcattaccaaccgggatgaccttaacaaggtaggcttgcataaattagttctttgaatctagggccgttgtcatcataaaagac

SEQ ID NO: 235265 - DNA, 283 bp, Glycine max
  unsure (1)..(283): unsure at all n locations
gaantttatggtgaagtgggggttggtaataatgggaaaaagagaatttagagatgggggattaaaaagtatggtgtaggaaatgtgggtatgtaataagatatataaaaatgttaaaattttttattgtatagttatagatattgattggtttagaatgtttattagatgaagaagaatagtgggttgttatggggaatgaggttttaatttaatatatagaagtgtttaaaagtgttttaggataaaaagtaagttgataatattaggtaataaagtgttt

SEQ ID NO: 235266 - DNA, 244 bp, Glycine max
ccgagttatgttgggaacagatacgaacgcggtatgcgtttaggcagatacaacatcggtataactaactttatttacgccaaaggaaatcgctggaagtatggcttaggctataagacactcattgcgatttgaagagaagcatctctggaaggaagaaccatggtcaaagctcatgttggagacaagatagggaatgaagcccgccctgccacataagtagaagccttataatcacggggct

SEQ ID NO: 235267 - DNA, 340 bp, Glycine max
agcttggtgacaataattgggtgaaaatattacatcagatgaaagaaaaataggcaactgctcatatgcacaaaaagttcatttgtgggatcaaaacaacgtcaatttgtgaaggtattaaatcattcatcaagcgatatgtggagaaaaagaatagcctggttgatttcaacactactagaaaattgacttttaacgacggttctaatatacatttaacgacggtagttgaaccatctttgaagccaacgacattaaaagtcattgatgtaccatgacgattatggaataaaccatcttaaaaaatatgtctcttctaagatggttcttatgtaagaac

SEQ ID NO: 235268 - DNA, 432 bp, Glycine max
  unsure (1)..(432): unsure at all n locations
tctacttatgtggcagggcgagcttccttcaccttcttgctcaaccgcgagctntgactaccgctcttccttcccgcgatgcttctctttacatctgcctgagtgggcttatagcctaacccatacttcccacgatttcctttggcatttatcaggctagttatgccgccgttgtctttgcctaaacccattccgggttcgtaaccattccccaacataactcgggccatcattactgctgcatcggacaggcaagcttgcccagagaaggagtccacggaggaaatgcttaccacctcaaaagactggaaagcggtttctaatgactcctctgcggcctccacataaggcatataggatgggcagctcaccaagatgtcttcctcggctgatatgatgaccagatgcccttccactacgaatttcaacttt

SEQ ID NO: 235269 - DNA, 403 bp, Glycine max
agcttgccacccagctcgcccaggcaaggaaggttgcttcctccagaagcaacagccttctggaggaatcttctggagggcccaagtgggcctggttgctatttgcacccctatttttactaaacacaccccctgcccttttttttggtgattcttttttcgtaaagttacggaaacttacgacttttgtaacgatacttgttttctttccgtaatgttacggaaccttgcggattacataatcatcccctttttgacttacggaatgttacgaaacctcactatttgtgcaacgatgcttccttttgatttccggtgtgtcacggaaccttacagattgtgcatcagtactttcttttgatttccggcacgtcacggaatttcacaaattgcctaatgatgg

SEQ ID NO: 235270 - DNA, 446 bp, Glycine max
ctcaagcttgatcaaacaaaatctaaacattccaatccactcaattcatacaatttctcattcaaatcaatcacaacacttcatttcatacaaaatcaaaccactaaatatcatattcaatcagttcactgttcaatcatgcctttgtacaaacaactgaaatttaagagactgaaatttaaataactgaaacataaagcataaactaaataaattgatcaaaataaactgttcaaaatgcaagacaagaagataaagatcctgtcaatcctctgcgggtgatcctctgcgggtgatcctctgcatgctcattaagatccaacaccggagaagctggtggatcttgaacaataggttactctggctccgacgctggtgcagatggctgggaatcctcacgaatgggtgttggagagataggaactatagaagtaagctcttgagct

SEQ ID NO: 235271 - DNA, 407 bp, Glycine max
  unsure (1)..(407): unsure at all n locations
ctgcaagccccattgngcataaagctaaaatttatcatgtcttattgctaataattaggagaaaatgacacaaaaatgaacaatgaagtaatttatggatttatctcctttcaaatatataaaatggttaatgacatagtcagtttcttacgcattctaatttcaaatgtaaaaattactaagttatacaatttaaggaaaccaactttcaatgaagtaggtaaagaaatatatcgtaagcataacaaaaggaatgagggaagttaacaatagtttaaaatcaataaaaataatcaataaaaaaaggatattttttttaagaaaaagatagtagaaaaggaaaaaaaaaaaaagcagcctcgagaacttaattaanaatggtaaaattttaaagttaaaaaacaaaa

SEQ ID NO: 235272 - DNA, 433 bp, Glycine max
ggcttcagttgttcgtaggattattccgaaactatctccaagaaattttgggccttatccaatagtggaaagagtgggggccttgccatacaagctaaagtttccggagggagcataaatgcatcctgtctttcatgtttcacaactcaagaaagctattggtagttactcagctaaaacaatattacatgaatggttagaagtggagttggaagaaaatgaagaacccgatgaattgttggcttcaagggagatatggaaaggagggcagcttatcagacaatggctagtcaaatggaagaagagagcagttgaggatactacttgggatgatgaaagtttattgaagagtcaatttccaacacttagccttgaggacaatgctatatctgcaggggaagtagtgatagggcaccattaccctatgtcgatt

SEQ ID NO: 235273 - DNA, 399 bp, Glycine max
agcttagcagctaactcctgaggatcaggtcttaggttttaaaatctagaataagcacagagtgattccccctcttccataataacaagggtcttcaagaaagtgttaagagtgtcttcatcaaacttaatcaaatgacctttcaccctcacctacttaggtgatttatcctcggggtcatagaggttggcgtaaaattccttcacaatggcaacattgatgttgttgtcaatgaaatcagtcaactcctcatcccagtgacgtctctcaagttcctccttgaactcatcaaactctgtatagtagaccaccacattcctctctggcaaaagcttcctaggcgcaataacatttgtgtatcttttcccaagcctctcgggaagtgaatctggatctatc

SEQ ID NO: 235274 - DNA, 431 bp, Glycine max
  unsure (1)..(431): unsure at all n locations
gatttagttacttaaatttgattcattggtaattttggntncctgaatttaaatttcctttatatatagcccttcaatttaaaaaaaatgatttttttactttttagtctttcttatctaattttttgcagttttacgattttttttacggctagagaaactaaaaaggatattttttcgaaattgagaggctataaaaaagcatatttaaattcagaaacaacaacaaaatagaaaaaatatagttaagccaagtttttaaaggatgaagttgcctacaggccacaagtcatacaacacctttgtctttaatgaacccctatgtaaacgacacttgatggtttttgcgtttaacctaagagaatcgcccaagacgacacaaagtatccaaaggaagttcccactaaccagaggaacgagtgttgaagcag

SEQ ID NO: 235275 - DNA, 384 bp, Glycine max
  unsure (1)..(384): unsure at all n locations
agcttccatcaagtggtaatcagagcacattagcttttttatgtgctccttaaacctccattaattttttttctttaccttctcttccattgttgnttcttcatttttctccatgtatctcctcacatgtcttgttctaaatgttgttaacatgattctttagagtttccaccgattaaacttgctatagaagttagatttgattttctatggttcaaatttcttgttcttgttcttgaaccatgaattgtgttgagtttaggttcctttgagttttgccttgttattttttgtggctgaaacctaaaccataaaattcttacaaaaatattaaagtagaagaaaacctcataaatctagagtgatttgttcacctattgtagt

SEQ ID NO: 235276 - DNA, 402 bp, Glycine max
tgactagtttatttgttttctccatagcatggtaaacagataaagcaccctatgctgacacaaattcaatagtcctaagtactttatcaaacaaacattgtttttatgttgaacttgattgttaacatagggtaggggtatccgtccccttgtgctttaagtaaaggaaaatgaccctttaagaaaagaaggagttgaattaaaccgtttgataaggataaaaaattatagcattagatgttatgttgctagctccaacagagttactaaggagtaaaaatttatattaccattcctttatgtcacctccatgtcctggctttttaatctatttttcttatgttacagatgacttgatccccatctttgtgttgtcatttgaatgcgatgtcaagtttcata

SEQ ID NO: 235277 - DNA, 394 bp, Glycine max
agcttgtagaagggctagttatgatacatgtcagggattggtttggttcaaggataaaagggatgccccacattatttccatgacacaaatgcaaaaatgatgatttggaaattttatgcaaaactggtcatgcatgcacctatgcggacactcaagtgtcaaatttttatggtcatgtgatgctagggctcaggattcatttcctctattttagatcaacccaatgtttccaaaatatgttcttttatcaatttgtgcattcatccgagtccattttgggtactcgggaaaattttcacagcattcacccttcaggtgtgcacacatttttttttcaaccactagctatgatcagccaattttttcaaagaaaagtgggaagtcatctctttt

SEQ ID NO: 235278 - DNA, 364 bp, Glycine max
  unsure (1)..(364): unsure at all n locations
actcagcttgaatgaggaagcgtggaagagttcttcttcctatttttgntnatngaccacagagtggtacttggagatatgtcgcggtggtcaggagaccttgnggacgtcatgtggggtgctattgcccaaaaacaagcttggctaatcccgacccatcccgggcatattcagtcagtgagaatctgtgactgacctaaactggcgagctcctggcagtcaacaaataaaagaacaaagtccacgaagcaaggaggcttgtgtggcggctggccaactatgtatcttgggtggtatctgaaaattaccctttggtaatcgataccattcgtgggtaatcgattacagggtttaaaaatggaga

SEQ ID NO: 235279 - DNA, 387 bp, Glycine max
agcttgccacccagctcgcccaggcgagttaggttgcttcctccagaagcaaccgccttctggaggaaatttctggaaggcccaagtgggcctggttgctatttgcacccccatttttactaaatacatccctcttgctcttttttggtgattctttttccgtaaggttatgaaactttacgaatttcgtaacgatgcttgttttctttccataatgttacgaaaccttacggattacgtaatcatcccctttttgccttccggaatgttacggaactttacggattgcgcactaacacttccttttaattttcggcatgtcgcgaaacttcacggatggtgctacaatgctttcttttgacttctggcacgtcatggaacttcacg

SEQ ID NO: 235280 - DNA, 263 bp, Glycine max
  unsure (1)..(263): unsure at all n locations
tanacagagaataagagagcttatatggagatcgattataagagctcgagcaaaataaggctcacgcctgatatattttaaaatgtaagtccaacatcggttttcaataaaaaaaaaaaccgatgttaacaaaatgatgttaaagtaaacatcggttttctggacgaggaggtagtggtccaccacactgatcggtgctaccacagggggggatgtagggtggtgcttctcgtgaatataacaattaatatgctcatgtatta

SEQ ID NO: 235281 - DNA, 396 bp, Glycine max
agcttcttatccaaggctcatcttggtgttgatatctcctttattccctaggggatggcgcctcctctcacctcttctcctttgtcttccgctgcatctccatgggggaaaataaccattaaaggaccttattgaagctcaaagatccagcctccatagaagccccacaagcaagcttccatcagaaggctccttggaggtaaatcttgtgatctatctcaatcccaaagagagaacatctttcatacaagatgcaaaattttagataaaacttgttctctcattatggataatggatcttgttgcaattgttgtagcacaagattagtttcctagttgaatctcactatcattccctacccaaaaccttataaacttcaatggctcaatgagcaa

SEQ ID NO: 235282 - DNA, 239 bp, Glycine max
ccaacccagtcatccttaggtatatctagctcttttcttcctcactgcctttagttgaatacaccttgggtggggtctatatgtggatcttaaacctctctttcaacttctttacaaactctgacctacatttcccttctttatgtataaaagaattgtctagtgggagcggaatgaggtcaaacggcgttaggggattgaacccatagacaacctctaaaggggactgcttggtggtt

SEQ ID NO: 235283 - DNA, 394 bp, Glycine max
  unsure (1)..(394): unsure at all n locations
agcttacacaatttccctcatgctgatgttttaactccttnggnatnncacttccaggactaacaccttcagatctgtaaaaagaatggatcacctgcagagacatctatatgttatttcctgattcctatacacaaaaaaggagagagaaagagatggcaggagcaaaggaggaacatgcaaacctgatacaattgcatcatccatgaaaaagccatgttactgcagcgattcctatcaaataattttgggcaattaaaaatgtataatcctgttttgcttccaaaatagctttcaccagttgggatttcaatccgtgaagggagctcatgcaaagatttcaactgcttgcaatgttgtaactctaaacacaacagtttggaaagcttcttga

SEQ ID NO: 235284 - DNA, 423 bp, Glycine max
cagctgtacaatggctagacatgatacatgtcagggcttgttttggttcaaggataaaagggatgccccacattatttccatgacacaaatgcaaaaatgatgatttggaaactttatgcaaaactggtcatgcatgcacctatgtggacactcaagtgtcaaatttttatggtcatgtgatgctagggctcaggattcatttcctctattttagtcaacccaacgtttccaaaatatgttcttttatcaatttgtgcattcatccgagtccattttgggcgtctgggaaaatcttcacagcattcacccttcaggtgtatacacattttttcaaatactagttatgatcagtgaattttttcacagaaaagttggaagtcatctcttttcaaaagcatgttggtttctcagcttgacaactt

SEQ ID NO: 235285 - DNA, 391 bp, Glycine max
agctttccccttgctccacgactcactattttttccaaaaaggtgttgagggaatcaacatcaaattttatcaagtgccctcgaaccctaacttgctttagttctttggcctcaggaacatatgggtttccatagaattctttaacaattgccacatcaatgctttcctcagtcaagttctttgtcctcaagggcatatgggtttccatttttttctaatcaattctcttatgaaattatcaaactcagtaatatacagcttgacatttctttctggcagaatgttcctggcaagcacattatctgagtaacggtgccaggcctcctgtgatataaatcttgatctatcataaccgtcctgagacactgaagctatgacttttctcttacc

SEQ ID NO: 235286 - DNA, 414 bp, Glycine max
  unsure (1)..(414): unsure at all n locations
ntcttaagaaaactttcttgagaaagcttcttgagataacttccttgagaaactagagtttagctacacacacccctctcataactaagctcacctccttgagaagcttccatgagaagctagagcttagctacacacacccctctaataactaagctcaccttcttgagaagagaagctagagcttagctacacacccctataatagctaagctcacccccatgacaaaaaacatgaaaatacaaaaaaaatcctactacaaagactactgaaaatgccctgaaatacaaggctaaaaccctatactactagaatggccaaaatacaaggcccaaaagaagaaaacaacctattctactatttacaaagaagagtggacccaaccttggcccatgggctcaaaaatctaccct

SEQ ID NO: 235287 - DNA, 386 bp, Glycine max
agcttcacaaccaaaatgcttttcaatttcttcagctgtaccggctggcttcttcacccctgaagcatacatacacataccaacttcactaccaaaggcatttctcccaagggaatatttcaatcttttatacagagcagaagataacatgtactttcaagttccatgataaaggaaatattcaagaaaaagctctaaaataaaaggcaatactcactatgtcttatgactttaattccaattgccccttcaagcatcctagcttttgaaccgtcatggtcatattcatgaagtcctgattcataacatcaataaaacaacacaaaacactttcagtgacttactgaacaactactaccataaaattcagaataatttcaaaatgc

SEQ ID NO: 235288 - DNA, 427 bp, Glycine max
tgtgcatccaatagctggatgaggatgtcccttatgttcttaaaactagactgatccatttgcttccaaagtttcatggccttgcaggtgaagacccgcacaaacatctgaaagaattccatattgtctgctccaccatgaaacccccggatgtccaggaggatcacatatttttgaaggcttttcctcattctttagagcgagtggcaaaggacttgctttattaccttgctccacgatccatcacaagctgggatgacctcaaaagagtattcttagaaaaaaaatttcctgcttccaggaccacgaccatcagaaaggatatttcaggcattagaaaactcagtggagagaacttatatgaatactgggagagatttaagaagctatatgccagttgcccgcaccaccagatttctgagcagct

SEQ ID NO: 235289 - DNA, 401 bp, Glycine max
agcttgacaagcccatcagcctagacgagcattgtgcatgctatggttgacacgttgtctaggatgagcatgatttatgtcccttcaagtagggtcaggtattggaatgccttctggttggggtctttgcatttgaccatcttgacccttctgactgttaggcaacacgtttgggagaggcctttcatttcactcaaagttagcgtgagctatgcacgcacgtcgtttctttacacgagtcactttatgaaaggcacatcttaaagatgcgttacgtggttcatgggggttacatcgaggcacgggttttcaaggttttgttttaactcccactagtttctgaaaggtcgtggtcttctctcttcatttaaaaggaacatagttaggttttcatcatctgc

SEQ ID NO: 235290 - DNA, 429 bp, Glycine max
gtttaggcatgatttatacatgatttatgacttgtaggatccaatttgggcaaaattggatgaaggcaagagtggtttcgaaaatctgcactttatgcagaatattgctaccaaataggtgcagcagaattttggctttgtgcagaaagtgttgtgtttttgctggttgtggaaagagtagtacagattgggttctggacgttttctagcagatcccaacggtcataatgtagatttatgtgctagagacttccagtaaactttttgagtcgatccaacggttaacggattggaacgaagagaatattactggggtaattgagtgtgaaaagctgtgatgttggtttgtgttttgggcaaagatttctgcctctgccctgttttcttgggtgcgttaatacataatgctaggatgctgaattacttgga

SEQ ID NO: 235291 - DNA, 402 bp, Glycine max
  unsure (1)..(402): unsure at all n locations
agctngtatntaaaaatgttttaaaaatatttttaatttatatttgaatntttattcctttattaatatatatgtgaggggtagagggtgtcacaaataaaaaccctgaaaatgcattttcaaaaggaaatgtatttttagatttgcttaaaattacattccttgtcatcgcgttttcattttacccaaaatgagattcctggtttcaactgaaaacgagattttattgtttccagttttaggttggtttgagaaaatattttcactgaaaatgaaaacagaaatccaaccaaacacatttccatccccattttctatgtcaaatgagaatgaaaacagaaaacaactaaaccaaacaccgccttatttattcttatgctttatttgtcttatgaaaataat

SEQ ID NO: 235292 - DNA, 443 bp, Glycine max
gcttaaccctacaaactcggcttataaggtgaggattactccccacttatatagtttatctcgatactatcttcattccatgtgagatttcaacatgtccagattttcctcatgtctgacaattagagatcaaattaattgagaagcaacaaaaccatgaaccaaaacgcacaccgaagttagggtctcaaatgattgtcagttattaaaattactgtagtactgtaatcaaattaacaaacctaggaataattgtcaatttcaaggactaaaatttctttctctaaaatccacggaataaaatgattaatcattataattttagggtctacggactagtttgatactaaaagaagcagcaagagatctaagaaaaacatataattccattgatatataactttacaatgataaagaaattatcagcaaaaaatataaatcaa

SEQ ID NO: 235293 - DNA, 403 bp, Glycine max
agctggttaaacaagatgttcatcaacgatgttttgacttgtttaaagcctgacgagtaaatctttgtttaaaagtacaaatgtgggatgagtttaccagtgttagctatgttatgactctaaataattaaggtttgttagttatattgtacttttttggttcattgattgcaataaaaaatctaacttactttaaattagatcggttcgaattaaataataactaattagataataaaatatagaagccaatcaataacataagacttgaataatttttattgtctaataacgatcataagatcttcacttaagatttatttaaattcctcactatattaagtcattaagtcgactctattgaatgtaaagacttaaactatatgcatgaagtcataattaa

SEQ ID NO: 235294 - DNA, 355 bp, Glycine max
cttcattcttacaaggaagtagagatacatatgtggagtataagcatctataatggggatgaagtcttttagactattagcatccatgtgtggacaacatatgcatgtatgtatgatttctgataaataagaactccgcttttcacccttgttagacttgttagtctgcttacctttaatgcgatctactctagtctcaaagtcaacgatatacaaagtactaaggcctcctctatgtactaatagcttgattctctcaatagagatatgatctaatattggtgccgtaacatagaggattcttcattggtaatacattgaatgtacccagcagaaacgtgcatagaattataag

SEQ ID NO: 235295 - DNA, 400 bp, Glycine max
agcttttggtaagttcaaagatattcaaggcttggaattgattgattggaaaagtaaaagtattgaatgaatgaattaattgaaaatgcaaatcaaagccttgcttttgtagactcttcatgtctggtcaagaagaccatttagaagagttataactttttagaaaaacttaaaaccaatttgaaaaagtcaaaaaccttttgaagagttacatattttgatttattcagaaacaaacattggtaatcgattaccaaataagtgtaatcgattacacaaagcttttgagtgaaaggatgtgactcttcacatttgaatttgaatttcaacgttcaagggcactggtaatcgattaccaaaacattgtaattgattatagctttttgaaaataattggagc

SEQ ID NO: 235296 - DNA, 442 bp, Glycine max
  unsure (1)..(442): unsure at all n locations
ctaaggatgcaatgtaatctgccagctcatatcacattgacaaacaatatgttttattgttgaattgcccgtatttggtaatcaaattgttattcagaaaaagacttcagacttttagactatagtctttatgtagaagcttcttcctttgctctctggacaacattttggctctcttatcattttcgatcctcatacttaaactaggtatattatttgcttctaccagtgcaaaaatcaaatcgtactgaaaattttggctagagttgggcatgatgacttcaggctgagagaaaatgtgttgttgttattttcatcaattnttattattttgatatttctctaatctctagttaggaaaacccatattcttgtttatctgtgaagtagcattgtcctgattntgataatgaatttgtagaacgtcttgtgatggcctact

SEQ ID NO: 235297 - DNA, 392 bp, Glycine max
agcttccattcccgagagcttttcttatttaagcacttcagcctttgctttcgtgtagcttatgaaaaatgcaatttcttctcctttctttcttccaaagccatttctaaagtcccaagcaatttctccatcacccacagccaccattagccaccacaaaccatcgttgttctccattgaaaccccacaccgagaggaacccttcaaccgaagtggaatcttccaacttggctcacggtttcggtagagaacgaaatcctagtctgacctttcgttttccttcgaggtaaccatggttctacgttgtttctttttagtttcagcttgtctttgcatcgtatctgactttggaaccgtcattgcatgttttactcttctttgaaaaaccctag

SEQ ID NO: 235298 - DNA, 439 bp, Glycine max
  unsure (1)..(439): unsure at all n locations
ntgtccgtaataatcactgagaacctcattagggttcaacgactcaaacggtcctctttgcttttatcggttaacatgaaccgttcaaaagcataaaatcaacatgtaactttaccgcattcgcgagaactacgtaggtctgatttcctcttcgatggaggatacgtaggagcaaaagccccgcttttgtcgacctcaagagatggttagaggtccaacgccttagctttctcaccaagtaaaatggatcattttaaggtccaacgccttaaatgacccccctttcaagtaaaaaagaatcacttgattcgccccttttgcgagaactacgtaggtctgatttccttttcgatggagggtatgtaggagcaagcgcccttgctttgtctacctcaaaatagaaaagaaataaaattttagatacgtaatttcacacaat

SEQ ID NO: 235299 - DNA, 392 bp, Glycine max
agcttgcatttggaattgctaaagccctattccattattaggattagtacctgacatctcaaacaaacaaatcaaacgtaacaagacaattatagttgttgtttgaatacctcacccactcaagtgtatcacacaattatggcttttctctaatgaaacactcttgccttttaccactctaattccccttgagttcttaggcaattcaagagattatggcctcaacaaagaacaattcaccaatatgtgtaaggtaaggctagagagacatggaaaaggttaaccaagaaaaggcttacaatgtttttaggcacaaatgaaggaaataaaattcagaatttaggaattcaagttacaatccttcatgcaaccaatatattaccttaaagaga

SEQ ID NO: 235300 - DNA, 425 bp, Glycine max
  unsure (1)..(425): unsure at all n locations
tcctctgccgtataaaaacattgttagccaacaagtcttntttaaaaaaattgcgcaatgtcagctgaaaaatatcagtcgggcctatttcacgaccggtgtcagctattgagatctctattcaatccctgaatgaaatatgcatgaagtcggatagcaaatatttttttgccgaggtgggctaatgttttcctggccgaataaatgggaaaatgccagtttcggccgaaacaaaacgtcggttgagctcgcccaaaaaaacctaggcgacctacattgtacattttttatgcaacacctatacaagaaaacttcctctgccgtaaaaaaaaaacattgtaagccagcgagcgtttttaaaaaaaagtgcgcaatgtcagctgaaaaatatcaatcgggccctattcacgaccgctgtcagctat

SEQ ID NO: 235301 - DNA, 357 bp, Glycine max
agcttcatgatgcaaagattgttttgattatatctaagatgatgaccaaggttatgacaaaaatgatgcaatcctaccccgcaagggcattgggtataagacttcaagttgattgggctagagatccatgggaaggccctatggttcttatgaaccttagggtagattttgagcccatgggctaaatattagcccgcttatctttgtaaatattagaataagtttttcctttctctgggccttgtatattggccattctagtagtatagggttttaaccttgtatttcggggcattttgagtaagctttgtagtaaggacttttttttttgtattttcatgtttttttgtcatgggg

SEQ ID NO: 235302 - DNA, 439 bp, Glycine max
tccacaacatgcaagcaaaacagacatttatacagctcaagctatcacagccaagcaaaacagggcaaaggcagaaaaactctgctcaacacactaaccaaaatcatagcttttctcacttaaagaccccagtaacaattccttcgatccaattcgataaccgttggatcgactccaaaattttactggaagtctatagtgcataagcctacatttggaccattgggatctactagcaaacatctagaactcattctgcactactctttccacagccaatcacacacaagcatttttctgcacttgtgcaaaattctgctgcacaatttcacagcaaaaatctgcacaaagtgtagatgtcgaaaaccacactttccctcatccaatcttgctcaaatcaaatcctacaagtcccaaatcaggtatcaatcatgtctaa

SEQ ID NO: 235303 - DNA, 361 bp, Glycine max
gcttgggaactaccacatgaaagattttgttttgcaaagagatgttctaaacaagctatatatgtcggtaaggtactaagaaaaaggcaaataatggttgctaagcgccctagtcatggcttttgtgatgataatcccaaagtttcccaaaatcatggacctatgaccaatggtagtaccaaatagtcagtggataccctccaacaactggtagctaccttactctacaatgccctattttataatggacaaagcccacatgcactcccaagaatctttattgctgatgacctccactgtattgaacgcccatatctaatatttctcattttgtaatttctattaataaaattgttgctga

SEQ ID NO: 235304 - DNA, 437 bp, Glycine max
tcctcgtggcttctttgagaagctttctcaacaggcttctttgagaagctagatccttatctatccacccctctattaactaaattaacttccgtaaaaataattacggatgaaaataacgcaacaaataatcaaacatcaaacataattactaataatatatagatatatatatcagggtgttacacatcgtatccggagccatatcagaattgtactgacactgcctaatgacggcaaccactaggtccttccaagaatggactcgggaaggttccaagttagtgtaccaggtaacagctaccccagtaagactttcttggaagaaatgtatcagcagttcctcatcttttgtgtatgcccccatcttccgacaatacatctttagatgattctaggggcaagtagtccccttgtacttgtcatagtccgacacc

SEQ ID NO: 235305 - DNA, 287 bp, Glycine max
accggacctaagcacgagctcactaattacaatttttcatttttttcaatgctctacacaatatgtaaaacagtattgtccaacattaaatatatttaataatattatgaatttaatgaccccgattatgacaaatattccacaaaatggacacatctttctgtaaaaaaaataattaatttttaaaagttaattatttaattattatagactaattaatcacattataaaatttaatggaaaatgcaactaaaatggctttttatcggatgtatcatgtctgaata

SEQ ID NO: 235306 - DNA, 392 bp, Glycine max
cgaaaaacactaacaaaactggacaaaagatacacatattccaatccaaattcagttgaaataacaagaacaaaaaatagaaagaaataaaaaatatataaatacgaaccaaaaatgaggataaaaggattggcatatccagcatcaccatgaacaaaatatcgaccacctcgtcaccaccaccacaaatatcgcaccttcgccatctcagatttccaaagtcgtttcttaccccaaacctgtcttcaactccgatgattccatcttcgacttctttagaaatgtcattaccaaggtccaaaccttagaagttgtgaaggcgttgaagtcatcagagcctagtttagcccgcaaagaaaataacccgttatcctctagtttatagggtattt

SEQ ID NO: 235307 - DNA, 364 bp, Glycine max
  unsure (1)..(364): unsure at all n locations
agcttaagacttttattgtctttgattatatgnacacgcngttagtgatacaaaccaccacagaaagaaagaaattaaaaaaaaaatgttttgcattgaataaacaacttttgttgtatcaaagttactgatatgactaacataatttgtgcaactttgcctgctaagagattcagcttaccggcagaaatgctcgcctggtaagatatgaaaattgtctacagtatcatatcttatgtttgtggtagtctatacattttaatcagccataaagtcccttctaaaagagcttaattgggaatgacgcccaatttttgcagaaaacaatggaagcttttatgattatcctttcagctacacagct

SEQ ID NO: 235308 - DNA, 416 bp, Glycine max
agaacgtatgtaagactcatcttcttcaaccttggtgattcttgactccatttcattaaagtgcatatccacttgtagttccaaagtgtcaaacctttcaccaacaaaggtttgaagaccatcaaacctgtccaaaatctttgaaagaagagattaatcttctccatcatgtccttcttcaccaacatgtcgagcacccttcttcacccaagagccatcatgctcttttttataaccaaaggatgctatgactgaagcgcctataaggaaggatctcttgattggaacatagggttcaaaatcaagagggatgttgaagtgttgaaggaaaagggtaacaagatgaggataaggcaatggagcattcaatcgcaattccatatgcatgcgatatctaacaagatgtgcccgatcaa

SEQ ID NO: 235309 - DNA, 389 bp, Glycine max
agctttccctaaattgaacatatttgcttttttaaatttggtatataaacaacacaacaaagaatgtgagaagggcacatcaaattaaacacattttcagaattgatttcttgcttcttttttttctcctttctgatcactaccatggctagaaagaagttgaatcttacatacatacccaatgactcaaagaggaagacaacatttaagaaaagaaagaatggtcagtgattgttctctctttacttcatatattattttgtacataaactgtgtattattaaccttgtagcatgcaatctttttttttcttaaaaaaaacgttgtaacatgcatatatctgggtattattaaccttgtagcatgcattttttttttttttctaaaaa

SEQ ID NO: 235310 - DNA, 325 bp, Glycine max
  unsure (1)..(325): unsure at all n locations
ttgcacggacacggatattctcatggtaatatcgttacagcnagactgaanagacaaaccaatatccatcactacacagacacacatttgtaaatggtggacacaaatttgactcatccaaagcggatcctgaacaagttaaactatgggtccaatcccatccataattcctcaaggcagctgatccaaagacatctgtgtgattgaaccaaaagtctcattaggcaacattcttagcaagatcgacatctaaggatgtcttagctaaaaatctgaatgaagttctacaaatgtttcaacaagaagaacaagttcatcctctaag

SEQ ID NO: 235311 - DNA, 406 bp, Glycine max
agcttccttgagaaaattcctagagaagttagagcttatctacacacacctctctaatagctaagcgcacctccttaagatgagaagctagagcttagctacacaccccctataatagctaagctcaccccatgacaaaatacatgaaaatacaaaaaaagtccctactacaaggactactcaaaatgccctgaaatacaaggctaaaaccctatactactagaatggccaaaatacaaggcccaaaagaaggaaaaaactatttaaatatttacaaagaagagtggatccaaccttggcccatgggctcagaaatctaccctgaggatcatgagaaccctagggccttctttagtagctctagcccaatcctcttggatccttctatccaatacccttgggggga

SEQ ID NO: 235312 - DNA, 446 bp, Glycine max
ctttaacatcaatattcatgcacccaaggctggtaatttcatttcatggttcccttcgctatggtaggttatttcatgattactctggtgctttcttaggaggatatgttttatatgtgggtatatttctttctttacaactgaactagagggagttgttttggctatttctatagctcattccaaaggttagggcaagctttggctggaggtggattcccttttagtcctcaaggcttttagtgttatcaatgtggctccttacgatttaagaaatgtctggatgaatactttattctattgtggcccaaatggagtttcgtgtctcccatattttctgagatagtaatgtatgcgctgatcatttggctaactatggtgtagaattactctattatgttggaagataaacattgaatttggatgaggtgtacaaggggagatac

SEQ ID NO: 235313 - DNA, 402 bp, Glycine max
agctttgaagaaaatggttacgaatcatttatttgaatcattcttttattctttcttgtaaagctttttgtaaatttttgtaaagttacaaaactctcaaaacaccttgtataccttgagagaaaagactaaaagtgttgagtgatatatccgtctgtaagacgatcactaattttagtcaatgtacaaacttccaacatatcttgttgatttgtttagatccaatagtgacttgatagaacaaagaatatttgtcttaagtcaagcatgggatagagtttgcaagtgtaaacttggataagttagtgaataatacttgtaactttgataagttcgtggaaacttgatggttctcaagaactggatatagtcttggggttaagacaaaccagtataaatgct

SEQ ID NO: 235314 - DNA, 445 bp, Glycine max
  unsure (1)..(445): unsure at all n locations
ccgtgaaactattccaaacacgctatacaatggtttgaaaatggactcattcctttaaataatgtctctagctagttcaaatcttgtttatgtatacaaaaaaaacatatataattgataagaaataaaagtggttaatcaagttttttcttttgacagatatttatcattaataacatgtgaatacctcacacccataatacaataacagaaaaagtatatacatttacactttctcttttacccgtccttagataaaaacaaaaaatagtgcaaaaatttgaaaaatgaaaagtgagtgtaacttaaaaagaataaaaaaaatgttatagttttatttgctaataaaaaaaattaagatgaacaagtatgagaagatccattcaagctcaagagaaataattntaaatattatttcaaataattaatcaattgtacgtaatgc

SEQ ID NO: 235315 - DNA, 394 bp, Glycine max
agctttataagcacgggtctgggagactattgtcaagtggtcgcgatatacgaagatgatgttccgagtacattggatttggtacgaccatgccctcctgatttccagctgggaaattggcgagtggaggaacgccccggcatttatgcaacaagcataatgtaaacctttacggttttaaaagctctatagttgggcctaggctttagagtttttccttttgttaaggctttgtgtcttttgtttttgaatttataatacaaggacctttcttcatctgttcctacgtctctacccattctcattcatttgcatgtttacttctttatttctgaaacggaagatccgatgacgagtccctcgaaggtactaatacctgtgacccgcttatcaa

SEQ ID NO: 235316 - DNA, 450 bp, Glycine max
  unsure (1)..(450): unsure at all n locations
tgtagaacggctggacatgatatatgtcagggtgtttgtttggccagttgttcaggaataaagaaatgtcccacattatttccatgacacgcgtgcaacaataatgattcagaaatttatgccaaactggtcatgcatgcacttatgtggacactcaagcatcaagtttttatggtcatgtgacactagggctcaggattcattttccctattcaagtcaacccagtgtttccaaaacatgctcttgtatcaattcatgcctttatctgagtccattttgggcgttcaagaaaatttttcacagcattcaccctttgtgtgtacacacattttaaaaaaataaaaaatacaaaaaccttgtgttttgatcggtgaatctttccaaaggaaaactggaatttatttctttcggaaagcgtcttggattnttagtcaaaaatatatatattt

SEQ ID NO: 235317 - DNA, 396 bp, Glycine max
ctgcagctgactgttaatgtaagcaaactttcctgttgatttatggttcacaaatgacgttttgatatatatgtgcgcttaaaatgtagatagaaaactggttaagagaatggagagagttaacttacagctaaatgtgagaatggtagtgttgtacgtggaaaagggtgaaattctgaggtttagaaagccaaatttggggttactggaaatttgagtttaaagtgagttaattctagtttagaatgtcaattacgacttgtaggaaaactcggttagagcaaatgaggaaaattagtggcaaatgtgaaagaatagagcccattatagtgtaaattgcgtgttgagaggtcaaactttgaataggtgtgcaatttaccttaaaatcctcttgag

SEQ ID NO: 235318 - DNA, 429 bp, Glycine max
taccttgtgaatgaatgacatatgctttgcacccattttgaactgaaagtatgattgttagactgaaccttgagtctgtacagtttatctgcttctaccttgtcttaagttgcaagaaagcatcattcataaaaggatattatggttcaaagtcaacttgccccaaatctggggcaattcattgtgtgaaagcttccaatggtaatgatataatagcacacatagtaagtaataagtagctcaatatatatatatatatatatatatatatatacatatatatttggctgtaaattatttaaataaaatgggtgtgcgtgttaaacgagcacaaaaaaaataagctacttctctaaggaatgtataaatctgggataattattaaacgggtacctaagatgaagctctctaaacctaacttatgatcta

SEQ ID NO: 235319 - DNA, 393 bp, Glycine max
agctgtgcaataattttgttttaaactttcctcactcaatagcttcatagtttcccaataaaattaaggtttgggaaacattaattctgagaaataatattagcttgttatatctacaacgtcataaaccagaaacaccaaaacctgtctaggaaaattattttgaaacattgttcacaacctaaatatcttaaatttccaattcttatgatacaacatacgtttgttatactactcatgaaaatacccaaatactttttctcttattttatatgttatactttaaaattttaaacttactataatgctatactatatgccaatgaattcaaaatcctattttaaacaccctaacaaacaacaaaatacaaatttagtatgtattaaggagct

SEQ ID NO: 235320 - DNA, 420 bp, Glycine max
  unsure (1)..(420): unsure at all n locations
tgaataggcagtcgaagagttgcgttctcaatcagtatcctccagcaggtccggggaataagtttcttcgcctgtggtatcaaaattgatacaggcttgtgaatcaaaagtgctataagatgagcatgagacagaaactcgggtttccagtgatgttcaaatcatcatcaaacccatttatgttaaccaacaggcaaattggagatttgaaaaaattgctttcgaagaggaagctggatgttcaaattgcgggtaaattattcaacggggagcgagatgatcggaaaactggtgatgcgaagtacagtgatctcaaagaccaagtngaacaattgaagcaacattgctctgattgggagcatccaacattgaacttggcggtctatattgaaactggaagcaacttctggggatatttat

SEQ ID NO: 235321 - DNA, 396 bp, Glycine max
  unsure (1)..(396): unsure at all n locations
agcttctctgttgctctgtctaattccttaacaattttcgcaagngattctgtctcaatggcatctgagacgccctggataataggatataattccttcatagaggaatcaactacttccaactcattcaatatagtaaatcgcccacttctaactctaatttccccatttacaagatcttgcaaacttttaaaggttggagcccaagaatatacatcagccacatccaaatctgacatattctttgtagagcccgaaaaagccgcagcaaacacactgcataaaaatactgtctgcacctttactccatacatagcttgcatcaaaaccttccctttagcagactttttaacctttggcagatcaagtgaccgcagaagatcatccaaaatgctg

SEQ ID NO: 235322 - DNA, 282 bp, Glycine max
  unsure (1)..(282): unsure at all n locations
nttanagtggtcaccactaccaagatccaaatcatatatcaacagaatttcaaaattaatcatgcaaaaaccacaagcaaatggtccccagaaaagaccaatgaataatctataataaactagccaccaaagaggcatgaataacatagagntttggttatctaaaagaataaaatgtagataacagaactaaagcaacacctttggatcaatcattactcttacaccaaaatcctaacaaccagaagttcattgtaggacaaacgtaattaaagtatggaa

SEQ ID NO: 235323 - DNA, 395 bp, Glycine max
  unsure (1)..(395): unsure at all n locations
agcttgttgatgaaaggatgttatgactatgttgttgnaatgctttggtccttgttgataagcatagtcactaagagtcctccttggtggtctgttttcttctcctcctcgatcaaccatgtcatcttttacaagtggctttttagttgaaggataatcaatagaagaagactcacttggtggtttagtggctgtttttctttttcttcatgttcttactttcagtcttggtaatttcctaatcaaatggtaatttatatacaagaaatttacctcgcataaaggaaaaatagacacactacaacaacccgtaagcaccaaggttagtgaaaaataacaagagagaatttatacaaaatataaataaaagaaatagttacaaaattaaggaaatc

SEQ ID NO: 235324 - DNA, 437 bp, Glycine max
tgaactaaaagaagataagtgcagttgtactacctcttatttgttgatgtaaattggactatcatcagtagtatcgaaatcctcagcttcacaatcacctgaaacaattcctgtcggggtcacccaaaaaatacatatcatttcgatgcaaatacccattgcgaatacaatgcattgtccaaatattttgaagctgaccaaaatcaaataaacaaatatgtattttattttcaatttttagtcaatacaactacaaacttgtttataatacatgtttaaagaaagacatcaaatacaccatagtggttgttcaaatctcatctaaagctttctacattggatgttcttaatcgttaaaaaatatgatgcccattttttgcgaattgttgtcatggtcttgatgtcaagtggcatgccatcaccaaactactacaaat

SEQ ID NO: 235325 - DNA, 394 bp, Glycine max
agcttgcttgtggagcttttatggaggatgtattttttatcttcaatgaggccctttaatggcgattttccaccatggagatgcagcggaagacaaaggagaagaggtgagaggaggccccatccactagggaataagccatggaagaaggagcttcaccaccaagatgagccttggataataagcttggaaagggtgctttaatggaggaaaagaatgaaggacataaagagagaggggggagcacgaaattgaaggaaaaaaagggagagaagttgaaccttgagttgcgtctacaaaactttcattcatcaaagttacaacaagtgttacacatgctcctatttatagactatggagctctcttgagaagctgtcttaacaaaactttctt

SEQ ID NO: 235326 - DNA, 433 bp, Glycine max
  unsure (1)..(433): unsure at all n locations
taagaaacagttagaggaattggtggagaagcggtttgtgagacccagtgtgtctccatagggagcaccattgttgttagtaaagaagaaagatgggaccatgaggttgtgtgtagactatcggcagttgaataaggtgacaattaagactaagtaccctttgcctagaatagacgaccttatggaccagttggtaggagcttgtgtgtttagcaagatagaccttaggttaggttaccattagatccaagtgaagtctgaggatatatcgaaaactgcttttaggacctgttatggtcactatgagtatctagtcatgcccttcggtgtgactaatgctccaggtgtgtttatggactacatgaatagagtctttcacccttaccttgatagttntgtgggtagattcatagatgataatttggtatacctc

SEQ ID NO: 235327 - DNA, 399 bp, Glycine max
agcttaatctaagggggtgtggggccttttccatgtataatgtttgagcctgcagaaacacattgctgggaagggtgacctcagttttttaaacagcatttgtcttaccctgaaagggggcatgtacttggaaatgattttttcccaatattctcacactttacggaggaaggttggctccattcctaaggctgagcaatttaggaatatgttgccatatgaaatgtctaaaatacttattcgtgccatgttataaaaaaacaatcgttttatcaatgttcagggtgaaatgtctaaaatacttattcgtgccatgttatcaaaaaacaattgttgcatcaatgttcacaatcctcaaccaccattggcctctgtccgctacctccagttgccaaaatt

SEQ ID NO: 235328 - DNA, 419 bp, Glycine max
tattgtatgcatgcttgtggttagatcacccattgttgtgtgctgttaggaactttagcattgacaaatgtactgtttccttggaacttggtagagcacgactagataaccgtagtgctagacatagtgtgcagggttctagtttttattatgttgtgcttataatgctgtttaaattaggctaagttcaataagagacatctgcgaatgaagaatagtttaaattagtccaaactcacgagacatcggtgttggtatttttgtccttaacatagaacacaagaataatttcaaatagagaaaaaccctaattgcatcaagtatctcggtggaaggacccaatgcttatacttatttgttttcacacttcaatggttcacgttacttattctttgattacaatagaatatacctttgtt

SEQ ID NO: 235329 - DNA, 362 bp, Glycine max
  unsure (1)..(362): unsure at all n locations
agctttgcttctacaaccacaacttgtgtctacatccagnccccaagcaacccgcttgagatttccactatccttgtaaaatcctttacaagcaatgaatcacaaaggaatctcctcttttgtgttcagtgattacaaccaagaagttatacccacttcttgcaatgaatccaaaagcggttagtcttttgagtccagtgatcaaccaagaagcaaatccgcttcttgcaatgaacccaaaagcggttagtcttttgagtccagtgtttaaccaagaagaaaatcctacttcttgcaatgaacccaaaagcggttagtcttttgagtccagtgattaaccaagaagaccttctcttgaaaca

SEQ ID NO: 235330 - DNA, 426 bp, Glycine max
  unsure (1)..(426): unsure at all n locations
taacaagctnntatttatagttggggctnggcctttttatctaaaaaggattnttaaaaagcttgagcttggcctttatagtaaacaagccgagccgagccgagccttacataggccgagccaaaggccttcgacaagctactcggctcatttccacccatgcacaacgtagtatggttaagagggcactcccataagagcaagaggtttccttctttattgcctccatgagaaagatgagttagagtttgtacacaaaataaagagggaaaaaatagatcactaattgtttggagacattgtataccttttctagtgagtgtccatatgaagctatgtaagcagaattgacgtgagccaaatgtatgctgcttttctcactaaaaatcttttcatcagttcatatcctttcctcccctgatttat

SEQ ID NO: 235331 - DNA, 389 bp, Glycine max
agctttgaccaaaatcaaacgacaacatttttttactcggatgtcggaatgaatactgtattatatcgagacgctcgaaattgacaatatatcgagacgctcgtaattgaaaccaaatgctcgaagcaaattcaaacgacaataactttttactcggatgttcgaatgaatcccataatatatcaagacgctcgtatttgaaaacataagctctaagcatattctaatgataataactttttactcggatgtcggattgagtcccgtaatatatcgagacgcccgtaattgaaaacggatgctcgtagcaaattcaaatgacaatatcgagatgctcgaaattgagcaatggaagctcttgagcaattcaaatggtcataacttttatt

SEQ ID NO: 235332 - DNA, 444 bp, Glycine max
  unsure (1)..(444): unsure at all n locations
gctatcaggacctataaaactcaagcttacagcagatttagtaatgacccactaacctatatttaaaataacttaatgccattaacctagggaattaaaacaaacttaatggctgagtgtaactgaaattgttggcaaccaaaagtcacccccaacagccaacaagtcagccaccatttggtctcccaaaaggctgatgcctaagttgccaattgggcccttattacaacttgaactaaagcccttttagttgattaacccaaaacatatttttggtcagccaactttacaaggattgggccattatttatacaaactaaacactctaaaattgaaataaagtggtgtcatttagtcctccatttgggccatgatacaactcacaaccttggactnttcttcttgaaacttgtgcttgtattcaaatagtatggacagcacttg

SEQ ID NO: 235333 - DNA, 400 bp, Glycine max
agcttctcaaggaggtgagcttagttatgagaggggtgtgtgtttttaagctctagcttctcaaggaagttttctcaaagaagcttctcaaggaagttttctcaagaaagcttctcaaggaagctacctagtctataaatagaagcttgtgtaacacttgttgtaactttgatgaatgagagtcttgggagacacaactcaaagttcaacttctctccctttttcttccttcaatttcgtgctcccccctctctctttctctccctctttcttttcctccattgaagcatcctctccaagcttcttatccaaggctcatcttggtggtgaagcttcttcttccatggcttattcccagtggatggcgccgcctcttacctcttctcctttgtcttccact

SEQ ID NO: 235334 - DNA, 451 bp, Glycine max
  unsure (1)..(451): unsure at all n locations
tctaatccctatatatatatatatatctttctcattgtaattcctataaaacnttttaatgggactgtcacctaacacatctaataatctcattaaaaattgataattaatatatttaattttaacaaataaaatgcacattatattttttataatgaactatacataatgaataaaaaattacttcattaattagcatatttttacatattcaaaatattttttcatattaaactaatttactacattgatctagtctgtatatatagcatatgtgctgcgaaggtatcaaatttatcttcctccaccctttaccggtacttcttttactataattttgattcattattaatatnagtttatgttaatttcactcttgtattaatactttcngttaataatttaattataataaaaaattacataacatgtcaatatattaaattaaatc

SEQ ID NO: 235335 - DNA, 400 bp, Glycine max
  unsure (1)..(400): unsure at all n locations
agcttgtcanaaaaggggaagaaaagatgtttaactatgtctgtgcaggaaggaccagttttccggttttacctactatagttatagaccaagcacaggtcaacatatattttcattaaagattaaaaataaattttaacaaaattcagtagttaataattaatcaaaagttttattctttttaatcccaatcatctctcttccattttctgaggaagatggagttgctagaaagcaaatgcaatctgaaatcataaatcgatggaaaaagaaaacatatctggaagggagggacacatggagtgatgctgaagaaaatgaaaaaaaaagaagtattcagtataaattaaaaagattaatttaaatatttaaatgattaatcggcccttgacctcttata

SEQ ID NO: 235336 - DNA, 460 bp, Glycine max
  unsure (1)..(460): unsure at all n locations
ctatacatactcaagcttcnacttcgctctgcntttcgatagagatttggattctatgatccctcttccccacttctttctgtactctgcatatttgtctgtgaagttatcctgatatgaaaccaccaaccataacacaatactaatagtttttttacatcagcatacaagatactgtcttaatttaatcaacgccaccttgatagcctccaaaactctgctgaactccaatctatcttcattcttaacagcggtcaaacacaaaacggatgcagctttcttgtggacaacctgttaaaaagcatgtggggtttaaatcagtcatttaattcagtcatacagtatgaaaatcacattatacaaagaaactataccgttcccaagcgggcctttcccttccaatacaattcggatatttcatcttcctgctcaaatcatgaagccagaccaccaattctat

SEQ ID NO: 235337 - DNA, 396 bp, Glycine max
agcttggagggttgacaaacttggagaacttggatctttacttgttttacaccgcggctgaaacagggaatctatatttgtagacagatttttgaaacgttgttctgttgacttttttcattttaatttaattcattttactaagcctggtattattaaaatttaaaactaaaactcttacaaggtaattataaactttctctagtttactttgaagtggtaatgctttatcatacaacccctttactttcattttttgccttttgtgtcatcattttgcttagcgaaattcttgcttagttgatattagtcactggattaagattgcacgccttcaaagatcatatttattactcccgtggctagaaaaaccaaacttgtgtgacatggaatgtt

SEQ ID NO: 235338 - DNA, 441 bp, Glycine max
ctcaagctcgctcttgatctcatctctcccattcacctttcacttatgtgctctataactccactctcctatcaatgttcctctacgacatgttcctgaacgcccccattgggaaaagaggttctagtgttaggggcctagggttagggtttgtgagagatgctggatgctccatgcattgatgagtcttatcgcgcgctgttggatgccattcgggcacagtgacgacgccggtaatgccaccgttggaagagaatgcaaggatgaactcctttggttctgtgacatcggaaagtttgccatcagcgatttctccatggccgtcatccaggccaaccaagtcgtcgtggaccatttttgatgctaagcactttccaatgacaagctgaaaagaatggatcactccatcttttacctctaccttcttgtttcatcttcttt

SEQ ID NO: 235339 - DNA, 366 bp, Glycine max
  unsure (1)..(366): unsure at all n locations
gctttgagcccaatcctaactcaccattttccttgtttcttgtgagaatgccaatccttaccctcggaagcaaaaaagaagagaaggaaaatctcccatcaaagaaaaaaatagagatggaaaatttccaatctatgagaaggcctcaaataaatgagagaaggaaaatttccaatcaatggaaaatagataggattgctcattcccacatcaaagagagggagattgcgaacagaactgaaagaaatttcccaaccaaagagtgtgacaaagcaaaaggaaggaaagatagctccttatcaacgatcgaacagnatcttcaacaaatgtgctgaaagttttttggaccgcacactttttgacaat

SEQ ID NO: 235340 - DNA, 399 bp, Glycine max
  unsure (1)..(399): unsure at all n locations
ctatacatactcaagctgctctatattacatggatggcgtgtatatatgggagtatgttgaatgtcatccncganccaaaaatacgatcccactggtaaaactaactctccaaatgtttgcctctccaagaaatggccccgaggaatcttgcctcaaagaggtccaagaaggacaacgcagctaaaagaactagttccgctccggagtatgataaacaccgctttaggagcgcgtgtcaccagcaccgcttcgaatccataaatgggtcgtcgtccttccgaagcgactcgcctagctcaaggactactagtatactgatctctcaccacgaaataaggcgcctgtcgtgctcaccatctattactcccatgagcaactaccatcctgaacttatcctc

SEQ ID NO: 235341 - DNA, 404 bp, Glycine max
  unsure (1)..(404): unsure at all n locations
agcttcaacaatcaagggggcaaggggtggtagtaatcttgtttcaagaatcaagattcaagaataatcaagtttcaattttcaagaatcaagattcaagaataatcaagatcaagattcaagaatcaagagaagactcaatcaagataagtactaaaaaagtttttcaaaacattgagtagcacaagaatttttcacaaaatcttttaccaaagagttttactctctagtaatcgattaccagaaggtagtaatcgattaccagtagccaacattgttttcaaaactgatttacaaagctgtaatcgattaccataatcaagtaatcgattaccaatgttttaaaacgttagatctcaaatttcaagagtcactactagtgatanaacatttcaaatcattta

SEQ ID NO: 235342 - DNA, 372 bp, Glycine max
ttaagtctaaagcctgaacatagattgatttaatttgacaatgaacattactataaataaatcacacaagtcttctatggataagtgttcttttttctttgtgcacactacaggatgcgcctcatagaaccagaaactgcgatatgccattgattgtgcatctcatcttatcctgccaactgcattttgttttatcttttaggaattagattaagttgtgactttcaatcaagacaaaatacttgcttaattttcttaagtagccatatttattaataagatgatagagcacaaggtgacccttctaaaaagcgtgttcagacagattggaaacatgacagagtggaggatgacacctgtgttatattgaag

SEQ ID NO: 235343 - DNA, 392 bp, Glycine max
  unsure (1)..(392): unsure at all n locations
agcttgaccaattgtgtatgataatttttttgtaacaagctaaatntcaggggctaactctaataaaatagtttcaactcaagacaaattgtagacatagctaaaaagtgaaaatgatcatgtaggctgagaatgatggctctgaacttaatagtaggatttattaacctgtagatggaggaaaagactaggtagatgctgagaactatttccctttggatgatctcctttctaaacttactattttttcctctattatgaaggttgtttttcctctattcatttagttcattctttgctatcataattaatagttttgtcctttgtgaatttttctaacatatatgaccgagaatgaacttttcgcattgacctattaacaaatcatacta

SEQ ID NO: 235344 - DNA, 401 bp, Glycine max
tgcactatatatactcagcttccatcatcaagtgtcagggagttattttgcgttatgcagatgctcggtgctgacggtggtaacctcaactagtgcaagagttgtaggttcgtgaggcatgtcaagctcccctagcttggacgactgttgtttatgcttcttctggcaagatgtctggggtggacaagcttttgatcttgcaagcaaaattagacgtgtcaggcggatgatgtccttatatatgatgattcaccccttttctgatcattggaggatgcattgaagacaaatgtttcatttagtcttttgctacaggcgagtgcaacacacacatattactcttgcatacgtatcactcatggagtgggtgtgtactgaagatgcaatacgtgggtgactgg

SEQ ID NO: 235345 - DNA, 393 bp, Glycine max
  unsure (1)..(393): unsure at all n locations
agcttcaaactttgaggaaaagagggatatatcttttgttatanacacggcatgaaaaaggaccattttcataactgctttcgggctatacttggatcaaacctgtagttttatctccataattatcgaaataaagatttgtattgaagtcaacataggttactaaaaccaaactccatccaattctaatagtacaataacactaaggacaaaaactatatacaaatatacaagttttgtccttaactcattcaaattttgatgaattcggacaaaattatctagaaactccttaaatacttatttttttgttatttctcactcaggcttatcaccatagtttgtcttataaaagtttacataaaaagcaactattgtagttttggatcatat

SEQ ID NO: 235346 - DNA, 394 bp, Glycine max
agcttgaagacaagactatacgaggtatttttcttgggtatagcaatatctctaagggctaccgtgtctacaacttgcaaactaagaaactcgtcatcagtcgagatgttgaagttgatgaatatgcttcatggaattgggatgaagaaaaagtggagaagaacgttcttatactcgttcaactacctcaagaagaagatgaggaagaaaacccaggtgaaccaccttcacctccatcacaacaacaagaagagatggagtatccatacagaaaaatttgcaccagtagctcgtcttaataagacaaagctcaactctgatggcaccatacagaaacacaaggcgaggctagtagctaagggttacttaccagcacccggaattgactacaatg

SEQ ID NO: 235347 - DNA, 435 bp, Glycine max
  unsure (1)..(435): unsure at all n locations
ngagaaatcttcaatatttgagtgttgaatattgtgacaatntanagtttttattcagaggggtacaaatcccttcccttgaagttttgctcattcaatcgtgtgggaggctagagtccttacctcttcattttctccctaaactagaggtcctgtttgtaatacaatgcgagatgctaaatctgtcgttgaacaatgaaagcccaattcaaagattgaggctaaaacttctgtatctggagcattttccaaggcaacaggcattgcctcattggattcaaggtgctgctgacactttgcaaacgttgtcaattttaaattgtcatagtcttaagatgcttcctgaatggctgacaacaatgactcgtcttaagacgctccatattgttaactgtcctcaactgttgtctcttccaagtgacatgcatcacctca

SEQ ID NO: 235348 - DNA, 381 bp, Glycine max
agcttaagaaaagagctttaagggtaatttttttaacaatatctgaataccacttggcacttgggcaatcatccgtgaaatgttaatccgtgtaataaccattctaattcatgagttagtaattttttcttgatggttgatatttcatgtgaacaggtgattgctgagcatttgacagtagaagaagctgctgggctaaaagaaggattccagcttatggatacaaacaacagaggcaagattaacattgatgaattacgagtagggttgcataaacttggtcatcaagttcccgaatcagatgtccaagctcttatggaagctgtgagtattgctatcaccttttatctcaaatctttattccaaagctgatacttaaaa

SEQ ID NO: 235349 - DNA, 441 bp, Glycine max
  unsure (1)..(441): unsure at all n locations
actcagcttatatggtgtagtatggtgaaagaatgcttgtaatataggataggtaatggttattctattcatgcttggacccaaccatggctaacaaatattgataatccctatgtcacatccactaaccacattggaaactttggcttaaaacttagggacctcataaaccacaactcgtgcacttggcaaacaaatttggttgctaccaatttcgataatcacaatgcacaatgtaacatcctggaaatttctacccagaatttttgaaaacgatgtattttgaatgattatatatataagtattattcagtgtatatgcatatatgttcttggtcgaagtatgaatagcggtggcaagatatgcgggttaggctaattaaggaagaganatccataactgggagggtgtgggttaattcttaattaattagtctaaaa

SEQ ID NO: 235350 - DNA, 436 bp, Glycine max
  unsure (1)..(436): unsure at all n locations
tgtatagttccccaatttatggttattttggagtattttntgtaaataaatcttgttttatggttaacactgtctctagaatatttccattggatttaatgatgaaatctgtgtattttcaagtgaaaaagaggctaagttttgaaatgcaaaatgtagcagttgggctaagcgcatatccaccgctaagcacaacttcagcgtgcttagcgcaaaggagaatttggcagagcatcaacatcaaagccgcgtgctaagcacgagattagtgcgctaagcgcagcaggtgccttcagccaggctcagtgcaagactggcgctaagcccaattccacttactcacgctaagcgcgagagtggcgctaagcgcaaggttgcaaattctgagcctatttaaagcctgctttgtgcagaattatggtacacacaccttttg

SEQ ID NO: 235351 - DNA, 341 bp, Glycine max
  unsure (1)..(341): unsure at all n locations
agccnngggaaacaagaacgagctctttttttttnacgggcctcnatccgacatccgaggaaaaaggnaaggcccgccgatttttctaaaagcttcccttttcaattacaagcgtcttgatatattacgggacacaatcggacacccgagttaaaagatattgccgtttgaatatgctcagagcatttatttacaattacgagcgtctcatatattacgggactcaatcggacttccggagaaaaatttattggcgtttgatttttctcagagctgcgaggttccatttcgagcgtctcgattaactacgagacccagtcggtcacccgaagttaaagtta

SEQ ID NO: 235352 - DNA, 261 bp, Glycine max
gcagagcaaattcatacgacaagaagctttgactcgtgtgtccgacagagccctgaaacatatcgagacactcggaattggaaacagaagctctgccaaaccagacgaaataactggtgactcggatgtccgacagaatcccgcgatatatcgagacgctctcgaaccgcaatagaagccctgagcaaattcagacggccagaactgtgaactcgggcggtcgactgctgcccggagagatcgagacgcccggagggcaaa

SEQ ID NO: 235353 - DNA, 387 bp, Glycine max
  unsure (1)..(387): unsure at all n locations
gcttntgaatggagaaagactcgatacatcaactttttcatttttataaacctggctcctggttncgattcactgtgatggaaaagatttctcttttttcagaatataatattaatgatatatattatataatatgggtaatatattaatatattatttataatatataataattatataaattattaaatttagctaagaaatttaatgttaaaaatggtattgcgataaattttatattctttatcttcttgccattattcatcaaacaatacacatgataaaaattgtgatgtacttgttgttttctcgagaatatcaatgtgtagcttgagctaaataattcctctaatagttatatccacacactttcacatatttattcgt

SEQ ID NO: 235354 - DNA, 401 bp, Glycine max
agctttaacctcatcatctctcacagtctttagattttggagccaatccaatccttgtgttcggactctcaaccacttatgatagccgccgatgatcccattactgcttcccctaagctctttgtcctttcttcatgccgcatcccatgccttgcgaactccttggagtaccctcgcgttgtggtcactgaaaccccgtgcgatgaaaggcgtgatgctttcgtctgatggcactcctctcatggggtagccaagctgtcttatggcgaggacgagattataattaatacagccccttgttcccatcaagggaacatttggacatccttcgcatgaagatagaatcctgattcttccttccttctagcgagggaaccaattaacaaacgcccctccatgct

SEQ ID NO: 235355 - DNA, 447 bp, Glycine max
  unsure (1)..(447): unsure at all n locations
tanatcgaaatggnctggaccatgtaccatcaagagtgtctgaccatatggagcagtggagctttgtgatcctcaatctaaagatcctgacagaacatgggtagtgaatgggcaaaggttgaagtaatatcatgggggagctatagaaagaatgaacattgttctacgcttcaaaccaggataacaggataatgcatcaagctaatgatgttaaaagagcaattactgggaggcaacccaacttttctttcccttctctcctttatattgcatttttatttgaatttgttttcttgtacatgttaagacaccttgcttgtgattgagataaaatatcaccttgtttaataatgaactaggggttttaagcctaggtgaagagatggacagaaaagacttagaagttnttttattaattgtccatccgataagcgcaacccttgcgct

SEQ ID NO: 235356 - DNA, 403 bp, Glycine max
agctctctaccttgaaatgggactccctttattgtattgatatataacgagttatatctcctgaaattcaatgaaattacactcaatactcattctttttttaccttacacagacatccataatgcctttccattaacacaaatctttcttaatttcttagctggtatataaccgaggaaaacaagtgtaatgttaaaaggagggaagaaatgccgaatctaattttgttaaacactgttatcatgtttaagattaaataattaatctactatgtaacatgtacaaaacgtttttgagtaaatagttagtttataatgacatgttatcatgaaaggttttttcatcctcaagaatcacatatgaataaaataatatgtataacaatttatgcattttattcaa

SEQ ID NO: 235357 - DNA, 443 bp, Glycine max
  unsure (1)..(443): unsure at all n locations
taagcctaactaattggaaatacaactcgtgctttgggtatgatatctggactnttgagtccattgttactattgcgtagggtatacttgcccttgtgcgagcctaacatattntacgcatcatttagtatacgtgttgtggtttggttcagtcttaaaaacacaaattgataaccgaaacaaactgattggtttgagaataaaaactcatcaaaacaaatccacaataattggtttggtttggttttcgatatttttgagtggtgttcgattttaattttggattagtttggatttgaacatccctaattttctatagtaggttattattgtgggtgttttttttgtagtttgaatcaatatggaaatttctataattgatgaagtatgtatgtaatggtgactttgtttggatttataattataggtataatgattcgtag

SEQ ID NO: 235358 - DNA, 406 bp, Glycine max
  unsure (1)..(406): unsure at all n locations
agcttgtaggattatggggtacccatcacatgtggtactacgtggcggncgggcgatggtgcacaacaagtttttccacatccacaaatcgcacataaacccaccatcccctgttgcccacctccaactgagctcacgtactcccacgtagcccatatcctcgtttctctcaacactgggtccccatcaatcctcccaagcttccccaacatccaggtaattcaacatccaaatcatcacaaactaataaaccaagcaaaacagggcaaaggcagaaaactctgcccaaaactcaaaccaaaatcacagctttttctcacttgaagactccagtaacatttccttcgttccaatttgttaaccgttggatcgactcgaaaattttactggaagtctctagtacata

SEQ ID NO: 235359 - DNA, 462 bp, Glycine max
cactatgaaactcaagctatatagatggttcgttcctaatttctctacaattgcatcacctctcaatgagctagtgaagaagaatgtggcatttacctgtggtgaaaaacaagagcaagcctttgctttgctcaaagaaaagcttactaaggcacctgttctagctcttcctgacttttctaaaacttttgagctagaatgtgatgcctctggagtgggagttggagctgttttgttgcaaggtgggcaccctattgcttattttagtgaaaaacttcatggtgccacccttaactaccccacctatgataaagagctttatgccttaataagagcactccgaacttgggaacattaccttgtttccaaggaatttgtcattcatagtgatcatcaatcacttaagttcattagagggcaaagcaagttaaacaaaaggcatgcaaaatgggtagagtacct

SEQ ID NO: 235360 - DNA, 404 bp, Glycine max
  unsure (1)..(404): unsure at all n locations
agcttctgaattctgctgagtgaagagttatatcgtgtcttttattnnaaaaggattttctctttctttttttttttaaaagctatgccacatgtctccttttgagtggagcaaaaaggggcccacctcttccctttgaggtgacttcatactcagccacaaggagagaaaaatttaactttttgaatgctaaaatcctgtctcggtttacatgccgcttctctggttccagctcctcgcgtttctctgcacccgtcggggccctttttcgaaagtaaacaatatatatatatcaaaacgctcagaatgaaaccctaagcgtggttcagaggttgcttttgttaaatttttagttgcatgcaaaacgataaattttagactaattaattgaaaattaacctata

SEQ ID NO: 235361 - DNA, 432 bp, Glycine max
actgtgtccctaggcaggcacattgcgaaatacctctgtatcccggggatggctagcagcgggcaacagacgcaccgccatcacctctagagttcacctcagctcatccacaaaaaggttagagtgttgcttacgacccatggccgagcaataggcgaccaagtttagagccaaaggtaagcaaagtactaggtccgtgactgacaagccatcaagcgtccagctcaagacgttaaagaagcgctactaggaggcaacctagtaccttttaaatctctgcttgttatttgatcactttttgtttctcaagtcatagcaggacacacctagttgctcatgatcctaggaatttaaataaaacaagcacaagctcggaaggtagtcatacctcacaaaaaatatatatatgtatgtttaggtagaaagatacct

SEQ ID NO: 235362 - DNA, 376 bp, Glycine max
  unsure (1)..(376): unsure at all n locations
agcttgtagctgaagtgcttgagaggtttttaaattggntaggcaaaagcaaaagacatattcctctgttttcatttactggaagttcaaaggtactatatttctctctaattatgattaaacattggaatctttatttttatgtgtttacaacgtacattacattttcatgatagtatttttatgttacgacctctactagttagctaacaagtgtaatttattataattttctgtaattcattttttttgatgatccattggttttattctaatacctattcttatttataacatatatggtagtacctataacataaaaaattggattgaattattagttatgcttcctcccccaccaataatactatttagt

SEQ ID NO: 235363 - DNA, 393 bp, Glycine max
agcttgaaggcaaactggatgcattggtttattttttaacccacctggccttgaatcaaaaatttgtacctgtcgcacgggtttgtggtttgtgctcctctgttgaccaccatacagacctttgcccttccatgcagcaacctggagcaattgagcagcctgaagcttatgctgcaaatatttacaatagacctccttaacctcagcagcaaaatcaaccacagcagaacaattatgacctctccagcaacagatacaaccctggatggaggaatcaccctaatctcagatggtccagccctcagcaacaacaacaacagcctgctccttcctttcaaaatgctgctggcccaagcagaccatacattcctccaccaatccaactacagcaac

SEQ ID NO: 235364 - DNA, 260 bp, Glycine max
  unsure (1)..(260): unsure at all n locations
tgcctgtccgatgcagcattaatgatggtccgagttatgttgtggaacggntacgaacccggaatgggtttaggctaagacaacggctgcataactagcctgataaatgccaaaggaaatcgtgggaagcatggtttatgctataagcccactcaggcagatgtaaatagatacatcgcgggaaggaagggcggtggtcatagctcgcggttgagacatgaaagtgaaggaagcccgccctgccactaaagttaaagctt

SEQ ID NO: 235365 - DNA, 436 bp, Glycine max
tggttcgaggtacttacccgttgttgatcgaagatctatgaagaacgaatgaagaacgtctaagaacggtcgaaacctttgggaaattcctcacggaaacgtttcggaaccgcctcggcttagattttcttcacggaaaattttttccaagcatattcgaaagagagagaagtgcctaaggggctgaaccctttttcacttcacttctccccttatttatagaaaattgggggaaaagcttgccacccagctcgcccaggcgagcagggttgcttcctccagaagcagcagccttctggaggaatcttctggagggcccaagagggcctggtttctatttgcacccccatttttactaagtacaccccctgccttgttttggtgattctttcttcgtaaagttacgggaacttacgaatttcgtaacgatacttgt

SEQ ID NO: 235366 - DNA, 327 bp, Glycine max
agcttctagccaaagagacttaccgtgatttaatttctttgataacccttttgagccttgtttccctttccttggtttgaagctcactacaagccttaagtgaaaaaccatgatattaccatatccttaaggaattttggagctttggaattgttttgggaataagtggggggggtttttgtttcattggacaacttgtcttggtggctatgctttatgaaggattttgggccatacttgaatgacattgtatattggttaaatgttggacatgctgaatgaaatgttgcttcttcaaggctaaagagttaaaaaaaaaagaaaaaa

SEQ ID NO: 235367 - DNA, 395 bp, Glycine max
  unsure (1)..(395): unsure at all n locations
agcttgttgagataggacttttttgattttatttgcccngggcngaatcgatctgaaaatcttgtgtttgcgaatgatttgaattgatcgattgcatggattgagtgaattgtgatgcgtaaatcactttgctttgaataagtatgcagttattataagagaaagaacatgaattaggggcatgactgaaaatgttagttggtttaaaagaaaaattatgaaggtaatcattagccacaacccggtgagttgtgtgatctttaattgtgagagaacgactagcattaggtactgatttttgcatgaatctttgattactgaatgaatgcatgangttgaagatgatgaaggccatgattgagtgaaacatccacttatcccaaaagcttaccctg

SEQ ID NO: 235368 - DNA, 444 bp, Glycine max
tgaacctcaacctgacccggtgagcaagttgaatatctttatacagacctaatatgctcaactcctcatatgcagcccacattagaggatccattgagagtgcctgcttaaaattatgtatggcacttttccttctgtcagttgatctgaaaaagagaataacagccaaagaaatttagaaaggtggatttatcacatgtggcaagctagcatgacatacacacatacatacatacatatgtgtacacacacacatacacaaatatatggaattgactccagttacagcatccaatgtctttctatgaaatggatttttcattgattcaattgttgaattacaactatctatcaatttttattatggcaaactttgaaaaacttgaacatcaataaaaagggaatttgaaagatcatattttcatactcttggaatgacgaaac

SEQ ID NO: 235369 - DNA, 364 bp, Glycine max
tcaagcttgcttatatccatatgaatattttcttcaattcttttccattgtgatttcttgatcttattaagatgcttttaaattacgcattcttgacaaaggtcagttctggtcttcaggaattgcatctctgattcctcaataaagtattttcaaacttattatcctgtgaaaaagagtatgtgaagctgttctatgaaacacattactttatatcaattagttccaagatcatataatcaatttctttccttttaaaggtctcttgactcttccaagttatatactcctgtgtagatggaacttggaaatcctatggtttttccccccacttctaaattaaactttgggagaagatcagaaa

SEQ ID NO: 235370 - DNA, 423 bp, Glycine max
  unsure (1)..(423): unsure at all n locations
tgtagtgccatatttgaaggatcaaacatccgtatattatagcatcaacaaggctaggttcaggatgcgaggagttaatcagaaagttattcaagtaatatgatggagcaatctcaaaaggaggaggcagaaccatcaaccactccattccttgatggatcattgtcatattggtggtctacaccattcaagactttccttggtgaattgattggcattcatgaagaggaatctatataaaggaaacaatcacattacatgtgtctggactgatcaaaagatttatcaaattagatggatatagcaaaacagtaatatatgctgatattattttagttgataaatatcanaatgcttcacttggaaggcttaggttctattntctccatgaatattatcttctttttttttgtgaatagttgt

SEQ ID NO: 235371 - DNA, 396 bp, Glycine max
agcttgtagccattagaagagaatgagcatgtgattggaagtatgactaaaaatgttagtcagtttgtcaaattgattgtgaaagaatgcattgactgtatcccggggagagtgtgaactttaaattttgagagaaacgattatcatttagtactgatttttgcatgaatctctgaagtatggactggatgcatgaaattgaggatgatgaaggccatgtttgattgtgatagccacttagccaaaaagcttaccacgtgcttgaatgatttatcccttgcacccagtttgagctgaatgaattattgattgattgaaccttgagcctatacagtgttatctcttgctaccttgacttaggctgtaggagagcatcatccacaggaagcatggtgc

SEQ ID NO: 235372 - DNA, 443 bp, Glycine max
  unsure (1)..(443): unsure at all n locations
tattgtatgcatgcttatggtttgatcacccattggtgtgtgctgttaggaactttagcattgacaaatgtattgtttccttggaacttgatagagcagggctagataattgtagtgctagacatagtctgcaaggttctagtttttattatgttgtgcttataatgctttttaaattaggttaagttcaacaagagacatctgcgaatgaagcttagtttaaattagtccaaacgcacgagacatcggtgttggtatttttgtcctcagcatagaacacaggaataatttcaaatagagaaggacccaacgcttttacttttttattttcacactcaattgttcacgtttaatgtttcttcgattacaacaaaatatacctttgttttcaattcatgatacttaattctttntacaaacaactgtantttgaatgaacgttt

SEQ ID NO: 235373 - DNA, 391 bp, Glycine max
  unsure (1)..(391): unsure at all n locations
agcttggctntggtttagacatgtttgatacatgatttgggacttgtaggatttgatttgagcaagattggatgaggggaagtgtgattttcgaaatctgcacttatgcagaattttgctgtcaaaataggtgcagcaggattttagcttggtgcaaaaaatgcttgtgtgtggttggttgtggaaagagtagtacagaatgagttctggatgtttgctagtagatcccaacggtcaaaatgtaggcttatgcactatagacttccagtaaaattttggagtcgatccaacggttaacgaattggatcgaaggaattgttactgtggtctttaagtgagaaaagctgtgattttggttgatgtgttgagcagagttttctgcctttgctct

SEQ ID NO: 235374 - DNA, 451 bp, Glycine max
tatccttatggcttgcctccggacttcactccccgtgccactccgaaagatttaagccaagcccctacttttgaggggcaactcccgccttgtgacgactatcccgggcaagacgatgaggaaggagatacccatctcggccccctgctccaccttaatgatccgtccccacatgaactaccccaaccgaacatagtccgccatatcccggcctcacccacacccgtaaaagaatctgttcccttcgcggaagataagggaaagatagaggcgcttgaagagaggttaagagcagtcgagggccttggcaattacccgttctcggatttagcggatttatgtctcgtgcccaatatcgtcattcctcccaagttcaaagtaccggactttgataagtacaaagggacgacatgtccgaaggggcatcttcggatgtattgccgaaagatgg

SEQ ID NO: 235375 - DNA, 397 bp, Glycine max
agcttgcattttgctattgaagaaaatatttttaaatatgcatattattataaaacgaaaacaaattcagcaaaatcatgtttggctgcaaaaagtaaaaacaaaaagaagtttaatccacatgtgttgaagcaaaggaactacataagatttataaaagatattcgcatattcaagtgtcgtttgtgatatttctacacacagatataaaggaacaattacaaatatttgttatgttccatgcttcaatatttgattagatacataatagtatcaatcggtagagtttaagcttgaactaccctcacaatacaatgtcaaagaaatggaatatgagaaaaacaaaacatataacaaaatactacgtctaaatgtaaggaaatggagaaactacgat

SEQ ID NO: 235376 - DNA, 444 bp, Glycine max
  unsure (1)..(444): unsure at all n locations
tcacataatgtggagattaaggaagttagagtacatgttcctttaactagtacttctacttcaagaattattgttccttatattggggaacctcanaacaatcaataagaacaacaaattaatgatcctgaggttaacaatgaacctatagtaaaacaatcacaagaaatagtattaagaagatctcaaagagaaaggagatctgctatgtgatttatctacaagagtcagaaaatgacttaagcattgataatgatccagcttcattttcaaaagccattaatggtgatgattctggaaaatggttagatgctatgaaatatgagcttaaatcaatggcagaaaatggtgcatgggatcttgtggaattgcctgaaggatgcaagagagttgggtgtaaatgggtctttaagactaagcatgactcttatggcaatattgaac

SEQ ID NO: 235377 - DNA, 402 bp, Glycine max
  unsure (1)..(402): unsure at all n locations
agcttgngtaaaatgtaaagaatcactgattgctgtttttttggaaagatatcggcttgtccaaaatttatgatatattctgatcaggattatgaatctgactgagaatatcagtatcttagaaattaaggggaaattaattggattccctaatactgggtctcctattccttggctctatatagaccattaactttttgatcaagacattaacacgagatattttatatgcttttgtataatgcaagtgtaaccttagacactagacaaatgattttgacccatgaaaaaatatataatttctgttataggaccttgtgctaaattctagatggacttatgtcacattgttccttaatttaatcataatgttgtatttctttttatttacacagctctggc

SEQ ID NO: 235378 - DNA, 440 bp, Glycine max
  unsure (1)..(440): unsure at all n locations
ctaagctntaagtgaaggatgtgactctgcacattagaatttgaatttcaactttcaaggacactggtaatcgattaccaaaacattgtaatcgattacagccttttgaaaataattggaacgtgtgaaattcacgttgaaaactttttcaaactcattttgctactagtaatcgattacaacaatatggtaattgattaccagagagtaaaaactctttggtaaaaggttttgtcaaaaattcatgtgttattcaaagttttgaaaaactttttaatacttatcttgattgagtcttttctttattcttgaatcttgagtcttgaatcttgatcttgattcttgagatcttgaaccttgaatctcgattcttgattcttgattctaggctctcttcttgagtcttgaattcttcttgattcttttcttgaactctcgac

SEQ ID NO: 235379 - DNA, 401 bp, Glycine max
agcttcttggagaagctaatatatgagatttgtttattaattagcttatgcagaagctaatttttgctcatggagaaacttgtttcgattttgcttctaatcttcttctcttattggtatttatggaaaaaaaatatccaatcaggtagttcacactgtgtctgttcgggaagtagttatactgcttatttgtttatcactcagagtacggattccgagaaggcacgtttcatgatatttgagaggggtccaagggcttttattgatgaaacagttaagttgttgtgtggactcactgttcaaggttcgtccacacataatctgaccccatctgcatctgattatttcggcgaaagagtaggaattttgagtagcttaatatattcactcgccacattgtt

SEQ ID NO: 235380 - DNA, 447 bp, Glycine max
gatcttcaacctgaaatgttgctatattttctctctctaactcttccaaacttctctttttatctaattaaaagtaaaaacaagaaatgaaaaaaaaaatattttcttaaagtaaacagacccttaaatttaatttgttcaaaaaaattttggctaacctttcacaatacaatggtaggaaaaaaacaattcattgaattcaataatggcatggagcaagatcatcactttctcaaggcaagagcattattctatactgtataggagttcatgcgaacaaacaacagaaggaaatttccaagacaacaagggcatgctttcaatagaaaatctagtgattttcagctaaaaagcctttacctcagtactttgttaatatcctcttcctcatctacgtgtagtattgcatcaattaggttcccacgcttcaattaactcaatgtaagt

SEQ ID NO: 235381 - DNA, 389 bp, Glycine max
agctttacgtagtacgtagtgaagccaatggtctgtcgacaagcataatttcatcatctctgaaggaaaactgtttaatggtacatacgtgttcggtgcaaaactagtagcactctaaaaaaataggccgctgtcagaggccttctcattgactatagtttaaaaaatgcaataatgaagataagcatctttgactggcgctaagaatatcaagtagaaaagaaaccattacatgtaagcttcggcggttatccataatcaggtcattcttgatttccctcaaacggttcccctcttttacaggattctgaatgtgtttgtgtgttcctcctgaagatgaatattttggaagtccctagtacacgtaaatttcttcaaaattttatact

SEQ ID NO: 235382 - DNA, 319 bp, Glycine max
actccacttgacacaggagaggtaataggtgttttactgacttttataccttaaagataaccaaaatgagaatattttgtacgaactgaacacaatccttccgaagagaccaaaactgaagaaatcaaattaaaaggactattaatatatatagatcttatcctctcggatatattcctattgacactcgagatatactacacaattaatcctatcataaatattagatatttatcataatacatgcattaaccgcaaacatgcacgtgtgaataatactcaatatctcgtaaatgcggatatacataaaccttaagca

SEQ ID NO: 235383 - DNA, 397 bp, Glycine max
  unsure (1)..(397): unsure at all n locations
agcttatccttatggcctgtctccggactttaccccccgngccaccccggaagatttaagccaagccccgactttcgaggggcaactcccaccttatgaagactatcccgggcaagacgatggggaaggagatacccatcttggccccctgctccacctcaaagatctgtccccgcatgaactaccccaaccgaacatagtccgtcataccccggcctcacccacacccgtaaaagaatctgttccctttgcggaagataagggaaagattgaggcgcttgaagagaggttgagagcagtcgagggcctcggcaattacccattcttggatttagcggatttatgtctcgtgcccaacatcgttgtcccttccaagntcaaagtaccggactttgat

SEQ ID NO: 235384 - DNA, 390 bp, Glycine max
  unsure (1)..(390): unsure at all n locations
agcttgggtaaacatgcttttgttatagttattctttataagnccgcgaagactcgggaacatttgattaacaagctgaaaatacatggcttattaattagtatcaattgaattgggttgaaaatacatgactcgttgataccaatatgttttacaacttatataatgacaaaatatataaataattaggttcctaaacacacagttataccttgatattgatggattggcgtgcaccaatttgttccaagtaataaagttaaaacgaaagttcgaatatcgtatctacaaagattttatttgtatttatgtacatgaatatttgattaagaaaaagattttgaaaaattgtagaaaaacactaatataaattgatagaaaaattaaaaa

SEQ ID NO: 235385 - DNA, 431 bp, Glycine max
gggtcgatgttgggcatattggtaagtgttgtgaggggtttactggggttttggccaagtaggagctgaagtcacagcgtgggcatccccttccttcttctttgccccacttgctccaaatcttctattgctcatactggtaggagcaacataatcaaacttccctcttttcaagcctacttcgatcctctcacccacaaatactaaatctacgaagctagagggcatgtaacctaccaacttttcatagtagaacactggcagcgtgtccactatcatagtggtcatctctctttctaccatggggggtgccacctgtgctgccaagtcccttcaccattgggcatactccttaaatgactcatgctcccacttactcatatttttcagctgggttctggtatgagccttgtcagtattgtattggtact

SEQ ID NO: 235386 - DNA, 383 bp, Glycine max
agcttgtctcagtgtgtatgctttacggttaccaacatgctagctatcatcgccaagtaccaagaagagttaggtctagccacggcccacgagcatagaatcgtggatgagtatgctcaagcatatgcggaaaaagaggctagaggaagggtgatcgactctttacaccaagaggcaaccatgtggatggaccggtttgctcttaccttgaatgggagacaagaacttccccgctttgtagccaaggccaaggcgatggcagacacctactccacccccgaagagattcatgggcttctcggctattgcagcatatgatagacttaatggcccacataattacatatcgtaggaaacttgatggctctcagaccttgatggat

SEQ ID NO: 235387 - DNA, 343 bp, Glycine max
  unsure (1)..(343): unsure at all n locations
agcnngagagcttatatagacatgngcttttagcaacacccccactcttatgctagttcaggcttacatgaaccagtcgtggtttgttgaccttgctactacatggtttcatgccactaatcggggcgtggagaatgtgcttttagagaggcaacaccaagaggggtcttccttacacctgtcctgttatgaaatgtccatcacactagatgatgtgtctcgttagctctatttcctgcgtaagcaacctcattaatcatgtgccgttattattgaacaaaaagcattgaagaacctgttgaaagtcatctgggtttctgaaagaacaaatgttccacagcgt

SEQ ID NO: 235388 - DNA, 441 bp, Glycine max
gaacttaaaactaagctaacatcttaaatattttaccagtagttgacctgtttaagatatagtgttaatgagtcattgatgagtaatcgatcaaaccaataggtcaataattgaaccatccaaactgatataagtaacataaaatataaatatatgtattaattgcgttgtaagtttaataattaaataatttttttttcggtcaattttttagtatatcatattttttcgtatttttattaaattttatattaaaaatagttaattttggtccaaccaattcaataagattgattcactgattcaactagaccgactatcaactcaactattgacccagttgaatcaaactgagtcacactaggacgattacatgactgatgcaataatcaatttgactagatcagacatcttacttgctattgcgggtatatttgggtt

SEQ ID NO: 235389 - DNA, 386 bp, Glycine max
agcttggaaggatgcttaatttatgttttaaagagggagagaaagagagaggggggagcacgaaattgaaggaagaaaaagggagagaagttgaacttttagttgtgtctcacaagactctcattcatcaaagttacaacaagtgttacacatgcttctatttatagactaggtagctttcttgagaagatttctggagaaaacttccttgagaagcttctttgagaaaacttccttgagaagctagagcttagctacacacacccctctcataactaagctcacctccttgagaagcttccttaagaagattcctaaagaagctagagcttagctacacatacctctctaatagctaagctcacctccttgagatgagaagctag

SEQ ID NO: 235390 - DNA, 422 bp, Glycine max
tctggaaggagatcaacttgatattctatgcttcttgaaggtggcattccatgaggaatctccttgggaaagacatctttaaattcctgcaataagggttgaatactatgggaaacataaatagctaactgattagaattatcactatctctctcttgtgtatcactccatctctcaagtgtatcactctctccttttctattcctctatgatgcctcactattgtctctctcttgttctctcttttctctccttctaatatggtcatcacacacttctctgagggataaaggtttatgaataattatctggtcatggtgctggaaagaaatcttgttgggaagccatcattcactgctttggtgtccatctcaatgttgggcctcactagtgccatctccatcttcctgtcctccacaatc

SEQ ID NO: 235391 - DNA, 407 bp, Glycine max
cagcagcaagctttattcccaggcggcaagatatattgaacactacgattgggcgaccggaccaaccatgtcctattcatgctgcgggagccactgtcacaatcaaccaatacttcaaaaatgcatcacacggctccaacagttcaactacattgatcaacctacaatagttggatgagataataggaaagctcaaagaagaggggatgagagaagtacaagacaagaataaatagagtctagagaaaattaaaccaaagttaaaggaggtcataaaaattgagttaacccaaatggcatcgcaacactcattcccgattaaggcatatatacaagtattaggtgcacgtgagaacacaaagaagaactatgttgaaattgctagcaatctatcaagaaaaaaacat

SEQ ID NO: 235392 - DNA, 418 bp, Glycine max
ataacaactcacactcgtttgtggtcatcgtttagtatgagaattcaaaatattcagctgttgaatataattatggtcttaaattcttcaaatcctatgcacaaagatgaaacaataaaaaaatatcaaaacactttaattaagaaggctattctaatataaagccacaaatgcattggacaacaatcttaagtcttaacagtgaaaacaagggcttgagagtcaaagagatatcataaaaataaacaatatccctaactaaatagcatgtagaagatcataagtactttcagaatatcatcaaagagcaagctcaattgcataaaaaccttatcataattggaagcttcttgagacacaggctgggctacaaaaggttgtgatctttcccaagaatgggtatgcaaaaaaccaacct

SEQ ID NO: 235393 - DNA, 400 bp, Glycine max
agcttaactgaaacagagaacaacacttttcttcaaggcaatgcatgcaactattcatatttctaatgaacatatcaagtgatctcagcctcacaagtacaacccccatgctctttttccttgattttttgttacatgcccaatcctaacaatctcaaagttatctacaaatcccccaggtcatgattgttttgcaagaaatgaatctgctagattctgaataatattttacaatggaccaatacatagaaaatttgcacaaaactacttagcagacaatatcggttagaagaagagaataacaatcataaggaaatgaatgagtacataactaacatatttgctgtttgggattaactatactatcactgaggcttttagcagttccttttgaaacaat

SEQ ID NO: 235394 - DNA, 454 bp, Glycine max
  unsure (1)..(454): unsure at all n locations
actaagctngcacatgattntctcgaccatgccaacctttggttttaaatctaaaggaagcatgtccaactttgtgaatgaattttctattcttaaagttttttctattgatattaatcctcgtaaggctaaatatatcaaggaagtgctttggagggctccttggcttggcaccattaagtacaaatggatttgctcatggttctcctggtcatgctggttccaacgatatttcccatgatcatcagggaggtatgcttgattgtttctcctcttacatagatatttataactctttttttgctgagatttttgctgttattcttgctttggaaatggccaaagacaaagggtggttaaacctttggattgagtatgactntgcgtttgtcattcaagctttttccaatccctctattgtcccttgtaagttgcataatagatgggaaacttg

SEQ ID NO: 235395 - DNA, 405 bp, Glycine max
agcttgtaatcaattacatcatttgtgttattgatttccaggcattaaaattcaaatttcaagtctaaagagtcacaactcttcagaaactaactgtgtagtgttaatccaaaaagagagttaaattttaattgggaatagcttttgtatcttaattcaacccccctttcttaagataactgaggccacttgtccaacaagtggtatcagagcttcattcttgtacaaagtttagaagcttcaagaataatcggcttatcaaactatttttttcctgaagggaattctataaataggcctcctatttttaatggcatgggttaccattattggaaaacctgcttcgcaaaatttatagaggctatagatcttaatatctgggaagccatagaaattgggccctac

SEQ ID NO: 235396 - DNA, 447 bp, Glycine max
gttgtacgcttcaataaatggcacccgtgaaggtttcatcatgcatcaatagtataaaagtaaatgggtgtgtaagaagcatgcacatgctactcacagctggtatatcgtgaagcatgcttataggcacatgaaatgatgtatgcgaccgtggaatcttgccattcacagttcctatctcgtgaaggtatctcatgaagcatgcttatagggtctcttacatgaaatgatgtatgataccatggaatcttgccagaaataaagtagtcaataataactaatgttgccaacaataatgctactcaataataacttgaatcacagaccaacatgctttaagttgtgtaatattagactttagcacgtgtgcaacaatattatacaagttaatatattagaagggtttacttctgcaaaaaaacattgtgtccatcaataccttacacc

SEQ ID NO: 235397 - DNA, 404 bp, Glycine max
agcttgtgctgatgtaatcctgatagggtcattgacattatctattgggcccatactagcccacaaacaaagccactccccttacgtaccttttgtttcctaaactcacccctgtttttgcttgtttttattgtccaaccttgaggacaaggttgtatttcgagcagtgggtaatgatagcaatgttgatagcaattcaacagagaatggtgttgatagcaattcagcagagaacccagaccacaacatagaagttaatatcaataacaacagacactaagtggttgtagaccctccactttagttagttacaacatttcactagttagttaaacaagataattatgttataaccatttccaattatgttagagcaattagtataaacatatcaagtagtgaaa

SEQ ID NO: 235398 - DNA, 385 bp, Glycine max
agctgaatgctagtgatatgcatctgcaatattgttgataatattgagtcagggatcaatgtatgtttctttaagcgtgcacaagacatggatcctacatttaatttccaatttaattatggatatggataaactttttgttggaaagtacatcgcgtcatgtttttaattattaaattaatttgcatgcttttgagttgtctgatgatgcttaattaaaagttattgaattattatcattttcattagattctttactttgtatttattttttaatgtttaaacatctaaattaaaggagcgagaggtggaaaagaaaaaaagttgggagaattgattgaagtatcttctgacctgttccttttgcatgcctccttaatcaatt

SEQ ID NO: 235399 - DNA, 376 bp, Glycine max
agcttgcctaatttacctgaaattgagagaaaacgattattaaacacacaaaatggaagtactaagtatttattacctatacttaatagaaactacttataacactacaaaataaccataaattggaagagtttgatacaatttatacaagttatatacacaaaatttagtcgtattcaccaactaacagaggcccaaaaattgaaactagcagttgcagaattctcagattatgcttttgtgtggtggaacaaattacaaagggagagagctagaaatgaggagcctttggtggaaacttgggttgagatgaaacggatcatgaggaagcggtatgtgttggcaagctatactagggacttaaaattcaaacttc

SEQ ID NO: 235400 - DNA, 358 bp, Glycine max
ggaccaatggtttattggtgtatttgctgccttataacatattgacagtcctaaattggtcttctcttataaaattaaaatacggtcggattacaaggttaactgttagggaccaattctctataacccatgacaatagagtgacttctgaatcaaaggaaactaccccttcttaatactataaaatccctattctaattccccttgtctttatttcacaaaacaaacaacacccccttaactctactattactgcaaggatattaggaacatttggtctatcattgctctttgggaaaccacccaggatcactctctagtacttgcattttatgtgtattatattcccgtaccgcct

SEQ ID NO: 235401 - DNA, 391 bp, Glycine max
  unsure (1)..(391): unsure at all n locations
agctttcaccattagccttttatttggattcttgncgncnccgcatctccttggtccttatggaggtctggacttcttctaaggtaatgtcttgatctttgccataaagaattgcatccttgaaatgctcaaaggattttggtaaggaattcagaatcaagagagctttatcctcctcttcaagctttacttcaatattttccaaatcatcaagaatcttattgaaatcagccaattgttcggtggttgttctggaccctgtcatcttgaaggcgtccagttgttgcttcaagcatatccgatttgcaagggactttgtcatatacaatgactccaatttcagccacattgaggctgctgtcttttctcttgcactttctcttaaagcttt

SEQ ID NO: 235402 - DNA, 429 bp, Glycine max
gaccttaaatctcagctggtaactcaggatggcccttgtgagccccttttaaaaatctaaggtgcataaagtccacccttgtaagctttcctattactaaattcttatctatgcagaggaatacaagtttgtcggaacatcagaaacctaaggtccatccttggtaagatgactctttagggactacaatacacacagtcaaaggtccaggttccacaaggcagaatcaatgaccaccagattgatcagcaagacctttaactaggtggaaagcatactaagtactcaccaacctcaggtggaaagctccacagagcgaaaggaagcatcaccatatgagtgacaagacctttaactaggttgaaatcaaacatgagatgatatcaagtcatctagctctatttctgattcaaagacgtcgatgccttg

SEQ ID NO: 235403 - DNA, 383 bp, Glycine max
agcttcaggctgctcaattgttccaggttgctgcattgaagggcaaaagtctgtatggtggtcagcataggagcacaaaccacaaacccttgcgacaggtacagatttctgattcaaggccagttgggttaccaagttgaccaacgcatccagtttgccttcaagcttcttagtttcagatgatgtaaatgggtttgtagctacctcatgcactcctctaatgactatggcatcatttctggcactaaactgctgggagttggaggccatcttctcaattaaatttctggcttcagcaggagtcatgtctccaagggctccaccactggcagcatctatcatacttctctctatattactgagtccttcataaaaatattgga

SEQ ID NO: 235404 - DNA, 278 bp, Glycine max
cctttccttttgaaacactatgacaacccttatattctgagtattgggatagcagtccacctatatgtataccatgggcagtgaaattaaaacagccgagatgcataaatggtaccaaatgttcgaaataatgttcaacaccatagatggattactagcaatcttgtgacacccttactctactctaagaaattacaaaaagccattctattgcaatttgtgtttggcctatatagcatttaagaaaaaatatatgttgccacttactagtattaact

SEQ ID NO: 235405 - DNA, 388 bp, Glycine max
tagaggataaacccggagaaaactttgttagtaattataaaagagtttataaacataaagaaaaagataagtgataaaatcaaacttacatagtgcacagtaagtaaagggagattctctctgtctattaggaagaatggaaatgggagattctgtctgtctctgtatacagtgcacagtaagtaaagtacgatgggattttgttgggaaagggaaacgaactaagtcttttgcactctttatgctctttctaaccctgaaattaaacagcatatactggcattagtgaagagctgaagataaaacaaaaatacatgcatagataaaatggaagatacattatttacgtaaggcttataattattatggaatgcataccttctcctga

SEQ ID NO: 235406 - DNA, 387 bp, Glycine max
  unsure (1)..(387): unsure at all n locations
agcttaactaattgggaatacaactagttctttggattngatacccatacttcgtgtccactgccactattgcatagggtacacttgttcttgtgcgagccttacatattttacgcatcaagtttatggcgtcgttgctagtgacaagttgaggaattcccaactaatttaattttgttaaaccaaacaattttaattttctactatttatttatttttattcttttatttctcgatgcacttgatcttttcctgcattatgtagtgcctgcaaactaggtttcataattgaccactacaatacgaacattgacaagctaatctgcaaacttcgtgcaaaaatgtgtgaagagagagaaaaagaaatggtacctaatcatgcacaaa

SEQ ID NO: 235407 - DNA, 419 bp, Glycine max
tagagtggatgatgcgctaagcgtccacttttctctataaaaattttattgtgacagtgctaatcacgcaatctagcgctaagcgccaaattcactctgtatgttgagccttaaagcagggcttaacagggaaggatgcgctaatcgccatttgctttctgcttcgaaatgctaggaagtgcacctatcgcgtgtaattgcactaaacctgagccactctctggaaaatgaagcctgattgtgcgctaatcctgacttcatgggctaaacgcaatttccatgatcaatcagatctactgacagtgctaagcacgacgttctcgcgctaatccattgcatgcctatggaactggaaaaattaaatatgcttagatctaaaggcgatgctaaccgcttggactatagctacacatcatgat

SEQ ID NO: 235408 - DNA, 393 bp, Glycine max
  unsure (1)..(393): unsure at all n locations
agctngaactctggagaggcttattttgttttcaaagggntttcttttaagagtaggatagagtatatgcactccaattttagcaagttagagaggatttcagctcaaaagtaaaattgagagatgtcatatcacaagtttctaattttaaagatctagaatcaatcatacaagatgatggtaaaattaatgagaatgtcacacataggatacaagccggatgacttaaatggagaaaagtattaaatttttgtgatcacaaagtgcctaccaaaactcaaaagcaagttttatgtaccactatatgtccaattatactatattacagtgaatgttgggcttttaagggacatgggagaaaaatatgagtaatgaaaatgttaagatggatgt

SEQ ID NO: 235409 - DNA, 426 bp, Glycine max
  unsure (1)..(426): unsure at all n locations
gtataggatttctgattggtaaacatatactcttatttacgtcaatgcgttatgggccattgattgttgttgatgttatctcagtcactccttttctggcacagaggacaaaactctataggattcctgatcgatgaacaataacgttgtttacatcaatgtattatgggttgttgattgtcatcggtgttatctcgactactccttttttggcatagaattcaaagttctgtaagattcttgtcgtgtgaaaagtaacctcgtttacatcaatgcattatgggtcattgatnttcgttgatgctatactgaccactctttttctagcacacaagacaatggtctacaacattcttgacgggtaaaatcttcaaatcttaataatgttggcttgttttttgccactttattgttttaaatcatttc

SEQ ID NO: 235410 - DNA, 382 bp, Glycine max
agcttcataaaagtttatatggcttgaatatgcaccgaggcagcggtacaagaagtttaatgagtttatgagcaactcaggattcaatagatgtgacatggaccattgttgctatgttaagaaatatactaataactatgttatccttaccgcgtatgttgatgacatgttgattgcaggatctagtatgacagaaattaataggttgaagcagcagttggcagaaaactttgaaatgaaggatcttgttccaactaaacaattccttggtatgagaattcttagaaatagatcagaaggaattttgaagttgtctcaagaaaaatatatacacaagttgcttgacaggttttaccttgaagattctaagaccaggaatacc

SEQ ID NO: 235411 - DNA, 347 bp, Glycine max
  unsure (1)..(347): unsure at all n locations
tagagaggaagctttatggaggaagataatgagatttagagagagagagagagagaganagtggcctggaatattgaaggaacaaagggagagaagctcaactttgaaatgtgtctcacaagtctctcattcatcagaagttaccacaagtgttacacatacttctatttatagcctatgtagcttccttgagaagctaatgttacacccttccaatatctaagctcaccccccatgccaaaatacttgaaggaataaagcttccttgggaagcaagtgttgcacacacccatgagaacacacacccctccaatagctaagctcatccccatgagaacacacacccc

SEQ ID NO: 235412 - DNA, 391 bp, Glycine max
agcttgttaatattttataaaggtaagttcaattttttcattcacattaacccaagcttaggtgatcaactccattttttcaaaataaaatattaaattattgaaaaaaagaagaattgttgatttgataaacttgcattgcttatagaagaagtttaaggtgaaaacttctttcttcaacaaaaagttttgttcccaaacatgcgtgaattgtgtcaatttttatcaagaacgagaaagtcaaatacaattatacaacttgattgattgattgattgatttttcttatcttgactctttcagtttctacaattataacaaagatattttgagcaataaaaataatcaaaacaaaattggttaatactatgaaagataaatttcttgcatg

SEQ ID NO: 235413 - DNA, 414 bp, Glycine max
tactagacttttacagtcttccaaaatcaaatattctagctttcttagaagaccgacggatggattgatatgcttgagatgtgtacatccttcaagagttagatgttgaagatttaggtcctctttgaaatgtggtaactcaacaagacttgtgcagtctttcaaattcaaataagccagctttcttagaagaccgatggatggattaatcttcttgagttttatgcatcctttcagatctagccactcaagatttagagcctcccctaaatctggcaactcgattagatttttggaatgagagagaaccaaacgtctcatattgtgtaaaggctgcagtgaagggtcaatagtatgagacaagagttaataatgacacttaagctctctttgattcttaattaatctgaggaa

SEQ ID NO: 235414 - DNA, 429 bp, Glycine max
  unsure (1)..(429): unsure at all n locations
cagctttttaggagcaatcttaatcctttaacaatactttgtatganaataattttctaataaaatcttacaaagatactatcaaataggacttaagaagctactaaaaataatcagatttagggtagtgcagaatctgtttttatcttttatgcatataagtaaaggttgcttctaaagtttgaaaacaatttgagaaaacttcttatgatcttatataaaagatatgacattgtaaaacatgttttcccaagtaaaagatataaaagcaacaaaataaaagtagtaaaaaaggataaagcgcacatagaatttatattggttcacccacaaccttgggctacatccaattcctaagctcgtacaatttccactaacacaagcaccaaatgtgatattttttctttcctaaatcctccacaagatcct

SEQ ID NO: 235415 - DNA, 440 bp, Glycine max
  unsure (1)..(440): unsure at all n locations
tctagcctaatggacttaccttgaattaattcctttttagcccctttgagcctatgttcccctttctttgttttgaagctcattacaagccttaagtgaaaaaccatgaaatcaccttacccttaaggaattttggagctttggaattgttttgggaataagtgtggagggggtatgtttcattggaagatatgatttttttaccatgcttaatgttttattttggccatgcttgatgtatatatatattgccttgttcttgctntaatcttcaattttgtactgctaaaaaaataataaaaaaaataaaaaaaaattcagctgctgcaaattcgtactattcaaaaaaaaaaagaagaaaaaaaaagaagaagaacagaagtgaagttgaataaataaggtctttgatttgggagccttggttgtatttgttgatatta

SEQ ID NO: 235416 - DNA, 429 bp, Glycine max
  unsure (1)..(429): unsure at all n locations
agcttcagcctcatcataaatctaccatctggtttagattatggaaagaaattaacccaactatattaatcaaatacaaaagctaattacaacaaaatgcaaagccttgttcttgagtaaacgaacgagtatatgatagagaaaacatatactcaactttttagttgttttttttttaacgttctttgatcaaaattggaatttcacctcaatataaacttttattatacaaattatggagtttcatgtcaatataatattttaatataaacttttattatacaaattatggagtttcatgtcaatataatcttttaatataaacttttattatacaaattatctagatgaaactccaattctgattagaaaataacacaaaaaaaaaataactcttcaatagtactacacctaaattntgtgtttcac

SEQ ID NO: 235417 - DNA, 431 bp, Glycine max
  unsure (1)..(431): unsure at all n locations
aactcaagcttggatttgtacaagagggcttagcaactagagagtactctangaaatggactaacaaggatggtggcagaggccgttgactttttgttatattgttgtattattagtatattttgatgcattatgcacaattattgttgctttaacatattttttagtttatgttgtggttaaattactttttttttttgcgttcaacaactgtttaaacaacacgtgcctagtaacaagaactatgttttcaattgattcataaaacaaacattaacatgaacaactaaaaaagcactaataatactaaattttcttaaaaacaatcaacgtatgatttttataaagtaaaaacaaatatgactacatagatttatcatgcaaaaaagcaatgatctcattagcagatntgagtttccttggtttgatag

SEQ ID NO: 235418 - DNA, 438 bp, Glycine max
tgccgcatgcaagctttgtagaatgacatatagccctatgtatccacctttacattccaattttaataaaatgaggattttttttctcataagtgaatttccaagagaagaaaggttaaccctagaaatgggttcctaagccgaggtaaatacttcaaaggacctatgaatctataggcatcccaggaaatgggttcccagatcgggctaaatacttcaaaataaaaggactactcaaattttgactttattcagaaatagaacaacaaagatactacattaaaatatactacatcatattacaatagatcgaacaactctatcttacactacattacataagtcaggaatgtcaaaaagaacaaaattaaaaacccaaaaaggaaaaagagaatatagagaagactgttggaaataaggctttctatgtttaggaaa

SEQ ID NO: 235419 - DNA, 399 bp, Glycine max
agcttgaaatgaggaagtgtggaagggttatacttcctacttttattcgttgaccacagagtggtacctggagatatgtcgcgggggtcaggagaccttggggacgtcaggtggggtgctatttcccaaaaccaagcttgaccaatcccgacccaacccgggcataatcagtcagtgagaacctgtgatgtacctaagcaggcgagctcctggcagtcaacagataaaaggaactaagaccacaaagcaaggaggcttgtgtggtggctggccagctgtgaaacttgattgatatatgggaagtggcctctggtaatcgattaccaagggtgggtaatcgattacaaggcttaaaagtgaagacaggaagctaagatggcctctggtaatcgattacca

SEQ ID NO: 235420 - DNA, 442 bp, Glycine max
tgccacccagctcgcccaggcgagttatgttggtacctccagaaggtaccgccgccttctggatgaacttcctggaaggcccaagtgggcctggttgctatttgcaccaccctgttttataaatacaccccctgccttttttgctgattctttttccgtaacgttacaaaactttacgaattccgtaacgatacttgttttcctttcgtaatgttacggaaccttacggattacgtaatcattccttttttggctttcagaatgttacggaacctcatggattgtgtaacaatgcttccttttgatttccggcatgttacggaacttcatggatcgtgcaacaatgctctcttttgacttctggcacattatggaactttacgtattgtgcaacaatgggtgccaagtacctcgaagcggtcaagcaaaggttgcatgccat

SEQ ID NO: 235421 - DNA, 428 bp, Glycine max
agcttatgtctggtcgagtatagatcctagcatacatttttcttccaacaattgatgcatacggaattgcttccatttgttttcattccagatcatttctaggacattgtccgagactaaatctgtctcctttctgaattggaactggtgatgctgagcactcttccatcctcaatctctctagtactttattgatatatcctttctaagacaagcctaacaatccttgtgatctatttcggaatattcctatgcctatcacatagcttttctaacacatatccttcatttcaaaattactagaaagaaacttcttagtctcatgaagaagaccaagatcattagttgcaaaaaatatatcatcaacatacaggattagaacaataaccttactcccacttacctttagatatatacactgatcaata

SEQ ID NO: 235422 - DNA, 443 bp, Glycine max
tcagcctgatcgctaagcaacagcttatccatggcttatcgtgacccattgtcttcaagcgcaattccttacggccttaattgaggtccatgacgcttagcgccaatcatggcagctaagcgagattcattgcggcaatgtgagcgctaagtgagtccctctcagctaagcgcatgctcttctgtacttaagatacatcattttagctaagctggccagagccaggcttagcgagagttgcagcttttctaatctgcagacctcgctaagcagactcaccctcgcgctaagccaagtctctattaaaaaaaaaattgattttgaatttgaaatgtcagctaagcgcacaagtccactaagcgaacctggttgagaaaccaaacgtctctcttgctcacttagcgcagcggtccgctaagcgaaagtatcagaaacagcttaat

SEQ ID NO: 235423 - DNA, 363 bp, Glycine max
  unsure (1)..(363): unsure at all n locations
gcgganccgacaagaggcaaatttaatcatccttcttggacaaatgataaaactgcggcatatgaagagggtgaggatgagggagaaacccatgttgtgactgccattcctatacggcctagtttcctaccgacccaacaatttcattacttagccaataacaacccttcttcttacctaccatccagttatccacaagggccatccctaaatcaaccacaaaatccacctaccacacaaccaatgcgtaacaccacctttatcactaagcataaccaccaccaacgcaggaatcttgcagcaaaaagcctatgggattcaccctatttctggtgtactatgctgacttgctccatatccact

SEQ ID NO: 235424 - DNA, 297 bp, Glycine max
  unsure (1)..(297): unsure at all n locations
gctctccctgcggacccccagacttccaggtgtttgncccttttcccgactgaggggccttgcactagacgcctcgcagacaacgtctcctcgttgtgcgggcattttccagatttacgtgggtcacattatctcaaaaatcagacccttcaatccctcacgtgtcaattcacacttgaacatactcaactgtgtattcgcaaactggagtaccatgcacacaggcaacacacaagttaccgatctcccttcgaagctcactcatgagtcttgcccgttccccaaccatcactcctg

SEQ ID NO: 235425 - DNA, 389 bp, Glycine max
  unsure (1)..(389): unsure at all n locations
agctngcttgaagagaataggagctgttttccaacctgtttctcccacctttgttgaaaattgtacaaaacatcccaagcaacagacccttctaacttgcaatgaatgtcatgccatggctctcttggaccacctttcttgatggaagcaccacggaaatttggctgatggaaatcatctttatgcactgtgtccaaagttgaaaatagaggatgttcctgagtatcatatctcccatcacaaagatcaatgccacctacaaagcttactattggtctctnttgtccttgttgtcccatagcacactgggtgtcaacaactatagtcttttggtgatgagtgaacattgttgaagtttcaaaaccttgcactatgcttttcccatcatc

SEQ ID NO: 235426 - DNA, 433 bp, Glycine max
tctaattgacccaggactttgagaaaccaaattgattaatcacgcgatggcataaggcgtgcagcattgttgcccttgtttctctgccatggaagaggtattcataagttctatcatttatcattatcattatagctgaaaatttaaattgttattattgggaatcttttcctttccagattccactcaatggcctgtgcactacttttgttttttaatcaatatttcagaattaaacttctttcttgatacatgtatatcaaagttgagatactagatttatgctttctctgttcaataatctgcagttctgtctggtcaataatgccttgtaggagtcactggtcaagactcttgactggcgaagtgaacagttttcttttctcatgtgtagaattccttggtttagtttgtacggatttatcacatgttg

SEQ ID NO: 235427 - DNA, 414 bp, Glycine max
agcttctttagatctaccaacgtaaatccgaaaccatcggttcgcacacctatattgttgtcaacccacttacacttgaaaacacaagcaatgaatttgacataattaagctcccagatttcttcaatgactccaaagtaaagcattgaagctagacggggattgtcatcatttacactagcaaagtgttgagattcaacccttagactaaccccattattttgcattgtactcttgttgtcttgtgatttcgtgtagaacgaatacttgttgatatcgtatccttgccaagttataacaccctgttatgccctttcaaccccttgttcttagacatttttggattactttccttcactaaaccttcatcatgtactatgtatggcaaaacttcattactattattcagcatat

SEQ ID NO: 235428 - DNA, 434 bp, Glycine max
tcggatacgtgaagactcaattgtgttgccattggcccttttctttaatctaaaatatttttaagataaaaaatacattcttaaatatttcacatcagtattaactattttcttaactattattaatttttatcttataaaacatataatttaatcatttctactaattttttaattatatattatattattacttaaaatattatataatattaaaaaatataaaaccggtccataattcaattacaattgagccattaaattttgaactaatactctcatccattcaatcctcggtttgatttttaaaatgacgcatctatgtgagttttatcgtaaagcgacccctaaagttcaattacaacatttagatgcttgtcatttctgatcaatttctcacgtggtatgtgtgggggttatctgctagtataatt

SEQ ID NO: 235429 - DNA, 407 bp, Glycine max
  unsure (1)..(407): unsure at all n locations
agctntaaggttgtccaaattggtcactattttcaaggatagaattcaaaagactaaggaaaaggattaaaaggaggtcaatgatgatgatgatgatgatgatgaagactatgtacctaaatatgaagagagacttggatcaaattctataagtgaaaattaccagcacgacaaatatgatgaattttctactacaaatgatcttgagtcacgggaaagaaagataactcttgaaaattttcaatataatgctaatatacattattgtgttaataaatgagtggggtggttttgtggttattgtgaaaattttcaatataataccataggaaattgacttcattttcttgatctatctacatctttcttaaaaaaaattcaaattcactcttttgtaaaaaaatagt

SEQ ID NO: 235430 - DNA, 436 bp, Glycine max
  unsure (1)..(436): unsure at all n locations
nggatgtaattcttctaacctctgctatgttggaaataagactttttatgtttaggaaaagtgtttaggaatattggagactttgaatagaaacttgataggaaggagaattctttatgcaggagagaactttgtatttttgcttgatacaaatgtgtaggattacatctctatttatactattctaaggagaactctagacacactaattctagagagttttcaactctagagatccaaagagtattctagagaatattacaaccataagaaatatttagacactccaaacactacaagaattctctagaaacgtgacccataattacttaagcccaaaataactaagtccaaggaaccaaataattaatttaggcccaaatcaagtttatatttcaacatccccccttaaacttgatttgtgacttcaagcata

SEQ ID NO: 235431 - DNA, 421 bp, Glycine max
  unsure (1)..(421): unsure at all n locations
agcttctttagatctaccaacgtaaattctaaaccatcggttcgcacacctatattgttgtcaacccacttacacttgaaaacacaagcaatgaatttgacataattaagctcccagatttcttcaatgactccaaagtaaagcattgaagctagacggggattgtcatcatttacactagcaaagtgttgagattcaacccttagactaaccccattattttgcattgtactcttgttgtcttgtgatttcgtgtagaacgaatacttgttgatatcgtatccttgccaagttataacaccctgttatgccctttcaaccccttgttcttagacattnttggattactttccttcactaaaccttcatcatgtactatgtatggcaaaacttcattactattattcagcatatacaaatg

SEQ ID NO: 235432 - DNA, 431 bp, Glycine max
tcggatacgttaaaactcaattgtgttgccattggcccttttctttaatctaaaatatttttaagataaaaaatacattcttaaatatttcacatcagtattaactattttcttaactattattaatttttatcttataaaacatataatttaatcatttctactaattttttaattatatattatattattacttaaaatattatataatattaaaaaatataaaaccggtccataattcaattacaattgagccattaaattttgaactaatactctcatccattcaatcctcggtttgatttttaaaatgacgcatctatgtgagttttatcgtaaagcgacccctaaagttcaattacaacatttagatgcttgtcatttctgatcaatttctcacgtggtatgtgtgggggtttatctggctagat

SEQ ID NO: 235433 - DNA, 405 bp, Glycine max
agcttaaaattcattatggatgcattttctaaaagcattctaatggcttctaattttgcaactggagcatatgtttcttcataatctataccctcttcttgattatatccttttgcaactaatctagccttatgtctaatgattacgccatgttcatctaacttattcttaaatacccatttcgttcctatgatggggtagttttcaggtttctctactagttcccacacattgtttctctcaaactgatttagttgttcttgcatagcaactatccgatgatcatctattatggcttcatttatatttttaggttcaatcatagacacaaaagccatattattgcataaatatttaagagaatgtctagttgttaccccttttgagatgtcaccaagaatgttg

SEQ ID NO: 235434 - DNA, 376 bp, Glycine max
  unsure (1)..(376): unsure at all n locations
cgcctcanagagatctatgaaggataatgcggctctagggaccagctacgctcgcgaatttgattaccgacgttttgcgattgctagaacaccccaaccgcttcaagatctccgagggtggcggtttctctcaggacgaccctgccagctctagaacaaatactatatctactttcaacacgagatattcgcctgctgtgaacacactgcgtacccccttggacaacaaaaaacgagacgtgtagctcgagtactaagctagtgctggaactatagactaggaccttctaccactgccaccctccgtgagggggcggnggataccgatcgacttagatgatctgaaccaacacatgtgataccatacatagcctaa

SEQ ID NO: 235435 - DNA, 402 bp, Glycine max
agcttgtgcttgttttatttaaattcttatgatcatgagcaactaggtgcgtcctactataaaaagtgatcaaataacaagcatagattcataaggtactaggttgcctcctagtagcgcttctttaacgtcttgagctcgacgcttgatgattgttggtcacggacctagttcttttgcttacctttggctttggactttggtcgcctattggttggccatgtgtcgtaggcaatactctaacctttttgtgaatgagctgaggggctctggaggtggcggcggtgcatttgttgcctgttgctggccatcccaagttgttgtggtgtctcgccctctgcttgcctgggggcgcaatacttcttgatgaaagcttggttagtaggagtcctgatgaccttg

SEQ ID NO: 235436 - DNA, 426 bp, Glycine max
  unsure (1)..(426): unsure at all n locations
tatagaattgtcttggatttgttttcttttcgngcccctaaaatgttgaaaataccatctcctttgaggctcattctctagagaataaaagtcttttctaagggtttccttatcaatgctaaatttgtcagataacatcataaggttcatgcataaaggaatatgttggagattggatcggctnttggtcatcctcttgttcttgattatatgtggttctaggtatactagaagttgtatataatccttggaggtttatactaggaaactggttctgtgactcagatctagataaccttactggaattgaccgggttcttatcgagaaagaccttcttgccgattcatactcggatcttgaggctnttattctagatgagaaagagtntctcctattgaaggttatttctaccttatcggaattat

SEQ ID NO: 235437 - DNA, 443 bp, Glycine max
acctgccgcatgcaagcttgccacccagctcgcccaggcgatcaaggttgcttcctccagaagtctcagccttctggaggaatcttctggagggcccaagtgggactggttgctatttgcaccccccctttttactaaatgcacccccttctatttttttggtaattctttttccgtaacgttacgaaactttacgaatttcgtaacgatacttattttccttccgcaaggttacgaatccttatggattatgtatttactcttttttagctttcgaagaagttacggaaactcacggattgcgcaaaaacacctcttttcgatttccgccacattacggaatttcacggatcgcgcatgcctgcttccttttgatttctgagacgtctcgggacttcatttattgcatgtcatcaagtaataatccccgaacgtaattaggg

SEQ ID NO: 235438 - DNA, 448 bp, Glycine max
  unsure (1)..(448): unsure at all n locations
ntcttgagnaaactttcttgagaagcttctttgagataacttccttgggaagctagagcttagctacacacacccctctcataactaagctcacctccttgagaagattcctaaagaagctagagcttagctacacacacctttctaatagccaagctcacctccttaagaagagaagctagagcttagctacacaccccctataatagctaatctcacccccatgacaaaatacatgaaaaaacaaaaaaagtccctactacaaggactactcaaaatgcctcgaaatacaagcctaaaaccctatactactagaatggccaaaatagaaggcccaaaagaaggaaaaacctattctaatatttacaaagataagtgggctcatacttagcccatgggctcgaaatgtaccctaaggctcatgagaaccctaaggcctacctttgga

SEQ ID NO: 235439 - DNA, 428 bp, Glycine max
  unsure (1)..(428): unsure at all n locations
agcttgatgataaaggcatgccacatattctaattggttatcactcaacaggaggctacaagctgtatgatccaagaagtggtcaagtgtccattagcagggatgttatctgtgatgaaaatggaagctggaattggaattcaacctctagtgaaagtcagtccaggatactgttagaagaagaaacaccttcaactgcaccaactattaacaaagttcctggcataagaagatcatcaaggacaagtcaactgccattacctttgagggactatgagttgtttcaagattcataagtcaacttagagggagaattggttcattttgcactcatagtagaagttgaacctattgaatttgacaaagcagtgactaatgagatgtggctganagctatgaaggaggagcttaactttatagaaaagaat

SEQ ID NO: 235440 - DNA, 445 bp, Glycine max
atgatgatatggtcttcaccgaagaaaggatcaaagtgggtctaaatataggcaaatctgatcatcatgctttgataaatgcaaaaaaaaaaaaaaaaaactagggcaaatgaagagggtgagaatgagggagaagcccatgctgtgactgccattcctatacagccaagtttcccaccaacccaacaatgtcattactcagccaataaacaaaccttctccttacccaccgcccagttatcgacaaaggccatccctgaatcaaccacaaagtctgtcttccgcacttccaatgacgaacatcacctttagcacaatccacaaacaccaaccaagaaatgaattttgcagcgagaaagcctatagaattcaccccaattccagtgtcctatgctgacttgctcccatatctacttgataattcaatggtagccataaccccaac

SEQ ID NO: 235441 - DNA, 423 bp, Glycine max
agcttcttatccaaggcaattcttggtgtgtgaagctccttcttccttggcttattccctagtggatggtgcctcccctatcctcttctcctttgccttccgctgcatctccatggtgaaaaatcaccattgaaggacctcatcgaagctcaaagatccagcctccatagaagctccacaagcaagcttccatcaagtggtaatcatagcacaagagcttcaagtaggtgctccttaaacctccattaattttttttctttaccttctcttccattgttgcttcttcatttttctccatgtatctcctcacatgtcttggtctaaatgttgttaacatgattctttagagtttccaccgattaaacttgctatagaaactatgattgatcttctatggctcaaatttcttgttcttgttcttg

SEQ ID NO: 235442 - DNA, 355 bp, Glycine max
  unsure (1)..(355): unsure at all n locations
accattgatcactcacaacgtatcgtcatattatgctcttggatcataccaccttgtnaaaagctatgaccatttgaatatcaccagagctttcattgatcaacttccagcgtccacatctatgaatcgtcataatcagacatccgactgaatacttatgaccattttaattccccgagagcttactatgatcaatctcgagcgtaccaatatattgagacgcctgaataagacctacttgtgaaaagctatgaccatttgaatttcaccagagcttacgttgatacatcttgagcggatctacatgtgaacagctgaatcgtacatatattgaacagcttgaccattcaatatc

SEQ ID NO: 235443 - DNA, 424 bp, Glycine max
  unsure (1)..(424): unsure at all n locations
agcttgtctctgacttgaacagtgcattattggagcnctttgttggtaagatatattcaattttcaatttgatgcgtttccggcagagttgtagtaaacaaagaaaaacctattttcttattttgaactcctaaatctgtaaataaaagaatatcagttactgagattgaaaatggctttttccctgtgctaatacattgggggttaacaaaatgttgatgaaatataaatatctattcccaaatattgtaatactttggaatgctgtccaacatatgggtgtaagtggaaccttcccatcataatcaacatttagtatgtgatttatactagaaacatattcgtaataacatttgttatttggcagtttattttgtctctttatcctggtttctaatccttttaatttttgtgagaagtacag

SEQ ID NO: 235444 - DNA, 457 bp, Glycine max
  unsure (1)..(457): unsure at all n locations
tacactataccaaactcaagctntgtcccaatcatccttgnttgacagtgataaagggctctacacactattcgttatgccctgtaaccctatagtactcttcaacatattctgcttccaactcttaaaaactattcaccactatcccatatgcttctgcttcagatactcatgttctcacgtataacattcaagtttcggcttgggccaaacttgaatattgtgggcaacttagatttcctaatttcaattctgtgggggtaatccatggataataaactgttctgaatcagtttcatggaccttataagcatgcaagttgtaattgcacaagagattgaaacaatttatccaatcaaatattattctcggcgcttctaacttggttgcaatatcaacaacacaaagaatgtacttatcatatataatgcaacatggaagacggcttaacttttca

SEQ ID NO: 235445 - DNA, 429 bp, Glycine max
agctgggggatgttgtacatcaacgttttaagagttgatgatgcaggacacaaaacagctcctttgattccaaatttattcccaacatccaacgcccaagccatgcacaaatctgcaacaatgaagctaattctattattctcacctttcaaatgaataatatcctctatgagctcctcaagggcttctggcatggaacttggaatagcttcacatagcttggcctgatcgtttctgtcatcatcaggtcccaaaccatcagggattgagaccaacttcaacagtgacgacgaatcatcgaggctatgatcttgttgctccaccatggatctcaccactcgcttgtggacgaaatctgtgttcacaaaaatgactttgcatccattgtcaaccaacttttgtgagaaggtcatcatgggatatacatgc

SEQ ID NO: 235446 - DNA, 439 bp, Glycine max
  unsure (1)..(439): unsure at all n locations
taagaggtatggcagtgctaacggatgtttcccttgatatgagaaggttcaaggattgcttaaggagtgctcttttgatatcaccttttgttgcaaaatgggtttccttcttaacaatcttcttggaggaatccttttcctatttttccttccccttggcctttgaagacaaggccttactatccttctttttcttttgtttttctagtttttcttcctcatccctcttatctttcatagttagntgatctttggccacctatgaaggtgcttgaagatgcaacacaaactttgttacaaggtgggtgagggttatctcattagttacgccattatagatgattttcctatcatatttccatgacctacctaagagaaggtgtcctacctccatatgaactacatcacaaatcacttcatccttatatgttctaatgga

SEQ ID NO: 235447 - DNA, 316 bp, Glycine max
  unsure (1)..(316): unsure at all n locations
ggaccttaagcacgcgctgcagctnaaggtttggtattgtttgggaagaaggataggaacttatgaaaacgaacctgaactgaaagcaagagaccaatttagactcaattgagataaagaataatgacaaaaaagagaaagagaagactccttggaatctgcatactatggtacggggaaaaaggaaaaaaaatggaattactacttcctgctaatagtatttagactaaataaatattcttattataacaataagacatgtcccatattcaagaacatctttttcaggctctaaggattagttgaaattaagatt

SEQ ID NO: 235448 - DNA, 354 bp, Glycine max
tcttgaacaagagacattgattgtatgtagtggttgtttaggctgaaaatatcctgctgctgagtgaatttgatctgaatgagcatgcacttattataagagaaaaagcttgaattaaggacatgaccgaagctgttacttgcgttgacatgcaaccttgtgattcgaatcattcgccatagcccggcgagttgcgtgaaccttacttgtgagagaaccactaccattgattaccgaatgccgcacgattctctaactactgaatggatgcacgatcttggaaaggatgacagccatgattgactgaaataaccacctaaccaaataacttaccttgctcatgaatgacttatc

SEQ ID NO: 235449 - DNA, 412 bp, Glycine max
agcttatttcagggtatcatcttgcattctctaatcactgttgttttgctttattcttttacgagctcagacaccatttcttttctaaaaactaaatgttttacagtattcagttatatgtatgagattttgtgaatctaaattctattaaaaaaattcgatctacaggaattgttggtcgtatatcccctaaaacatgggctgctatggaagtcttcttaggatcaattgccattgaagattatgactcaatggcatcttccttaattgaaatgggtgctacaaaccaggatgttgatgctaaggcctttgcaagagatttggaaaaagtattctcatcaattaaggcaagtattgtaactcacaaatatgtcaatcatatgtgggacttcgtaggtgaatgcggatttac

SEQ ID NO: 235450 - DNA, 418 bp, Glycine max
  unsure (1)..(418): unsure at all n locations
ggacctaagatactcagcttagtcatgatgacaacattttctcacacttgcttanttgtccaggtccacctgtagtgtttcgttgttctggggctcggcgaagcaattccttaggagcgagacctctcctactttaactagtagcattgcgtccatcctatatgttagccgaaaaggggtctcctcaattgtagactgaggggtgcatctataagcccataggatctccacaagcttttcggcctatctccctttggctccctccagtggcttcttcatttagcctaaaatgaccttgttagttatctcaacttgtctgttggtctgagggtgctccactgatgtcaccctatgcttaatgcaaaaaccattcaagaattcattgagttttaggtctatgaactgtacgtcattgtct

SEQ ID NO: 235451 - DNA, 410 bp, Glycine max
  unsure (1)..(410): unsure at all n locations
agctttnttcgtgtcaatcgcaacatttctctcactaggtactttactggtgccatctatgttctgaatctcgtcaagtgcagagcaagggcggngatgttgcattatttgttcatcgtggaacgaagcttttgggtggtgatgagattcaaagggattcgaatggttcatgcatagcttcagcggtttattccctctcggtactgtttctaatattcgattagggttttacttcccccaatatctgattcattgacgaaacactctttctctgctaaattaatatgtctattattacattttgatttagggatggatccaggcaattattttatacgttgaatttattcaaaaaaaatctctgattttctntatccaatttcccattcttaaattaatagataattatt

SEQ ID NO: 235452 - DNA, 430 bp, Glycine max
  unsure (1)..(430): unsure at all n locations
tcttanttatagatgatgcagatgggtttgtagctacctcatgcactcctctaatgactatggcatcatttctggcgctaaacttctgggagttggaggccatcttcacaattaaatttctggcttcagcaggagtcatgtctccaagggctccaccactggcagcatctatcatacttctctccatattactgagtccttcataaaaatattggagaagaagctgttctgaaatctgatggtgagggcaactggcacatagtttcttaaatcgctcccagtactcatacaggctctctccactgagttgtctaatacctgagatatctttcctgatggctgcggtcctggaagcagggcaaatttcttctaagaatactctcttaaggtcatcccagctcgtgatggaccttggagcaggtaatacaac

SEQ ID NO: 235453 - DNA, 417 bp, Glycine max
  unsure (1)..(417): unsure at all n locations
agcttgtgaaattgaataatgaggacttattaaactatctacacatgaacaattcaaaatccctcacggattcaagctaaatcccatatacctgattataccctaaaataaatgttctataacatttcacctcagaccattcgtattacatttcttttaccatatgtttttttatgaatcatttttttttatcaagtcttttaccctatgttgactctgcatattttgtatttgtagaagatattctgcaaagtaaaaagtaaacatgagaaggtgaagacagagatgcaagattagagagttcaacaccaaacatgaaaaaagaaggtatttgcatgaagtgttgatactatttgcatatttttctttnttatgattctcaatgctcgttttgatatgtctaacgcacaaatgtga

SEQ ID NO: 235454 - DNA, 428 bp, Glycine max
  unsure (1)..(428): unsure at all n locations
ntganaataaggctatgtttgataaaattataagtgttaanttttattaattaaaaagtgtaagatgattaaaaaaataataaaattataatttatttgaaaaatgtaaacaaaaaatttgataaatatattaaagaaaaaaatataaaaaagttaaaaactagtgttttaaaaaatgttagaagttatttaaaaaaatttatttatcgaatattcaaatgagttttatcgtaagtaaaagaaaagctagaaactaatttaaatgtgttaataaacatagtctaaatgttgtatacaacaagagttatacaagtttttcaattaaatttctttaattatcaattatcaataaatatgcaatgcaagttatggaatacttcaatatatatatatatgcaaaatattaaaaaaaaagtaagtttaatgat

SEQ ID NO: 235455 - DNA, 417 bp, Glycine max
  unsure (1)..(417): unsure at all n locations
agcttggagtggcatgaaagctgattacagtgaactagagacatttggttgtatatgcttatctaaagcaggataagttggaaccaagggccttgaagtgtatcctcataggctatccacaaggagtaaagggatacaagctatgatatttggaacctggacacgggaagtgcatcatcagcatagatgtagtgtttaatgaactataaatggcaattttaattatgccattcaagtctgctagaagttagagttcataagttcaagtgaagtctgaagagataactactcagactcatgaggaatcagtagtgataagatgcaagtttgttcttgcgcctggacaataaaatgaagaagcaacttaggattattgtttggctagagacagganaaggaggacaatcaaaacccctg

SEQ ID NO: 235456 - DNA, 404 bp, Glycine max
agcttggactcatgtgtggtaagttgttgtctaagtggattggtccttttgttgttactaatgtttttccttatggtacaattgagatcaaaagtgactccacaaacaagagcttcaaggtcaagggacaccgacttaagtcattcctcacaaacccttctttagtggacgtcgtggtggaagagacttccttactccaccctactcttcctccaccatgacttagggagcttttcttttcctatcttcttctttacttttattacatttgtccgattctatttgatggtttaattgattttaatcttttaattgtgctacattgaggacaatgagttgtttaagtatgggggggagtgtagtgttctttggttttggttttgctagttttggtagtggtaaat

SEQ ID NO: 235457 - DNA, 291 bp, Glycine max
  unsure (1)..(291): unsure at all n locations
tagggcaggtacgagcaggtgctatgttcgtgatttatcaaccatcatcccgcgtccggctcaagacgttaaagaagcgctactatgaggcagcctagtacctttaaaattttttcttttcattcatttgtctattttcttaagctgtatattgaatatgcctactttatttgcaatcctaggaattaagaaaatatacaagcataacaaggggatatntaaattcttgcaaaaaaaagggagttagctcgcctgggcaagtacgactgggtgcagagacgttaaaagggg

SEQ ID NO: 235458 - DNA, 398 bp, Glycine max
agtcttaatggaggtttagaatgatatatatacagagagaaagcgacatggaaaactgatggaagaacgggagagaggctgaactttaaagtgtctacaagactcttattcatcaaagttgcgaagagcgtcacacatgtttctatttatagcctacgccactaactttcttgtgaatctcattctcatttcatatgaatctaagaggaatattctaaggttatgccaaaggcatcttaccatattccaagaatatgtcaaaggcatcttatcatattctctttagatgccacaagaatgaaaggtgtgactctagcacatgagaaaggaatatgccccaagaatgttctaaaggaatattccaagaatatgccaaacgtatcttagcatattccttg

SEQ ID NO: 235459 - DNA, 425 bp, Glycine max
  unsure (1)..(425): unsure at all n locations
tggtctctgataaattagtgaatgatgtgttngtttcctgataaaaaaactgcattcgatattagactatgatggaatacaagcgtgagataaaatcacatcaaataaaactgagcatgatgaacaccatgtaagtgaggatagaatcctaagtcttaagatgttgggttaaaatattctgccaagtttacttatatgattatttatggctcattggagtaaaatctccctggattaacccccatcgatttcacaacgtaacccgatgtgagacttcacctcacacttgcattccaacaatctcttcttcaagtgtgagtcttttttacatgataatctccccattgaggggaagccattctcaattcgcaagtatccaatgatgacctgagagcttaatgagaatgttggatatcatataagtg

SEQ ID NO: 235460 - DNA, 407 bp, Glycine max
agcttgtttgcctcggtgaaggagaattctagatgttatgattaacacttgcacaaggtggagagctctagtcctagaataagcccttgttagctcaacctaattttctgcatgggtattaattgctatatcccatgtatttaactacatggatattagtaaatgcgggtaggtggcagtggcggatccaagaccctaagtcagtgggtgtaaattataaaaaataaaattagtagattcaattatataaatatagatgaaataaaatataagattttatttacaaatttgatgaattttaaaaaataagggggtgcaagtgcacatcctcacatagctataggttcgccattggtaggtggtactgcaggaaaatgtttagttttaagatatatgtatgttggggg

SEQ ID NO: 235461 - DNA, 436 bp, Glycine max
  unsure (1)..(436): unsure at all n locations
ngaacgaaaggcctcagctntcaaaaggattntaggtttaggagtgattgttatgtttttagaggtggaggagacatccctaccactttgtaatcttaattctccctcaaaaacctcatcttggtgttgaaaggtgctaacttgcaatggaaggctaaatctcttgttggggatttctgctgagctctgatgtaaaactcttcattatctatttaaagtttttttaatgtgttcattgcttctatctatatttaattcttgcatgcttgtggcttgatcacccatttgtgtgtaaagttaggatttttagcattgggaagtgatttaaatccttagaattggatagagtacgctagagaattgtatgtctggacacatagtgcanggatttagtttataatatgtcgtaatcttaatgcaattcttttagactaag

SEQ ID NO: 235462 - DNA, 429 bp, Glycine max
agcttgcacatatctcctttgatgtttatagaaaattacttatgtctttcttggatttttaaaacctacacaaactccctaaatgtcgtctcaacatttggcagtaacaagtcatatacattaacaattttgattaaaaaatattaaaatatgtttttcttccttataaatatgaaaatgtttgaaattaatcattacaaaactttttgtctatatttcattctcgcaaaatttaaatgttatttttatgtttgagactaagttcaagttactaaaatttacgtgtatgttattatagaatgtgtcaattttttcaacttttttgcatcatttatatgtataaaccatgcacaaacattgtttttgcattatataattgatgtaaaaaagtaaaaaaaaaacatgatactttctacaaattaatataca

SEQ ID NO: 235463 - DNA, 423 bp, Glycine max
ggtggactaagttatcgggtcgaagacctcttctttttgttattgttacagtctgcatatgtcgatggactattcaaatcgatccatcaagttccagtaagaattacatggatcaatcattaatgaaaataagaattaatattttaagagacatgttattcatataataatttatataatattttttttatccatttctctctatcatactatttattagatttcatacttctttttcttttcttgttctctcagttataaaatttgttgtacaaataacatttcttatgttttgataggtaaaaatataaaaattaatattacatttggcaaagagtagttaatactgaaagctgtttagctgaaagctgttatcttttaagttagtctataaatttgagcgttggtaaaattgtgttgaag

SEQ ID NO: 235464 - DNA, 424 bp, Glycine max
agcttgtatgagtactgggaaagattcttgaaattgtgtgcaagctgccctcaccaccagatttctgagcaacttcatcttcaatatttctatgagggacttagcaacatggagtggagtatgattgatgctgccaatggtggagctcttggtgatatgacccctgttgaggctaggaatttgattgagaagatggcatcaaactcccaacaattcagtgcaagaaatgatgctattgttcttagaggagtccatgaggtggccacggattcatcttcatctattgaaaataaaaagcttgaaggaaaacttgatgccttggtcaacctagtaactcagcttgccatgaatcagaaatctacacctgttgcaagagtctgtggtctatgttcttttgcagatcaccattcagatctttgtcctt

SEQ ID NO: 235465 - DNA, 434 bp, Glycine max
cctcacagaggtccaggaaggacaaggcagcagaatgaactagttccgctctttagtatgatagtcaccgctttaggagcgcggtacaccagcagcgcttcgaagccatcaaggggtggtcgtttctccgggagcgacgcttccagctcagggacgacgagtatactgatttccaggaggaaatagggcgccggcggtgggcaccactggttactcccatggccaagtttgatccagaaatagtccttgagttttatgccaatgcttggccaacagaggagggcgtgcgtgacatgagatcctgggttaggggtcagtggatcccgttcgatgccgacgctatcggccagctcctgggatatccgttggtgttagaagagggccaggagtgcgagtatggccaaaggaggaaccggtctgatgggttcgatgag

SEQ ID NO: 235466 - DNA, 408 bp, Glycine max
  unsure (1)..(408): unsure at all n locations
ccgacctgcaggacatgcaagcttgcgaaaagctcgctgctggagttgtcccattatttgccctagcttttttagactggtgatccctatgctcttgaccttgacttgatagaacctcattttaagcgaaggcgttcgacttgatccgatgctttactaacgngaaacaaaatctaacgcgaatcaaaactccgacatctatcatgggtggaatggatgaatgcatgatgaaatgcgtttgatacagatgcaacttatgaacatgggagcccaacaaattgtatccttcttagatacaacgccttgaggtatcaaagtgtccaacgtatgtatttaagaaggtgactcaaccctccgttggtttgccaaaaagaggggatcaagacacaacctgtcggtgatgcatat

SEQ ID NO: 235467 - DNA, 436 bp, Glycine max
  unsure (1)..(436): unsure at all n locations
taacagaatntatcactggaaaaacttataggtattatcttcaacgattcttttcatttgcaaggtatgaaatttaaattccaacatttaaaatatagaaaatatgagtttcttgaaattgtgtatattctattcatggggaatattgagttgctttgatcggtatatgaatatatatttctttatcaacaccacccacatgtttcgaaattctacttatcaaacacggatgagtagcactggctgctgtgaacaagtggaatgcattttatttttcatgaaggcaatcattcacatattttgtcattaataacataaaggattaaaactaggattattttatgcatatactattattcaacaatctattcagtaacataatgaaacacaagttagtgcacttattcaacattgttctttagtagcatttgataaa

SEQ ID NO: 235468 - DNA, 202 bp, Glycine max
tgttcaataacaaaatattcttgacctcacttatagccaccaaaaaaaaatgaattttaaaaaataagaaaatttaaccatttttatcctatttaaaggaactattataaaaaaaatcttccattagctcagaatttattttcaatgatttttttattcataaatataaaatcccatgaagagtatattatgaaaaaaattc

SEQ ID NO: 235469 - DNA, 409 bp, Glycine max
tactcaagcttcttgaggaagcctcttaatgaagcttcttgaggaagctacatgaatctaccttggtaaaaatgttgcctagccttcgttaaccgttggatcttctcgaaatcttgtctgtagcttcacaagacacttgtccacgatctaaccgttgggatcgttgaaaagatgtctggagtgtgctcgaagcttccgttctcgagagcatttcttatttaagcatttcagcctttgctttcgtgcagcttaggacaaacccccattcctctcctttctttcttcccaagtcatttctaacgtgccaagccctgttttcatcacccacaggcaccattagccaccacaaaccatcgttgttctccattggaaccccacaccgagaggaacccttcacccgagctgaatc

SEQ ID NO: 235470 - DNA, 402 bp, Glycine max
  unsure (1)..(402): unsure at all n locations
agctttctgaagggtttattgnctntttttaaaatctttatttccacaattgacgtatcatactattaaattgaatatacagaattattgttgtcataagttatcaaaacaattgcagcccctgctatatttcaatagtttctgttatatgctgttgtcagcatgattttccaatgactaaacattaacgatacttatttgttttatctgttagaatgtatgaaaatatctaatattatattgaccatatcttataatatcttacattaccctttaggatcagcttgcctattttctccctatattctaagattgattaccatatttcacaatctcatgatttgtgccctgttacgtaggattatgattgtaagggtcggtattctatgttttatgatcaca

SEQ ID NO: 235471 - DNA, 358 bp, Glycine max
tgtgcatttctagcatggaagttagtttacgagtgtttgtctgtgccttcacacgagtgagagacatccctacattattgttaatactgttatatgtacattgaaccttggttgctgctggttgcttgagctaaattatcaatcgcctactatctggtctctgattacgataactctggtatactgcatgatccgagcaaataaacccgtaaagtaatgaagcaacttggtcgatttttcccaaacaaagtgacaatacagctgcctcaagtttgatgttagattaactctattatgaaacttattccagtgctatatacagcttatagatgcatattaattgcacttgaacaggacg

SEQ ID NO: 235472 - DNA, 417 bp, Glycine max
  unsure (1)..(417): unsure at all n locations
agctttgaccaaaccccaacaatagttgtttccttagagacttgcctcagcaccttgtctccgagactgagaataattgcattgtgtgccttcagcagtagtgctttcttattcccatcaaccatcatcttttcgagtttggcttctccatcaagtgctaccaccaggccctattgaacaagaagagctctcatcttcaatcgccatagcccaaaatcattttgccctgtgaatttttcaacctcatacttggccgagcccatttcttgaaccgaactcaaaaaatcgctccacgctcaccgcatcaatttgttgtaccaagatcatattttacttcacaaaagaatgagtttcttgtatgaacaagaataagcaaaatgcagaanaagggatgaacaaaaactacacagaactcac

SEQ ID NO: 235473 - DNA, 438 bp, Glycine max
tcaagaatcaagatcaagattcaagactcaagattcaagaatcaagagaagacttaatcaagataagtacgaaaaggttttttcaaaaactgagtagcacatggatttttctcaaaacatgtttaccaaagagtttttactctctggtaatcgattaccagattgttgtaatcgattaccagtaagcaaaatggttttcaaaaagttttcaactgaatttacaacgttccaattgatttcaaaaagctgaaatcgattacaatgttttggtaatcgattaccagtgcctttgaacgttgaaattcaaatttaaatatgaagagtcacatcctttcacataaaagctttgtgtaatcgattacactgatttggtaatcgattaccagtgattgtgtctgaataaatcacaagatgtaacctctcaaatggtttttgact

SEQ ID NO: 235474 - DNA, 404 bp, Glycine max
  unsure (1)..(404): unsure at all n locations
agctntatgaagttttctggttttccttaccttgaaaacttgtgctattcatcttttcattctcttctccctttgccaaaaaaaattcgctaaggactaaccgcctgaattctttttgtgtctctcttttcccttttccgaaagaacaaaggattaaccacctgaattcttttgtgtctcccttctcccttgtcaaagaattcaaaacgacacagtctgagaattcttttgattcttccctttccctaatacagaagtgttcaaaggactaaccgcctaagaattcttttgtatccccattcacaaagtatcaaaggtttaacagcctgagatctttgtctcaacacattggacggtacatcctttgtggacaagtagagggtacatctactcgggtttgactg

SEQ ID NO: 235475 - DNA, 348 bp, Glycine max
gggaaccccaaatttgaggagataaaaaaggaaagaagtggaacttttaagtatgtctcataagactctcattcatcaaaggtaccacaagtgttacacatgcttttatttattaaccagggagcttccttgagaaactttcttgaaaaaacttcattgagaaacttctttgagaaaacttccttgagaagctagagcttaactacacacacccctctaataactaaactcagcttcttgagaagctttcttgagaagaattctaaagaagctagagcttagctacacacaccccctattatagcttaactcacccccatgcctcaatacatgaaaatatataataaa

SEQ ID NO: 235476 - DNA, 433 bp, Glycine max
  unsure (1)..(433): unsure at all n locations
tctcaggaggtgagcttanttatgagaggggtgtgtgtanctattctctagcttctcaaggaagttttctcaaagaagcttctcaaggaagttttctcaagaaagcttctcaaggaagctacctagtctataaatagaagcatgtgtaacacttgttgtaactttgatgaatgcgagtcttgtgagacacaactcaaagttcaacttctctcccttgtttcttctttcaatttcgagctcccccctctctctttctctccctctttcttttcctccattgaagcatccttccaaggctcatcttggtggtgaagctccttcttccatggcttattccctagtggatggcgcctcttctcctttgtcttccgctgtactccatggtggaaaatcaccattaaaggacctcattgaagctcaaagatccagcctt

SEQ ID NO: 235477 - DNA, 414 bp, Glycine max
  unsure (1)..(414): unsure at all n locations
agctntactacatcggttntttataattctcttagattcaacgatgttgaatcacacttttgtattcgggtccagaggaattgcttgtagtctcatggcctacttgttgattctgcatagtattgaatggttggagcatgcaacctgaataaataataaataattcatacatttttttgttaattaagtagttaatcaagtaattacaataagaagcatgagaatagaatgatactgcgtgtggcactactaaaaaaaagactttttacgatgcaccttcgaggtcggtcgcattttttgttttagcagatatagggtttgttgcttgaatttgtgtttctattttgatttcgcttattggtctttccattntgatttcatntgattgggttcacgttttgatttcattgattt

SEQ ID NO: 235478 - DNA, 433 bp, Glycine max
ttaaaacagtaaacaagtcttctaccctaaggttcataaccaaaattaaagtgtagagttaagaaaacttacttggattgtagagaaaatgagcaagaggaaaacacgagatgcaaatggcacaagtgaaagcacaatgcagatgcgagtgcacagtgagtgaagaatgtgtatgtaaatgcacaaaagtaatttcttaaggcagttaaaccttatttttgatagtttcgactgcctcgcttagcgcgggtgactcgctaagctagcactcaatgacttttgaattttcagaattcaaactcatgcgcttagcaggcaaactcgctcagcccgattcaaatattagaaaacccgagaaggatttgggcttatcgcgaaggttatgcgctcaatgaagtttgcaactctcgcttagtgggccatgggccaactt

SEQ ID NO: 235479 - DNA, 344 bp, Glycine max
  unsure (1)..(344): unsure at all n locations
agcttggttcagtcgtgttctttggtgcacatcaatttcatattgactaggttaactattaggcctcatagctgcatataagataagtattctgcctatgttttaaatccaagatttagtcttaagaaaacaaaattggatccctttggcacttcaaaagtcatgatttgcactcattattcaacaccactaattgttctcttatgcaacacatagttatgcaaaaacagagttcttttgttaatggtttactggtttaaagagttattgtagcagaactctntgttaaatcattggtgtggctcaaggtctcaggatttgattttaaacaataatgataactc

SEQ ID NO: 235480 - DNA, 415 bp, Glycine max
ctgataatgtcgagaagaaatcacatgtttgtcatcatcaaaagggggagaatgtgaatgtatgtatacatgattctgatgatgtccaagaagaatctaagacggttgcttctaatgataagcattttcttcaagaataattcacgattgcttcaacaaacaaatccttgtttcaagattcactaaggaccaagtcttgccttaaaacaaagtgctttctagacatgcaaagctctggtaatcgattactacgaagtgtaatcgattaccagacgacagggttgaacaatagctgttgaaaaggattttgaatttgaattttcaacatgtaatcgattaccatatgtctgtaatcgattaccagcaacgaaatttctgatattcagattcaatgtcatgacccttcagatataac

SEQ ID NO: 235481 - DNA, 397 bp, Glycine max
  unsure (1)..(397): unsure at all n locations
agctttaagcaaagttctaatggngtttttagactttgatatgaacctagntaggagtcacattgtttttacggatcatcactgagttggttatcatgtttaaaggaattaaagataaaaatagaagaaagtgaaatttagcacaaaaaataaatactttatataacattggcgcaagaaatagaaaacatggaagtgaggaaataagaacaaaatatggggaaaaaaagaagatcataaaaagccacactctatagagagtgataagtcctggaaagattcaccataaaggtatgaaaacctttgataagaactaagaaaggttcaatctaaaaacacacaagaggcgcaactcttaaactcacaaaaggagtgaaattctaatcttattcaagtc

SEQ ID NO: 235482 - DNA, 423 bp, Glycine max
tgcagagcttcgatctaataaataaactaattcttcttataaagacatagtacaagagctaaagggccctctcgagaagtgtaggcaacttaagtttgctcaaaaagagtcgatgaatgccttatccacatgactcgaagatttcaatgagctaaagatgagtcattttattcgatctgctaaatcctccttagttatggattctcaaacaaattttgtaatttttttttatatttttagtattcattaatctccttttgaacaatttgcactttaattttctatgttatgggaatgtttatttcggttattattggtctatatgtttttaagtactttccatttatcgaaccaatgtaattggccgtatttacttcttgaatcacataagcatttcccgaaaaaacctttttgataacatat

SEQ ID NO: 235483 - DNA, 426 bp, Glycine max
agcttcaatggagcttacatcatgtggtatcagagattcatttaaataaaatttaattgaatttctagaagcccaatccaattaaattttagagggggaggtgagcatttggttactacacctcattgccacattatatagtcacacgttgtgcatgtccttcatgctttacatgcctcatgccacctaagcacacttagtggagaatcttcgaattgatcttggattagtgggctgaaccataactaaaattcactaatcataattagtgaaattttgtctccaaagtttgggtccacaaattcaatttcaaattcaagtgaaatttgaattgaaattcaaatttccctccaattttgtgtgacacttaggctataaatagaggtcatgtgtgtgcattttttcaactttgatcatttgaaaatt

SEQ ID NO: 235484 - DNA, 445 bp, Glycine max
  unsure (1)..(445): unsure at all n locations
ntacagcagatgccactctactccaaattcttgaaggatatgttaacaaggaaacataagtacattcaccaggaaaacattatagtggaaggaaattgtagcgctatgattcaaaagatcgttccacataggcataaagaccctgggagtgtaactattccttgttcaattggagaagtcactgtgggaaatgctcttatcgacttaggagccagtataaatttaatgccactctccatgtgtagaaggttgggggagttggagatcatgcccactaaaatgactttacaactgactgaccgctctattaccataccatatggagtaattgaagatatgctggtcagagtgaaacaatttatcttcccggcaaacttcgtggtaatggatattcttgaagatactaacattcctataatattgggaaggccattcatggttactg

SEQ ID NO: 235485 - DNA, 424 bp, Glycine max
agctttttattttaatcttgaaattcatgacagcactctattttctgaaatttttgggataaaaatggtcattgaccagtcccttttccatgacttaaccaaattacccagtgacggtgtaccatttgaaggtacactgaatgacgtttggaaatttgatttctctgcccatgatgcccgccagttggtttgcaccaacaatgcggatatgaccggacgtcttcttgccgggtcattggcttttgaaagccacatccttcattatttaattgtgcgtattttggttccacggtcttccaaccttgcccaggtttctgaggaagatctaattatcatgtgggcctttcatacacggcgtcaacttgactgggcacacttagccagatatcgcatgctaaggcattgagattaaatgctccactac

SEQ ID NO: 235486 - DNA, 381 bp, Glycine max
tctttgagaggacttccttgcgagggtagagctgagttacacacattcctctcataactaagctcacctccttgagaagcttccttaagaagattcctgaagaagctagagcttaactacatatacctctctaatagctaagctcacctccttgagatgagaagctagagcttagctacacaccccctataatagctaagctcacccccttgacaaagaaacatgaaaataccaaaaaaaagtccttactacaaagactactcaaaatgccctgaaatacaaggctgagaccctatactactagaatggccataataccacgcctagacgaacgaaaaacctactttcgtatttaccaagataagcgggctcctacttagc

SEQ ID NO: 235487 - DNA, 429 bp, Glycine max
  unsure (1)..(429): unsure at all n locations
atgcaagctttggaagtgtggccaaangcaattgtaaaatttatttatttggaatttcttctgagcagtatacagccgtctcaagcaaaggatccatccactgcactggcacagggtttatatgtcatgaacaaagttttagagaaacaacctcacttgttcataagaaataacattaaccagatttctcaagtaggcctatcgttaccttttgttttatttatttatttactcaatgattcaatttttatattgggtaattgtttttcctcccagattcttgaaccatgtctcaagcataaacttttagatgctggcaaatctttttgctcactgttgaagatgatttttgttgcttttcctcaagaagcaactaccacgcctgctgatgttaagtttgtgcaccacaagctcgatgatttgatacac

SEQ ID NO: 235488 - DNA, 437 bp, Glycine max
tatcaagaaattaaatacaagacgacttcagtgctttttctcgcttcctatatatttttgaaaatatatatttaacttcgcaacttttatcaacgtattggttctttgattcgcttacatgcggtgtaaagcatggataaggtttctttcttcttttcaactttttcccttttgcatgcacccttcattctatgataaagatttgaatcagcatctgatcagcaagtttgatggggaaagtcattaataataataataataataataatgaatctcataaaaagaaaatataatggttctattttattatatgcatatttttaattaccagacaaagaactccaaaaatgaggatggagtcatggagacgataccaagaggagtatatataatgggtataagagaaacgaatattacaaaatatcctacaaaatggt

SEQ ID NO: 235489 - DNA, 394 bp, Glycine max
tccttaaatcttcctctcaacggttagtaacttcacaatatagttttccctaaaaagtgtttaatctcatttaacttctctaaaatctgattctaatttatccaaacaagtcaattagataacttctgttgcggttagttggagttggttattaattctgttcttttccctccatcatattcagggtacatactatatattcacatagaaatcaatgaaacatgtgttctgcgaaatttccacttctcttaatctcagtctcaatagcaagagaataatattcttaatttttggtcagcccgagagttatcattttaggttgtcagtcttacacattatctgcaaattataatctgcagtatttaactgatttttgacaggtcaatttctttat

SEQ ID NO: 235490 - DNA, 445 bp, Glycine max
  unsure (1)..(445): unsure at all n locations
ngactggctcagtacattccttttgccttacaaaatatattgttagaggctcacccaaaaagttgacattccaagatttcagcattgttgttccaaccaccttcatgaatgatttttgtttcaccataacaatcttttaatggaaatctgagtcttgaaaacaatgtggcttggttgaatcaccagcttcgacttccttcttgatcaaatctgtaatagggttatcaagaaaatcgtctttgcagtccacattcgtcactccattttccttgtgcttctccctctttattgatggatcaacttcttcctccataaccttttcaatctttttttctctttctaactttgcttcatcatttttggtttcttctccaccacaaaggatgtggttcttaattacggaaccttctctacttctgttttctgatttcaagaactacaatgg

SEQ ID NO: 235491 - DNA, 413 bp, Glycine max
agcttatcattgcattgcatgcattatttacttcatgggggcaaagggatcattaaagaaaccccattttcacttgaaatcatcattccaacttggaaaggctccactccttataagttgtacggattcatccatgaaaccccacaaaacgcattttatatttaaaaaaaaaaaacacaatttaccatggatccacttgattgttcagagtgaatatcgttaaaatttaccctgtctagtaattttatatacgagcattgaatttttatcaactatgcaatagaaagttttataaaatttaatttatcgaaagatgatgtgtcgtggtgaagatggaaatctcttgcctattcttaatttattaaactttcgtttggtacctatgaaagtagtaggaattaaaggtgaaaaaa

SEQ ID NO: 235492 - DNA, 432 bp, Glycine max
  unsure (1)..(432): unsure at all n locations
ggcatgccttctgggtcttctgattgaagaaagtgtattccaatgccataattgaataacctaccaggatcattatcaaataaaaggcgataattttaatatgaaaaaataatgggatctttctgtttttacatggcatgttgaattaactaaaaattggtcagattggtttttcaacggaagaaacaatatgtcttcttaagtctatgaaattgtgcaacgatgtataatattacatactaatactaatattaatacaaaggattaaacataccatgccccattgaagtctaatgaactaggtctcttaataggagaaaacccaagaacattcacgtaaaaatcaacggatttctccactgatgcacacacaattgagatatgattcaatgacttgagttgcangggaatggccattccggttttcccttt

SEQ ID NO: 235493 - DNA, 402 bp, Glycine max
  unsure (1)..(402): unsure at all n locations
agcttgtaagttacttaatagagaaattctatagaaatataatgcatcctttngtatttaatcattttattagattatgtaacaactaccaactaactttaattaaaataagttttattctctttatatatcaaggtttggacgtgttggcatggcatcattaattggtgaaagaagattctctttctctctctgtctatatatatatatgtatatatatggatcaagcttgcactatggtttataggcggacaaaataatgtgattaaatgaataactgcagtataatttcaaggatcaacctagcacaaagcttgaaaatcgactaaaagtagcaccggtaatagttttcttttgtgccaaactaatttgaaaatcctagtacttcatgaaaatgaaatt

SEQ ID NO: 235494 - DNA, 402 bp, Glycine max
tctttacctataaatacgacattatagaagaacaatttcgacaatcaactgaaaaataagagtcgtgagccaaaaaacaagagaaaagaaaagtaaccgtaaaatatacaatgtacttaagagagtctatttttttggaatatacaaagtacttatgagagatttgaactttattataaattcactttttgagtgttataaagaatttctaattctatatcaaacttttgtttataaaaagttcggagtggctcactaacaaataatacatgagtattcctagattcaagaggagtctaaggattgtgtcagtagtggcgttgggaatacatataagtaaaaaatgataggaaaaaatacttgtgatcaagtttgatcagtggaaccttttactggttgaca

SEQ ID NO: 235495 - DNA, 413 bp, Glycine max
agctttgtcaatgataaaccgacaacttgaagagtagcaagtctaaatttaattctttggaaacacccaccaccattttaactcctgggttgggggttggatttgatcaagaggttggagtgggactatgcgggagagtatagcataatagagctgatgatgagaaaaaaagaaccagacaagggagttcaaagcgaaggcaatttgaagcatttcctgattattttatggccactctcacaccaagatacatgccatgtaccccctcattccccttctaaaactatcaaaacaattcttacaccttccccctcggccagacatgctttacagaatcccttgtagtgaagaaatgttgttaagaagtgtcacaacaaatactatcattgatccttcacataacctatgaaaaa

SEQ ID NO: 235496 - DNA, 429 bp, Glycine max
tcctctggcaacaatatcgtgctgtttttggaaaatttaaatatacgcgagattctcatcatatatatttgggcacacaataccataacaatcaaattgttgtagcgcgtgtttgactgtttggttccggtcaatgagataaaatgatgtgaaaaattagaagttagcagtacggtcattttggaagaaaagctaagcagatccacacatgcatgtaacaaattttgatattcctttataattgcatcagcccaaaatgcacttagcatctaaagaaggattctttatccgtaatgttgaatttctttttatttcataaaaaaaaaatctctgcattcaatgtggtatattttgttaatattttaaaaagttaatatctaaaattcctttaaataatttagtgttatcaaaaaaaataaagatatttat

SEQ ID NO: 235497 - DNA, 404 bp, Glycine max
  unsure (1)..(404): unsure at all n locations
agcttgtnttacctttcatacatgcattgatcagnggttgatcgattgacataaccaccagtgctagatgcggatccttcattcgtgtttacttcagaatggttgtgtcccaatattgggcgaattggatttatggaattaagggaggtgttgccaccaggtgactcagtaagagtggaaagatagggtccctcataaacacgccaaccatagtttccaccctttgtgatgagatccacctcctcaaactgatcctgcaaatgaattatgtaatacatttcactcaacttttttctgtagttctagtcatgtcagcttgtagacttctgatttctccaatgctctttcagtctttctattgcgtctcaagttcatcaacacctcgaatttatgcacggaaggta

SEQ ID NO: 235498 - DNA, 404 bp, Glycine max
  unsure (1)..(404): unsure at all n locations
gaccttggttcgttctcacggcaagttgctatttggttccagaaccgtagagctcggtggaagaacaaacagctggagaaggattacgagactctgcatgcaagttttgagagtctcaagtgcaactatgactgtctcctcaaggagaaagacaagttaaaagctgaggtacttcaattaaagaagaacgaaatttagatgcagtttgttttgagttttttttaaccttgtttttattattagaattggtgtttcatctaaataacataacctatgttgatgtttaaagcaaatttttatcatagtatcatataaattatcgagtcgaaactttaattctgaacaaaactaacgacacaaaaaanaaattgtccataaattaatgttcaattcacatctatatc

SEQ ID NO: 235499 - DNA, 419 bp, Glycine max
  unsure (1)..(419): unsure at all n locations
agcttatgcgcatatttccttacatattttctcttgcacaagacatttaaccgaaaaagtgcacccatatacaatcaaggcagcttcgttacctagattatttacacgtactgccaaggtgtatttgttacttacatcacacacatctccttggctgaatttacatacatgcatactcaaagcattttggggtaccaaaaattgcacatgtgcacatcttagtatttctaatacctatatatacacaaacttcatgatgaatcttgactatcttcacaaaaaggtgctacacttcatcccttttttcaagtttttgctacctaaagccgcatgcaaattcaagcatattttcctttgcggactannaatgtattcaaattaaaaggtatattttttgaatatgttttcttcacataaca

SEQ ID NO: 235500 - DNA, 435 bp, Glycine max
  unsure (1)..(435): unsure at all n locations
tcaccaccaagagagtgccttggataagaagcttatttaggaagcttcaatggaggaaaagaatgagagaaagagatagtggcatggacattgaaggagaatagagagataagttgaactttgaagtgtgtcttacaagtttctcattcatcaaagttatgacaagtggtacacatgtttctatttatagcatagcacatgggaagcttccttgagaagcaaggaaagtagcttccttgggaagccagaggaagaaagcttccttgagaagctagagggggggctactcatacacctccaatagctaagctcacccctatgccaaaatacatgaaactacaatgggaagcttccttaagaagcaaggaaggtagcttccttgagaagcatggaagaaagcttnctttagaagctagaggggggctactcacaccc

SEQ ID NO: 235501 - DNA, 406 bp, Glycine max
agcttcacaaaatcgtgttgatgttctactcaaaaaattgtgtattgcatttttttttgtattacaaattgctcaatctgtaatacaaaacaatgcattatggattggtgaatccataatgcaaaaactatttccattctccagccaggtaaccactatttttctaataatagagagtctctcacttaaaacagcgaagaagatcatattgtggtgggacttgatggcgttgaaggaggcccacgacaagatgatattctctagcgatggaggccgcggtgaggttgatctctacctccaagcctcgacaaaattcaacattccctctcctttgtctttgtttcctttgacaaagtcaactcctccacaatcacatcaacaaaaaaacaacaaaacccaaaactga

SEQ ID NO: 235502 - DNA, 381 bp, Glycine max
  unsure (1)..(381): unsure at all n locations
tcttgcgtagccgctcttggtgctcagaanatccctaaaacaaatccctcttattactagctattttgaattctttaattcctgaatgtacaaccttcaaattgttgctcgttcccctctttcatttctgcaaaaaagaaaatcaaatgctgtgaaaacatgtatgaagtcctaagaaaatcaatatcaaagaaaacatggatgaaatcacaattaaaaagcacaactacctatctttcagagtcctttggttaatttgtcttgtctccttatgtggtggggttntgtttaataatattatacttttgccttccaaaaaaaacttatgactgatcctcttttattaatccanatttgtatgttattgtataaaagatcatg

SEQ ID NO: 235503 - DNA, 407 bp, Glycine max
  unsure (1)..(407): unsure at all n locations
agcttctattacatgagtacttgtgttataaatttacttatcaaacttattgaaataagttttaaaaaatattttatttaataaattttaattaaaataagtttataattcctttaaacttatttaaattcaaggcattagaataagtttgtaagaattataagctatttttacaagttcaagtaataaatcaatgccttcgttatttgaatgaccaattcaattttggaaacatcggttcaaagtatttattcatatatatatatatatatatatatatatatatatatataaatatataaaaattaaataatttttttttattttgtatattccgctctttacaaaataaaaattgctatttggtgtcttatctaatntatattctacatattncgatttctttg

SEQ ID NO: 235504 - DNA, 421 bp, Glycine max
  unsure (1)..(421): unsure at all n locations
nntaaaattgaattaaaatgttcagaaactgctggttatcgattaccatatatgtgtaatcgattacacagtgcaaattttgaattcaaattttaatagatgttgtaaatcagttttggccactggtaatcgattacatcctctggtaatcgattaccagagagtaaatttgtttgaaaaagactttttaacttaaatttcttggccaaaccttttgctacttcaattggaattcccttcctatttaatataccctttctaagactctagagactgtcttgatcatccatcttgaatatctttaatttctttgtcttgaataaagctttgagacgcatgtgaacctttggcatcatcaaaacattcagcttgatcctttgtctacaagntgaaggatacactttgtgtggtggggctcatg

SEQ ID NO: 235505 - DNA, 433 bp, Glycine max
  unsure (1)..(433): unsure at all n locations
catgcaagctttcgatatatgtggttgacgttttatttatgcgtttatagcacattttaatcncgaacatgaaagaatcatcaaaatatttgataatataatcttatataagaatcatactattttagattaataactgaaaattttcccttcaaaatttataaacaagaatcacagaggtatataaataaatcttttactgatatatgtattgaaattaagttacgtaatgaaaatatttgcttcctctcttgtgtaagcaataaaatgtgctcctgtcacatctcggtgttaatggcattttataattctcaatatttgaacaaaatcctattggtgtttaatttacaaatttagaagttttattaaatatggttcacttttctaacttttacctcattcgatattgtatagttgacaaataattttatta

SEQ ID NO: 235506 - DNA, 425 bp, Glycine max
  unsure (1)..(425): unsure at all n locations
actccagcatttaatttcaatgcaaggaagcatgacttatgccttttattctaattnttggctttgaatgtacaaaggcatgaatattatgacatgtttgagaggcttttattagaatttaaatttggctgccccatgaggaataccttgcacctaggtagcatggaaaatacctttcaatggtatgtatatatgtgaatatatatggcataaaaatatgttgcaaagtgtgtgaatatatggcataaaaataccttgcaaagtgtgaatgtatatcaaataatgcatttcaaaaatatgtatatgtggcgtccctaaattaatgactggtttaatagtaattatttaaataacctaaaccatggtaaatgtttctttcttctttatctttatcattacgttctcttttcaccataactaggttt

SEQ ID NO: 235507 - DNA, 410 bp, Glycine max
agctcgtaagtggttcatgatgaaccttctatatcaactgttggattcatctaatttatatggttccaatttacaccactcacactagatttattgcttccctcctagcaaccttctgatcaccatttgccgttgtcggaggcaatttctggcaacggcattttttttaatcctttcctcaccacctttgttcctttctctccccatcaatcccttgtcttcgactgcaattgtctttcacaaaatactggtacccctaaaatgtgaaattaaggccattccaagattgaaaagtgaaacgcagcataaacatcaaaagtgatgcatatgaccgaaagtgcattcaacatactaatcttcaacacaacaacgaacagatgaaaaagtaaaaaaaaataatagcttcattt

SEQ ID NO: 235508 - DNA, 414 bp, Glycine max
  unsure (1)..(414): unsure at all n locations
tgactaggcgaatggggttttagcgcttagtttcactttatttattattcaattcaattaagaatgagaaatcccaaagagaaagcgtccgattgatttttcgctttattttactaaaaggtatttttttactattatattattattttacctttttttttatttccaacgtggttacggcacgaccgaacggtcggaattcattttaacggaaattaacggatattacaaatcaaatgttcggtggaaatntattttattttttgattaggcaagaaaatgacttatataaatgattgaagcacgtcaaaaaggggtacgaaaagtaaatgaaacgagaataatagtacacaaaacaaatggggaccaccacgggtacatagaatgaattgaaaagctcaatttggaaactta

SEQ ID NO: 235509 - DNA, 405 bp, Glycine max
cgctgcagctgatttggctctgatagaatatgtggcatttggccatattttatttccttttcctctggctctttaaaattctctagcctgtttttactggtctttttcatgttggacactaaaattgacgtccttttaagatattattggttatgctgctaagggttttgttttattcatgttgcattggttctattgtattttgttttatatgtttttttatttactaaatcacatgctatttgtctttttttaatatactaaattgacatgaattgacctacactgataaggagtgtttggtcatgttcctagccaatgtgggggcatcttatcattctatttctgtttgccggcaatgatgagacatacaagtgaccaaaaatgtcatatatgatggtcact

SEQ ID NO: 235510 - DNA, 443 bp, Glycine max
aacatcagccaccctttagcttccgcttctcaatgtgatgactgtgctgctgctgcttgcaccctcctcctgactgacatcaacaaaagaagtcttaatccttatgaaagtcggtagtttctctatagcagcccacttggactgaagctccttatcttcctccacaaaggaatctgcatctctctcaaaggtcaacacatgaccttgagttcttcctcttggagttaactccattggaagaattgaacttagctttgcttgaagcagtagctattattgctggagctgttaagcctcaagctcctcacaatcactgatatgatctcagaagttgccaatgatcgttacagattgtggggggatgcatggaacggagaaagaatagtcttcactcacacagaaataactacagtgtgtgttcttgcttctccttttaaacaacg

SEQ ID NO: 235511 - DNA, 424 bp, Glycine max
  unsure (1)..(424): unsure at all n locations
agctngcatcagtgtgacccttcagtatttattcagagttttcataaatgaggaatttgcctttagttcttcttaagtacttaagtatgggcttaaccactttccaatgttcctcaccagggtttgcttgatatctactacttacacctagtgcataagcgacatcaagacatgtataagtcatggtgtacatgatagctcccactacactagcatatggtactctactcatgtgttctctatcttcaggagttgttggacaattctccctaccaagagtaattccaacacctacaagcaaatagcctcgtttggaattattcatgttatatctctttaagatacgatcaatgtacatagaatgtgagagtccacgcaaccttctagatctatctctataaatctctatacctagaataaatat

SEQ ID NO: 235512 - DNA, 442 bp, Glycine max
tacttggaatggttaatcaagttgaaggggtgttgtttattataatcttgatttaccccattaatcaagtgttaggccaataagcttgtactattactccaaagaaaattctacagaagtgtagaaataagtagaagaaatatttaattggaagaagcgtatagaactaagtagttggaagaagtgtgtagaaatctcccttgaagtgtgcggaatctttcttgatgtatctagaactctcccttgaagcctataaaagggggaaagattgtcatttgtaagtgaacccacaaaagccaaaaaaaaaaagccaaaacaaaaaatctctcaagtcataaaaactagtcttctttcaaatattctctcggctatttctctcaattaattcctataaccttctcttctccaacagtagaagcctttgttgtgtggaatgaccatg

SEQ ID NO: 235513 - DNA, 400 bp, Glycine max
agctttaaaatgtgcaagcaataaaaatttctcttagtttattcgtagacgtaggtacatacattgtgtgcaaaaccatgttaaaactttgtatcttctctcctttctccttattccttactcttcttcttattgctctatacaaacaacaaggttaggaacttggacaaggttatctctgtactccttttgaagtatctaaaacttgtataatggacccaatttgtggttccaacattaattctcttaaattaacacaaacagtacctagattaaaactacccctgcaccaaatagattcaacatgtcccaccaaaatattcatcaaatactctagttaactccaaatattatgggatcaattcagctaacaagaagacatgtgatactaaattactat

SEQ ID NO: 235514 - DNA, 403 bp, Glycine max
  unsure (1)..(403): unsure at all n locations
ttacggatntggtctttaccagcgaaaggatcgaagttggtctgattttatgcacattcgatcatcctgctttgatgaatgcgaaaactggggcaaatgaagaggatgaaaaggagggagaaacccttgccatgactgctattcctacatggccaaatttcccatcagcccaacaatgtcattactcagctaataacaacccctctcattacccacaacccaatcattcacaaaggccatctccaaatcaaccataaggcctacttgccgcatgatcaatgccaaaccacctttagcacaaaccaaaacaccaactagggaaggaattttgtagcaaaaagcctgtagaattcaccccaattcaggtgtcgtatgataacttgctcccatatctacttgataa

SEQ ID NO: 235515 - DNA, 413 bp, Glycine max
agctcggcaaaagccatactctaagattatatggattttgcttccatggatcatgcatgacaactatgagtaatgactgatgattcaatgcatgtcgatattcagtgttgcaagttaatcaaatcaatgttcatgtgttcccaaaacagtttcagtccttcaacaattcattacatccctaaagttacgcatcctcataagcaattttgttgttctcatgatcttattctctaaggtttcataatttcaaattcctacctgaattgaagcggaccagttgacatggttttcctaaataatctgagaaccactgtgatgcttcagctccctcatccaaggcagatccagtccattcccatactgagacagcatttgctacctcctctccttgttggctcaaacatatattgaga

SEQ ID NO: 235516 - DNA, 385 bp, Glycine max
  unsure (1)..(385): unsure at all n locations
ngagggtaaaagatcgggtacctttataactaggtatctgaggttcatatatgaccttggtatgaggttcatactttaactttgagagttgcttaagtagtgttaaggttgcgttaatgtactaagtcaaagcatgaaaacttgcttggataccaccctcacatttgcgttcgttgaaatagccatcgagaattaatcccttttaaagatgtaatttttcacttttgggatttcacattacttatcacgcatctccccctaaattgggaggaaccagtacacacacaattggataaaaattacctccatagagtgtggaaggcgttgagaacacaccgtgggcaatataacgaaggcaacacaaccatacgaaatacttttaaca

SEQ ID NO: 235517 - DNA, 416 bp, Glycine max
agcttagaagggccgagagggacgagttattgatggaaagcatggtgttaaaggataagttaaaggcctgtcaaagggcgaagaggagtttgacggaacaactgagcaaaatggaagagaatatgttgacaattattgatcaatataaggaaaaggtgaacctagctgctagtcatgggtagaggctgtaggatgaacatgcaaaggtattggctttgcaaattgaaatggaagcaagagagagggtgatagaatcattgcacggggaatctatgaaatggatggataggttccctttcactctgaaagggaggtaagagcttccaaggttgttagccagagccaaggcaatggttgacaagtacttggctctcaatgaagttcatggtctttccgattactgccaacacatggtc

SEQ ID NO: 235518 - DNA, 441 bp, Glycine max
  unsure (1)..(441): unsure at all n locations
cctataaaactcaagcttttatccaggcgtcatttggtggtgaagctctttcttccatggcttattccttaacggatggcgcctcctctcacctcttttcctttgtcttccgctgcatctccatggtggaaaatcaccattaaaggaccccattgaagctcaaagatccagcctccatagaagccccacaagcaagtttccatcaagtggtaatcatagcacaagagcttcaagtaggtgctccttaaacctccattaattttttgctttaccttctcttccattgttgtttcttcattttttctccatgtatctcctcacatgtcttgtgctaaatgttnttaacattattcttatagagtctccaccaattaaacttgttatagaagccatatttgattntctatggctcaaatttctctgtcttgttcttgaaccatg

SEQ ID NO: 235519 - DNA, 376 bp, Glycine max
  unsure (1)..(376): unsure at all n locations
agcttccacaacatgcaagtaattcattatccactcatcacaaactaacaaaaccaagcaaaacagggcaaaggcagaaaactctgcccaaaactcaaaccaaaaatcacagctttttctcacttaaagaccccagtaacatttccttcgttccaattcattcaccgttggatcgacttgaaaattttactggaagtccctagtacataagtctacattttgaccgttgggatctgctagaaaatatccaaaaccccatatgtactacccttttcacaaccaaccatacacaagcatttttctgcacttatacaaaattgtgctgcacatttcaacagcaaaattctgcataaagtgcagatntcgaaaaccactc

SEQ ID NO: 235520 - DNA, 428 bp, Glycine max
  unsure (1)..(428): unsure at all n locations
ntgaacaatatactgggccttcatttaactgtcttgtccttgtttgccacgctcaacaaagtattttcgacacctactgtacgttgatttgaccaatgctgttatgggaatgtttcgacaatccttcaaaaccttattgatacattctgaaaggttggttgtcatgtggccatatcgacgtccttctctatcataagccatcgtccatttttcctttgaaattcgatcaacccatgtggctatggctggactcagttcacgaaatttttgtaaattctgatcaaaaatgtgcttgcaaggagtgtaggctgcataaaaatagttatgaataacaattttaagtatatacgaaacttaaataaacgtcaccatcaaataggaaatcttacccaattctttcaacatttctttgtgtttggcattattga

SEQ ID NO: 235521 - DNA, 383 bp, Glycine max
agcttctggtgggacatcttgacttgttttccaatctgacattcaccacagattctgccttcttctattttcagattgggaatgcctctaacagcacctttgtcaatgattttcttcatgcctcttaagtgcagatgtccaaatctttgatgccatattttgacttcatcttctttggagaatagacatgtggaggagtgactggattcttgaggtgtccataggtaacagttgtcctttgatctgctgcccttcattagaacttcactcttctcatttgtcaccaggcattctgactttgtgaagtttacattgaatccttcatcacacaactgactgatgctgatcaagttcgcagtcagtcccttcaccagcagtacttt

SEQ ID NO: 235522 - DNA, 431 bp, Glycine max
  unsure (1)..(431): unsure at all n locations
tgtcgcaacctacccttcggcgggagggcgacgcgatactcgcgggaagcgtgttccacgaaaggaatacgcgcggagtcgccaccaacgtttatttgaggaaaacgtcggaaaaaccagaaaagatgcgatctacgaacttttaagtgaaaggttcgggagttgtttttacgcacgaggaaggtattagcaccccacacgtccgtcccaagggacggcagcctttaatcgaatgtgcaaacatgactttgattttttatgttccctttttatgtctttatatcctttataccctttttatattnttctctttttgtgggcgacaagggtgtttccctttgctcctacgtattcctcaattgcgatgaggaaatcagacctacgtagttcttttttatcaagtgattctttnntactttaagaggtgatca

SEQ ID NO: 235523 - DNA, 398 bp, Glycine max
agcttgatatgaggaagtgttgaatgtttaaacttcctgcttttattgttgaccacagagtggtacttggagatatgtcgcgggggtcaggagaccttggggacgtcaggtggggtgctattgcccaaaaccaagcttgaccaatcctgacccaacccgggcatagtcggtcagtgagaacctgtgatgtacctaagcaggcgagctcctggcagtcaacagataaaaggaacaaagaccacaaagcaaggaggcttgtggtggctggccagctgtgaaacttgattgatatgtgagatatggtctctggtaatcgattaccaagggtgggtaatcgattacaaggcttaaaaatgaagacaggaggctaagatggtctctggtaatcgattaccacg

SEQ ID NO: 235524 - DNA, 394 bp, Glycine max
  unsure (1)..(394): unsure at all n locations
ntcaacaaggtccttcacatataatcattacacagtatgaaactaacaaaaccacccatcatatctcccaaaaccccatacccacgaaactaagagaggaagatgtccacccaaacctgaaattttgaagtcccactcgtaggcacgcacttcacgactccaaaaatgctctcctttcacgatttggggctgaaacgggcactaaaggttgaagctntgtatggagctctaatggagaatgagggaggaagataggcaacgtgagggagagagaaagctgtctgaataaaaagtgagggctgagtgaagagagagaaaagctttttggtttaaataaaaggtttgctcttgtctattatttattcaagctctgcacatgtcctattgattgagc

SEQ ID NO: 235525 - DNA, 399 bp, Glycine max
agtcttagaataaagtgatgaggtagaagccctaaaggcaaagcttgaaagagcccgggtagtcaaagagaagttcaagtccatagccatcaaagtctgaaaagagtatgatgaactaagggacgtcaatatggccacagctgaagccttggaacgagaaaccaagaaggcccgaaaggaagaacacaaccaaagcaaagttttgaggggctctatagggcagcaatactgagctcaagctccgaagaggtgaaaggaatcatcacgggtcaaaggcatgatcttgaaggacgagctaaaggtttgccttatgtcgaaaagaaatttgtcccaacagttaggcgagactgaagggaatatgtgggccatcatcgataagtgcacagagaagcttaatct

SEQ ID NO: 235526 - DNA, 417 bp, Glycine max
  unsure (1)..(417): unsure at all n locations
tgaaggagcaattaggcatgatggaaaagaatatgtctttaattatcggtcgatatgagctaaagatgatgaaggattggcaagatctagttaatatacatgggcgggctntgagaagcgagcaggtggaagtgatagccttataaggtgaaagagaagcgagggaggaagtgatagagctattgcgtcaggaaagcaggaggtggatgaataggtttgcactcacgctaaatgagagtcaagagctcccaaaattgctggctatagccaagacgacgactgacacatactctgctcccgacctagttcatagtctttttaattactgccaacacatggtcgaactaatgacccacataattagggaaccgtgatgcacctgctatttgttttttattgtaccctaatatgatgtat

SEQ ID NO: 235527 - DNA, 426 bp, Glycine max
agcttctatggaggctggatctttaagtttcaatgatgtttttccaccattgagatgcagcggaaggcaaaggagaagaggagaggggaggcactatccataagggaataagacatggaagaaagagcttcaccaccaagaatgtgccttggataagaagcttgctaacccatggaagctcctaatatctcccacactttttggggtgggccattcttggatggccttgattttctcagggtcgaattggaccccatttctaccaactacaaatcctaagaaaactatactatctacacaaaaggtacacttctctatatttgcatagagggtgtttttaataaggactgaaagaacttgcctaagatgtcctaagtgatcatctaggctcttactgtacactaaaatatcatcaaaataaacaac

SEQ ID NO: 235528 - DNA, 424 bp, Glycine max
  unsure (1)..(424): unsure at all n locations
tctcaggaggtgagcttagttatgaaaggtgtgtatgtagctaagctctagcttctcaaggaagttttctctaagaagcttctcaaggaagttttctcaagaaagcttctcaaggaagctacctagtctataaatagaagcatgtgtaacacttgttgtaactttgatgaatgagagtcttgtgagacatacttcaaagttccacttctctacctcttttattccttcaatttcgtgctcccccctctctctttctctccctctttcttttcctccattgaagcattctctccaagcttcttatccaaggctcatcttggtggtgaagctccttcttccatggcttattccctagtggatggcgcctnctctcaccacttcttctttgtcttccgctgcatcttcatggtgagaaatcaccatt

SEQ ID NO: 235529 - DNA, 423 bp, Glycine max
tgcatgcaaaatgccagacactgttgatgccacagttaaagtgtacttgaagtccttatcagctgcattgtcaaaggacaatgcagaaatgagaaccattagaagaattgcaggaccaatgcaattgagtgggaatattgtgttgatttgaggaccctttgcaaaggctaagattattagagggagggatataggacctgagggcagaaggaatctttttgattgacccaaaaagattctgcctcttcctgaactcatgtccattaccaatatgacaagagtcaccaagtaagaagctgctgtaaagagaaggaccaagatatcaacaacaagagggtagtttgaagggtatgttttgtcacagaaataatggtaagggcaattgattgtatccaaggtttcctccacttgccaactgatgca

SEQ ID NO: 235530 - DNA, 366 bp, Glycine max
actcacgcttagacatctataacaccacatcagaaggctgcacatatccacaccactccctaattgtcatcaatcaccatccatcaacaacgcattcaaacaacaaaccccctgacaccatgctacgcgaaaatcgatgcacgcgatcaagcgcttcaccaccacatgcacaaacaatgaagatgaaatttacctaactatctcaatataccaccaatcacctgacagcagttcgtcagcgcatccttttagcacattctgtagtgcatcaagaagcttagaacaatctattacatttggcaagccatcaacatgtaaagctgctcgaacaaccggtacatctttatcatcaagctgtcttaacac

SEQ ID NO: 235531 - DNA, 360 bp, Glycine max
  unsure (1)..(360): unsure at all n locations
agcttatcccaagcatagacaagagtactttnnngnttttttctcacnnccnctcacactcacattattgataatcacttcacaacactttatattgtcattcagctatcaactataaacagacaatggtctacaatacttattttaaaaaatatattaataatacaattttaattaattaaaagtgtaaaaacctttacactaacaatcatattcattgcggcataaaaaacacttatatttattaaactccaataaatgttatgagataaaacatagataactattattcatttaagttttacacacgtcaatacaataataataacaacactattctcttattaaggtttattaacc

SEQ ID NO: 235532 - DNA, 441 bp, Glycine max
  unsure (1)..(441): unsure at all n locations
ntgtactccataaccgaactgcatgatataaacatgattaataattttttacattatcaaaagtgaagaaacagaattaggaaagaacattcacatgggatcaaataaacatacttgttatgtctgctgaagaggaaagaataaaatccccagctggactaaaagtagccgcataaactggccctgaatgaccttgaaacaatgtgcacagtcttttcccactattttgcccaatattttgttcattttgtgaagtgtcattccctccctgtgaaaaagctgatgatagcaacaactgaagtattataacatgtaaaacatataattcatctgatcatatcaagctgctcaaaacatgacaaacttcctctaatcaatctaaattttgctaaatagaaccttaattttgactctgttcactcagcattcatacttttttgt

SEQ ID NO: 235533 - DNA, 412 bp, Glycine max
  unsure (1)..(412): unsure at all n locations
agcttttcactcggatgtccgattcattctcataatatttttagacgttcgaaattgaacaatggaatcttttgagcaattcaaatggtcataacttttcactcggaggtccgattcaggcgcataatatatcgagacgttcgaaattgaacaatggaagctcttgagcaattcaaatggtcaaagcttttcactcggatgtccgattcaggcgcataatatatcgagacgttcgaaattgaacaatggaagctcttgagcaattcaaatggtcataactcttcactaggatgtccgattcaggcgcataatatatcgagacgctcganattgaacaaccgaagctgtcgagaaattcaaatggtcataacttttcactccgaagttcgattcaggcgcataatatatagag

SEQ ID NO: 235534 - DNA, 424 bp, Glycine max
tccattgttcaatttcgagcgtctcgatatcttatgcgcctgaatctgacctccgtgtgaaaagttatgaccatttgaatttctcgagagcttccgttgttcaattttgagcgtctcgatatattatacgcctgaatccgacctccgagtgaaacattatgaccatttaaatttctcgagagcttccgttgttcaatttcgagcgtctctatatgtgatgcgcctaaatctgacctccgtgagaaaagttatgaccatttgaatttctcgagagcttccgctgttcaatttcgagcgtctcgatatattatgcgcctgaatcagacctccgagtgaagagttatgaccatttgaataactcaagagcttccattgttcaatttcgagcgtctcgatatgttatgcgcctgaatctgacctccgt

SEQ ID NO: 235535 - DNA, 411 bp, Glycine max
  unsure (1)..(411): unsure at all n locations
agcttaggggcaggttctaacaagtgttatgcccatgatccatcgatcaccaccccgcgtccgactaaagacgtttaagaagcactcctaggaggcagcctagtatctctaactttgctctttaatttcttgtttcatacttgtttgttttcttggattgtatcctgaattcgcctaagtttatatgcaattatagaatttttttatggagaaaatataacaataaataacacaactttgtaaaggattttttgcaataataataataataataataataataataataataataatagctcgcctggtgtttgtcggtaaatacgactaacttttgtgtaagaaactattgtaaattggatatgacttctnccatttatagttatctttgggagtatcggaattactttt

SEQ ID NO: 235536 - DNA, 367 bp, Glycine max
  unsure (1)..(367): unsure at all n locations
gtctaacaaanattgtcatgcaggtggaccttcttctagtagctctgacttgcagtagcctcctatccctcttccattcccacctaaagcaattcctaacagaaaaaatggaagaagcagaaaaggagatcttggagactttcaagaaagtagaggtgaacatacctcttctagatgccatcaagcagattccaagatatgccaagtttctaaaggagttgtgcacccacaaaaggaagctcaagggaaatgaaaggattagcatgggcaaaaatgtgtcagcattgataggtagaatttttctcacattcctgagaaatgcaaggacccaggtactttgtgtataccttgcactattgggaatagt

SEQ ID NO: 235537 - DNA, 390 bp, Glycine max
  unsure (1)..(390): unsure at all n locations
agcttaaggatggtttatttactctgttgtgatgaatattagcgcanaacggaatcgaaaaatgcgaaaagtagtgatcctagggctgcaaactcgtaaattccgtgggtatgacttttgaatggggggaaaagaagtttttgaatgcaaaaacgtccccctttcttcattttttatattttggtgcaggggttgctcgcccaggcgagctaacctgcacttttttttttaggggaaacataaccatggcccccctctctttacaggttaacgtttgcctactcgaacttacttaagttagaattaggcatcgttttacttatttaaaacaaataatagtaataatcactgtgaattcaaaggatactgggctgccttgcagcgacgttc

SEQ ID NO: 235538 - DNA, 410 bp, Glycine max
  unsure (1)..(410): unsure at all n locations
tganacccttagttgtagttatggtttgataattctttaatgccaaacatgttttatagatatgacaattgtattgaatgtttttcgattaggcatgagtgtgatatagtctaagtctttttcatgcttagggttgatcaaatatgaagtaaatgaagtattctaattctctaagtttcccaagtaaaagcaattggacttacttctacttgaaatttggctagaagcatcgaattaaccgatttccttacttggtaattgagtgcccaagccagtttcaaaagaaggaaggatttgtagcttacgataatcgattgactcatttgataatcgattgcccaactcctagacacaaagaatagctntgtgtgattctataatcgattaccatatgtgccaatcgattaccg

SEQ ID NO: 235539 - DNA, 405 bp, Glycine max
  unsure (1)..(405): unsure at all n locations
agctntaagaggaacttctgtacaacttgttagtttatgcagatagaaaaaagtaaaattgataaactgctaaaaatatgtttaaagagattaatctatgaaaggtcaacttaccaggggttcaggagcattgagcatttcctgagtaaaccgaacagtcgagatatgctttctagatgaatgcctctgcctgtcacaagtttgccgctccaatggtggtatgaagtgtatgtcaaatacgcactgatggtcataggcaaaaaagttaatggtggttgactcgtagattttcaactttcttgaaatttttgagtccatttgccaaatacactctttctttgtgtcgtctgacctgtatttcgtaaatgactccatcatatctcaggtgaacagactcgtgatact

SEQ ID NO: 235540 - DNA, 435 bp, Glycine max
  unsure (1)..(435): unsure at all n locations
tcatagaatgctgtttagantaaatatcttgctctataataatctactactagtagatttaatctattataagttcatagcgtattttttctattctaattacttttttaatatatattgtgataaaatataaatttataaaaaaataaattattggatgccttaattgctttaatttatggcataaaataaagaaatttcttcaattacttaaatataattataaattttggtttttcgatgaaacgtgaatattctcacaaactttggcccaaatcacttatcggactaatttatgatccatgtcatacttaaagttttttatctcttaatatattatgtaggattaaattcaaattcttttccacaaacttaattattgtattgttatcaactaagttaaactcattagattattgattatgttatatatat

SEQ ID NO: 235541 - DNA, 358 bp, Glycine max
  unsure (1)..(358): unsure at all n locations
agctagcttcatactcttagnctaggatcntgtcatagtaccttgncataggacctctaatcccatgtaaaggatcattagacaggctggntgcacctctatcaaatggtttccaccaaaaatattccaatcggagaagcacatcgatgatttagatcttgcacatatatagtaagttgaagagttttctatccattctagttgtagtaggataatacacattcagtgcatctttctgtcaatgtttctattaatttttcttgaataaaattgataccccatcagctaagtaataaatgtacattatttaaggttagctataatcattgtcatgaaataagacattatttcatttaaa

SEQ ID NO: 235542 - DNA, 421 bp, Glycine max
  unsure (1)..(421): unsure at all n locations
tgggtggtgtggtctcttctgttgcccgccttcaatacagagagaggtcagaggctatggaaacctaatggacgacgcacagaaattgtacgaatcactcttcgaccaactcaactccaccttccgccgatttttctccgctctgcctcagcgccaccatgacccttacgctcggtctcttcggcctccgcctccgcctccgcatccacggctgtggccaattgttcaagaactttctctcgttctgcggagctgtcttcttctcctgacgctcccgcgctccgaccagaagttcctcctcctcaagtgccgcttcctccttcgcgttgtgaagtccttcctctctcttgatgtcgccgaacatggncggttgcgcttncgcaactttctctccggctgtgacttggagcttcctgattct

SEQ ID NO: 235543 - DNA, 416 bp, Glycine max
agcttgtaatttgtaatagatgctatatttattgagagactatatttcttgcgtggaaaccctctgtgaggtgaaaatctatgtccgtgcactttaaaacacaaaaacccctttgttgttgtaagtcaaacaatggttgtcaaggttaaaatccagtagtgttgttggtctaattgaggctaggttgaaagtctaatagaagtattagcaggttgttgaaattcagtggttggttgtgtttgtgaaatctcatcttaaagggcgaggactaggcgtagctcaagcttgggctgaaccaatataaaaatcaatgtgcactcttttttctttctcctatttgcactatttttgaacaaattcgtttactaggtttgttaatctttaaaacagaaaaaactctcacaatacacaaaaaa

SEQ ID NO: 235544 - DNA, 427 bp, Glycine max
  unsure (1)..(427): unsure at all n locations
taaggtacaaaggagctatctttcttgctcttgcttgttcatggagtattctccattagatgtgttgtaggagcataggaagttagctttccacaaatcaacactttaagtcccttttcctttagattttgtgttaaggttattagaacttgtaaactattgttattttaggtgttcaatgtgtggaaacatgttggataggtttgagattccatttgggttgatttggaagccattttatgtgttcagtgtgtggaaacatgtttgataggttaagtttccatttgtgtggaaacttgtaaaatcctttttcaaagctttgctaggttgtgacgcttaagcaaatagttacttgcgcttatgcgagatgacctgcaggggaaaatgggcttctagttntcaagctggaaccaagcttaagtgtgac

SEQ ID NO: 235545 - DNA, 322 bp, Glycine max
agcttgagagatgttcttatccagatgttttcaacaaggcaaccctcattcaccttacctttctatcctttataaagtccaatcctaacttaccttttggaaggacaaactcgattttgactagggcaggcaggctatggctcacaagctaaatcagtcctttccgatccattccattatacttctggctcccgcaaggtttgtgcgacaaaattgacgagttgtgtatggctatgatttggtaaaaaatggggatatacttaattgtatatatcacatgctaaaatatggtacgctggaatgtaatatggggatatatatc

SEQ ID NO: 235546 - DNA, 370 bp, Glycine max
gcacgcaaatggcagatggttatgctatcgtaatttcttccccccgaacaattagttttattatagagcgtattagatagactatggttatgcacccctctacaatatatatgccccgtgcgtgctccaatatattagaataatgactagattacagcacttagaccgaaaccctgcaatagcaaaccttaatggtacgcgatcatgagggatatatacccataggtaatctaagattatccatattatacatagacacttacatgctgcaggcctatatctcctaatgctgcatcgacctatactataacacctatatgaggaactacgctgataaatgacgatgtcaattccttctatttatagatgt

SEQ ID NO: 235547 - DNA, 394 bp, Glycine max
  unsure (1)..(394): unsure at all n locations
agcttttaactgaatttgcaatgttcttattgatttttaaagggggtaaccggttacaatatattggtaattaattaccagtgtatcagaacgttgaaattcaaattcaattgtgaagagtcacatcttttcataaaatgctttgtgtaatcgattacatgattttggtaatcgattaccagtgacaagttttgaataaaaatcaagagatataactctccctatggttttcttgaccagacatgaagagtctataaaagcaagaccttgacttgcatttttagaacttgatataactcttataatctttttgaacatctttttgaacttcttcttcttcttcttttgccaaaagctttttaagttntctggtttccaaaccctgttctttcac

SEQ ID NO: 235548 - DNA, 422 bp, Glycine max
  unsure (1)..(422): unsure at all n locations
tgcaagtctccacccatcatcatgtgtgaattgaacagaaactacccacaaacatgcactaaatttcctataaactcaaaacatgtttaattgaatttattttaagctctgtcatatgtgtttcattacaattatgaggcatctcactgctgaatttggttcagcttggtccttctgtccttgttgccaatggcctgcataatggtagtttagtgcagtgtcgattctcttctagggtcaatctctagtaggactctaaggtttttattttttatttatgacataaaggttgattggattaagatatttgaaaactggaacttcaaaagagtcaaattacttttcatgccttattctggaatangacagtttccttttccctgaatntttatataacctacaaaataaatctagatggattt

SEQ ID NO: 235549 - DNA, 426 bp, Glycine max
agcttcaacctagaggagacggaccattccaagtgttggagaagatcaattacaatgcctacaagattgacttgcctagtgagtataatgtaagtgccactttcaatgtgtctgagctatctctttttgatgcagatggaggggccttggatttgaggacaaatccttttcaagaagaagggagtgatgaggacataaccaagggcaaggaccatgaagcacttgaagggcccagaccagaggcagacttaaacaagcccaacacgtcatagagacaaggctggtcatttgtatagctgccattgatgatgattgaaggcccaagtggagaaagatgaaggcccaaagacaaaggcactaccaagactactaattgttgctgaaggcctatgtctatttttatctttttgttagatacactataag

SEQ ID NO: 235550 - DNA, 420 bp, Glycine max
  unsure (1)..(420): unsure at all n locations
ttagtgtagcactatcgaggctacttttggtctaccttgacaattatgatttctcctgccaggatcaagaatttcattataaggtgtggtataaagacaatggctctgagcccatttaatattttcatgccaatcaaagcaaaataagaactatctgcatcaacaatttagtaccttacaatgaaactctgcgagagcttgccctgaccaaaagtggtcattaggtctacataacctttggtttccactttctctctagcaaaaccaaggagtggtccatagtgcagttgaattgtgtcaagtgagacttcaatcctttgaataaagtatatatgtggaactaccttggtcgatgaggaccttagacaccatcaaattagagatgtgtatggagacgaccatggngtcatncctggtgat

SEQ ID NO: 235551 - DNA, 348 bp, Glycine max
  unsure (1)..(348): unsure at all n locations
agcttctcccccaagtgtctataaattgttggagaagtttagtgaaaaagggttcagccccttaggcacttctctctctttcgaatttgcttggaaaaattgtttccgtgaagaaaatctaagccgaggcgcttccgaaacgtctccgtaatgtttccgtaaggaatttcgcgaaggtttcgaccgttctttgacgttcttcattcgttcttcatccgtcttcgatcttcaacgggtaagtacctcgaaccacacttttcgattcattctatgtacccgtggtggtccacattgtgtttcgtgtatacttattctngcttcatttactttttataccccctttttgac

SEQ ID NO: 235552 - DNA, 349 bp, Glycine max
  unsure (1)..(349): unsure at all n locations
tgctctaaatttacattgatgtttgtatttatgggatgaggctgtatttcatttttgntctaagaatagtatcccactggtaaaactaacttttcaaatgtttgccttcgcacgaaatggccccgaggaagcttgcctcaaagaggtccaggaaggacaaggcagcagatggaactagttccgctccggagtatgatagtcaccgctttaggagcgcggtacaccagcagcgcttcgaagccatcaaggggtggtcgtttctccgggagcgacgcgtccagctcatggacgacgagtatactgatttccaggacgaaataaggcgccggcggtgggcaccattggttac

SEQ ID NO: 235553 - DNA, 431 bp, Glycine max
  unsure (1)..(431): unsure at all n locations
catgcaagctntatgatggttacctcagcctgtagaaatnataattatatcgacttcttccaacattaaagctttctttaaagaaaaaataggttaaaagatgcaactttaggaactaactctaggtaccataaggtgggataacatcttcatatgctacaccgacatggcataagcaaattacaacctttattgccaacttatggaactagaatgcacgaaaaaaatgctaacatggcctttaacgtcaatgatactgaagaggatagagtttgacaatattccttttttttttggctctatgagaactaaaacaaaatggtattaccgtggccttatttcttaaaattagtaacatgctcagctaatcaaatattagatacgtcgaaaacaaacattataattattttctccatcaattcccatctaaa

SEQ ID NO: 235554 - DNA, 415 bp, Glycine max
tcccgcatccgcacctggaaggatctgattacggccttccttaggcagtatcagtacaactctgacatgggtcccgaccgaactcagctacaaaacatgagtaaacgagaacacaagtcttttaaagaatatgctcagcgttggaaggacctagcagcgcaagtggcccctcccatggtcgagagagaaatggttactatgatagtggataccttgcctgtattctactatgagaaattagtgggctacatgacctcttgctttgcggacttgtttttcactggagaaaggatcgaggtgggtttgaagaggggaaagtttgattacgtctccccggtaggtgccagcgataagaggactggaatagctgggccaaagaagaaagagggagatgcctatacccgcacttcaacac

SEQ ID NO: 235555 - DNA, 344 bp, Glycine max
  unsure (1)..(344): unsure at all n locations
ntaagtcgaaccacacantatcgaatcgaatcgagctgagttgagcttttactcgacccaactcaacttatatctaatcctatccttaagcatcgtcatgaactgataactatgtcaaaagaactgatcttattcaacgcttctagtgaaaaccaacgccacacccactgcaatctaaacgcacagggtcaggatcacccaacgaaatcttgccatagcaagttcatacacaaaattcggaggtgggagaagccaaccaacttatccataagaccatgcaactgaatcactagagaacccgccacatgattcgctcttcttgaacaggggagatcttcatgcca

SEQ ID NO: 235556 - DNA, 374 bp, Glycine max
  unsure (1)..(374): unsure at all n locations
acatcagcttcagncacgaagggacaagtgtggatttcccttgtttctcnacactccanaaactgcttctggacttctaacccattggggtaacacattattgaattctcaaccaggatgcaaatgccctaggtgaatccccattgcatgtgaccagcaaatttagcaagggcatgttgttggctttccccgaaacatgaatcatagttgagacgctcttaaatcggaagtgcctaaggacattgacacaagctgcaatatattgctgctgcaatctatgaacttttaactttctcaaacatgtttcccatcaccaaacttcatctacagttgcattgtttgaagagctaagtaacagccttttgcggattata

SEQ ID NO: 235557 - DNA, 396 bp, Glycine max
  unsure (1)..(396): unsure at all n locations
actagaatcgcgaagatcgagtctaatttgacagtcttcgctgctccagccgagatatgaagtgcttttatctcgcgattgataaatacaatggctttaatcccaatgaatattctcatgcctgttaaagctgaggctgaactatgagcatcatctatagagtacctcacaatgaaactctgggagagatagcgctgaccacatgtggctactatggctacaagatgtttggtttcctactctatctctatctatacgcccgacagccccatatntgcatttagttgtgtatagtgagaccacaaaccatttaataagatatcaggatgcaactatcatagttcatcatgacttctacacattcatggccacatgtctatggacacaccatggaga

SEQ ID NO: 235558 - DNA, 322 bp, Glycine max
gaatgcacgacaagatatcgccacacattgccaccatttatattgagccgaagataaatctctgtgcaatgagctcaactaaattctacgcatagataagtaaacaatacttttctcttgtatctgactatctttttctgcctgaaactggtctcccctgtattagagtccatatacacctcaaatgatatggcattggacattactcgggctttaactgcctttgcaaatttctcttcatcaacccgccctatgttaattcaaagtaaactttattgaaagggagccacttctttgataaatgcacttcccgtgtgttatg

SEQ ID NO: 235559 - DNA, 405 bp, Glycine max
agctgtgcctatatgctgcccattttttttccatactcaatttgcaataccggggtgcaccagcttcattaatcttaaaataaaatcgaggctaaaaagaaaagacaaatttatcaaatatcatatgcaaaattttatatatatatatatgaaaaatagtaaagataaggtttctaagtggtgtagatataaaaatttatatataactaattgacatacctttaaaattgtttcaaagcaatcatcaaaataagctttaggtacgcctgaaggttcataccatctatcataatccataggaaataatctgcaatcagctgctagtattccaagaaatcctgtaagcaaggcttgtgcttcaccaattgcttggccctggtcataaaattcacaatgaagcgtaac

SEQ ID NO: 235560 - DNA, 414 bp, Glycine max
taggttattcttgacagaggaataacttaattcgtcctccacaacctactgtcccagatggacctctctgctagtcatcctatccagcaacctatttccacatccagaggacctttctgctttccggcaacctatttcagcatttctatgagcccttttacccaatgatggccctttctcctctttcggcaatccttttcatctgctttgcattttggcaactttttttaccttttccggcacagtttccggcaaccgctgccactgccgccgtccgtggtcagagctctagcgaccttttcagtcagagaccccgccattcaacttctcaaaggccgatctgtccgtttctcatgccaccgcctcctttcagcgcacccacgcgtatgatctttgttgtgccaacaccaccag

SEQ ID NO: 235561 - DNA, 330 bp, Glycine max
agctgtagttcttttaaacaagtcaatctcaagcttttatttgggctagtttaactaaatgaacaagtttgagccacctttttttttttcacaagccaagcctaaattcctaatgttaagcttgccttgacttatttatacccatacccctcaatattatactataataactctatgtacactatgattttcgtgagtctaattaataatcaaattgttattgtatattgctttttttgcacatgttattgatgtgaaatatttatcaactttagtgataagttaatgactaatttctattaacagacttggctaaccacatttaacagg

SEQ ID NO: 235562 - DNA, 403 bp, Glycine max
  unsure (1)..(403): unsure at all n locations
tacctcnaacccaaacagtgacatatgtcagtgagatctaacaatttggcatgaaactttaagctttcctcgtacctcaatcaacaatactgcaactgaagacgtattattattattattattattattattattattattattattattattattattattatcatcaataaaacatgaacacccaaggaaacttatcatacacgaatttgacctacgtacctcgcggagaaagctttgacctttgagcacccacgagtgtttcagcaccctagtagcaacagtgtatgtagggttttcttcgagccaggacaatgtgggttctgtggggtttgagcgacgacaatatgggtcttccgacagtgtanggggttctgtgggttccaacgaggacaatgtgggt

SEQ ID NO: 235563 - DNA, 393 bp, Glycine max
agcttataaccctatttactctcatgatttatgcagttagagcatgttgcctccatgctgcaatcattcaactgttttattttcaaaagcttagatatctccatctagatcacttcctgaacactcatttggatgaggtctgatataaaaaattagttactggtgttactagataacaacaaaagtcttatctaggtgagtttaagtaacataaccaatttcaaaactttatttagataatacgtaattgtatgtgtgatttcatactcatagttgcttaagtaacatactcaaagttttgttgcccgaaatgtttgcagcatcattgaaaggcagatggagtgcaatcataaccacatcttttagtcacttaagaactctatcataacccta

SEQ ID NO: 235564 - DNA, 389 bp, Glycine max
  unsure (1)..(389): unsure at all n locations
ntgcacaaaagtatgaaagtccttttaactttgcatatnttggatcacatcgaacatttctgacataattctgaagctgatgtcgcaccaccacttccggcacatctacaaaatcatttggataaagttcaatcatcctcaacaattttttcacatcaaaagcttcaaatgatgatgagggactcaaacatgaaacacattgtaaaagttcagtattatcttcatcaaacctagcattgagctcatgcaactgcaaatctaaaacactaaataaaaaatcatgcttaaaatgatgcaaattagaaacactataagtggtagcatgtcgtctaggtttcttcccttgcacatacagngcatccaaatcaggcacatcaatatcatgctta

SEQ ID NO: 235565 - DNA, 318 bp, Glycine max
agcttgtgcactcaatagacagatgatagtgttgcatatgctctcatgactgaactaacacattagcggtccatgattcatgggcttgcaggtgaagatcctcataggcgtcttagggagctacatattgtttgatccaccatagaacctcctgatgtccaaaaagaccatatctgtcttaaaggttagccctcattctctggagggagtgcgaaaagatgggatctaatacctggctcccaaatacattatcattggggatgaccttactagggtgttcttggagaaattctctcctgtgtctaggaccactaccct

SEQ ID NO: 235566 - DNA, 426 bp, Glycine max
  unsure (1)..(426): unsure at all n locations
tgtctgcaanacattactgataaccgatttatcgttcaacgccatacacggtcctctttgcggcaaagtactcaaactaggctacttgtacaaactaattaccataaggtggctgttttgaaactattgacagagaggtctgttatagaacgggactctccagtggggctggcgagttggacacgtggcagcgcctgtgggactcgccagtggggttggcgagttgctgcctttcgtgagaactacgtaggtctgatttcctcttcgatggaggatacgtaggagcaaaagccccgcttttgtcgacctcgtgagatggttagaggtccaacgccttatctgttctcaccaagtaaaatggatcattntaaggtccaacgccttatatgaccaccttccaagtaaaaagaatcacttgattcaccc

SEQ ID NO: 235567 - DNA, 398 bp, Glycine max
  unsure (1)..(398): unsure at all n locations
agcttgggattgcatttgggcatctattttgactttcctatgctgtctctacatacataaaacagccctaccatcccaattttgcaaaatcatattcatatatcattggggcatttcaccgagcacttgatgggtgcatgtttggacataaattgcaagagaatggggccaatgtggcatgccccaatgcttcagaatacaacataggcctaaggccttctcattcaaatcctcaactcaaaaaaatcaagcataaaaacaacccanaactgccgcacaaatataatcacattctcacaatttggagcaccaaaagatgaagaaatataccaatgggaagctaaaacatcaagattgatacttacttgtggagtgaatagaaacacaaaaacgaaagc

SEQ ID NO: 235568 - DNA, 419 bp, Glycine max
  unsure (1)..(419): unsure at all n locations
tgtagaatggctagacatgatacatgtcagggtttggtttggttcaaggataaaaagggatgccccacattatttccatgacacaaaatgcaaaaaaatgatgatttggaaactttatgcaaaactggtcatgcatgcacctatgcggacactcaagtgtcaaatttttatggtcatgtgatgctagggctcaggattcatttcctctattttaatcaacccaatgtttccaaaatatgttcttttatcaatttgtgcattcatccgagtccatttcgggcgtccggggaaatttcacagcattcacccttcaggtgtagacacattttccaaaaattggttatgatcaatgaactttnttttggaaatcgtctcttttcaaaagcatgtcgttntttagctagacaacttattttctt

SEQ ID NO: 235569 - DNA, 415 bp, Glycine max
agcttcgggaagaaccggctcagtgcttttttgagaaattttttttacatataatgacgaagaaagaccatgttcaatctgtctttaagttacataaaaaaatgagtcctgtgaaaatttgaatggtctctctcactgtctccatcttttcttggagatactatgctctttttacgtaccaaataacataattggtagggtttactatcatctttttatctggtagtatgctagtgttattgcttactaagatagtattaaaagctcaatacattggtattaacaccgttgtttaatattgaactcaacttcctgtgtttttctccaatcaaaataagttgagtctccgatggctatcccatttttacaaggttcttttttttttttagtccatgttatctacaactttttaaaa

SEQ ID NO: 235570 - DNA, 431 bp, Glycine max
tggaatgaggaagtgtgaaagggtgagacttcctacttttattcgttgaccacatagtggtacctggagatatgtcgcgggggtcaggagaccttggggacgtcaggtggggtgctattgcccaaaacaaagcttgaccaatcccgacccaacccgggcatagtcagtcagtgagaacctgtgatatacctaaacaggcgagctcctggcagtcaaccgataaaagaacaaagaccacaaagcagggaggcttgtgtggtggctggccagctatgaatcttgagtgatatctgtgatatggcctctggtaatcgattaccaagggtgggtaatcgattacaaggcttaaaagtgaacgcacgaagctaagatggcctctggtaatcgattactatgggagcggaatcgtataccccgcttaaaacgagatc

SEQ ID NO: 235571 - DNA, 415 bp, Glycine max
  unsure (1)..(415): unsure at all n locations
agcttgccttgtgctgaactagggtacttacattcctnttagaaccctacagcacggagaccacagtgctaatttcacgatacaagctctggacgcaccaagaggagcatctctgcacacaagcctacggttcttcaattcgagagagattaccgagctagagagtgattgtgaggcactgagaagaggaggacggatcccccttcttgtgtcaggaacactcattctatactctcaatctcatttgtgttaaggtttccctgtaatggctggctaaacacccttgtaatggctcgccatatcccttgccttgccttccaagaatttccggggcaggcccactattccattccgaatttgcttcatgcgacccaactctattgcatgaaccgcaatcacaggtgcaatcttgctc

SEQ ID NO: 235572 - DNA, 443 bp, Glycine max
  unsure (1)..(443): unsure at all n locations
tgctgcggttatatatgtatcatgcagagaagagtgttactgaacattctttatgcancaccattaaccttagtatagtgtttatgctttgcgtaatttgtgacccaagattctaatgaggtacacattttatgtgttgctcgcctaactaatgacataataaaccagtacccgacacattccgaacatgcctgacatcaacgcgtgggttttcgcgcaacatatatgattagatatcttgaaatcattagagaacgcgaattactcttaggattataataattaacggtgatgataaatcatcgacctctcttcacactcgagtctttaaatagaaagcacgcagaattatttttatcattatatagtatttcacaaattgcttgatactgtacaaattaaacttcactaacctattacgtgctatacaatacctaatgaat

SEQ ID NO: 235573 - DNA, 68 bp, Glycine max
acctgcacgcatgcaagcttctatggaggtgggatctttgatgttcaataagattatttaatggtgat

SEQ ID NO: 235574 - DNA, 446 bp, Glycine max
  unsure (1)..(446): unsure at all n locations
cagcttgttgggattntctaattntcatgcaaaatctaaattagtagatgaaaaaccaatcttgaagggtaactaatttcagatcatctggtaaaatcagccgcaacaactttggggacaggagttgatcccctttcaaatactatatcacaaattaaagttgctcacgtaaaaaatgatagagataccaagccagcagttagctctttgacataaccatccatttctaccaattttccttctgacccaaaggttcatttgtatattccttatattccttatgtatctaccatagttagttggaactagaaaaagagcaaattgtcactagcaatgactactactgaccatgatctaacatactatatagtagcacagtgtaaaacaccaaaagaggatatcatgcttgccaccgaggactacatacatgactcacaatattttaa

SEQ ID NO: 235575 - DNA, 413 bp, Glycine max
agctttcattgatgtaacaaatagggtctctctccacctttggccctcgcccttgtaaataagctaagtttttctcttccctttctgtcacaaccttcccttcggtgggagggcaaaaaggccaagaaagatggacccatgtagttctttaagtctgaaattttgtgtgttacattgattttatctttttcgaaagattgattttaattgcaaaaaaagtagtttaaggtgttggacctcaaaatgatgttttaaacttttaaaaagcaaagagaatcgttaaggtgttggacctcgaaacaatcttctcgagtttgaaaggcggagagaatcgttaaggcgttggaccatgaaacaatcttctctagtgatattttgatgaaaagaaatttagttatgagttggttttatct

SEQ ID NO: 235576 - DNA, 445 bp, Glycine max
  unsure (1)..(445): unsure at all n locations
cttcgattcattctatgtacccgaggtggtccacattgtgtttcgtgtatttntattctcgtttcatttactttttatacccccttttgacgtgcttaagccattttatttaagtcattacacgcttaacctaaaaataaaataaatttccaccgatcgtttgaattgtattatccgttaacttcggttgaaatgaatttcgaccgttcggtcatgccgtaaccacgttggaaataaaaaaaaaggtaaaataataatataataataaaaaaaacatcttttagtaaaataaagcggaaaatcaatcggacgttttctctttgggatttctcattcttaattgaattgaccaataactaaagtgaaactaaggctaaaatcaactcgcctagtcaagctcgtgcataaaaatagggttttgaagtttatcatttcaatttcttac

SEQ ID NO: 235577 - DNA, 422 bp, Glycine max
tgcttctacactccattgtcaaaagtttactaaggtttaaacttgtgaaaattacgtgactcataggactatagctagagccaaactgcatctaggacaaaaataaggctaggtaggggattgagtgccagatttcattcaagacaaacattggtcatattgcattttgaacaaaaagataggacaacattgaaaaccaatgataataccaaaaaggtagaaaagctgaaaatttaacaatgaacatacaccaacacattgaacccagaccaatgaggttgagtgtcatcagattggccacatcaaggtaagcaaaagagtcagactacaaatttaaaaagaacctacaaatttaacaatgaaagagaacttcacaatatgaaaattagattcacattttatttgtaattaaaagcttcatg

SEQ ID NO: 235578 - DNA, 327 bp, Glycine max
  unsure (1)..(327): unsure at all n locations
agcttgtatgagtactgttgaaagattttatanattatgtgctagctgctctcacgactatatttctaagcaactccttcttcaatatttctatgagggacttagcaacatggagaggagtatgattgatgctgccaatggtggagcacttggtgatatgacgcctgctgaggctaggaatttgattgagaagatggcttccaactcccaacaattcagggcaagaaataatgctattgttcttagaggagtccatgaagtggccacagattgatcttcatctactgaaaataaaaagcttgaaggaaaacttgatgccttggtcaa

SEQ ID NO: 235579 - DNA, 438 bp, Glycine max
  unsure (1)..(438): unsure at all n locations
ntgaccgatcgtttaagccgttttctctcctaatatatgataaaaagaatttcaaccgaacatttgcattgtaatctcgttataatcactcttaaaacaaaatctaactgatcgttcacgttgtaaccttggttaaaccaaaaaaggaaaaataataataaaataatcaaaatatctttaaataaaataatcaaaaaaatcgatcagacgtttttctttggaagtttccttgaatgaattgactaataaccaaagtgaaactaaggctaaatcaactcacaaatcaagttttgtccgcaaaaaatcactgaaaaccgttttaaggtccaacgcctttaacggtcctctttgcttntatcggttaacatggaccgttcaaaagcataaaatcaacacatcactttactgccttttgcgagaactacgtaagtctgattt

SEQ ID NO: 235580 - DNA, 401 bp, Glycine max
cactgcggctgcagcttgaaggattgataatatctctgatgtcttatatttgcctgacattgagcaaaatctacttagtgttgctcatcttgtaaacaaaggctttaaaattatatttgaagaaaattgctgcttgatcaaagatgcaaaaggaaaagacgtatttagggtgaaaatgagggctaaaagctatgctctaaatctaatggaggagaagcaaatagctttttcaagcatgaccaccaatgttgaacaatggcacaaaaggctcggacacttccatcttgctggacttttatacatgcaaaaacatgccttggtgaaaggtgtgtcaatgctcgaagacaagttcacttgatcacaagtacccgattggtggcttgcaatatggaagctagtca

SEQ ID NO: 235581 - DNA, 453 bp, Glycine max
  unsure (1)..(453): unsure at all n locations
gacctataaaactcagcttaacttntttattttatatttgtctcactaggtgtccattattacattagatgttgatctataatttttcaaagatttatttgattacaaaccaagcgagcttttaagattggggaactataaatagttaaatacttgcagatgctgccgtccctaatcaacatccaacccaagaggtacctaagttccccaatggcttcgaatgaaaaaacccttcctcatcaaacccaagtggttctgatacctttccctgcacaaggccatctcaatcagcttctgcacctcgcacgccatattttttcacacaacataccagttcattatgttggcactgccacacacattcgccaggccacacttcgagaccacaactccaatatttctaacataattattcatttccatgcctttgaagttccaccctttgtatcccct

SEQ ID NO: 235582 - DNA, 402 bp, Glycine max
agcttgcctgcctttttggacaacttttcagaaaacgttgaagccaccattgatgtcccttatgatgtcgttcactatctcaaaaaagcctacgatgatttggaagaacccttgacctgttttctcaaatcttccaaagttgattggcatttctatgacccatatatgttacagttaccaaaaaggttcaaagagaaaaccaaatggtgtggaatagtaagccccgcgtgggcaccatagttgaaggtattgagccacaaggcagttggtggggttttgactcactctggttggacctctgtggtggaggttgtttagaatgaaaaacctctaagtttggtaatgtttcttgcagaccacggattgaactccagggtgttggaagtgacaaagatggggtat

SEQ ID NO: 235583 - DNA, 105 bp, Glycine max
  unsure (1)..(105): unsure at all n locations
tgtgccacccacatagcataggttgttcatggntgatcaacctacgctgtggtcgcaaatttgagaatctctcccatatccaaatatgaaccaagtagtaaaagg

SEQ ID NO: 235584 - DNA, 327 bp, Glycine max
aagggtgggactggaatgagtcaccaatggctttcttgaggagagagacatgaaagaccggatgatatttactgtgagatggaagatcccacttataagcaacagtacccaccttattaaacacctggaaaggaccataaaaccgaggggagagtctttcattaatccttttaaccaaggatcttctcctgtaaggttgcatcttctagaacacccaatcaccgactgcatattctatgtcccgacggcgtctgttggtatttgcttgcatgatatcttgagaacttatcaaattctttcttacagtagccaataattcattccgag

SEQ ID NO: 235585 - DNA, 428 bp, Glycine max
  unsure (1)..(428): unsure at all n locations
tcatcccttctctctccagattaatataataagaagtataattgtatataagtatggaaatggtgaactgcaaaaatgagtaaaatacaaatgcttgacattgttttctttcagaaaaataacaaatatccataacttcatgtcaacataataaagcaacaaattaaagagatcaccttatcccacaaggtaaactaaaggagagagcaaccagcaagttccctaggtaactgttgagactttggcaagtgtatcaatcgctcttaagtagtaaacctcggaagtccgagtatcattccgcagggattttattgcacttattagatacttctcaatttgtaagtaagagtaaaataataagagcaagaataaatgtangaatagagtgctattactaaaacaaatagttttaaaggaaaaacaattga

SEQ ID NO: 235586 - DNA, 222 bp, Glycine max
agcaataaccatttaccatccaagtcagctcctctgttatttattctcttttactcgcctaaactttacggtataagacttgtagttttagacttttacggcttcaatgctttgctacaattagttcaacactacgactatatatacatgtatatcgcattgaatctattgcacacattgtatgccccgaatgcctcttataggtttaaaaagcgcaaggaa

SEQ ID NO: 235587 - DNA, 358 bp, Glycine max
ttctccaaagccttcacttgttcacacttagtcgacgctctttctcagattgatgccccggctcttcaacacacccttcctcgtcgagcccgtccaacattgatcggaactccctgccatacatgtggtggctgttcctcggactatgttcctctataccaatgcatattatatcagacatcattcttattatcataaccaacataaaacatggatcttggatctgtgtctgaattttaccaaacaaaaacccatatttataaagcgtgaacgaagtaagtaagcaccttgtgatgatgatggagacaatgtcatgacggcagtggaagattctgagctgctaagtctcttcatgact

SEQ ID NO: 235588 - DNA, 406 bp, Glycine max
agcttatgttgcaaacatttataatatatcccctcagcagcaaaaccaacaacagcagagtaattatgatctttcaagcaacagatacaatccaggttggaggaatcatccaaatctgagatgggcaagtcctccacaacaacaatagcctgtccctcctttctagaatgttgctggtccaagcaagccatatgttcctcctccaatgcagcagcagcaatagcaacaacaaagataacaagcaactgaggctcctcctcaaccttccttagaagagttagtgaggcaaatgaccatccagaatatgcaatttcagcaagagacaagagcattcattcagagtctgacaaatcagatggggcagatggctactcagttgaaccaagctcagtcccaaaattctgac

SEQ ID NO: 235589 - DNA, 420 bp, Glycine max
  unsure (1)..(420): unsure at all n locations
tgtcattngagagttaagaccaatgtgattnttaactgcaatttaatcattaaattgattgtgttttctataagcatttaatgtacttctttcatcattgataattgatagtggcttccctcttaattagcaaaactgcaaaagcttaaattagttgatatgtttagttatttaagatttatatgaatgccattatgtctatcttatgaacatgtaattatgtacttgtatgcaacttcaaaggatctactaatctcttaatgcaagaattgataattaagtctctctatttaatgcatatataaatatgcaatttttataataatattaccatcatggaaacttacagtaggatattcactgtccattttcatggttgctaacttttgtatctgctcaaaggtcgagaacctaactttc

SEQ ID NO: 235590 - DNA, 378 bp, Glycine max
  unsure (1)..(378): unsure at all n locations
cactanaaaatactcacgcttactgataanggcaatgtatgatgaatttanacccttattaaaagcagcantcacatgaaatgctgcataaaaaccttataaactcatgtttcagatcctctccaaaatgcttaataaatctgaaattaaacccatctggacctgcgctcttgtcactaccacaagcccacattgcataagatatntcctcctctttaaaaggctcaaccatcatctctctctgatttgaagtcaggacattaaaagagacccatctagattaggtctgagcagattaggttcagaaaatctgctctaaaaatgcggctcataaaatctgctctgaaaatgctgcagaatttcagccttaatcagatt

SEQ ID NO: 235591 - DNA, 431 bp, Glycine max
  unsure (1)..(431): unsure at all n locations
gctagcctatattttagcatgacatccattcaatcattatcttgtctccattcaaacactgcatatgaatttgcctaatgattttcagcccaattcaatcatgtccaacttccttatctttntataaatcttaacatgctagtttcaaattagagttatatatgtatatttcactgaatgatcagtaaaattataagctgcactgtgtcgtacttcttaacctgtattgtcctttgagactatctgataattaagtgtgtatctttagctcatattttgacccgaaaattatatcaagagggagttggaggctaccataagtgtcattcctgtgcagtagtgttatccacaaatcaaccttgaatgctttggcctcaatcgcttgcgtttaatatatatatggacgatattcaatgcttgatactgattca

SEQ ID NO: 235592 - DNA, 382 bp, Glycine max
ttaatcaataaagacatattgagttctattcaaaaaattagagggtatctcttttatcttagtgagagcgattctcctaaattcttgagtgattcaagaacaccctggctgtatcaaaggactttcacaacttttgtgtgttgccctcgctggaaagaatgattacttccttcctttcatcttcacccttgttttttcaaaccacaatttcagaaaaatcaccacctctgcccagaattatcttgtggccataactcccattttacgcactctaattaaaagattcttgagcctcaattgaatatcaaaacaagacctttcacctcgttttgaatcacctcatttggagacctgcagcttcagttattggcctttctatatt

SEQ ID NO: 235593 - DNA, 423 bp, Glycine max
  unsure (1)..(423): unsure at all n locations
acactantattttttctgtttcagaattgttctttatgttgcagtattgatatagtcagcgctacaacttttgttccttttatttctagatatatgtctggcttactattgtcaagggttttggtcagtaatttacttcactcccccctcccccaatgcatactttcttctttacagatttaatgcctacttacttgcaagattcctccttagcctttgttattctttttcaacactactaagctcttcccttccattgaatatctaggttgggataggcaaaggtgtttcaccatctgctgctactgatctcattgccaggcatgtaaacatccaaatatgttgccttcaacctgaatttctggtgggttggttcttacttatcttttgcttacttttctaaacagggaaactctggatttt

SEQ ID NO: 235594 - DNA, 239 bp, Glycine max
tgtgggcttcagtgaaccttgagaagagatccttgtgtgggagattctcaatacctggtacttataagaaaatccacccttaagttcagagttgagctaacttataaaaaaactggtctaaaaattagatgactgcaaagttgaacacagtatgatctccatcgaggatatcatgatttgacctaccccacaatggttttaagaaacagattgagagtgtagcagcttgcaaaatcctt

SEQ ID NO: 235595 - DNA, 379 bp, Glycine max
  unsure (1)..(379): unsure at all n locations
aatatattgatatatcatatacccataatatttatttatttatttctaatattaattataaatttaaaatattaatataattagatcgcgtgtattggtttatattctagaagcttacgcaataattaaaagtgaaatggaatggttttaagacttaattatgggtgtatttaattagaatttcaaatgattntaaaagactttcttaatcacgaatttatataaaaaagtcttgtggtattcaatcatgatttttatataagataaataagtattctgctattcaattaagacatttgagattttttaaggaagaacacaaaatccngttgtattaatccggattttttataacttataaaagtcttttggtataaaa

SEQ ID NO: 235596 - DNA, 463 bp, Glycine max
  unsure (1)..(463): unsure at all n locations
ccgaagcatgcaagcttcttcacatagttcgcctttgctttatcttctntatgcttaaaaacagaaacattaggcataggcaaaagatcaagaggagttagtgggttaaaaccataaacaacttcaaaaggagaacaattagtggtgctatgaacagctctattgtaagcaaattcaacatggggtaaacaagctccccaagtttttaagttcttcctcaaaactgtcctaagcaaagttcccaaagtcctattaacaacttccgtttgcccatcggtttgtgggtgacaagtggttgaaaataacaatttagtgcccaacttgctccacanagtcctccaaaaatggcttaggaacttagagtccctatcactaacaatgctccttggcaaaccatggagtctcacaatctcctttgaaaacaaatcagccacatgggaagcatcatcaactcttttacatg

SEQ ID NO: 235597 - DNA, 72 bp, Glycine max
aacaagccatgaacgacctcagaacacaaaaatgatgagcggggcaaattaactgataacgattaaaataag

SEQ ID NO: 235598 - DNA, 408 bp, Glycine max
  unsure (1)..(408): unsure at all n locations
agctggcatcccggtttgatatnngatatttatacgccataaaccgcaaatggcactgggaattacgtacctactagcccttgaaccacatatggtacttggccatgttcacttccaccattagaagtatatagtctgtgagtctgttcaagaatcttaggtaagcaattctccatggttgccaaagtagtattggccctaataagccccaaaagcctgcgaagaatcctaggcccaagctcatatataatgctccatagaatatggaatcttcatcttcaccatcaactgcttctccttcagacgtccctatcggcttatcttcaggacaacttttgttaagttgttgaccacaaagattcgtatttccttcaatactacagccatcatagggttgcaactgtcttc

SEQ ID NO: 235599 - DNA, 367 bp, Glycine max
  unsure (1)..(367): unsure at all n locations
tttttttattcanaagtatacagggctgagaggaatcctaaacgatatatcggaatagaaccaatgaaattatagggagacatatttaaataaatcatattttgcaacctattccacaaccagtctggctctgagtcacgtatcctgttatcaaaaatttcaagccaataccaagaactctgagtcttgacaccactatgaaaagtggggcccaactccgaagaactgagttccaagcgtattaatcggaatggaggaccccactcggaccaatttcaagacaacaatttcctgatcggtcaagttttctatttggaaaatttaatcatggattagagacgtcccctccaagatatccaccaggtga

SEQ ID NO: 235600 - DNA, 358 bp, Glycine max
agcttcaatggctcaatgagcaaggggttattatagtctttcaacaagtaaagatacccttttctataagagactactgtgatgaagttttatgtgatataatccctatggaagtagagcacattttgttgggtagaccgtggcaatttgacaagaaagcaatccacaatggtctcaccaatgaaataaccctcacccatggaagcaaaaagtttaaacttgtttccttgacaccttcacaagtggttgtggatcaagtacgaataaaaatcaaatgggatgaggaaaagaatataaaaataaaagaagaacatcctttaatggttaaaggggagttgaaggaggtaagtgtctcctc

SEQ ID NO: 235601 - DNA, 313 bp, Glycine max
atcctgactcaccataaaccttgatttcttgtgagaatgtcaatccttaccctctgaagcaaaaaagaaaagaaagaaaatttccactcaaagagaaagctcaaagaaaagaaaggaagttcccaatccaaaagtgggagaaagccaaaagaaaagaaaggaaattcccaatccaagaatgggagaaagaaaagaagaagaagaagaagactaagaagaagacgacggaaagaaagctcctgatcaatgatcgaaagaaaaaaagaataaatgtgcagaaaggtctttggaccggacaatatctgaacaatac

SEQ ID NO: 235602 - DNA, 396 bp, Glycine max
  unsure (1)..(396): unsure at all n locations
agctggggcttggtttatacatgattgatacatgatnngggactcgtaggatttgatttgggcaagattggatgaggggaagtgtgattctcgaaatctgcactttgtgcagatttttgctgtgaaattgtgcagcacaattttgcatgagtgcacaaaaatgctcgtgtgtgattggctgcggaaagagtagtgcagaatgagttctggatgtttgctagtagatcccaacggtcacaatgtaggcttatgtactatagacttccagtaaaattttggagtcgatccaacggttaacgaattggatcgaaggaattgttactggggtctttaagtgagaaaagctgtgatttggttggtgttttggcagagtttctcgctttgctctgtcttgct

SEQ ID NO: 235603 - DNA, 333 bp, Glycine max
  unsure (1)..(333): unsure at all n locations
tcttcacatagtccgcctttgcttgaccttctttatgcttaaaaacagaaacattaggcataggcaaaagatcaagaggagttagtggattaaaaccataaacaacttcaaaaggagaacaattagtggtgctatgaacagctctattgtaagcaaattcaacatggggtaaacaagcttcccaagtttttaagttcttcctcaaaactgtcctaagcaaagttcccaaagtcctattaacaacttccgtttgcccatcggtttgtgggtgacaagtggttgaaaataacaatttaatgcccaacttgctccacanagtcctctcaaaatgac

SEQ ID NO: 235604 - DNA, 445 bp, Glycine max
  unsure (1)..(445): unsure at all n locations
agcttctagaggaagcctcttaatgaagcttctagagaaagctacatgaagctgcctcggtaaaaacgcttcctggccttcattaaccgttggatcgtctcgaaatgtggtctgcaacttcacaaaacacgcttccatgatctgaccgttgggatctttgagaagatgtctggagtgtgctagaagcctcttaatgaagcttctggaggaagcctcttaatgaagcttctagagaaaactacatgaagctgcctcggtagaaacgctgcccagccttcgttaagtgttggatcctctcgaaatttggttttcaacttcacaagacactttaccatgatttaaccgttgggatctttgagaanatatctggagtgtgctagaagcttccgttcccgagagcatctcttatntaagcatttcagccttttgctttcttgtagcttag

SEQ ID NO: 235605 - DNA, 346 bp, Glycine max
  unsure (1)..(346): unsure at all n locations
gggcgaaggtgcacaacaagctnttcacatccacaatgcgcgcataaacccaccatcccctggtgcccacctccatctgagctcacgtactcccacgtagcccatatcctcgtttctctcaacaccgggtccccatcaatcctctcaagcttccacaacatgcaagcaaaacaacattcaaacagcacaagctatcacagccaagcaaaacagagcataggcagaaaactctgctcaacacatcaaccaaaatcacagctgttctcacttaaagaccccaatgacaattccttcgatccaattcgttaaccggtggatcgactccaaacatttactggaagtctat

SEQ ID NO: 235606 - DNA, 389 bp, Glycine max
tgcggaacaaagcgccttatgaggtcgctggaaatcacagagaacactgatcccaattgcgggcgccaacagttaaaaccttgtatattaaatacggacttgacactaaaggatgtctcttctcgaaacggttttgtgtgcttaaaacatgtcactgcgaaagcagctacctgacatccttgaacatctgaaagtataacgtggcttaaacgccttgtcttgcaataatgggaaatagaactcgcgtgtcgattcggaatttagattcacatctgtggcttgtatctgactcttatgtaatgcatcgtaccacttccttacgtaaaacgtttgaacattgtacctcacttcgacataaccgttaaacttgagctgcaccatgtatgtga

SEQ ID NO: 235607 - DNA, 301 bp, Glycine max
  unsure (1)..(301): unsure at all n locations
cttaaccataaattaaattcaaaatgactaatgtatgattaattttggggagagaagattctcagaccttaaccataggttgacaattaaaataagagatattagacgattaatcggtaacttagagttcttaattaaaataagaattaaggaaaaatggtacatacgaaatcataatatgagtcacttcttttcatacatatcttttcttcaaattattggttgtttctaattttattttcttgaatgcaaatacaaatcatccccaacttaagataaaaactcaanaatatttatttta

SEQ ID NO: 235608 - DNA, 306 bp, Glycine max
  unsure (1)..(306): unsure at all n locations
tactcagcttatcgacacgttgacagctcgccacctttcgcgacttttgttcatgtacntttcgacactgggagtcgtgtgtttaactacgtttgctatntttgaacgggttcgcaaacatggccaatctcaggtactttcgcgactctgtctcaaatatttttgaacgggtttgcccctacagcatggactaaaagtctaaaaaggggatgctgtaggtttctcttggtgcaggtaccaatctcaagtacaacattgcttctcatttcttgtccatggtatgtttggntgtttaagattttctat

SEQ ID NO: 235609 - DNA, 415 bp, Glycine max
aaaactcagcctaaactataaaaagaaccagtttatgcattgcaatgatattatatatgaaattacccgggattatgggttttcactttcattatacaaatgtttggttccgaattggatcatatgcctcattagatcctacagcaaactcctcatactgtttgtaccacaactggtatgcccccgtcacatacaatataattatacacatcacgcttgttcacactatttatgcattcagtgcaaaaccgctgcccatgttttcatctaagattactcttgtataatatatggatatggatgtatctgcaaccggaaccaagtgttctccaagttccaacaagcctagaaaatgctttctggagtacatctcactaacactctgtgtttagttaacacgcttggcgatcatttc

SEQ ID NO: 235610 - DNA, 405 bp, Glycine max
  unsure (1)..(405): unsure at all n locations
gagctggtgcttatgttgaaggtatcatctcacccatgcaagctagttgcttaaggctgaaaaaatttcatggcccacgcgaacgagatgctagcctgggcgagtttaggtctagaaaattctatgatatgaccattttacccctttccttatggctttttgtttttggatctgacaatcaactaccaaaccctgagtgaccctttggacttgtgctgcaactggtgccaaacacctaaattcaattagcaatgatcaaaacatcatatctgaatgataaaagtattatacccagatgaaattanggtctgacaatgccaaatcaaacaacatttatacatctcttgtcttttcttctctttccttaagggngntcagggtacaagtcaccacaaaccccgaatt

SEQ ID NO: 235611 - DNA, 415 bp, Glycine max
tgagagaacttccttgagaagctagagcttatctactcacacccctctaataactaagctcacctccttgagaagcttccttgaaaagaatcctaaagaagctagagcttagctacacacacctcgctaacaggtaagctcacctccttgagatgagaagctagaacttagctacacaccccctataatagctaagctcacccccatgacaaaatacatgaaaatacaaaaaaagtcccaactacaaagactactcaaaatgcctcgaaatacaagggtaaaaccctatactactagaatggccaaaatacaaggcctatacgaaggaaaaaacctattctaatatttacaaagataagcgggctcatacttagcccatgggctcaaaatataccctaaggctcatgagaaccct

SEQ ID NO: 235612 - DNA, 251 bp, Glycine max
  unsure (1)..(251): unsure at all n locations
cggacatgctanttggtttgcatgtgaggtctaacatgtcaggtgagggaagcctgtatatctgacctctgtcttttctacagtggagaatgcttgaaacaacttatgttgctgtaatgcattgcgtgaggcaccgggacttgccctgtatccgagggcaccacaaactgtggggaagagtgttggctcttgcatacacgcctccatatactcttcctcagttagcgcctacaccagaggcgtctcccagg

SEQ ID NO: 235613 - DNA, 365 bp, Glycine max
ggtaatcgattaccatatatgtgtaatcgattacacagtgcaaattttgaaatacaaattcaatagctgtggtaaaacaaatttggccactggtaatcgattacatcctctagtaatcgattaccagagagtatatttgttgaaaaagacttattaacttacattgcttgggcaaacactttggtacttcaattggaattcccttcctatttaatataccctttctaagactctagagactgtcttgatcatccatcttgaatatctttaatttctttgtcttgaataaagctttgagatgcatgtgaacctctggcataacaaaacattcagcttgatccttggtctacaatctcccccttttt

SEQ ID NO: 235614 - DNA, 300 bp, Glycine max
ctggactaattcatttgcttccaaagtttcatggccttgcaggtgaagacccgcacaaacatttgaaggaatttcatattgtctgctccaccatgaaacccccagatgtccaagaggatcacatatctctgaaggcttttcctcattcattagagggagaggcaaaaggactggctgtattaccttgctccaaggtccatcacgagctgggatgaccttaagagagtattcttagaaaaaattttccctgcttccaggaccacagccatcatgaaggatatctcaggtattagacaactc

SEQ ID NO: 235615 - DNA, 437 bp, Glycine max
  unsure (1)..(437): unsure at all n locations
agcttgagctcactgttgctaccccacttttgcttcacggaattttcacggccatgctcttccttgcgagccctcttggtttcttgtcaagggcttttgcggtagctgcattttcttctcgtaacccggcgcactctttccggacgtctgtagcgaccaacttgaatntttctttggcaagtctcgcttttcctagtttggttttcagagctcggacttcttcatcctctttcggagtatcgaagttctcttcgttgataatctttaacttggcgagccaatctaaacctcgtgtacgaactttcaaccattcatgataaccaccaatgattccattacgaacgcccctaagttctttatctttccttaacgggctctcccacgccttatggactctntgtantaaccttgaaatttgcacgccaaaatctctcaca

SEQ ID NO: 235616 - DNA, 385 bp, Glycine max
tccttgagaagattcctaaagaagctagagcttatttacacacaccccctataatagctaagctcacccccatgccaaaatacatgaaaatataaaaaaaaagtccttattacaaagactactcaaaatgccctgaaatacaaggctaaaaccccatactactagaatggccaaaatacaaggcccaaaagaaggaaaaaccaattctaacatttacaaagaagaatggatccaaccttgacccatgggctcaaaaatctaccctaaggttcacgagaaccctagggccttctttagtagctctaacctaagcctcttggagtcttctatccaatacccttggggggtaggaatgcatcactaacagtcaccaatgatgtttatg

SEQ ID NO: 235617 - DNA, 393 bp, Glycine max
  unsure (1)..(393): unsure at all n locations
agctntagcatggcctccgtgatagaagccatttgatcttttaaggccgataggtcggccttcatctgttcttgcactccctcttcgttatccatcttacttctagatcgagtgttataggggtgcctttgcgcttttttagttatggtgagttccctaaagaaacaaacagtggtgagtatgccaccaaaacatgaatatgctaatgaatgatcaaagcacttggatccacctcaaggcctttttagacaacgtgatgagtttcagaacttctctttttataaaaaggaacaaaagcttttatctagccaagatcatacaaagtgttacaacagaagctaacggtttctaattatatgggccattaaatctatcatgtgttgacagtaacta

SEQ ID NO: 235618 - DNA, 413 bp, Glycine max
  unsure (1)..(413): unsure at all n locations
tcagaccaaagcaacacanaaatctaggtgtcccaaacccttcaatttaatggattttcaaggcttgataagtgaaattgagaatgaggtaaatttggagcaaactctcacttcacacaagtctatatcatcaatctaaacttgctcaaactggttttacgacgaaaattctaccgaatcaaaatttgacttctcaacacccaattttaccctagaaatggctcttgccctcactctggtcatttgtttttctctctagtacagcccaagctttctcataagtcctaaatgacatttcaagctaggattaacccactttaacctctatttaccactgaatccagatttagcctttcaactctcaaatactcactctnntttcactcataacaccatgttctcaccttctaact

SEQ ID NO: 235619 - DNA, 369 bp, Glycine max
  unsure (1)..(369): unsure at all n locations
agcttagaattgcatttgggcacccatttcgaatcctctatgctgtccctatgtatataaaacagtcccacaatcccaatcttacaaaaccatattcatatgtcattgaggcatttcaccgagcacttggtgggtgcatgtttaggcatgaatagcaagagaatgggggcaatgtggcatgccccattgcttcagaatacaacataggcctaaggccatcccctacaacccctcaactcaaaccaatcaagcatgaaaacaatccaaaactgccccacaaattcgagcacattctcacaatttagagcaccanaagatgaacaagatgcaccaatggaaagctaaaaaactcaaggattaaatacttac

SEQ ID NO: 235620 - DNA, 381 bp, Glycine max
  unsure (1)..(381): unsure at all n locations
tgtgattagagagagcttagcctcttctttggtttttgactgaaaaccaaattgattcttatcaaggaagctattcctttgtggtgaatcctcctttggcttattgattctccgtggaccgcgacatcattctattcatcttcttcatcttatccatctttttctatttttctattcttgggttctttgaaggtcaacaatgttgttcttgaatttgcatccgaaatgatccaaatcaaaggtccatggcttggattgcattacatttcaagtcccgctagttatcggagagttgcatctccacttaaatgaggtgtgcattaagttttggccaccaccatcttttgagttttgcttcatcttttatanatctcctgcatc

SEQ ID NO: 235621 - DNA, 433 bp, Glycine max
  unsure (1)..(433): unsure at all n locations
gaccttgagtcacctgcaggctgcaagtctttaaaacattgatttcgtaagaggtatacctangctgtcatacaaagatgatttagtctgtgaagcatgtcaaaaggggaaactgattaaaatctctttttctagcaaaaactttgttttcacctcaagacaacttgaactattacatattaatttgttttatccaactagaacaacccttgtcaggggaaaatatatggtttggtagtagtggacaactactcatagaacgcctatacaaaatggtgtggttgagagaaataatatcattgcaagaaatgattagaaccatgctcaatgataagtctacacctaaacacttatgggctgaagcaatgaatatagcctgttantacaaaacataatttacataagacctattttgaaaggactcttatgaact

SEQ ID NO: 235622 - DNA, 373 bp, Glycine max
  unsure (1)..(373): unsure at all n locations
actcagcttataccaggagcgaagaacatgtttattcatgtagccattggncagaaacttgtgttgtacaaccatggccttatcatgtcctcatttatacatttcattctaaaattcagagattcatgcaaagattattactcacaactagtcgttcactcatagtttaaggtcacactcttaccggtttttggttcaagcttttcttttcacaatcaattgtctactgactaacaattctaattgcaagatcacattcttgttctttctttgttcgacatgcacattngctcaaattcatgaaagcaaacacaaatttcatcaaaatcatgcattcaatttaaaacaaagtcatacacccatttttcacaaa

SEQ ID NO: 235623 - DNA, 386 bp, Glycine max
catgtttggcatgccacaaatactatttcgagggaagctgactatgtaggtctgatgaactactttggagaggaaagcggaagctcaccaaaggatatttagtcatggttcaaggaaagaaggatagatcatttttcgtgatgcaagctatgctctgcaaaggagaggtaaacataaccactgttgatatggaagtatggcataaacgacctgtgcatatcagtgagaagggtcttcacttgctagcttagaaacatcccatccttaacgtgaaaggtaagccactcgatccttgttctcactgttaactggaaaacaacaagttgtttaaaagatctcttcgccacaagagaagacatcttgaccttgaacactgtatatgtcaa

SEQ ID NO: 235624 - DNA, 355 bp, Glycine max
tcaatcacaccattgaacgaatgtacatcccggtttttttcagactcattcatcctggataaaattgcttctgcttctttgtacagacccccccttgcaaatgcatgaattaacgaattgtaggtctcaacaattggggtgcttccaacttcattcataatgttaaacatgacaagagcctctttatacaaagcagcctgcccaaacgcttcaatcaccccagtataagccttggaactcggcactactcctttctcattcatatgcagtaaaatattcttggcatcttcatagagccctcccttcccacaggcaaatatcaagccctcataaatctgcatgttcgggtcaacat

SEQ ID NO: 235625 - DNA, 367 bp, Glycine max
aaatctgcacctgttgcaagagtctgtggtctatgttcttttgcagatcaccatacagatctctgtccttctttgcagcaatttggagtcaatgagcaacctgaagcttatgctgcaaacatttataatagacctcctcagcaacaaaaccaacaacaacagaataattatgacctttcagcaatagatacaatccatgttggaggagtcatccaaatctgagatggacaagtccttcaacacaacaacaacaggctgtgcctccttttcagactgttgctggtctaaacaagccatatgttcctcctcaatacaacagcagtcaccacaaagaacacaagcgactgagggcccttctcaacctttc

SEQ ID NO: 235626 - DNA, 362 bp, Glycine max
  unsure (1)..(362): unsure at all n locations
gagagctanatagtggtttgactttgaaagttgacaatggaaataaactaaaggcccgtttgttacaattatttttttccataaaaagaataattnttcgtaaaatgatcactgaattattttttggaaatgcgattaaagttgcattgcagaaatctgcttgaacccgaccaattcatactacaggaactaccttctacaaaatacccaatgaaaatgtgattatgttgcccaaaggaatcatgtttctaatatattagaagattaaaatccaataaacaacagaaattgaatttgttgaacaacggaattatgttttgattgtgtatttagattgcatcccacattcacacgggagacat

SEQ ID NO: 235627 - DNA, 367 bp, Glycine max
gcattacttgcggcttgcctataattaaatcaaatgacatgtattaatatgcctggcccaaccaactgtcttagattttgtgcatatgacatactgtgttcttgctgtcattccacatattacaacagtttactagaacatatcattgacattaatggccagagcaaaaaatgcacatgcttttatataaaagtgtccccctcctacctctctcttttagtaaaagagagttatatccaatatttgtgaattcaagtcgtgaatactaaccgatcatatgccctactcaattatactactttacaagctgatcacagtcattagcagcatgcgcgaataatgggaagatattaaatcaattgtatct

SEQ ID NO: 235628 - DNA, 334 bp, Glycine max
  unsure (1)..(334): unsure at all n locations
actgatgggtaccatgatgtgtttgctggggttggacccatgcgggcgttgaagagacggcatgggcatctccttccttcctttntgcccctgttgccccgattcttttggcgttcacgtttgtggaggaaacgtaatcaaacttttctctcttcaatcccacctcgattctttccccggcaaacaccaaatccgcaaaactggacggcatgtaacccactagcttctcatagtagaacactggcagagtgtctaccatcatggtgatcatctctctctcaaccatgggaggggctacttgtgccgccaaatccctccatcgctgcgcatattc

SEQ ID NO: 235629 - DNA, 444 bp, Glycine max
  unsure (1)..(444): unsure at all n locations
agcttatntctgacataattgtagcacttttccatagctnttcagggactactcatatactccattcagagttctatagtattgtacaaatcctacacaaggcaaatagatcaagtaagcacaaaatccgaaaataagaaacaattattaattagccccaattattttcctaagaccaaaactgagttaaggtgagaaaataagagtcagaaagaggtcaaataagctaagaataatagaaaactactaaattaaaaatgctcaatcacagattgacatcaaataccacttgattctactaagaagatgattgaggtcctgaaagttgatagaggaagaatccaattaatatgttcataaagcttgttccaagaagcaagttcatgcactgtcacatagattgctgaagatgaacttaattacttggaattcataaatggtatt

SEQ ID NO: 235630 - DNA, 421 bp, Glycine max
  unsure (1)..(421): unsure at all n locations
tgtgcaaatcanatcattcctacgtttcatctctagtatgcatttttttctttacccactcctcacatttggttttttagggaaaaacaccataactaaacccgccacaaggcatccctatcgcaccagatccaaatctagaacgatgggtgatcaagaggagacacaggaacagatgaaagccgacatgtcggctctgaaagaacaaatggcctccatgatggaggccatgttaagtatgaagcagctcgtagagaagaacgcggccaccgctgctgctgtcaattcggctgccgaagcagacccgactctcttggcaactgcgcaccatcctccctcaaacatagtangacggggaaggggcacattgggtcacgatggcagccctcacctgngatacaaccgagcggcttacccttat

SEQ ID NO: 235631 - DNA, 409 bp, Glycine max
  unsure (1)..(409): unsure at all n locations
agcttctaacatggtcgggttaggaaggatattctgggttntcacggatgcaaagcttaagttttaggaaagcattaacttattccttgtttccttgctaacatgatttccttactacgtccctattttctttgattaccctactaacaccacacaatattctattggacataattgcttcaggtttctatttctcattcagtgggttntttttttcaaataatgacaatggcattgtgccactttttgcagtttacattaactgtgtgatgttgttacgatccctgcacataaatagttacaagcactcccccaaatttgaatcaaatatctcttctatgacaatgttctcttacaacctaagacaaggtgtgccagacaatcatttcatttagttagggttcaaaaa

SEQ ID NO: 235632 - DNA, 352 bp, Glycine max
  unsure (1)..(352): unsure at all n locations
tgcccagtgagcaagttgaatatcataatacagacctaatatgcacaactcctcatatgcagcccacattagaggatccattgagagtgcctgcttaaaattatgtatggcacttttccttctgtcagtgtatctgaaaaagagaataacagccaaagaaatntagaaaggtggatttatcaaatgtggcaagctagcatgacatacacacatacatacatacatatgtgtacacacacacatacacaaatatatggaattgactccagttacagcatccaatgtctttctatgaaatgtatttttcattgattcaattgttgaattacaactatctatcattttttttcat

SEQ ID NO: 235633 - DNA, 335 bp, Glycine max
  unsure (1)..(335): unsure at all n locations
agctngataacacgcatagactaacgtttacttttgcgaccttcgtcaatcgcggccgacaagcccgttgacacgtggtgatttacgtcatcttccgcgctcacaagatctgtcatactaacttttgagtcacgctgacgagcggaaatacccgagtggttatccgtataaactttttgcattctgtaagatgaaaagcctgatagcacgcagagactaacgtcgtcttctgcgcccttcgtcaatcgcgatcgacaagcccgttggcacgcggagattgacgtcatcttccgcgctcacaagatctgtcatactgactnttgagtcacgctgac

SEQ ID NO: 235634 - DNA, 329 bp, Glycine max
  unsure (1)..(329): unsure at all n locations
gacctatgacactcagcttatacggataccactcggtatttgccccgtcttctgactcaaaagtcagatgacagatcttgtgagcgcggaatatgacgtaaatctccgcgtgtcaacgggtttgtcagccgcgatggacgaagggcgcagaagacgacattagtctttgcgtgttatcaggcttttcgtcttacagacagcaaaaagtttatacggataaccactcgggtatttccgcccgtcagcgtgactcanaagtcagtatgacagatcttgtgagcgcggaagatgacgtaaatctccgcgtgtcaacgggcttgtcagccgcg

SEQ ID NO: 235635 - DNA, 284 bp, Glycine max
gatggggaaaaataagagctttgcacttccttcacttgtctcacaactagaaaaacattcttaatattggaaaaatcttcttggggacaggagataatatcaagatatattatattagtagaggataattcttctcatattaattaattattcaaattgagttaaatctaaattcatatttaaatatatggtagagattttctaaactatttaatgattatcaccatattacttgatgtttattgctttaaagagaatgaatatactttatttttaactaatgc

SEQ ID NO: 235636 - DNA, 207 bp, Glycine max
aagataatacgcatatgaatttcaatatcaagatgtgtgtctagttgaaactccttctttttgtactccgataacaaaactcctctggacttaactattataaccgaagatccctcgtttactcaatgataggattacataagtaagtcttctcacgagagtgacatcctcactataatagaatgggaatgacatactatttggagt

SEQ ID NO: 235637 - DNA, 435 bp, Glycine max
  unsure (1)..(435): unsure at all n locations
agtcttatggagaatcaaaggtgattcataggtgttttgatgataacaatgatgataacaaaagatgatgataaaggtgatgacaaaaaactcaaagatcaatcaaagaacaactcatgtgaatcaagaacaattcaagagttcaatataagaatcaagaagaaagtttagagtcaagaatcaagattcaaggttcaagatctcaagaatcaatatcaagattcaagactcaagattcaagaatcaagagaaggcttaatcaagataagtatgaaaaggtttttctcanaaattgaatagcacatggtttttctcanaacatgtttaccaaagagtttttactctctggtaattgattaccatattgttgtaatcgattaccagtagcaaaatggagttgaaaaagttttcaattgaattacaacgtttcaatta

SEQ ID NO: 235638 - DNA, 359 bp, Glycine max
  unsure (1)..(359): unsure at all n locations
nttaccaaagaatttttactctctggtaatcgattaccatttactgtaatcgattaccagtgtggttgaacgttgaaattcaaattcaaatgtgaagagtcacatcctttcacaaaaatgctttgtgtaatcgattacaatgatttggtaatcgattaccagtgataagttttgaataaaaaacaaaagatgtaactcttccagtggttttcaagttgttctaaaagttataactcttctaatggttttcttgaccagacatgaagagtctataaatgcaagaccttaacttgcattttacatacattgaatacattgatttcaatcctttacaacccttgagtctctttgaacatctt

SEQ ID NO: 235639 - DNA, 346 bp, Glycine max
tgcagcttttggacaaaacatggacaactatttattttaaaagcgtatctagtcaagggctgagagaccatacaagtttcctagcgatttctaattatgtgggtcattaagtctatcatatgttgacaatagccgagaagcccatgaatttcttcgggggcggagtaggtgtccgccatcgccttggccttggctaacaatcggggaagttcttgactcttgttcaaggtaagagcaaaccgatccatccacatggttgcctcttggtgtaaagagtcgatcacccttcctctagcctctttttccgcgtatacttgggcatactcgtctgcgaccctatgctcgt

SEQ ID NO: 235640 - DNA, 316 bp, Glycine max
  unsure (1)..(316): unsure at all n locations
tggcttaatgaagatgaaaagaataaagtgactcaccaggttgaggtgtgtctcacccttggaagatacaatgatagggtgctgtgtgatgtggttccaatggaggtgactcatatactgttaggaagaccatgatagtatgacaccaaagcaatgcatgatgacttcaccaacaagatttcttttcagcaccatgaccagaaaattatttttaattgaaagaaaagagtgaaacaccctagaggaatacgaaaaagaagagtgatacacatganggaaagagtgatacacatgagagaaaaagtgatacacatga

SEQ ID NO: 235641 - DNA, 356 bp, Glycine max
  unsure (1)..(356): unsure at all n locations
cctaaatattaagaaataaatatgctattttgcctcaacaacttgattctcgctcccacatatcttttcatgtaatgaagaactcaagattaattccttaaaaaatgttggtgttctagttaattctaataagcgctactattattatgatgaaaatatgaaaaggccggattcaagatttgttttttttttttgaaagggtgggcacaagatctttgcaataatcaaataggaggtggattcgaatggatatcatatcaccaaacattttatcatttattaattatttttggaatcacttttagagatacggccncacaatcataataaaaaataagtttattcaaataggtatc

SEQ ID NO: 235642 - DNA, 146 bp, Glycine max
gtatgcctagacctatgatttggtattatggacatgcgaagtgggaatgaaaaggcaaattgaaatgtgaaatttttgtctaggttggtttcttggacgctgtatggaaaacctgcttgccaaacatggtttaatacaacactttt

SEQ ID NO: 235643 - DNA, 372 bp, Glycine max
tattcctcactgcgaatctccaatagtaaagaatctttgttacataagctctgaagagggtctaataaatacaacagcaaggtccttaaaatcggtccttcattcatgtctaacatgcaagagtaccaaaaagtccgttcctgcaatggctaattagctagtatgtatatctgatgcacttatttaatatttctagcggtgactacataaaattggccaaaactagtcaccactcataacaagaatagaaaacattggggtttatcagtcccgaacattctgatgtactggatatcacactcggacagatgcttggagaaatttcggtctaaaacaaaccctaatgtgtaaacgctagatttgacctactta

SEQ ID NO: 235644 - DNA, 259 bp, Glycine max
gaattaatgctctttctccgatacggaacctattctagttggggttgctgagcttcggtcactatcatcattaataaccttaattaatttggaggtacctcttcttacaattttttatgtatttctcaagtttgggactttctggatgactttaaataactatcatgcttgttaatattcactattattgcacctactctcttagtgagacttgttttctaagttctaatttatgttactttgtcgtatttgaaggctg

SEQ ID NO: 235645 - DNA, 364 bp, Glycine max
ttaccggagaagaagagagcgcgagagaattttctgttgaagaagagagcgcgagcaaaataggctgtgcccaatataatctaaaactgtatttcaacatcagttttcaataaaaaaaaaaaccgatgttaacaaattgatgttaacgttaacattggttttattcaaaaaaaccgatgttaactgatcataagttaacatcggttttctgaaaactgatgttaacaaagtgacattaacatcagttttcacagaaccaatgttaacgtcacttcgttaacatcggttttctacaaaatcgatgttaacagatacacattatttacaattatgccaccatatttatgttaacatctgttaatct

SEQ ID NO: 235646 - DNA, 339 bp, Glycine max
aagtagcactcttcttatacaaattcgagaaatttacttagccaatatgctcaacataaaacattaacaccttttatactcatatttatctagggcgaagtcagatatatgctgctcaactattaaatctcggtcaacaaaactcccaagacctaacacaataacaatcctaacattctcacagacaattcatcatcaatcgcctgtgacaatcagaaccaattttctctatccaagatccgcaatcacacatttttaagacatctggttaatcaattacttacattaccctagcctgcagattgaaacctggcgagcaatctaaccataaatacgcat

SEQ ID NO: 235647 - DNA, 359 bp, Glycine max
  unsure (1)..(359): unsure at all n locations
cttactatgcattgttaaccaatttaattccttcatctgacttagcatcaaattntcctaagttttcttttccattgtttaatacaaagcatttgccaccaaaaacatgttgatgtgagatgtttggttttctaccattgaacaattcatatggagttttcttcaagataggtctgattacagccctattcatgatataacatgcagtattaacggcttcagcccaaaaatattttggaagaggggtatcattcaataaggttctagcaatttcttccaaagacctatttttcctttcaacaactccattttgttgaggggttctaggtgcagaaaaattatgttcaatgccattcttt

SEQ ID NO: 235648 - DNA, 383 bp, Glycine max
  unsure (1)..(383): unsure at all n locations
tagtgcgcacttacacgctaagcacgtaagtgttctcttatatgntngnnattttgngntgggctaagcgccaattgcacgctaaacctaataagcttactgttcttttttgttgtcaattgggctacattttggttaacttttatagttaacacattttgaagcatgttttggttgaattgattgcatgaccgagacattgtgtactggttattaatgttgtgaaatttctgatttttgagtgagcacgcgttgttgttgggtgatggttttgtgaattaaatgcgtgtgagtgagttggttagcttgcatgacaggaaattgtggatgaaaaactaaatgctttacattaccgtgtgagttgtgtgcaccttaatggcatg

SEQ ID NO: 235649 - DNA, 388 bp, Glycine max
  unsure (1)..(388): unsure at all n locations
catgcaagctgggactaacttattttatacaggtttttntagagacatgaatggaataagattggaatttcaaatgcttggaagcattcaaaattctcatttgagaagaactccatatctatgaattttgggtctacaatggaacgagaggaaaagaggtttgtgtaccatatacgctgttcctcttatgagaataatgacccacagggattggagggaggaattggagcttcctatgacccagaatgccgatgactccgactcgaagttcctttccgccatttgaagagttttttcgggatttcaatcggttcaaatgaaagagattgaagaaagatgaagtttgggctttgcggggagtgatttggacaagaattgagtgagatat

SEQ ID NO: 235650 - DNA, 241 bp, Glycine max
  unsure (1)..(241): unsure at all n locations
tcactatcttnaggatcaagtgaacaaagagaaactaaaagtggagtactgctgcacattngatcaacttgctaatattttaaccaaacccctcaaaggggagaagtttaaaatgttaagggatagaattggcttgatgaacttaggagatcagaattaagggagggtgtgaaagcttaattctgtttttgagtggtgtagatttaattgtacattggatataagagagtaacagaatttt

SEQ ID NO: 235651 - DNA, 373 bp, Glycine max
gaccattccagtctaacttggattatctggggtctatattgtcatttaggaatatgctcttgggtgttcagtactttaaaaccacatctctttgtgctttctatatatacagtcgttggcgctctgaaaccttatcaataatacaatatccctttgaattgattacatttatttatttttatacatgtttgattgattttacgaaggctaattgaaaatgggatttggaaaatgaaagatacggaaaagatatatggccatatatgaaatttctcctttagctgaaatcccaaatgtaacatgtacgatagtattcactaaccaagaatcctctgtcactattaagctaatcttgagtgccttatactttaca

SEQ ID NO: 235652 - DNA, 443 bp, Glycine max
  unsure (1)..(443): unsure at all n locations
agctggtnggattatgtgtgtcccgccatatgtggnactagggggcgatcggccgatggcgcaaatcaactctcccaccatccccagttgcccaccttcaactcagctcacgtactcccacatagcccttatcctcgttcctttcaacaccgggtccccatcaacccctccaagcttccacaatatccaagcaattcaatttccaaacatcatgaactaccctaaaccaagaaaacagggcagaggcagaaaactctgcccaaaacacattcacatattacaactttccttactcaaataccccagtaacattctcttcattccgatttgataaccgttggatcgacttgaaacttttactggatgttcctagtacataaatatacantttgaccggtgggatctgctagaaaatgtccaaaacccaatatgtactacctttt

SEQ ID NO: 235653 - DNA, 373 bp, Glycine max
  unsure (1)..(373): unsure at all n locations
nngaaacttgngctattcatcgtttcattctcttcttccttngccaaaaagaattctccaaggactaaccgcctgaattctttntgtatctctcttctcccttttccaaaagaacaaaagactaaccgcctgaattcttttgtgtctcccttctcccttgtcaaagaattcaaaatgacacagtctaagaattcttttgatacttcccattcccttatacaaaagtgttcaaaggactaaccgcctgagaattcttttgtatccctattcacaaagtatcaaaggtttaacagcctgagatatttgtcttaacacattggagggtacgttctttatggtacaaagaatgggtacatctactctggtttgactg

SEQ ID NO: 235654 - DNA, 365 bp, Glycine max
agcttattaaaaggtgtctagcagtatttcccagtcaaatgaaaccagacagccaaagagatcaattctggtggttaagaattcacaatattatccagtacatgttacaaatatggatatgccttgatcaacatctttcgaagtatacagtacaatgggataagtcagtactcaaaatgcctcgaaatacaaggctaaaaccctatactactagaatggccaaaatacaaggcccacacgaaggataaacttattctaatatttacaaagaagagtggatccaaccttgacccatgggctcataaatctattctaagtgtcatgaaacacctaaggccttatttagtatctctagcccaagcctt

SEQ ID NO: 235655 - DNA, 351 bp, Glycine max
  unsure (1)..(351): unsure at all n locations
ntagtcaaggaaagtaccccagagatgaccattaatttgatattggaagagcataacaagatattcctaaattggtttaaagatataatcttccgtgaccataatgcatctaaaatattaaggaagtttgcaaatgagcctaaaagagatgttataacttggcaaggatacaatattaacaagtattccttctacacgaaatcacaagacgatgagagtacaatgcacaatagtggtgaagtttaaggggtgaatcttaatacttcgctactgtacatgatgacaatcctcatgtagcttccatgccttactttggagtcattgaagaaatctgagagntaattattgtaa

SEQ ID NO: 235656 - DNA, 295 bp, Glycine max
ctgccaatgtgggggtgagtttttttacggtgtttatttacaaaccgaattctcaccaaggctgtctcaaatacaccttttgagatattcacagggttggaatccaaatttgcaacatataagcgcttggggatgcccgtctgaagtaagaattcatattgcacaagagaagaaattagaccctaagactattattgggtatatcattggatatactgaaagctctaaaggggatagggtctattgtccatcccacaacactacgattggggaatcaaggaatgcgaagtttttt

SEQ ID NO: 235657 - DNA, 293 bp, Glycine max
tattcatcaagaaatgctgtcacaatgttcctgtataatgcatgccagaatttgctgttgctttctaaactgaaaatgataccacttgaaaagaacatagcttgaactactctacaaatattaacactttcttttattgataacacaaaaccttactaagttaattttgtagaattatttaaataagaatattgccgaaatttcatctttttagagaaatatcgagttaaacaaacttgggtgttgcgtctgttataatcttcctagtatctagacttcacccttatcattaa

SEQ ID NO: 235658 - DNA, 228 bp, Glycine max
atattttccgctccgaaacttgataattacatttattacgatttctaccacctatttgaacgcacagaattctgataaaatcgctcaatacaattcgcgtctgtgaaaatacagctttttttaaaaaatataaattaacctgcatgtcatcgtcacatatgttgcattttttaatgtccaatctgtgagagaagaaccccccaaccataaatcaacgaaactctttgc

SEQ ID NO: 235659 - DNA, 446 bp, Glycine max
  unsure (1)..(446): unsure at all n locations
agcttctactttgtgagttatgcagaaaggaagtttgaaaaatcatttattcataagtaagtagtacattcactcttcaacaatcaacatatttagtctcaaatgatcgaatgagtactaatggacaaatgatttggagggactgatcatatggatttgttaaatcaaatttacatgaggtcaattaagcagtgaacttttgttctcttatcatcaaagtatttatgtttcaaatgcgacaaattaagaaagaaacttactagtatgaaacaagatagtatgttaccaaaacatatatataattaagttcagaatacaagttgttgcttataattaatcagtcaaccaacccacatagcctttntaatttgctggtgcacataggaagcttggttgatccctgcaagtgtagttttgtcactgggagacaaatcatgcattcacaa

SEQ ID NO: 235660 - DNA, 327 bp, Glycine max
tgggtatttcaatatctctaagggctaccgtgtctacaacttgcaaactaagaaactcgtcttcagtcgagatgttgaagttgatgaatatgcttcatggaattgggatgaagaaaaagtggagaagaacgttcttatacccgcttaactaccttcagaagaatatgaggaagaagatcctggtgaaccaccttctccttcttccaacttctagatcatgaactattctcgccagagtcttctctcaaacgagttagatctttggtggacatatttgaaacttgtaacttgccatacttggacctcggagctttgaagaacgtcaaa

SEQ ID NO: 235661 - DNA, 384 bp, Glycine max
  unsure (1)..(384): unsure at all n locations
gcttcgccaagtatccctattgaaaaacctttattcaaacctttcaaagntagtgagaaggctaaacgaaaatttaaggaacttagaaaaactagatccttaattgaaggcgtaggtgataaccatagtgaattacttaacaagattggtagtttacttaaggtcattccagatactcctcaagcctcggaaaatacttccaaaatggtaacaagaagtacctccaaattaattaatgttattaatgaagatagtgaccaaaactcagataacacaactgagataggatcagtgtcagaaaagaatataaatcccattaatttcacacactggaagacacccttcaagntatattatcaacgtccaactgcccttgacctacta

SEQ ID NO: 235662 - DNA, 285 bp, Glycine max
attcatctttttcattctcttctccttttgccaaaaagaaatcccccaggactaaccgcctgaattcttttgggtctctcttctcccttttccaaaaaaacaaaggactaactgcctgaattctttcgcgtctcccttctccctcgtcaaagaataaaaatgacattatctgagaattcttttgatcttccccttcccttaaacaaagatttcaaggactaaccgcctgagatatcttttggttcccttccaaagtttcaaggactaccgcctgagaacttgctt

SEQ ID NO: 235663 - DNA, 365 bp, Glycine max
agcctataaaacaagaagaaaggtcagcaacaaacatcttgaaatggtgaaatctaacattttgaagggttgcaatttttactctaatataagttttatctctggctggtcaaacactgagtatttagtatgctattcttcattgtatattctcttattgagagatacttgatttgtaatcattcaaatttgttgtttggaaagccaaaaagtgattgagtgattacatgatacttgtgtgttctttctcaaggtgatattgaaagtatgccaaaaaagacctacatgaatttttagtaagtcaggagtgatatgacataatatctggtttgtatatatattgattagtagagtccttcttggtt

SEQ ID NO: 235664 - DNA, 346 bp, Glycine max
accggatcttatgctaatgttcaatgaccaataatttcaagccatggaaagcctacttcagttcctcctaaatgtgatcttacttgtgcaacagaatttggttagtagcaatagattcttgaactaatatccaattcaattagacttcattacttataatatgaagaataaaatcatggtcaaccactacaagataattcggacccctgatgggttcatcaaatatctaccatatttccatttcaacagcttttgttaaatgggtgtgtacattataagtttatatacaaacaagaaagacaaaaaaattctcaaattaaaatcaaatttcatctccctgactaaa

SEQ ID NO: 235665 - DNA, 188 bp, Glycine max
tcttcacattaaaattgatcctaacatcattaaaagcggaccgtggtcagcttcattgactggcctataagtatcctacaatcctaaattaggttcccataccataggcacatgcatattaattatatgtctggatcatgaattgctctccttctaatgacaaagtatataaccttcttctacaactc

SEQ ID NO: 235666 - DNA, 433 bp, Glycine max
gagcttatctgctttgattgatcttctattgagtcctatgaacaacacaacatgagtttataatccaacgaaggttcttattgtacaatatattaaatcacactgtgaaacacggaggtagttactcataattttgtcttatatttcttgggccatatcgctttgtgcaggtcatctttcacttcacatgtcttgaaacgggtgatggtgggtcgacactcagtgatgaattttcagtaaattctgcttggtattctcgtatctttcttttctcatccattatttgtttttcaatgagatcataacccccacaagacagtaagtgcgggcagtcattgtatatttgaatttcctgtgcctttttcgtatgccttacaaaaaacaatcatttttgacaattaataaagaaataattgatacaataaaatttaat

SEQ ID NO: 235667 - DNA, 306 bp, Glycine max
acagaaagcaatgctagccacccaagaaagagctgtgcatttgactttgaaagtgaaatatcctggcctatagtcatagaagatctggaatgctcaaggcacatgctcatagaagtatgctatttcttctccatgctacttgactcgcaaaatataattaataaaatcatacaaaattgcatttattgaactacttgccacttttgtaatagatgatatgcaacgagcatggactcttcttggagaatgctcaagtgatccggaagctggatgtcatcatcctgaaagggatcttggaaaactgtt

SEQ ID NO: 235668 - DNA, 443 bp, Glycine max
  unsure (1)..(443): unsure at all n locations
ttaagcaccgcggctgcagcttgggaggacacaattanctggtttttatttattcttaggtaacgacaagtttcgtttgattaacaatttttctttaagtttaatacgcagacaaattaatttagttgttcactctttacctagaacgtctagatgttatgctagcccacaagtattttttagcattctttagtttatcaatgttattgttattaatgaaatgagatgatactcgtattcattttaatatgtacaataagtaaaaaatataaaaatactgattcgctttttcagtttatgattctggtaattgaaaacgatctccaaccgttaactttgttagagtgatatttgtaatatnttttaataattcccgtttgatatactttttgctattggacaaaacgcatgtagaatttattaaaaggctcatcatgtatttt

SEQ ID NO: 235669 - DNA, 376 bp, Glycine max
  unsure (1)..(376): unsure at all n locations
taagctggatccatcatacaattgttaactatatcatctatntaaagcctacacaaatgctgagttgcaatcaagttgtaattgcaagttgagagacagactaagtaacaacgagttagtgatatacaaatgctaatatatcaattatggtcaattaattgtctttagtcctttaaaagtgaaaatactataatatagtagatgtatcttgacactcttcgaatccctcgcatatataaaagaaaaaaaatagtagatgtatcctagtttgggttctgtttgacacccacattgaggaaatataagattagtgagtcaataaagcttaaatgtatccatatgtaatatttttgtggggtgcccttanatttataca

SEQ ID NO: 235670 - DNA, 410 bp, Glycine max
tagggttcaattcaatcaatcataaataagctcaacatgggtgcaagggattcatcattcatgaacaaggtaagctatttggctaagtggctaattcaatctatcacgaccttcattatttccaaaatcatgcattcattcagtatttagattcatgcaaaaattggtactcaatgctagtcgttctctcacaattaaggttcacacaactcactgggttatggctaatgattgccttcacaatttacctgtcaaacaaactaacaatttcactcacgttcctaattcatgttctttcttttctaattactgcatacttgttcggagcacgtgatcttacattgcaattcactcaagtcatgttatcgatcaatttcaaaatcattcacaaacaccagaaatttgaaacc

SEQ ID NO: 235671 - DNA, 304 bp, Glycine max
tgcttctgataatcctgctcaatatatatggacaaagggtttcattgaacaaattgctatctgctatctttcgattgcaaaactgcagccctaagccgcgattcagattgcgttgctatccattctacttgtgtcttcagatccctgccaattcaataaaaaatatatcaaggaataaatacgtatgcacaatatgggaaacaaattgaatgtatgttgtgaaaatgtaaaagtaacacacatgcaacgaggtatgcgacatgctgagtctctgcaattctttgagtgtaaagtcagtccctgc

SEQ ID NO: 235672 - DNA, 166 bp, Glycine max
ggaccttaaaactcaagctgctgattacatctcccttttctaatcaaattcttcttgatatcatcaaaatctttatgatttacaaaatttagaggaatcatctaacaacaagatatattatcggtgcccttagagaactcaaaactggggatgttccaagatcaat

SEQ ID NO: 235673 - DNA, 418 bp, Glycine max
  unsure (1)..(418): unsure at all n locations
agcttattcaagattgagagtggntacttattaataaanaagtagaatangcacttaaaaaaagatgctttcctcttttaatttatatatatatatatatatatatatatatatatatatatatatattatcaaaatcgtctaagttaatgctgcttttgcaaatttgcttatctacattgaattctggtaagatctctcattgcttctaagttctaataacagccactgcatgaatgtttctttggctcatcattgataggcaatctgaacgtcaattgtgtggccttaagattcaactaatcaattcagtttcgtagatccccgatgtattcttgcttaatttcttggctagntagctttatatacttacatacatacacatatatgcatatagtcaaaccctttataatatatga

SEQ ID NO: 235674 - DNA, 348 bp, Glycine max
  unsure (1)..(348): unsure at all n locations
tgtactcctcttcataagcatgtctcttattngcattattatacaactatgtgagcatgagggacaatgtctttctcttatgttagtgtggaagtcaataaaatggttcattttcttgctaatgttggtgtgtggcaatctcaatcctttgttatttgggattttccttctccttaactaagctcatgccttcttaaagataacctangttgagtcttgtaatttttccatatcaaaaaagaagaaaaatatatattttagattaatttttgacattgatatatgtagggtggtgagtcaaaagaaaaatataaagagggaagagtttgataatngtaatgactcact

SEQ ID NO: 235675 - DNA, 424 bp, Glycine max
  unsure (1)..(424): unsure at all n locations
gcttctactttgtgagttatgcagaatttgtgnttgaaaatacatttattcagaagtaagtagtacattcactcttcaacaatcaacatatttagtctcaaatgatcgaatgagtactaatggacaaatgatttggagggactgatcatatggatttgttaaatcaaatttacatgaggtcaattaagcagtgaacttttgttctcttatcatcaaagtatttattgtttcaaatgcgacaaattaagaaagaaacttactagtatgaaacaagatagtatgttaccaaaacatatatataattaagttcagaatacaagttgttgcttataattaatcagtcaaccaacccacatagctcttntatattngctggtgcacataggaagcttggttgatccctgcaagttgtagtttgtcactg

SEQ ID NO: 235676 - DNA, 300 bp, Glycine max
aatttcttttcagagctatacttactaaaatctagagctgtcccttgtcaaggtggacgtcgcacaggtaggctctaaaatctttcacgtccaactgaaagtatcctttggtaaaaagacaagaggggggacctgcaaaataaatgacttcgacacttgaactaagtacgagagttatgtgagaataaattttgtagaacggtgagatatgaactggtacttatagaatggagtggaagctgcggagccttattggctgggattgatactgttgtgtaacaacccttgcagataatgact

SEQ ID NO: 235677 - DNA, 443 bp, Glycine max
  unsure (1)..(443): unsure at all n locations
catgcaacttaacaaaggcatgcgaagtgggtgttattcctacatcttttccttatgttatcaaacataaaaagggaaaaggtaatattgtagccgatgctctttctcggcgtcattgcattactttctatgcttgaaacaaaattgatcggtcttgaatgtttgaaaagcatgtatgaaaatgatgaaacttttggagaaatttttaaaaattgagaaaatttttcagaaaatggtttctttagacatgaaggctttcttttcaaagaaaacaaattgtgtgtgcctaaatgttctacaagaaacttgcttgtttgtgaagcacatgaaggaggtttaatggggcattntggggtccaaaagactctagaaacattgcaagaacattcttattggacacatagagtattgatcagcgtattcaatctcccaaatgttacttc

SEQ ID NO: 235678 - DNA, 433 bp, Glycine max
atcaatcttttgagcaaggacaacccacaatgcgttattgtatgcatcgcacattagctcaaatggggctgtccaatcaggtgcctgaatgataggggtggtagtcaccacacgcttgaggcaatcaaaagcctctttgcattggtcatcaaaatcaaactccacctccttttgcagcagattggatagtggaagggctactttgctaaaatccttgataaagcgcctataaaaccctgcatgaccaataaaagaacgaacctctcgcacgcaagagaggtaaggcaattgtgaaataacatctatatttgcagggtctacctctatgcccctactggaaatgatatgacctaaaactataccttgtcctttgaatattaaacttcagaattcagagctcttttagacacaaaaattcgtgctcttctcttcc

SEQ ID NO: 235679 - DNA, 165 bp, Glycine max
attcctaccccgttagtattgctaaggaaaggcacctaccaaaatcattggcctacgtcatatgcctaccacaccaacagcccattaacgatcaattaagggagtgacgaatcagctgtgtaagttaaaaaagccatccaagtgaaatttgggaatgcaaccact

SEQ ID NO: 235680 - DNA, 344 bp, Glycine max
  unsure (1)..(344): unsure at all n locations
tttgttcccatgcttgctaaagtgagacaaaagctggtgcaaatcacaactctgatatctcatgggtccaatggatgaatgcatgaaggaatgcatataacacagatgcattctatgaatgctggaagtccggggaatttcgtccccttcttagacacaacgtttaggggtagcaaagtgccccaacgtacgtttttaagaaggcaacacggaccctccgttggtttgtttacacaagggatcaagacagaacccatatgcgatgcctatgcaaaagacacaatgcgagaatgtacacantatgacaatattcactgaacactaagcaaaaggtatatgatact

SEQ ID NO: 235681 - DNA, 337 bp, Glycine max
ttgaagggtgaaacttcctgcttttattgttgaccacagagtggtacctggagatatgtcgcgggggtcaggagaccttggggacgtcaggtggggtgctattgcccacaaccaaacttgaccaatcccgacccaacctgggcatagtcggtcagtgagaacctgtgatgtacctaagcaggcgagctcctggcagtcaacagataaaaggaacaaagaccacacatcaaggaggcttgtggtggctggccagctgtgaaacttgattgatatgtgagatatggtctctcgtaatcaattaccaacggtgggtaattgattaccacgcttaaaattg

SEQ ID NO: 235682 - DNA, 382 bp, Glycine max
  unsure (1)..(382): unsure at all n locations
ttaggtaanaacaaagtatagctaacaaaagggttacatcaccaagtgatagtggtggaggaatgagcatgcgccatccccttcccgtgtcacacttggcttacatgcaaaccagtcgaactttagcctatgttttttctcttttgggcggaaaactttggttaattatgtgttgttcttcccaagtttatacgtggactttttctacttatggatccttataatttattcgatacgagagcttgttttgtgacaatctacgtttgttgttttttgttgggaacaattggattgcgatatatataattgatggtctctatgcgagtctctcttgtttccttttcttttggtggggggggaaaataatatgcgagtaatgctg

SEQ ID NO: 235683 - DNA, 412 bp, Glycine max
  unsure (1)..(412): unsure at all n locations
ntcaagatgatgctattgctgctgttgagaagctatatgtttgtatgggcatcctctttgttagtgtctgattgatgtacattctacggaacaccctcatctttgggtgagatgctttgatgtaaaggaataccacctctggtttatgcagaagaaagaaagagcaatacagcaaatgcaaaagcaggatatgctgttctaaaaggattttcagaatcctcattattctggaaatacacgctcttgtcatgctcgaaggcctattagttatacatttggtaggatgtgtgttatatgttcaattacatggcatacacatcttgtattctagcattacagaatctaatgcacaagacaattggtagggtggcttttgttcaaagttactattgctttcatggaatatatactt

SEQ ID NO: 235684 - DNA, 432 bp, Glycine max
  unsure (1)..(432): unsure at all n locations
agctntaggcaaattcatacgacaatatctttttactcggatgtctgattgagtcccgtaatatatcaagacgctcgaaattgaatgttgaacctatgagccaattcaaacgacaataactatttaatcggatgtctgattgagtcccgtaatatatcgagacgctcgaaattgaatgttgaagctttaggcaaattcaaacgacaataactttttactcggatgtctaattgagtcccgtaatatatcgagacgctcgaaattgaatgttgaacctatgagccaattcaaacgacaataactttttactcggatgtctgattgagtcccataatatatcgagacgctcgaaattgaatgttgaacctctgagccaattcaaacgacaataactttttactcggatgtccgaatcagtggtgtaaatatatc

SEQ ID NO: 235685 - DNA, 430 bp, Glycine max
  unsure (1)..(430): unsure at all n locations
ntacagcagaatttagtaatgacccactaacctagtattaaaataacttaatgccattaacctagggaattaaaacaaacttaatggctgagtgtaactgaaattgtggcaaccaaaagtcacccccaacagccaacaagtcagccaccatttggtctcccaaaaggctgatgcctatgttgccaattgggcccttattacaacttgaactaaagctaactaaagcccttttagttgattaacccaaaacatattnttggtcagccaactctacaaggattgggccattatttatacaaactaaacactctataattgaaacaaagaggtgtcatttagtcctcctccatttgggccatgatacaacttacaaccttggactttttctcttgaaacttgtgcttgttttaaacaatatggacaagacttg

SEQ ID NO: 235686 - DNA, 318 bp, Glycine max
tcgactctgaggcatgccagcttgcttgtggggcttctatggaggttgtgatctttgttcttcaatgaggtcctttaatggtgattttccaccatggagatgcagtggaagacaaaggagaagaggtgagaggaggcaccatccactagggaataagccatggaagaaggagcttcaccaccaagatgagccttggataagaagcttatagaggatgcttcaatggaggaaaagaaagagggagagaaagagagaggagggagcacgaaattgaaggaataaaaagggagagaagttgaactttgagttgtgtctcac

SEQ ID NO: 235687 - DNA, 383 bp, Glycine max
  unsure (1)..(383): unsure at all n locations
tagccctanaggggatggaccttgtcaggttttggttatgatcaataacaatgcctataggttggacctcccagaagagtatggagtcagcaccacttttaacatttctgatttaactccttttgcaggtggagctgatattgaggaggaggaactaacagatttgaggtcaaatcctcttcaaggggaaggggatgatgcaatcctccctacgaagggaccaatcactataaccatgagcaagaggctccaagaagattgggctatagctgctgaagaaagccctatggttctcatgaaccttatggtagatttctgagcccatgggccaaaggtgggtccaattatctttgtcatattagataggatgcaatatatttggc

SEQ ID NO: 235688 - DNA, 331 bp, Glycine max
tcccaatagcaagaatctcttgagtctcataatgggctaaaactagatgagcaaaacatgtgctacagaaaaggtgtcagggtattgaaaccatcaagggaaagaaaccgtatgcgagcaaacaacaactgcataagaatttttttttgcaaaatctaaagagctgggtacgcaaaacatcttcgatggaggcaaaactacagggtaagggtcctccaaggtggttgacctcgttgtcggaagtgcggctggaacagaactcccacgtgccgtcatgaacaggaaaacaaacctgtttggctggaaaatggagttacaataatggcacctt

SEQ ID NO: 235689 - DNA, 334 bp, Glycine max
tcttcagaaacgtggcatttgtgctgttttcacaatttctagtacaccacaacaaaatggtgtatcatataggccgtatataactttaatggatataattaggagtattgtaatcaatttgactttaccctatctttgttgatgtatgccttgaaaactgtcatgtatttgttgaataaggttcctagtaaggcagttccaaagacacctttgaactgtggacaaataggacacctactattaagcacctgcatgtttggggttgctaacagaaataagattataatcccaaaaagaaattgatgcaaaacaacagtgttatttaattgtatca

SEQ ID NO: 235690 - DNA, 429 bp, Glycine max
  unsure (1)..(429): unsure at all n locations
agctttcccacttgtgttatcttgnctgttctcacctcgaactcgccatacgaggtcactaggttgaaaggctcatggttgaacctttgtattgtatctccttattgctaggagtttggcagcttcttccttaattctggccatgtcttggacttcatctattgtctcgagttctacccttatgttttcttgattttgttgctgctagaacaatagtctccttatcgatggttccccaacttcaacggagatcatggcgtctatgccatatgtgagtcaataaggagtttccttggttgttgtttggggtgagtagtgataggcccagagtatattgggagctcctctttccatagacccttagacttgtgactctatacactgcgctctaaggggactctattggttgccttgcatgtccgttggtct

SEQ ID NO: 235691 - DNA, 375 bp, Glycine max
  unsure (1)..(375): unsure at all n locations
actcaagcttaagacttagaaagggagtttgtgtnttgaattttatangcaacaaatggtactactccttttgagagttatacttagagacgangaaagaacaaggattactaggttgcttagtgaacctaatatgatagtgagggacaagattgagtggtgcaacctttttttgtaaaatcactcatgcatcttacattcttatgattcacattcataagaactatataggtaggtgtgttcttagcttttgtttccatacaaacctaagtgctcatatgaaacaccttcngttgtcatacttttttgttgagtaatcaccattaaatattaaaaaagaaatgcttattggataactttcttaaatcctaaaaa

SEQ ID NO: 235692 - DNA, 423 bp, Glycine max
  unsure (1)..(423): unsure at all n locations
catgcaagcttaaagtatgcccgagtcattcattactatgagatgttgttgaaacatnggcgaacagaattgccattccttggattatagggttgaaccaagctcatgcttttacaaaaaggttcatcaagtcaagttgaaatatggaagtaaccgtctatgcaaattggggcaaaagatgaatcgagtcacatcactgcttcgtctactgccaaacatatttaggattattgatgtccttgttacttccagtttcaccttgacaaagatgtcatggaccatgttgaaaatctaaattgattcaacctcatatcctgcgtaaaaattcgcaatacttaactgtacatcattcgcatacatccatgctcttcattgggtgcattgctcattgcatgtctttacttgaaaaaaaaaatataatga

SEQ ID NO: 235693 - DNA, 367 bp, Glycine max
  unsure (1)..(367): unsure at all n locations
aaaaagtgttttttacttttattttcnattgtgaataaagcaaaaaccaattcctcttgacttcccttttttaaactaattaaaaaggattgttatttataaataaatagaattttagaaacatggggaggcttttataattaaataaataaggataattaacttgtttaattatttgagagacaataaaaaggatatgttacttattcattatatagagtataaaatagagtctgtttttataaacaataaattatataaataaataaactaagtaaatgatcggttgtgagtaccctagacatgttatgtcaatcttctgacgatagtttctaagccacctcttcctcctaatttcgtttgctct

SEQ ID NO: 235694 - DNA, 198 bp, Glycine max
tttaattgtattgcgtaacatgaagatttggttaagtcattggatctttggaaaatttgcggatatgcacctgcaactgtccacttaaaacactaggtgggttaagtgaacaagggaggtgtggcactggccttagtgcagctaacatgaattttggggctagccaacttaaggaatagttatctaattttaaatatt

SEQ ID NO: 235695 - DNA, 432 bp, Glycine max
  unsure (1)..(432): unsure at all n locations
taagtcacctgcngcatgcagcttatggaattgatacagctttgttaatcagttttgaaaacaatgctggctactggtaatcgattaccagagagtaaacacttttggtaaaatattttgtgaaaaattcttgtgctactcaatgttttgaaaaacttttttaatacttatcttgattgagtcttctcttgattcttgaatcttgatattgatagttcttgaaacttgattcttgaaacttgatttttgaatcttgaatcttgattcttgaaacttgattcttgaatctttgggatttgcttaactcttgattctttggcatcatcaaaataatcttggaagtcattgcttccacactttagagggctcaatgtccctgccttcagagggctcaatgtccttgcctttagaggcctcaatgtccttgccttt

SEQ ID NO: 235696 - DNA, 364 bp, Glycine max
  unsure (1)..(364): unsure at all n locations
tcaacagttctaatgcatgctctatagtaaaattgctacgttagggtgtgtatggattgcattttcatttcctgtctttattctctgagaattgctttcattttcaaaatattacgattcttaacatatgtttgggttgacttcttggtttctatttttaggaaataaaaacactgaaaatttatgatatattgactacttcgttttctgtattcttaaatttgcttaaaattacattcattgtcatctcattttcattntactcaaaatgaggtctatgtttcaactgaaaacactgaanatgaacatttaattggttcattctctgattgtttcttgtttcatttcactgaaatgtttcaaa

SEQ ID NO: 235697 - DNA, 388 bp, Glycine max
tttgcaggtgtcttgcctaatttcgcaatctgatcttctgaattaatcgcaatgcttcaagataaatacctttgactcctgttcactaaaggctagatacctcaatttgacgtgcttagtccttctatgatgaacaggattcttcgttatagcaataagtgacttgttgtccacccagcatcattgcattttacatctgctcaacacatgataaatcttctccttatccaaatgacttaaattgttgctgttgcagatgaaatatacttagcttctgttgcgatttgggctaccacatcttagattttcatattccatgataacacacaactgctatatgactataatcttatcccaaggtcctcttggcatcgacatacgttttgct

SEQ ID NO: 235698 - DNA, 441 bp, Glycine max
agctattccatccgacatctacatcttcctcacccacaacagaactcaacaagtcaaggtcgttgagctcaatctctggccttttttggtcaataatcacttgtgattccaaggaaggttttccatgagatacttcattacacacacaaagacctagatttgcaatgcacttcacgaacccagatctactttgcacttcaccacacacaaacccatatctgattcgccaaaaagataaaaatacaacacacatgtcatttttggagaggagagaatgtgttgcagtaataggatctggacatgggattcgagttcaatggagaggatgttgtggcggaggacatcgtgtgaggtgactatggtagcaaagatgagcaatgtaaataggggccaaagtgtgagttctattggaagatgattttacagacctagcccgtcaaa

SEQ ID NO: 235699 - DNA, 407 bp, Glycine max
agcgtgaggattatatcatccttatcattctgtcactgtctcaccagattggaacactaattcttctcattaaattatcttattcttgtatggaccatggaagttttggtagcgggataacgcttttgttgatgttaacgtatgactgtggaatccattccgttatttagtttctttgtttatttggaaagcataaaataacaattaaatcaaactacatccttttctttctgtggaaatattaatatacgcaaactattcatactgtaggagaactaataatgataattaattgtttgaaaaaatgtgacattagacaaaatttctctttcattctaaatcatgtgctctgacattcgagcttaccattatctatctctagttgcttacttaaatttcatttgtct

SEQ ID NO: 235700 - DNA, 269 bp, Glycine max
agtctctatactttatacaagaatgaatctctgataccacttgttggacaagtggcctcagatatcttaagaaggggggctggtgtgttctctcccatgctctctcttccactcttcttcctttttctcacttctcctcctctcttcctctctttctcacactctatcacatcatctttccacatcttttcttctaatttccctattttctcctacttcatttatgtgaatcactaaatttttccatctttttctatcaaccctttctt

SEQ ID NO: 235701 - DNA, 364 bp, Glycine max
ttaatgcatgccatgtgcaagactggtgttaaaattgtatgttaattactcatctctctgtatctctaattaatatatatgatgatgtatattgataggacaaaactttggtattgttcttcatacataattgaaatttcatttatcttagtattatatatatgttgagttttaatgcaatttattttgctgattaagagtgtaacgtaatataagtttttgcacaaatatattattcatatggtgtttgcgtgattgacttattaatctttatgttatggacattaatattaataatggatgtgtgatttgaaagttggcactatggaagtgccttggttttactttcatttcataatactat

SEQ ID NO: 235702 - DNA, 375 bp, Glycine max
gaatgcatgatggaagattatataacctgagataaatacatggaaagaaatgaaggagcttatgaggaaggcattcttaccaccttctaatgagaaagatgcttatgacaagctataaaacctcacacaaggtagcaagagtcttgaagagtaccataaagagatgataatgactatgaggagagccaagtacaagagcctaaaacttccatgccttaggttcctatgtgggcctaatacagacattcaatgtattgtaaagttgtagtactatgagagattggaggatttggtgcatctagccaagacaatggagagacaacttgagaggaaacattcctacaagaagacctatcactatgactcttctaatgg

SEQ ID NO: 235703 - DNA, 370 bp, Glycine max
  unsure (1)..(370): unsure at all n locations
tcacaagaaagcttccattagtttggttgtgaattggttntatcttattagttaggccattatagattattttcctatcatattgccatggcctacctaagagaaggtgtcctgcctccataggaactacatgacaaatcacttcatccttatatgttccaatggagaagggcactttcacttgttgattgactatcatctcgtcttgctcattgagccattaaagtttataaggctttggatagggagtgatagctaggctcaacttaaagactaatcttgtgttgcaaaaattgcaaaatgaaccactatctacaataagaaagcatgtngtatcaataattttacacttgtgtgaaaaatattcttt

SEQ ID NO: 235704 - DNA, 435 bp, Glycine max
  unsure (1)..(435): unsure at all n locations
agcttgttgctgaactaatgttcattttataacactattgtttagtgtatttctttttagtattagaggagatctatttgcttgtttttataagtaatatttacttataattaaaaatataatatcttcttttgtcgacaaaatagatattattagagtaatccacaatcagaaatgtctcatcaagatgagaaacagtacaaagaagcataaagtacattcataagaaaagttacattaaataacgtactattacatatataactntttattattatttaattttctttttaggggcatatattaacatgtccatttaacatttttcatacctcaatactctctaaatgcacctttaatacaagtgcagaccccattacacaaccctatagatcttaaactcctaaacccctcaaaaaatcaaccccgaaacat

SEQ ID NO: 235705 - DNA, 107 bp, Glycine max
actgtacccctaaaaaaaccaacagaccacgaagaggaattatcccccagacaaaaaccaataagaaactgcccaagcggggccaaagaaaaaaaacaccccccccc

SEQ ID NO: 235706 - DNA, 338 bp, Glycine max
ttgtgctctaaattgtgggagtgtgctcaaatatatggggcaattttgatttcgtctcttgcttgattaggttgaattaggggttggtatgagatggccctaggcctataatgcattctgaaacaataggacatgccaacatgcccccgttctcttgctattgatgcctaaacgccgcccaccaaatgctccgtgaaatgcctcactgcgattagcgcgtgacttctgcaaggagacaacccatggggtattctcggttgtgcatattttctatctttctggtataagtattcatttccgaaataagctacaaaatcgctcccatatttcctcatcct

SEQ ID NO: 235707 - DNA, 373 bp, Glycine max
  unsure (1)..(373): unsure at all n locations
ttatttaaaccgttttttacctaataatgataaataatttcaccgatcattgtggggaatctcgtttaatcactgttaaaacaaaatctaaccgatcggtcacgctataacctcggttaaaccaacaaaaagaaaaataataataaaataatcaaaatatcttgaaaaaaataataataaaataatcaagagaaatcaatcggacatttttctttgaaagattccttgaattaattgactaataatcaaagtgaaaccaaggctaaaatcactaanaaatcactaaaaaccgntgtaaggtccaacgccttaaacgggcctctttgctttatcggtaacatggaccgtcaaaagcaaaaataacatgaactta

SEQ ID NO: 235708 - DNA, 409 bp, Glycine max
  unsure (1)..(409): unsure at all n locations
tgcaagctatctctaagatgttgacttcaatgttgtttaaagtttttcacaggntatatnggagagacgaactgcattttcggaagcatgaaatacattgaatgggactggattgtggttcttaatgagtttgtgaattttgcctccagacatggtaagagttgtttccattttaaaaaagatttcaaaaaagtcttacgatttaacagggagttctttgattatatgatggaggggtatttatgagtcggattagattagtttgcttaaacttgttattcaatccaatcaaaattttacgggttatattgggttagatatggtaatttttttacaagcctaacctgatataaataaggtgggttaatcgggtctaaatatcttttatttttctattatataaaaataa

SEQ ID NO: 235709 - DNA, 378 bp, Glycine max
  unsure (1)..(378): unsure at all n locations
gactccatctcattgaagcgcatgtccacttgtaactccaaagtatcaaacctttcaccaacaaagggttgaagaccatccaacctcttcaaaatcttttgaaaaagagatgaatcttcttcaccatgtccttcttcattaacatgtcgagcaccttnttttgcctaagagccatcatgctctttttgataaccaaaggatgcaatgactgaagcgcctattataaaggatcacttgattggaacataaggctcagaatcaagagggatgttaaagcgttgaatgaggaaggtgactaagtgtggatatggcaatggagcatttaaatcgaatgccttatgcttgcgatatctaacaagatgtgcccaatacattgta

SEQ ID NO: 235710 - DNA, 332 bp, Glycine max
  unsure (1)..(332): unsure at all n locations
agcttaattccctccattgcgcatttttttttcaataatagcctccatttaaacctccctactttataaaataatttaaagcatgattgctcaattacaatttttaccgttatgaattatataattgttcaagctggatatcctaattccttccataactaattttgcgggtgtgaattatcaattgctcaagccaacctcaatcctaattccctccattgccatttttttttttttaaagaatagactccatttaaagctttcttacgttataaaataatttaaagcatgactgctcatttacaatntttatggttatgaattatataatt

SEQ ID NO: 235711 - DNA, 342 bp, Glycine max
  unsure (1)..(342): unsure at all n locations
tgttgatcttgttgagatgagttctgattctcatctaacttcngagccctgcggatggacctcactctcaaagaagatagaatacaaggtaatataaaatacagaacacacagctgaaactgataaatatttcaagtatgttagaacttataattgaagctagttggtttataagttataactatatcaactgaattatttttttctaactgttactttcttttgtactaccctctcgttattgaaaagtgaaataattgaagcgaatagtctttacccaaatctccactgactctacctaattaagcttaggtgtcatgtttcttttcctgtagaaatgaa

SEQ ID NO: 235712 - DNA, 433 bp, Glycine max
  unsure (1)..(433): unsure at all n locations
agcttcactggcatgtgaaatgatgtatttttatggcctactgaacaattgcttctaactaccatgctttgggatgtcaaatattatgtgaaattgatctaaagtcatgcttcttctctttcttttataaattatacactgtgttggatttggagttggagtacgaccacctagtttagtgctacttcaataacttcanaaagttatataacaacaaattatatttaataaacttctctttcttgtgccatcacctaattctctttcttttatttcaagctgtcccttcgaaatgatatcatgtttcttctctttcttttataaattatacactgtgttggatttggagttgagtatacaatccatccaacatacttatgagctgttctattacctaatctctttctttattaaatatattaataactgcaaa

SEQ ID NO: 235713 - DNA, 333 bp, Glycine max
  unsure (1)..(333): unsure at all n locations
tttggtgctctaaaatgtgggaatatgctcaaatatgtggggcacatttggtttgttttcttgcgtgattgggttgaattgggggtttgtatgggatggccctaggcctataatgcattttgaagcaatgggacatgccacattgtccccgttctcttgctattgatgcctaaacgcgcgcccaccaagtgttcggtgaaatgcctcaatggcattagcgcgtgatttttgtaaggaaacaacccatggggcattttggtttgcccatattntccattntttttgggacatgcattcatttccgaaagggctagagtaattggcccacatata

SEQ ID NO: 235714 - DNA, 416 bp, Glycine max
agcttctaaaaacctagcgccattcttgctttgcaaaccctgcgagagctttttcagacttgaagctcgtaatccctcaagtaactagggatgttgctccctctcctgtgccttcctgaagccattctcgggcttccttcttcattgggccttgaagcttgcggttcagggttgttgttcgtaacattcccgcggtcttcaaacaacaccttgtcctcaaggtgatgcagctccttaagacatgcccagtcttcccacgacgtttcatccaggtgcaggccctgccactgcaccagaaccatttttttggacccctagtccgtcggaactgtcttctgacccacaatagctaatggtgtggtgataggctgattatccatagccccggaaggaaggttctcaactgctattggatt

SEQ ID NO: 235715 - DNA, 272 bp, Glycine max
taacacaaaatatggtttctcatcctgtgaatgcttaatgtactgcaaaagggaaaaacatagcaaaattagtccttttaacccacttatgtatccctctacttcaaaggaaaacacatcaaatatgtagcaatcattagaaataaaataatatagaatcgtatgttttgcaggtttgagattcccatcattttaacatgaaagaatggtgcttttttaaattttaatattgccgacgctcacaaggaggcgactgaagatttttacgtttg

SEQ ID NO: 235716 - DNA, 430 bp, Glycine max
agctgtcggattcattgtcaagcgtctttatatattaggagacttaatcagacatccgagtaaaaagttattgtcgtttgaatttgctcagagcttcatcattcaatttccagcgtctcgatatattacgggactcaatcagacatccgactaataagttattgtcgtttgaatttgctcaaagcttcggtattcaatttcaagcgtgtcgatatattacgcgactcaatcaaacatccgagttaaaagttattgtcatttgaatttgctcagagcatcaacattcaatttcgagcgtgtcgatatattatgggactcaatctgacatccgagcaaaaagttattgtcgtttgaattatctcagagcctcagaattcaatttcgatcgtctcgatatattaccggacatcatcagatatctgaggtaaaa

SEQ ID NO: 235717 - DNA, 381 bp, Glycine max
  unsure (1)..(381): unsure at all n locations
cctataaaacncagcttccctttttgcctcctcaggtgttgcatgtaaatacatgctctattttcatccccactccagtaggcctccggatcattctttcctttaaatggaagaatggtgagtttaataccatcaattcggttttgtctaagaacaccatcattccctcttctccttctttcttcttcattatgagctctattctccatttgatccaacctctcatggagcgcatcatcttcgtgtttcattaacctctccaaatgttgcatcaaagcttgcatttggaattgcgaaagccccactccatcattaggattagtaccttgacatctcaaaccaacaaatcanacgttacaagacacttatagttgctgtttg

SEQ ID NO: 235718 - DNA, 403 bp, Glycine max
  unsure (1)..(403): unsure at all n locations
agcttaaacttacttgagtcatctttaacaagggtttaaggttaattcaaggaatcctaaaataactttctggttcggctactagttaagagcatttcatcttaatcttaggtttcctctcatctcaaaacaacttctgcccaagaagaatttatagttaaattaaaaaggcttctatatctcttatattanaagtgaccatggaattgagtttgaaaatgttgaaatcgggtcattatgtgaaaataatggtattatccacaacttctctacaccgagaacacctcaacaaaatggggtagttgaaaggaaaaatagaactatgcaaaagatggctagaactatgctctgtgaaaactcacttcctaagcactcttggatagaaccaattaatataacatgc

SEQ ID NO: 235719 - DNA, 385 bp, Glycine max
tatggtaaaattcgggacttagccatggtagaagtctccacagaggccagtgcctccctcgcccagtattatgatcagccgatgaggtgcttcacctttggggacttgcagctatcacctatgtgtcataccctaatttcgtccgtggattattacttgatgacatgcaacctttggttagccgctttgagatacttggcgtcctttgttgcacaatccgtgaaattccgtaatgtggcggaaatcgaaaagaggtgtttttgcgcaatccatgagtttccgtaacttcttcgaaagctaaaaaagagtaaatacataatccataaagattcgtaaccctgcggagggaaaaaagtatcggtacgaaattcgtaaagttcgtaac

SEQ ID NO: 235720 - DNA, 382 bp, Glycine max
  unsure (1)..(382): unsure at all n locations
agcttctaggggagagtagatcagcaattattattcatttcttgctcttgagggtcggtctagaagccttgaagcctagaagtgttggtaagcaagttcacccttcactatagccttgcttattcttattcattactcgaatcttctctcatattcttgagttttgttgaagtttgtttctgactcaagagaactccaatcttggttgtacccttcactttcacatggagactacaagaggtaaggggggtctctccaactcttgaaccctatgcttgttgttaaacttccttgaacatgttgtcttgaaatttctgtgcttgctgccttgttctggatctatgtgtngagttattttcccttggagtttttatgccaaaaa

SEQ ID NO: 235721 - DNA, 335 bp, Glycine max
tgagctcacagttgctgccccacatagctccacgaaatttgtcacagccatgctcttccttgcgagccctcttggtttcttgttcaagggctcttgcagtaactgcattttcttctcataagccggcacactctttccggatgtctgtagagaccaacttaaatttttcattggcaagtctcgcttttccttgttcggtttttagagctcggacttcttcatcctcttccggagcttcgaagttctcttcactgataaactttaacttggagagccaatctaaccctcgtgtacaaaatttcagccattcatgataaccaccgataatgccatta

SEQ ID NO: 235722 - DNA, 437 bp, Glycine max
  unsure (1)..(437): unsure at all n locations
agcttcaacatcagactacttncagggtactggaactacttcacatggacttgatggggcctatgcaagttgaaagccttggaggaaagaggtatgcctatgttgttgtggatgatttctccagatttacctgngtcaactntatcagagagaaatcagacacctttgaagtattcaaagagttgagtctaagacttcaaagagaaaaagactgtgtcatcaagagaattaggagtgatcatggcagagagtttgaaaacagcaagtttactgaattctgcacatctgaaggcatcactcatgagttctctgcagccattaccccacaacaaaatggcatagttgaaaggaaaaacaggactttgcaagaggctgctagggtcatgcttcatgccaaagaactcccctataatctctgggctgaagccatgaacaca

SEQ ID NO: 235723 - DNA, 253 bp, Glycine max
tatttatttatttatttctaatattaattataaatttaaaatattaatataattagatcgtgtgtattgttttatatcctagaagcttaggcaataattaaaagtgaaatggaatgtttttaagacttaattatgggtgtattgaattagaatttcaaatgattttaaaagacttttttaatcaagattttataaaaaaaagtcttgtggattcaatcatgatttttatatagtataaataagtattttgcta

SEQ ID NO: 235724 - DNA, 382 bp, Glycine max
  unsure (1)..(382): unsure at all n locations
gggatccttaagtcacctgcggcatgcagtctttgtttcaattagagcgnctctatatattacgagactatatcgaacatgcgagtcaaaagttattgtcgttacacttttcttatagcttccgttttcaatttcgagcgtcttgatatccaacgggacacaatcaaacatccgagttaaaagttactgtcgtttgtatttgctcagagcttctgttttaaattacgagcgtttcgatatactacgggactcaatcggacatctgaggtaaaagttattgttgttggacttttcttacagctttcgttttgaattccgagcatcttgatatttaacagggctcaatcgaacatcccagttaaaagttattgtcgtttgattt

SEQ ID NO: 235725 - DNA, 289 bp, Glycine max
  unsure (1)..(289): unsure at all n locations
ctcttatgtccgaatgtgtcccgcagcatctcgagacgctcaaaattcaaaacagaagctatattgaaaaatctatggacgataactttttacacggatgtcccattgagtcccatcatatgtcgagttgttcgaaattgaaaactgaagctctgagagaaatcaaacgacaataactntttactcggatgtccgattgagtccccgaatatatggagacgctcgtaattgaaaacaaaagctctgaggaaattcaaatgacaantacttttgactcagatgtctaact

SEQ ID NO: 235726 - DNA, 408 bp, Glycine max
agcttggccacagaagatcgacgaccaagtttacattttcaaagcactatgcctaagttgatggcatcaggaattgtctctgccagggtcgaggtattacatattcaaaatattacatgcatgtcttgattatttgttgataaaaaaaaaaatcacgcatgcttattgactatatttcaattaggtcacacaagaactcaattttcaatcagatgacttagacttaggcaaatctttggtgtcaactaaattcgcttttcccttacctgactgggagaagacttctatcaaccctggtatcgacgaagagtatatatgtcggactccatcacctctcatacctgtgggcgatgaacaacatcccatccggaaaatagtgcgttaatatactgctatgttagtgattat

SEQ ID NO: 235727 - DNA, 456 bp, Glycine max
  unsure (1)..(456): unsure at all n locations
tcgagctggtntaacttttattatgtgtgagattcgattataataatacaagagacaattgggtaacgaatatggcttatcatgnttgaagaacacctctccaatacaaagaaggtctcttttttgaaattattttatgctcttttctccattctgatcagtggaacttcttgttgcttttcaaagcaaggggtttgttttttttattttctcttgtctttggagtttgctcaattctgtttattttttcccctttcattctcttaatgggtattctattttgccttctatgaattcctaaatccttcttatgcataaaagcattttccttcttatgtgtcttttgcacctttcaaagcctcttctcttttatgtacagcatgatgttggtccaaatgtagatcctcatgtgaatgacatactgtatttcacctgaacagaataataatatgatga

SEQ ID NO: 235728 - DNA, 428 bp, Glycine max
agcttgaagagacacccatattgcctagtctcagtgtctcttctgataaattcttttttcctacacctatactcgccactcctttcacaacctattaacacaaacgtagtccttcctctactacctgtgtttgtgtccgaccttaaaatcaccgtcacaaatctgttttcatgagcaacggatcgagtccactgcaaaacattctctcgacactcaaacacctacaaagcaatccacataatttaagttttctaccagtattcattttattaaatctgtgacaaacattaacattataacctgagaagtattgaacgcatcaaaacaatcaacatgtggttcatttgcaccacatgcttcttcattttcataatccatatccgcttggtcagacattatttcatacatccactcatcttcgtccatct

SEQ ID NO: 235729 - DNA, 465 bp, Glycine max
  unsure (1)..(465): unsure at all n locations
actaagctcgctaagtaatggcgtgacactctattaacttgtcacataatcatttaaccgaaagtatcacatcatcacttaactaatcaaaacaaatggtgagtatcaaaaaaaaaatttaaaaatgtcaaatgataaaaaaaaatagataataaattgaaaaaaacattataaatatgaaaaatatatttaaatattatacccgaaatcaacgaggtgtaggaactaggaacagggatagcaataataattcttgagaaactacaaatcagaaagctggacttcgacttcaaggacagtgatactaatttcaaaggtgaaccatcaattntcaaatagaaataacatactctatatatttcaagtangaagactaaaatngaaggactggaatgctgagctttgtggaatggaaggtctgatcaattctggactgacangtggatagacccagaaattagaaat

SEQ ID NO: 235730 - DNA, 424 bp, Glycine max
agcttatgatagacgtttggaaaatgggaattatatcttctcttgatgataataaggttgtgcgacgagaagcatttgaagcactgcataagggaaataatggagagtgagaaaggtaaagaaatgaaaagcaattccactcaatgagaagactttggcttcaaaggctaccgcggtgaaggtgaaacttctcataaaaatattatagaatttgcaaataacttgtgtcattcataagcttcatacccggaattacaaactatttcaaatttttatgaatctagctgataatttttattaagaatgatttttttttattgtttggaaatgcatgtatatgagggtgagatttggcataccagtagagttatgtcttggcgactaattggtcataaacacaaattaatttgaaaataacctcttt

SEQ ID NO: 235731 - DNA, 487 bp, Glycine max
  unsure (1)..(487): unsure at all n locations
tggttaagcccacagtctggacaagagtgggttgagctgcttctgttaagttgnctggggtggacatacttatggttntgcaggcgaggtctgacatgtcaggtgagtaaagcctctgtatttgataactttgtccttttctgaccattgaagaacacattgaagacaaatgttacattttttttgttgatgcaggtgtgtgcagcgcacgcacaacactcctgcatacgtatcactcgtggagtgggcatgtattggagacgtgatgtgtgggtgagtggggttgcgatgtggtgcgaaaaattagggcaccacttcagctctcgtcagatatcgaagagttcgttttctctttaaatggagtagacgcttgatntatagccaccatcactttgaattttcgtcttcttccttccgaaatctctttgctttcatgctagcttcttggaattccctttcttcttccttcgccttcttcgatacttca

SEQ ID NO: 235732 - DNA, 422 bp, Glycine max
  unsure (1)..(422): unsure at all n locations
agcttcagaattcaaacactagcagacgtgatctgtgttgctaaaatattgnccttatttcttctatgtttcctttttgattcatggcatttgttttgttttatattcttatcttccaatgcatgttttcatctgctgagttttttgtttcattgcatttgttttgttatatattcttatcttccagtgcaagttttcatgagttcaatgcatgccaagaaaaacctaaagaatattgggttggtaaacgaagactatcattttttcaaatgtgttgggaagggcttactttgtacttatgtagtacttgatttaacggtaattataattttagttgtcttgtggaagtatcatatttgaaaagtgtttatatttttaatgatagaatttcttgtggatgtaattattgttctccctttttt

SEQ ID NO: 235733 - DNA, 435 bp, Glycine max
agcttcaatttcactgtctccatgcaagaagtatttcttctctctacagacattatttcgtctatcccaacggtgggaatgttcgtaaatgaattcccatgggggtgtacaacatttagaacgaccaaacggttaacaaatctgagatcataagtttattgagacagatttaagtgtatacaggaaaaagaaatatttttgggagaaaaaaaagagagaacgaatttgggagaaaagaaagagaacacagaagtatcgtaattataaaaaatgacataatatatctctatttataactagggtacttttatgctattattgactctatttttctttattttaattatttataaaaaagactctattttactctcttattaaataaataaccacataaaatattcctttattgtctaaaatatcattttactctat

SEQ ID NO: 235734 - DNA, 494 bp, Glycine max
  unsure (1)..(494): unsure at all n locations
ngaagagtgaaatacacagaggcaaagaacagagcanaggagccaagttttgatcttttaggaagatttgtgagtttttgagtgattgtgagattcctagaggtggaggagacatcctcattcctttgtaagcaagcaatttctcttaattctttttcttcattgtaaaaggagcttccttgctatggaaggctaaacccttagttagggattcttgctgagtaattgatgtaaactctttccctatctaattaagattgcttttatgtgttcattgtttatatcagtactttattattgcatgcttgtggcttgatcacccatatgtgtgtactgttaggggttttagcattgaaagatgtattgtctccttagaacttgatagagcacgaataggtcaccgtatgtctagacacggagtgcgataattaagntnttattatgttgtgatcataaagntgttcaattaagctaagttcaacaagagacatctg

SEQ ID NO: 235735 - DNA, 418 bp, Glycine max
gatactctaacgtcacctgcggcatgcggcttggacaaaccagtccgttttttgttttggcggcgatgcctgtgggggagcaactacttccatagaagtgactgccgctgatgcctcatcctattaggggaagtcactgcccattcatgaccaaagggagaagattaacatgttcattgagatcatgaaagatttcgaggctcgaaggtagatagatacttacccttcacccatcctatttttggagattcctttgcttctctacactatgataatcttgacaagcggagagtgatttacaaaaagaatcaatttgtctcaatatatttcttgtgtctttctaggattcgcactaacgttggctaacaagggtgaacgagttctgcaaaggcgcatcaatatgatttgtgatttaaac

SEQ ID NO: 235736 - DNA, 353 bp, Glycine max
tcacgacaatttgttgcttagaaaactatagaaaaaccattagagctacatctgaacagcatacttcaactattatatcattaatattattgagcataatctaaactaatggatggtgtcattccctttcaccccttcaccagatatttcatttgctttaacctctcccgctatagctaactgtaccttttcattctcttgagacacgctttctcttactccctgagctttttctttgcgtcctcttctctgagcttcttcgtggtctacaaaagagactcaaacaaactcttcaagctagtctcggaatcttcaagaattgacttaggcattagattctcagcatcttcggc

SEQ ID NO: 235737 - DNA, 443 bp, Glycine max
  unsure (1)..(443): unsure at all n locations
ctctaagtcacctgccgcatgcagcattntggtcggagtgccgcatacttatttgtaggncggctttggtttttcgcgcgagctcaaccgaagctgtgtatcggccgacactggcgtgttctcatttactcggctagaaaaacatcagcccacctcggccaaaaaacaattattcacctacactgataaaaaaaatgatagtcgatgtcggtcaagaaagatgaccgatccagcaggtctaaaataaaaagcaagcatcacctgatgacgccgatcgaacattgtctattggacaatatgcaaaaattattcagggattgaattgaaacaaaaatacctgacatcggtcgttatatagccacgactgaatattttctgccgacattgcgcaatactttttaaaaacactggccgataatagtttttttacggtagaggaagct

SEQ ID NO: 235738 - DNA, 397 bp, Glycine max
  unsure (1)..(397): unsure at all n locations
tgctctanattacattgatgtttgtatatatgggaggtatgtgtatgccatttttgttttaagagtagtgtcccactggtaaaactaactttccaaatttttgccttcgcaggaaatggccccgaggaagcttgcctcaaagaggtccaggaaggacaaggcggccgaaggaactagttccgccccggagtacgacagtcaccgctttatgagagttgtacaccagcagcgcttcgaagccatcaagggatggtcgtttctccgggagcgacgcgtccagctcagggacgacgagtatactgattttcatgaggaaatagggcgccggcggtgggcaccactggttactcccatggccaagtttgatccagaaatagtccttgagttttatgcccat

SEQ ID NO: 235739 - DNA, 333 bp, Glycine max
gttgtagataaacaataacatttgtgtgtttttgaggttttgtgttgaagctttcaacattgatcacgttcctgatgttgtctacttattttgaattcctaaatatgttggaatttttaagttctttttactgaattatccagtttggcacaatttctggaagcaaatatttctcttgccctatttgttgctctgtgtttgtgggtgctgcagttaccttgatcatatggaacattttatcatttcaacaataatattggatgggttttatcattttgcctttccatgacttgtcttttaaaatctcttgaggtcagtggcatccttataaat

SEQ ID NO: 235740 - DNA, 416 bp, Glycine max
  unsure (1)..(416): unsure at all n locations
agcttggctaattaacctgaaattgagagtaattgtattttaaacacacaaaatgaaaatactaagtatttattacctatacttaacagaaaatacttataacactacaaaataaccatagattgggagagtttgatacaatttatacaagttttatacacaaaagttaatcgttttcaccgactaacaactcccccaaatttacaattttgattgtcgtcaagcaaaaagagaacaactcacttgtcctcaagtgacaatgacatgcagtgactatatacaaaggtgtatgcaacanaagttactgattgcataataagagaatggagtaaaatgccctcatcacttgtctttgacaaggtatgcagttatccaaagagaagaataaaatgtaacctgaacaaatagaaggagtt

SEQ ID NO: 235741 - DNA, 390 bp, Glycine max
atttcttgtcttgcttttcgatgggttctagatactcaacttggttttgtggggaattaagtggtgttgcatgtgtagttaaagctgatgttcctgttttcaatttattttgttgatattcttgctttggttctcgctgtgttctacatactcagctcggttttgtgacatgtggcttgctattttttgttgccttggttctgacatttcacttgcaatcttggtgtgacacaatggtaacatttcagttgcaattttgttggcatgcacatgtgtaattaacgctgacgttcttgctttgattttttggccgccgatttgctcgctttgcttttggcctggctctacattgttagcttggctttgtcggaaattaatgttgttcatgtg

SEQ ID NO: 235742 - DNA, 426 bp, Glycine max
  unsure (1)..(426): unsure at all n locations
agcttataaaagattggcagctactaacttgttttaannnnnncggaaacaaattatgtttctttaataagaatactaagtaatttattattattataaaaaaaagtcgtacacaaaccatgtaaaatgtaaatttttttgcacagttatccaatcacatcctattatatatggcgagtttgttaactcttaaaatattaaaataatttaaacggtgatatatgaataaatgataatataaaattattttactttctcagtgtataaatattaaattctattattattattatagtccttagattttataacttaccatgattataatctctaaatagaaactaaagtgattattagaatttaatcttagagaattatttgacttttttttaatgatatcgcctcacaaattaagggactaaaatg

SEQ ID NO: 235743 - DNA, 439 bp, Glycine max
  unsure (1)..(439): unsure at all n locations
tttcagctactagataagagaatagcatcggtgctgtctgatgaagcagggatgatgaaggagaagaaggattcaccgctatgcgggcgcaaatgttgattgccttggcataaaatgcaccggcggaggttgtgatgcgagcgattcatatcacataggtggtaaggtgcatgttgtgacagagatgttgaattacgtggtgttggtggtggtgtangatcagacaccattgttgaggcttcttaagctccagataccatataagtgtttgagtattgagagataaggagagaaagagacatagatttctgaagttgtaacataattctattccatttaacattctgtgatcggttccatcttgtacccttttaaactagtttgatagttgtcaaacaccccatcaggccaattactagtatagtaccacaagttacca

SEQ ID NO: 235744 - DNA, 491 bp, Glycine max
  unsure (1)..(491): unsure at all n locations
actcagctgcacgacaaagataagggtcgactcttatgattgatggataatcggagcttgaaggaacaataatacattacccttgtctcgagaaatatggcctaggaggaaatattctcaagagcattggcatgctgcaacaaattgaccttgggaccctatgtcgaattggcttcactgagagcattcaaaaaccttattaaagactaaacgatgaagtacagtgaatggtggaaacgaataaaggaacaataatacattacccttgtctcatttcaatagcaaccaaacaatatattccctgcagattcaaaattcaaattcaaatgtaacgaaataataataatgattttagattcattgatgcacataaatgtagaaaaaagcaatgacatatcataccttatcttaattgtggatgagaaatgcgatagaagagaaaacnctacacaaagtgattcctctcttcgtttactgactttcctctatat

SEQ ID NO: 235745 - DNA, 421 bp, Glycine max
  unsure (1)..(421): unsure at all n locations
agcttactggtcttttttgttgtcaatggggttacattttggttaactnttatagttaacacattttgaggcatgttttggttgaattgattgcatgaccgagacattgtgtactggttattaatgttgtgaaatttctgatttttgagtgagcacgcgttgttgttgggtgatggttttgtgaattaaatgcgtgtgagtgagttggttagcttgcatgacaggaaattgtggatgaaaaactaaatgcttcacattaccgtgtgagttgtgtgcaccttaatggcatgagaacaactgatttcattttcttgattttgcatgattcttgaatttcttgggtgcatacatgatgtggatatgatcaaggccttgntgtttattttaatttcagccacttaaccaaatagataatcccatt

SEQ ID NO: 235746 - DNA, 442 bp, Glycine max
  unsure (1)..(442): unsure at all n locations
tcaacctttggtgcccatttccgctccanatcgcatagtgtggcattttcacagtcgtgaagcgtgtctctacgtgtgggtcttcgaaatttcaggtttgggtggactactttctcctttgattttcgtgggtatggggttttgggagatatgatgggtagtcttgctaggtttctgctttatgatgattattcgtgaagaaatttgtggaaagcatgttgaacttgccatgtttggatgagttaaacatacccattcagttttagggtttttatgatgatgcttgtgatacttatgtgttgaaattgcttatggaaaactgttatagatgatgggtataattaacctacgcgtagaaagtgagaatgtggtgttttgagtggaaaaagagtgaggctttgagagttgaaaggcttaatctggattcttgtggtaatggagg

SEQ ID NO: 235747 - DNA, 418 bp, Glycine max
  unsure (1)..(418): unsure at all n locations
agcttataaataagnctgggatgcactctttgttatatttaattacaataatattcagattattatctttcaagtaagacatttacatgagtcaaccccctagttttgaaaattccaacaagtagctggtgtgcaaattgaataaggcaatttatggtctcaaacaagctcctagagcttggtttgacaagttaaaggctactcttcttaggtttcagttcaggtcaagcaagtgtgacccctccttgattgtttacactgattccaaaaatactgtcatctatatgcttgtgtatgtggatgatattattgttactgggaacaattcagccttcatcaagtccttagttactaagctcaattctgagatctctcttaaagacctagggagtcttgattactttctatgaattgaagt

SEQ ID NO: 235748 - DNA, 425 bp, Glycine max
  unsure (1)..(425): unsure at all n locations
atatgaacattttgaatcctaanaaaactaagagctaggtttatacagttgtttcacacatgcccttaattagacttgcatacgtttagcagacaagtactctactcagaggtgaagttctaagtcaggcacctcatcatgatcattatcatagtccaaaggaagctgtggaggagcctcttctggctggcctatatgagcacctcctcctccataattattggtgtcacctcctaagagcatttgtagaaatgacgaattttgatccttgtgagaaactgcgccatgaggagagagcctcaagggggtcaacctggacgcggaatctgctcggtgtggaaaaagagatagccctgtaaggttattgctaggcatggcatacattgattctcttggacttggctgatgcataagaggtagtagct

SEQ ID NO: 235749 - DNA, 417 bp, Glycine max
  unsure (1)..(417): unsure at all n locations
agctngtacttaacttcaaattgatagcctattagtttggttttccaacactgctgatctggagatgaaactctctgttgtaaaaaatgcttcaagcatttatgatctgtgtgcacaataaattctctgcccaataaataatgtctccagtgctgaatacaaagcacaagggccatcaattccttctcatagacagattttgccagattcccatcagataaagctttactgaagaaagcaataggtcgtctctgctgcattagaacagcacctatacctctaccagccgcatcacacttaacttcaaaaggtaaatcaaaatttggaagaattagcacagggggagaagtcatgatcctcttcatctcctcaaaggccatgacagcttctattccccaagaaaaattgtctttctta

SEQ ID NO: 235750 - DNA, 492 bp, Glycine max
  unsure (1)..(492): unsure at all n locations
gggagaggatgcttcaatggagganaaganagagggagttaaagagagaggtgggagcatgaaattgaaggaagaaanaggagagaagtttaactttgagttgtgtctcacaagactctcagtcatcaaagttacaacaagtgttacacatgcttctatttatagactaggtaccttccttgagaagctttcttgagaaaacttccttgagaaacttctttgagaaaacttacttgagaagctagagcttagctacacacacccctctcataactaagctcacctccttaagaagcttccttaagaagattcccaaagaagatagagcttagctacacatacctctctaatagctaaggtcacctccttgagatgagaagctagagcttagctatacacccnctataataactaagctcacccccatgaataatacatgaaaatacagaaaaaaatccctactacaaagactactcaaaatgcctcgaaata

SEQ ID NO: 235751 - DNA, 212 bp, Glycine max
cacaaacccaggaacagagacatttttttgcacccccccagagagccccaccgacaaaaacaaagaaccccccaccctgaacatccccaagcgaagcacccggacacacgcacgaaaacagccaccaaacagggtgcaaacccaaacagaaagcagcaaaccacccccacacacagtaaacacacaaaaccagcaagccacccacgcaaaaa

SEQ ID NO: 235752 - DNA, 363 bp, Glycine max
agagctagcgcggcggcggagtatagaaatgcattattcctgaggaagcgaaatttccttcccatctaaccttatcccaagctcttcgaggcctcaaatcgtctttagattcgcgactaattaatatttcttgattcggagataactcgaacgacttttctcacgatggatatgtgcctaaccattctgctagaaatgaatctcgccggctgcttcacataacactctagagaagggtaaactgttcctatagatgatgagtgcgttgatggacctaaaccgcgccaactccatgcgacatagagacttcatgcgctggatgccacgctgtgcagctacccaacgcagaatctgactctttat

SEQ ID NO: 235753 - DNA, 424 bp, Glycine max
tgccacccagctcgcccaggcgagcaaggttgcttccttcataagcaacagccttctggaggaatcttctggagggcccaagtgggcctagttgctatttgcacccccatttttactaagtacacccctgccctcttttggtgattcttctttcgtaaaattacggaaacttacgaatttcgtaacgatacttggtttctttctgtaatggtacggaatcttgcgaattacataatcatcccctttttgacttacggaacctcactaattgtgcaacgatgcttccatttgatttccggtgtgtcacggaaccttacggattgtgcatcaatattttcttttgttttccggcatgtcccggaatttcacatattgcctaatgatgggtgccaagcacctcacaatgaccaaacaaaagttgcat

SEQ ID NO: 235754 - DNA, 430 bp, Glycine max
agcttcatcctcaatccaagagggttttgatatagaagattcaaatgaaatagacgaagatgatgatttcaacctttttgtaaagaaattcaacaaatttctaagaaacaaaggaaatcaaagaagatcaaatttcaaatcaaagaaaagggcagcagattcatcatctcttccaaaatgttatgaatgcaatcaaccaagacatctgagagttgattgcccaagtttcaagaaaagaatagcgagatctgaaaagaaaactttcaatgataagaaagcaaagaaggcctacattacttgggaagacaaagatatggactcatctgaagatttagataatgaagttgtaaacctgagtctgatggccaagaattatgaaagcaatgaagaggtttccttaaagaagagttggtacatagatagtggatgc

SEQ ID NO: 235755 - DNA, 486 bp, Glycine max
  unsure (1)..(486): unsure at all n locations
tagattattctanatgataagcctttaggttattgatgtggtccttttctttcttgaattgggggaagagataaggcaccatgacttgaatcagtgtttagaagaaaagttgtctaaatcattatttttctttcaattttcttatttctacccttcaattgatttagttatattcaaattcgatctaacaggagagtttttagattgaattagcgtttatttattcttttattctttttagaatgtaaataaccaatcgatctaataatacacaatcaatataataaaaaataattcagattatcaagcatctgatcctataagctatttgttatcgttacaagtctaaaattgatgtatctcattttatttttgaactagtggaaagaacacaatatcgcagctagcattttttaagtctgaaattaagtctaagaaattgaaactaactcgcttactttattacttgtcgggatatattttatg

SEQ ID NO: 235756 - DNA, 425 bp, Glycine max
  unsure (1)..(425): unsure at all n locations
tggagaggatgttntaatggttgaaaataattagggagagaaagagagagggggagcacgaaattgaaggatgaaaaatgggagagaangggaactttgatttgtgtctcactagactctcattcatcaaagttacaacaagtgttacacatgcttctatttatagactaggtagcttccttgagaaaaattccttgagaagcttctttgagaaaacttccttgagaagctagagcttagctacacacacccctctcataattaagttcacctccttgagaagcttccttaagaagattcctaaagaagctagagcctagagacacatacctctctaatagctaagctcacctccttgagatgagaagctagagcttagctacacaccccctataatagctaagctcacccccaagacaaaatac

SEQ ID NO: 235757 - DNA, 446 bp, Glycine max
  unsure (1)..(446): unsure at all n locations
ngagtacctgatgaaataaaactctataagcattaagatcataatacaatgcccttcctttacagctgcagtactccaatgcttgtgctaaatacaaggtcactctcaaccccaatgcccatttcattggttggctcttattttacatgtacgtgactaatttgtatattttatattttgtagtggtttggtgatgacacatcattagacatcgagatcataacaaaaatttgcaagaaatgggtggcaaattttttaaaagttaaaaacatccgatctagaaaggtttggatgtcataggacgaaccactatgttgtatttgatgtttactgtaaacattataaataagtttgtacaattattgacaattatttgagaaataaatatacatatttttatttcattntctctgcaccanaaccctttggacaatgcattgattctc

SEQ ID NO: 235758 - DNA, 428 bp, Glycine max
  unsure (1)..(428): unsure at all n locations
catagcttagaaacccaagcgtcttagttgtctatattatgtcaacatacttattgacttaagaacctataatnttcgttttataagtatgaaaggcattgaaaattatgacttgtttggtgagagttcttactcgaatttggctgccccatgagggagactttgcacctgtgtagcgtggaaaatacttttcaatggaatgtaaatatgtgtgtaaatataggtagcatggaaaacaccttccaatggtgtgtatatatgtgaacatatggcatgaaattccttgccaagtgtgaatgagtatcttcctaaataaatattgaggtcgcttcctatatgaatgtaagatggcatgggaatcccttttgagtgcaagtatgtgcatgacgtaattagctttcccatatgcatataaataaatgtgaatg

SEQ ID NO: 235759 - DNA, 481 bp, Glycine max
  unsure (1)..(481): unsure at all n locations
tatagagttaagtctcatattggcttaatcatttatagttctactttaatcgatttgagacaatgactgatttttcaagagtctctggtttaattgattaccaggtggatcaatcgattacttctttcttgttaaattgttcaaagccgaacaaagaacactttaattgataacttatgtcatctaatcgattacattgttcttgagtggttttctagatgttggatgaacactttaattgataacttaggatatgtgggacactctacaagttacacatgagggaacaactgatgtcaaaagatctaggataaatactctaactcatgagtatgaattatctaggatgaagacaaatgagagtactatacaagatatgcagaaaagattcacacatatagttaatcatcttgcatcattaggaagaacttttcaaacaaggatctcatannataagtgttaagatgctatagtagagaat

SEQ ID NO: 235760 - DNA, 455 bp, Glycine max
  unsure (1)..(455): unsure at all n locations
ntacataatagtaaattgtgtaagaagaactatgtgattataagncaaacaaatatatattatactattttaatatataataataataataatactaatattaattgcaatggctttagacaattttaatatatattatttcacagtatataatattataaatatttttagttattttgtgaaatatatactttaatgtaccttatttttaaaaaaaataaaattaagcatagtcaaatattatttaatctactattaatatgaaaatgattatttaaaatagtatcaaaattatataatgtagagttaatacatttagacgaatttggatgaacttaattgagaattatatttcacaaataagataacttatagcgcagatctatttatttatttatctgtatataaagatcaatcttaaaactcattatacataataaaggtcctataatctt

SEQ ID NO: 235761 - DNA, 312 bp, Glycine max
agaggtttttgttgacaacgtagggagatgagggtcgctctaatttatttgtcacaccaacccacaatggtcttcaatgttggttggtcacaaggtaataatagatcctatacaaccacaccttgattgcaggtaaagggatattgaggtatatgagacgaacactcaaatgaggccttttgttttctcatcacactaagggagatgataagcctacacctctgtatgctacttcgagtatgaccggtgtggtgagctaattgacagaatgagcaccatgggaccaaatttactgcgggcaggggctcccat

SEQ ID NO: 235762 - DNA, 481 bp, Glycine max
tacggaccttaaatactcagctggtacctcttcttactacataagaatttctggttgaggtctctctgcggctgtcttactaggttaaccccatgctctaaatgtatctaatgcatacatgtggatgggctaataccaggaatgtccgccagggtccagcctatatccttcttatgcttcttgagaattgataaaaacttctcctcttgctcatcaacaagggaggcaaatataattactggaaaacgtctgctatcatccaagttagcatattttaaatttgatggcagacgctccaattctggtgtgggcgcgtggataatggtagaaggagatggtatctcatcctgtacctcatatagaaagtcagaggtatgtgtacttcctgagacatggttgttctatctgactctacgaaatctatcttcagaggttgaacatcagtcgacatgctatcaatatcaatgttagattcactctc

SEQ ID NO: 235763 - DNA, 422 bp, Glycine max
agcttttacaaaaaggttcatcaagtcaagtttaaatatggaagtaaccatcctgcaaaattggggcaaaagatgaatcgagtcacatcactgcttcgtctactgccaaacatatttaggattgttgatgtccttgttacttccagtttcaccttgacaaagatgtcatggaccatgttgaaaatctaaattgattcaaccccatatcctgcgtaaaaattcgcaatacttcgactgtacatcattcgcatgcatccatgcttttcattggttgcattgctcgttgcattctttccttgaaaaataaaataaaatgaacttaatcattgttataaaaaaagaaagggacacgctttacgacgcccttaccgaactcgtgctagagctagagtaatgggtgaagtagaggagatacaagagaa

SEQ ID NO: 235764 - DNA, 311 bp, Glycine max
  unsure (1)..(311): unsure at all n locations
gttgagcaattcacatggacattacttctcactcggatgttttattcacgcgcataatatatcgagacgctcggaattgaacaactgaagctctggagaatatcaaatgatcataacttctctcacgcaggtcagaattatgcgcatacatatatcgagacgctcgatattgaacaacggaagctctggagaaatcccaatggtcatttcttttctctcggaggtccgattcacgcgcatgatgtatcgagactatcgatattgaacattcgaagctttaancgattcaaatggtataactatcactcgga

SEQ ID NO: 235765 - DNA, 423 bp, Glycine max
  unsure (1)..(423): unsure at all n locations
ggatcttaagcaccgcagctgcngcttgaaagatgctttaatggtgttatttattagagaaggggggagcacaaaattgaaggaataaaagagggaaagaagtggaactttgaattgtatctcatatgactttcattcatcaaagttaccacaagtgttacacatgcttctatttatagactaggtagcttccttgagaatatttcttgagaaaacttccttgagaagcttctttgagaaaactttcttgagaagcttaagcttaactacacacacccctcttataactaagctcaccttcatgagaagcttccttatgaagattccttaagaagctagagcttagctacacatacctctcttatagctaagctcacctccttgagatgagaagctagaaccttgctaccacccccctattat

SEQ ID NO: 235766 - DNA, 461 bp, Glycine max
tgttaggagtccagctctcatgcgaaatacaaaacctttcacattgtaggccaaagtacccgcagattcaaatctacccatattttgtatccatttacaacttcagtaggcttaatgattggaatttttctaagcattactattctttagtttttttatagtgatgtattgtgtgttggttcaaatcttcatagtgcttatttgtgtgtgacttaaaacagagttacctccttaaaaatttcatccacgcaaacttttagaggagagtatacggatttaccaacaaaaactaattggaaatatgagctgtccagttcattgattgattgaagcataattacagcacaatatttatattctgttgcataattactcaaatagaatcaatcttatcctcataatacataccatactttgctcttaacttcataagagacacaaagaatgagttttgttcattc

SEQ ID NO: 235767 - DNA, 425 bp, Glycine max
  unsure (1)..(425): unsure at all n locations
agctnnaaaanatnnctatgcgggaaacgttatatttttttttagcccngcaaactaatatctatgtgaattttgtagtctctcaaattcttatgaaatgattttttagttatttctaacagattctgttgctattggattacataatttatgataattttttattgcatgaggaactacattttttctttgcaattctgaggggaaaaaacgtaaattttaatagccatacacccttatattactgatgaaactgcaacggtcccatatttctttagtaataaaattttgctgagcttcatataaaagctctaattgttggaactctgctagttactgtaaggaggcagatagtatatagtgcgccttaaagttctgcactcttaatccctaacagtgatgtcaatactatattatgagctaac

SEQ ID NO: 235768 - DNA, 468 bp, Glycine max
  unsure (1)..(468): unsure at all n locations
cctggacccactntatatactcaccatgtgttcaattctttttctatncagaacaaagggtgacaagggtcatactcttaaccactcaatcaatgaggttcaaatactatctaatcaaccaactctcttaatagcttaagccattatgtgaagaccaaaaatgggtttattacatctgtaacatgtacaaaattacaaatacattataattcatctcttccgagttatatatgtgcaaacaagaatttcataaatggaagttcatcttacaaatctggcattggctgtgcaaggaaaataaaaattgtaaatggcataattttgtacacgagtttctaaccaactttgcactagacaagagtaaagcagtgaatatttacattacaatgaatggatttctgaacactatatccaaacatcattgtcaaccttgaaaacttaacacagtttaactacctacaacactgg

SEQ ID NO: 235769 - DNA, 432 bp, Glycine max
  unsure (1)..(432): unsure at all n locations
agcttgtctaagtccttacaatgattggtttattttgtataccaaggaagaattntctaacttgtaacctttggaagttccatataaacttcttcaaacaaatatccattcaaaaaaacattattaacatctaattagagaaggcaccagtttgtagcagcaacaacacagagaaaaactctcacagtggtaagcttggccactatagaaaaagtatcagagaaatcgattccatcttggtgagtatatcctttggcaaccaatgagctttgtatctatccacagagccatccattttatatttaaccttatacatccagctacaacctatacaatgcttatcaggtggtaagggaacaagtgtccaggtggaatttgcctcaagagcttatgattcctcattcattgcctgacgccactcaggataggggg

SEQ ID NO: 235770 - DNA, 501 bp, Glycine max
  unsure (1)..(501): unsure at all n locations
taaaactaagctatgctgcnacattataatagaccccctcagcagcatatccaacatcagcagaataattatgacctttcaagcaatagatacaatccaagttggaggaatcatccaaatctgagatgggcaagtcctccacaacaacaacagcctatccctcccttccagaatgctgctgctccaagcaggccatatattcctcctccaatgcagcagcagcagcaacaacaacaacaaagacaacaagcagctgaggcccctcctcaaccttcagaatatgcaatttcagcaagagacaagagcctccattcagagtctgacaaatcagatggggcagatggctactcagttgaaccaagctcaagtcccaaaatttgacaaattgccttcataaactgtgcagaatctgaaaaatgtgagtgtcatcaccttgaggtctggcaagcaaattgaagtgccttcaccagtagtagcacctgcacctgaacctgtcaagct

SEQ ID NO: 235771 - DNA, 222 bp, Glycine max
  unsure (1)..(222): unsure at all n locations
agcttaccaccataggaggccatggatatgtattttttttttnaangagatgagtgaagtgcatatggtgaataaatctcatatgtttgtgctctactatagctatgtaatctcaaggtatatattctaactgagcatagattgaaaaatatgcacacacgttgacctctattctatagccttaacttgccacataattgttgggaaattcaaatatcacgt

SEQ ID NO: 235772 - DNA, 484 bp, Glycine max
  unsure (1)..(484): unsure at all n locations
tgtctcagcatttatgcgagacggagaccaacatgctatctatcatcgccaagtaccaagaagagttaggtctagccacggcccacgagcatagaatcgcggatgagtatgctcaagtatatgcggaaaaagaggctagaggaagggtgatcgactctttacaccaagaggcaaccatgtggatggaccggtttgctcttaccttgaacgggagtcaagaacttccccgcttgttagccaaggccaaggcgatggcagacacctactccacccccgaagagattcatgggcttctcggctattgtcagcatatgatagacttaatggcccacataattagaaatcgttaggaaacttgtatggtctctcagaccttgactggatacgacttctttntttgaaataaaatgagttggtcccatgtntctactccanaaagcttgtgcanatcaaatcactcctatatttcatctctagcatgcat

SEQ ID NO: 235773 - DNA, 417 bp, Glycine max
agcttattatccaagacactctctgggaggagaagctttttcttccatggcttattccctagcggatggctcctcctcccacctttttttctttatcttccgctgcaactccatggtcgaaaatcaccattgaaggaccttattgaagctcaaagatccatcctccatagaaacttctcaagcaagcctccctcacttggataaccatttgatcaattccaagctttgcataacaaaatctaagaaaattaaacttgaattgcgggtctagaatgcatccaaagcaaagcaataatgctatactcaccctaatatttatcaattttctttttcatatcaataggcatgtttctaatgagctcatcctcattattcacatgttgaatcaacaaacataaaatcttcctgacttgcatg

SEQ ID NO: 235774 - DNA, 490 bp, Glycine max
atgagaacaagcatgcctcaatcattttagaatatgcatgagaattacgaagcatcaccaagaatgaatccaaggctgttgtgcaagcaatcaatggtgcaaaacacaccaaatgattatgatgatggatgtgctcatattctcacaaaggtaaactcatcactttcaaattgatctttcaaaactatcatgacatgtagaggagaatcaaagatttcaagtcacaaaatgtcaaaaacttttattttcaaaacaattatccatttcttgaacatatcctataattaaaagaaaaacatgcaaagtcgtacatgcgcacacaattgacccagaatattaaactaaaaatcctacggaactaacatcattaacaaattaacaaaaccaacaaaactaacacagaccacagaacactcccccccatacttatacaacacattgtcctcaatgtaacacaattaagagagtaagaacaattaaatcattcaat

SEQ ID NO: 235775 - DNA, 380 bp, Glycine max
  unsure (1)..(380): unsure at all n locations
gcatgcaagcttcaggctggnctattgcttcaaattgttgttcaatatgttcaagggctgtatggtggtcggcaaaagagcatataacacagagtcttgtgacaggtacaaaattcttattcaaggccaactgggttaccaagttaacccaggcatctaatttaccctcaagctctttattttcacctgatgaaaatgaattcgtggctacttcatgcactcctctaacgacaattagcataatttggcactaaactatagggagttggaaatcatcgtcttcaataaattcctagcttcaacagggggcatgtcttctaggacttcaccactagcagcatctaacatacattctctccataatactgagatccttcata

SEQ ID NO: 235776 - DNA, 498 bp, Glycine max
  unsure (1)..(498): unsure at all n locations
ntccctctntgaacanatacccctcagccaaatagaattcatcttgggcctttntcccacaactctcataaatgggagagaaatgttcatctaaagcatacaagtccctaatattatcaaatcctaaaatttgagctcctagggagcaaaacaatgtgtgtctcctagagagggcatcagctaccacatttgtttttccctttttgtatttgataacatatggaaattgctctaggtactctacccattttgcatgcctcttgtttaacttgctttgccctctaatgtacttaagtgattgatgatcactatgaatgacaaattccttggaaacaaggtaatgttcccaagtttggagggctcttattaaggcataaagctctttatcatangtggngtagttgagggtggcactatgaagtttttcactaaaataagcaatagggtgcccaccttgtaacaatacagctncaactcccactccagaggcatcacatt

SEQ ID NO: 235777 - DNA, 422 bp, Glycine max
  unsure (1)..(422): unsure at all n locations
agcttcatggagaagtaaaggtgatttctatgtgttntgangataacaatgatgataacaaaagatgatgacaaacagctcaaagatcaatcaaagaacaactcatgtgaatcaagaacaatttaagagttctagataagaatcatgaagaattcaagactcaagaagaaagttttgaatcaagaatcaagattcaaggttcaagatctcaagaatcaagatcaagattcaagactcaagattcaagaatcaagagaaggcttaatcaagataagtatgaaaagtctttctcaaaaattgagtagcacatgatttttctcaaaacatgtctaccaaatagttnttactctctggtaatcgattaccagattgttgttatcgattaccactagcaaaattgttgtgtaaaagtcttcaaattg

SEQ ID NO: 235778 - DNA, 489 bp, Glycine max
  unsure (1)..(489): unsure at all n locations
ntctattcattgattccttaaccatcatgtatccttggtttggttgccaagagattactattcaagggatacttttcacacaatatcgagggtcccacacctccaccaaactactttagttcaaatattattntctcaattctcttccattccacacaaccagactcacccttaagggcaaaggtcagcataactgtcttaaactagattctctaatttctctatcgcattctctatgttagagcacagtaagcaagacctaccttaccctatcttttcccttggttgacttggttttgctggtgggcgttgaacacacatttgtaagagataagataaacatagttcgatggaaagacatgggctgagggaggttatgtatgtccatgagagcaggaataaggatgcagccaatggtacagaaggataacagctacatanaactgtggaggatactgtttgtggggtgggtggaacagaatgaacact

SEQ ID NO: 235779 - DNA, 418 bp, Glycine max
  unsure (1)..(418): unsure at all n locations
agctngaaccttaaatctcgagtcttgattctttaaatcaaatttccttctgaaccttgaagtgttcttgattcaatcctgaacatcttgaactcattctttgattcttgagatcatcatctttgttatcatgaagtattcttgacctttgagctttttttcatcacctttgttatcatcaaaacttctttgaatcaatcttgattcatcatgaagcttgcttctacaggtaagtgtgaatatgaacaggtgtataaactatctgtgcaaaaagaaagaaaatcacgcgagagaaataatgtgtaaaaacaagtagagaacacgttggtcttcctaataggttcctaatgctaaaaagatattctctatctagcaatgctcatgtgttcttatggtgtctccggagatacttaacccc

SEQ ID NO: 235780 - DNA, 396 bp, Glycine max
  unsure (1)..(396): unsure at all n locations
cctgagcatgcagctgnngactttaagaaatatctttttatcatgccnnngatcagttgataatggaaatatataaaaaattacattgacaatgcataatggttaaaattaattgtgaagggatataatttatatttggatgcaaggtacaagaaaatccaatgccaaattttggatcgaacacaaaagtaactcaaaattgctttaactcagaaccagttctggatccaaaataattatgaactcttccccatgtataatcaaacatgtcaaaattgatccaaaatcaaatctatactcagaattattctccaccatgaaacgaaacaagtaaaagccacaaataaaattggatcatatataatcatatcccatcagatgcacagtagttcagtg

SEQ ID NO: 235781 - DNA, 477 bp, Glycine max
  unsure (1)..(477): unsure at all n locations
ntcgaaaactacatgagatgtctatgatgtgactcctttgtttcttctctttataggaattcggcagcttccctaggccacttttctgccttctatagccatgaaaagaagaggacttgtcagaaggaaacctacaaagtaaatgcctcagtctttttttccaatccacgatgcattattccactacgaaatcaaagttgtggccttgtggaaaacaatattaacttgagtaaccacttgaagtcacggttataaacatgtaatgtaatataacaaacctatggtctttgtaagacaaaaaaagatgtaataattgtgcgtgtatgcatgtatcgattattatgatccattggatacatgcactctagcaccccaattcagaatatctcagaagttattataagatccatattagagtacaaggataatcggtaacacctaattgatttccaacttgcctctcgtttaaatatgtgt

SEQ ID NO: 235782 - DNA, 416 bp, Glycine max
  unsure (1)..(416): unsure at all n locations
agcttctcaacagggctggtagaatgaccttattccaatcagnggtggcatccatccccttatatgtcatgaacaactatcttcttcctaggtacttgggaagctattgatactttggtaaagaagttcatttggggtagcaactcctctactattcacccgattaagcaattgtctcctccgttccattcttttgcgataattttgggatcaatttaattgttcttggccctccaatgggaagtccgcatcatacacactttgaaagaagccaatgccagcgctgatactattgcaaagaagggagctntcattaatgttcctttagtcacattaagaaaatgtccttctaatggtttggcttgtgtcactgctgaagcactagtgtaactnttgtcctatcctttctctactaa

SEQ ID NO: 235783 - DNA, 488 bp, Glycine max
tccctttacgttactttggtttttgtcttggaaagtcaaatttctctgctaaacgtgatttggatgtgttttcaagcacactctaagttggtttgggtttgattcataaaggaaagttcatacttctcaaaaaacctgagatgaggagtacagagattacagaagttggtttagattttagaaagaaatctaaatttcagtgacaaggatatgtagtaagcagagtgtaaagactcgacttagtttatgcatattatacaaacacaattgacacttggtaaatcagcacgagggagtacttttacactttatgttcttctcatattcttttactgggccatttcttttcttaatcatcttttttcgtgagatgagaatcctctatccttgccacatccatgtgtgtttttccctccattttcctcttcatagattgtctcagataatctccatacctgactttctgatacaacttggggttttgagca

SEQ ID NO: 235784 - DNA, 422 bp, Glycine max
tgcgagcctatgcgccaagttaccaacgaacgttcacttgcgccagagattctattatactatagaaaatgcgcccatataccatcaaggtggcttcattacctataatatttacatggacttccaaggtgggtttgttatttacatcacacacgcctccttgggttaatttacatacatgcatactcaaagcatttgggggtactcacaaaatgcacatgcgctcaacttgggatttctaatacctatacatatacaaacttcatgatgaatcttgactacctacgcaataatgtgctacatttcatgctcttttttattttctttttctgagggaagattaaccatgtccctccctttcatggataaacatttggctacatgaactacttaggtagaataggcggtgagacttattttta

SEQ ID NO: 235785 - DNA, 441 bp, Glycine max
  unsure (1)..(441): unsure at all n locations
tcaacctttggtgctcatttctgccgcaaattgtgaaaggagagcattttcggggtcgtgaagtgcgtggctactagtgggacttctaaaattcacgtttgggcggacttctttctctcttaaatttcgtgggtatggggttttggggagatatgatgggtaatcttgctagggttctgctgtgtgacgattatttgtgaagacatttgttgaaagcttgttgaaattgccatgtttggatgagttaaacatacccattctgttttanggtttttgtgatgatcgttgcgatgtttatatgctgaaattgctgatggaaatcttgtagagacgaagggtagaactaacctatggttagaaagtgagaatgtgatgttatgagtggaaaaagagtgagactttgagagctggaacgctaagtctgaattctgtggtaaatgg

SEQ ID NO: 235786 - DNA, 421 bp, Glycine max
agcttcttatcatgggaggccttcactttgttcttgtataatctggcacactcatacatattccatctcatttcctccaactccaacagttgtgtctttctttattccctagatgcagcatcatcaaaatttaaaaatttcaaagctcaatatgccttatgcttcaattccaccgataaatgacaagatttgccataaaccatctgaaacggagataggctaataagagacttgaaagcaattcgataggcccataatgcatcatctaacttgcttgcccagtcttttctatttgatgctacagtcttctcaaagattttcttcaattctctgttggagacttttgcttggccattagtttgcgggtgataaggtgaggaaactttatgtgtaacatgataatggcctagcaccttctgca

SEQ ID NO: 235787 - DNA, 474 bp, Glycine max
  unsure (1)..(474): unsure at all n locations
tagaggtatggtacatggtgtgtgaagagatttangatttaatganagttataataagagaagggtagcatgggaatattgtaaaattgagggtgcaggaagcagaacagtaaatgtatgaattttgtttttcaaaaatatgttttacaaattaatggcccaaacagaaattaaacctatgactttcacgttattagcacaacgctctaaccaactaaaatttctaatgtatatttaatgcgcatgtaaatttagataataaattttgtgacaattaattctgatctaataattaatatgtgtactatatgattatttgtgaaacctatgatgtttatttaaaatttatatatataaaataatacattattagatcaaaattaattgtgatagggtcaaataatacattagtagagttatggtaataaacctatgactnttatttataatttatatatctaaacaaattaatta

SEQ ID NO: 235788 - DNA, 386 bp, Glycine max
agcttggctgaacctaacatgccaagaaatgcttgtgaagatgcacctgcatgactgcacgaatacacttactgaattaaactctcttcagggaagcattggtggtgttgtggatttggccacaatcatttggcttctcggaagctccaattgtcgtccttcagggatgttttactatcatagctcctggtttgatgatgtctgagacagagatgggttacatgtttcggtgtggatttgctccattgagactgatataaacacatatatacaagataagaacttaatcttaaataacaacaaaaaccaattaaacattttaagaccaaattcataaatggttttttcttacacagatacctgtttaaattttttggcagaccata

SEQ ID NO: 235789 - DNA, 485 bp, Glycine max
  unsure (1)..(485): unsure at all n locations
ngtaaagganaccctcatctattctcagtattntttagttcaactcgttctaattattaagtttatcttaatagagatacataaatcaatatatgtaataaaaatggtgtattctttttttaaaaaaaaacaacagggttcaatgtccagtctaccacaacatctataaatgtaaaaacaaaaaagcatgtcattaaaataaattttaaatctgtacttacaattttaaactaaattacagaaagaaagaaagaaaaaagcttaatgcttcaagttcaagttgtttgtgtttcacttccacatctaattgccttcatacaaaggcagtgtcctgctctagaacagatatttaaaatgctttttgtaaaaaaaaaattctaatcagtgtccttaacaatgttgttgactaatagttcatatattctctatttaatctcaccatgccttaattataacaaaatccagcaatctgaattatataatat

SEQ ID NO: 235790 - DNA, 356 bp, Glycine max
agcttcaaactgtcaaccttctcagccgagatgattgtctagtcctcctagatgtagcatctgaaagaatatttgaatgtggaggggaccttgggggtgttgtcatgaatctacacaagagaaacaaataaaggtactaggacatgttagttatataaacaacatatacctattaagttgtaaatattacaaaacataacatgatttcaattatgtaatatgctatatacattaccactaaaaacataaccactaacgcatgaatattatcccataaaccttcatcatgaacattccaattctcatgaacaacatctcttctgatctcaccatttattaagcgcatatatttatac

SEQ ID NO: 235791 - DNA, 407 bp, Glycine max
  unsure (1)..(407): unsure at all n locations
tgagacnncctagaaatatgggttttacgacacactaactacatcgatctttctaaaccaatggggnataacaagcggtggcaatttcgtaattataaagttagaaaacgaagacggtgatgtacaaacccatctttgaattgcgaaaacaattcttcgacgatgttgttttggtgaacaccatggtggttggcgcggcattatagtcacgtgactcgaacaacactcccatgacctcaaaagactgagttgtgcgccctaggtacgtgaagactcgaacaagagtcaattgaccccttcgttactcagtttgcatcgtcactcagctctcccttcctcagtcatcgtcactcggttcgcatcttgtatcgtgactcacgccacaccttccgcggtggcgcacccta

SEQ ID NO: 235792 - DNA, 418 bp, Glycine max
  unsure (1)..(418): unsure at all n locations
agcttgtctcagcgnttatgcgagacggagactcatcatgctagctatcatcgccaagtaccaagaagagttaggtctagccacggcccacgagcatataatcgcggatgagtatgcccaagtatacgcggaaaaagaggctagaggaagggtgatcgactctttacaccaagaggcaaccatgtggatggatcggtttgcccttaccttgaacgggagtcaagaacttccccgattgttagccaaggccaaggcgatggcagacacctactccgcccccgaagagattcatgggcttctcggctattgtcagcatatgatagacttaatgcgccacataattagacatcgtcaggaaacttgtatggtctctcagaccttgactagatatgacttcctttttgaaataaaatgagtt

SEQ ID NO: 235793 - DNA, 494 bp, Glycine max
  unsure (1)..(494): unsure at all n locations
ntgctgatttagttntcgccgatgaaaggatcgatatgtgtctgataagaggcaaatttaatcatcctgcttggacgaatganaaaaaaaatggggcaaatgaagagggtgagaatgagggagaaacccatgttgtgattgccattcctatacaaccaagtttcctaccaacccaacaatgtcattactcagccaataactaaccttctccttccccaccacccaattatccacaaaggccatccccaaataaaccacaaagcctaccttccacacaacaaatgctaaacaccaccttgagcacaaaccaaaacaccaaccaganaaggattttgcagcaaaaagcctataggattcaccccaaattccgatgtcatatgctaacttgctcccatacctactcgacaattcaatggttgccataacccctgctaggtttcctcaacctccatttttctgaggatacgactcganacgcacatgtgcatatcatg

SEQ ID NO: 235794 - DNA, 409 bp, Glycine max
agcttgggatgttggggaagggttttggaataattaatgatataggaatggctattttccaaggttacacgaaaaataagacttgaaacactcaagtgtttctgctctcgggaaaagaagagtttttcacacaccagaagacatatcacagatcacaatgggcaattcatggacatttgtcctatgaacctacagaccaaatttagaaaagatccaacagttaacgaatgcaggagggcgcttttaccgagatggcttcaggcatcttccttgagaagctttctcgtgaggcttctttgtgaagcttccttgagaggcttctttgagaagctaaagtcttaactacccacacccctctaataaataaactaacctctcggaaaataaaacgtggataaaataacacaac

SEQ ID NO: 235795 - DNA, 496 bp, Glycine max
  unsure (1)..(496): unsure at all n locations
ntgatgctattgcttagcttcacaacaatatatgcctactactataagaattaaggactcaattcagaaacacagataaaagtgcaaagatctacttcatcagaataatttgtagtccataaaattcaactacaaatacaattagttccaggtacaaaaccaaatttctacctaacctcttgatcaatagaaaaactctaagcttggtttattgaaataaaaataaaggcaattctatattatcatatttttcagcatccccacctttttccattactcttgttcattttattttatatgtacgcagtttttgctacgtgaaagtgagcaacaatgacttttccttagtttttacagatgatttgtatcagattttgctttccttagaatagaananaaacttacattataattccaatgaggacccaccaacatcctttaattaaattatatgaactcgcatgatatcgaatggcagataccctcagttcccatg

SEQ ID NO: 235796 - DNA, 436 bp, Glycine max
  unsure (1)..(436): unsure at all n locations
gcacactgaactgatacagtatccattntttgtggaggaaaaaagatacaatcatgtaattaacagacaatatttaccattcattcatttcagcatcattgggataatgctgatacaccatttaagtttgcagtgcaataaatattcgtccttataggtcataccatcaaactacagtaatgcaaaacttattcaaaacataccagttaacattgcctctgagtgtgttgatttctccgttgtgtcccaatacacgcataggttgagcacgatcccagctagggaaagtatttgtagaaaaccgtgagtgtatctgcacatatgcatgccaaattgtcagtaatcatgattatattcttgtaacacaatataaaacagtgtagaagatcaaatgcaaaaatggttttttcttccatgtacaatacaaagcatatat

SEQ ID NO: 235797 - DNA, 403 bp, Glycine max
  unsure (1)..(403): unsure at all n locations
agcttgtagaatggctagacatgatttatgtttnggtntnggnttggttcaaggataaaagggatgccccacattatttccatgacacaaatgcaaacatgatgaattggaaactttatgcaaaactggtcatgcatgcacctatgcggacactcaagtgtcaaatttttatggtcatgtgatgctagggctcacgattcatttcctctatttttagtcaacccaacgtttccaaaatatgttcttttatccatttgtgcattcattcgagtccatttcaagcgtccgggaaaattttcacagcattcacccttcaggtgtatacacattnttcaaaaactagttatgatcagtcaattttttcaaagaaaagttggaagtcatctcttttcaaaagcatgtt

SEQ ID NO: 235798 - DNA, 473 bp, Glycine max
  unsure (1)..(473): unsure at all n locations
tggtacacacagagaccaacatggtcatctacaccctttgtcgaagagncaatgtctatcgaccgagactactttagtctccccttcgttaacccgaggcaagagagcctgttggtacgcagagaccaacatggccgtctacaccctttgttgaagactcaatgtctatcaactgagactactttagtcttcccctcatcatccagaggcaatcaagtccgatgacacgtagagaccaacatggtcgtctgcatcctttgtcgaagactcaatttctatcgaccgagactactttagtcttcccttcgtcatctagaggcaatcaagtccgatgacacgtagagaccagcatagtcatctgcatccttggtcgaagactcaatttctatcgaccgagactactttagtctccccctcatcatccaaaggcaatcaagtccgatgacacacagggaccaacatggtcatctaca

SEQ ID NO: 235799 - DNA, 423 bp, Glycine max
  unsure (1)..(423): unsure at all n locations
agctngnagaaaggctagacatgatacatgttatggctnggnnnggttcaagggtaaaagggatgccccacattatttccatgacacaaatgcaaaaatgatgatttggaaactttatgcaaaactggtcatgcatgcatctatgcggacactcaaatgtcaaatttttatggtcatgtgatgctagggctcaggattcatttcctctattttaatcaacccaatgtttccaaaatatgttcttttatcaatttgtgcattcatccgagtccatttcgggcgtccggggaaatttcacagcattcacccttcaggtgtagacacattttccaaaaattggttatgatcaatgaattttttcaaagaaaagttggaaatcgtctcttttcaaaagcatgttggtttttcagcttgacaacttat

SEQ ID NO: 235800 - DNA, 416 bp, Glycine max
  unsure (1)..(416): unsure at all n locations
tngcggatctggtctatgccagtgaaaggatctatgcgggtctgaaaaaaggaaaatntagtcatcttgcttggacaattgataaaactgaggcaaatgaagagggtgaggatgaagtagaagcccatgttgtgactgccattccaatatagccaagtttcccaccaacccaacaatgtcattactcagccaataacaaaccttctccttacccaccgcccagttatccacaaaggccatccctaaaatcaaccacaaagcctacctaccgcacttccaatgacaaacaccacccttagcgtaaaccataacaccaaccaagaaatgaattttgcagcgagaaagccttataattcaccccaatttcagtgtcttatgctgacttgctcccatgtctacttgataattcaatggta

SEQ ID NO: 235801 - DNA, 363 bp, Glycine max
actatcatatgcgggccacgctcttatttttctgttcccaaatctaatttccattcttagaagactaagacatccaagacctatgctcctttgtcatctaagtcattttgtgtaacttcattcaaggtgaggagggctttccacttcttgaaccctaccttgttgtctttggaagctaagattcgctgcatgtcgttttgatgtttaaatattcgcatctactgccttgggttaactagagcatatgtcatttttatggaaactttaaggttaaaaatgtggtctttaagtgtagaaacttacggttagtcttaatattcacttaaataaaagttctctacgttaagttatgaataacacaag

SEQ ID NO: 235802 - DNA, 488 bp, Glycine max
  unsure (1)..(488): unsure at all n locations
tggctttggaccttgtcatcagatccttcatctcatgatgtgcctctaggtccttatgctctttgagtagccttctattaatgatgatgatgataatgatgatgatggtcatggtggtgatgatgttcctcaataacaacaaacaattacacgtgattatcctataacaaaaggaggaagaggtcatagaataagaagacaaccaccaccaacaaattaagtgcaacaagatgaaagacctcaacatatatatagaagaacttgttgtgtgacatcatctcactattaatatttttgttaaacaagtatgtagttcattattatttttttcatttaaatataagtcttttgtttacattaattttctaatatacgaaacacataataatccttaacattagtaacaaaaatatagaacaaataaacaaaataatataaaatttagaanatatattatataaaataatatacaacactatagaaaatat

SEQ ID NO: 235803 - DNA, 375 bp, Glycine max
agcttgaccacaaatgccagagacgaggaaatgttctatccgcaagggggactgaagtagcagaacgggcacatgaaccactttatgaaggaacattatatacagaaccattgcttctaggatctcttccttcatctttttctaaagaacccaaaagtagatccttgtggattgcttccactctctgagctggaacaataaaacttacatattctgcaccaatagatagattgccaattcatctgcaaactcaaatgtccctcagtgttccttataagtgaacatataagacggttgcatgaatttgctattgttagtatgacagattttattatacaccagcatcacaacaatataaacatgttgcaactttca

SEQ ID NO: 235804 - DNA, 477 bp, Glycine max
tcctcttaatatggattcgcatgcatactctatcccagtgatcttctccacacaaaggaaagaggttccaaactggccttgtccaagctttggtcccaaattgtaaaactccttaaggttaccggtttttcgttgcaaaacagaatctgttttgaggcctgcacttgctagcctcttcacattgtgtggcctctttggttttgttggctgctcctttgtttcttccgaaggcggtttagtctctttggattgatgaggaggcttcacatcctccctctcgattttcaccatctccggaggcttgttatgaacagtttctgcggcttttgcactctttttgccacttttgtgtgcatgagaagcatctttcttgtgtccacgtgaccaccagattgaacttgaatttgaagagccactttgttcgtctttagaagaagaggttctcgatccaacacagttgtgttccatatgacacta

SEQ ID NO: 235805 - DNA, 418 bp, Glycine max
agcttaaaggtttattatggccatgcttgatgtatatatatattgcctagttctttctttaatcttcaatttcgtactgttcaataaaaaaaattaaaaaaaaataaaaaaaaattcagttgctgcaaattctgcaatttcgtactattcaaaaagaaaaaaaaagaagaaaagaagtgaagttgaataaataaggtcttgatatgagaacttgatttgggagccttggttgattttgttgatattagagggtttgagtttactacttgtgcttaatttccacttattccccattgctcctctattcctttgggatttagctacttattccatatttttcttccctaccttgtccatggccccattacaacctttaaagaccttttgatcctcatatgcatgtgttgtcaaatcgttt

SEQ ID NO: 235806 - DNA, 459 bp, Glycine max
  unsure (1)..(459): unsure at all n locations
ngacatctcacaatatcaacataagatattcaaactccacataacctaacatccacatcaagcaatcacacatagttaattcacacaacacctcaactcatccaaatcaatcaaataaaacaagaattacatcaaacatcaaattcaagtcatctaaattccaaggcattacaaccatgttgttggacttagcaattaccacaattaaataaaaatcaaataattaagtaaagatttagaattgattcggaagatttaattaaaagggaatgattaagtagaagataaagataaatgataaaagaaaatataatagataaaagaatatttgatttatataaaattcagatttgacaaattctgggatctaagtttcacaccaagattcttggtcagntaatatatcaattcaagggtctttctagttctctctaatgtcgaattaatctaatgtgatct

SEQ ID NO: 235807 - DNA, 313 bp, Glycine max
  unsure (1)..(313): unsure at all n locations
agctttgattctagatgtgtgctttaatgctttggcataaagntgncatcctatgtctaacaatgattaccttatgatatcttttctttctgttctaatataagttatcctttgtcgagcgtctaaccccaaaaactgaagcatgcatattttctttatatttttattaagatttaccctctatcaagcgtttaactcctatcatgatgttaagaggagtaatgcatgacattaaataagaaaagagaattggattgaaaacacctgttgcattgacaaatatggagtgcatcatacatctatttggcttttt

SEQ ID NO: 235808 - DNA, 458 bp, Glycine max
  unsure (1)..(458): unsure at all n locations
ggaggtttcttanactagcacatacagttcctataacataactatcactgcaccanaagagatttgacatgccccaccaacatattcaccggatattctagttaactctaaaagttgtgagaccaaacattctggacggaagacatctgaaactaaaatactgtaaaagggcatgacctggttctaaaggaataaatcacaccaactgttcaaagacaggacatgtctaacttccagcaagtagatgtttagagatttaaattatcctttcaagctaatttcctaccttttactagttacaaataagagaatggcttgattcaatccctgtacatgtatactagttgttgattaagtctcgagccttctatatatacctcagcacctcaaactcaacctcgagaatcacgcatccacacatattaacatcgcaacaagacccaattctttcactagta

SEQ ID NO: 235809 - DNA, 442 bp, Glycine max
  unsure (1)..(442): unsure at all n locations
gaccttaagtcacctgagctgcaagctgaccataatacaacctgcctgtattgttttgatttaggagcaataacagaatcatgaataaagtatttgtgcagctgaagccaattaactgaaatgaaagcaaatacaattttctatttttttgatctcatttttttaagttttttcctgttgtagtagatactttttattgatttttggatatcatgatgatgctttgtataaactggctactatcaggtatgtctatgcctaccatggaacaaagggaggaatngtatgatcccttggcaatggcctgttggaccaagcccgcttattaattattataactcggatgcaatgttttttttattaaaaatcactagctacttgactggttgtaggggaggtgcttacatagaaacaatggtggtgtatgtaaaaaataaatgga

SEQ ID NO: 235810 - DNA, 475 bp, Glycine max
  unsure (1)..(475): unsure at all n locations
nngcattggaattgcgaaagccccactccatcattaggattagtacctgacatctcanacaaacaaatcaaatgtaacaagacaattatagttgctgtttgaatacctcacccactcaagtgtatcacacaattatggcttttctctaatgaaacactcttgccttttaccactctaattccccttgagttcttaggcaattcaagagattatggccacaacaaagaacaattcaccaatatgtgtaaggtaaggctagagagacaaggaaaaggttaaccaagaaaaaggctaacaatgtttttaggcacaaatgaaggaaataaaattcagaatntangaattcaagtaacaatccttcatgcaaccaatatattaccttaaagagatgttttttaaagtccttcaagcatgaaccattcagcccaattngttttttaattntattatacaaattctgcttcttcttttttat

SEQ ID NO: 235811 - DNA, 387 bp, Glycine max
  unsure (1)..(387): unsure at all n locations
agcttgccgcccanctcgcccaggcgagcaatgttgttttctccagaagcaacagccttctggaggaagggtctggaaggcccaagtgggctagattgctatttgcaccccccttttactaagtgcaccgccattatatttttctgctaattctttttccgtaatgttacgaaactttacgaatttcgtaacgatacttattttccttccgcaaggttacaaatccttacggattatgtatttactctttnttagctttcgaagaagttacgaaaacttacggattgcgcaaaaacacctcttttcaatttccttcacattacggaatttcacggattgcgcaagcctgcttccttttgatttctgacacgtctcgggacttcattc

SEQ ID NO: 235812 - DNA, 468 bp, Glycine max
  unsure (1)..(468): unsure at all n locations
ttgaggcagagcntttantgccagagcttgtctccaatgttggatgtcctgaatcantttgtggaattnttattcatgcccctgcaattcttgaagcagggccaaaagttcaagtgctggctgattatcctgtaccttctagcaaattggtgagttttgattcctctattgaagaccaaacagttaattaataacatagctgtctataggaagctttcatctttccttgttatgaatataagataaaaaactgagagtgctatgtgtgtgattttcaaacttttgactaaattggaaatacgtgactgactcaaattntagagtgtgatcatttctcaattctagttttaggttgctagtggttatttattccagaaccattagaatctaaaagattcatgtatgatgaatgagtaatgaaaacatgcaagaatggacaacattaagtatattaatattcaactctta

SEQ ID NO: 235813 - DNA, 409 bp, Glycine max
  unsure (1)..(409): unsure at all n locations
agacttcaagaaatnncgatggtcataggttattacactgtggtccgattcangcccctcacatatcaagacgctcgaaattgaaccaccggaagcttttgtagaaattcaaaaggtcataactttaaactcggatgttcgattcacgcgcatcatatatcgagacgctccaaattaaacaacggaacctctcgagaaaatcaaatggtcataacttttcacacggaggtgccgttcaagcccattacatatggagacacccgaaattgaacaacggaaactctctaagaaatgtaatggtcataacttctcactcgaatagccgactcaggcgccttatatattcagacgctcgagatagaaccacggaagcctctggaaataatatgtagataatcttactcgatgg

SEQ ID NO: 235814 - DNA, 474 bp, Glycine max
  unsure (1)..(474): unsure at all n locations
tcaccggatgatgccgatcgagcatttcctaatcgaaatcatccaatngttattcagggattgaatagaataaacaatggccggtgtcggtccttatatggccccgactgatatctttcagccgacattgcgcaatttcttttacaaacgctggccgataatatttttttttttttacggtagaggaagttttttgttttggtgttgcctaaaaaatttacaacgtaggtcggcaaggtttttccgtgcgacctcaaccgagggttcgttccgaccgacactggcatgttgttatctcatttaggaggccaacaaaacgttggcacaccccggcaaaaacaaaaaaaaaatattcacgaaaattgatcgaaaaacatgatagctgacgttagcatggagagatgaccgatcgaggtctaaaaaaaaagcatcactggatgacgccgatcaaacatttcctaatcgacatcttgc

SEQ ID NO: 235815 - DNA, 404 bp, Glycine max
  unsure (1)..(404): unsure at all n locations
tgcaagctngcgccgaannnccggacagagggacgttgtctctgcaanncgaagcccttgctcatccaatatagatatctccttttccaactcctaatctgaaaagacgaataaacacagagtctcgaaatcatcgcaattgcaacaattgaaacaatgcggcaacacatcacagagtatagatcgtcaagtcaattcacacacgcggaaacacgaaattttatgatagctatgaaaatcgacggaaatcttgaaagagcgaaacgtggaacggaagtttcggtgtgacctttccagaaggcggagacgactgatatcggagaagaggatggagcggtggattaattcgcttgggccggatctgatccgaaccacctggggagcctccattttggtgcatgtct

SEQ ID NO: 235816 - DNA, 500 bp, Glycine max
  unsure (1)..(500): unsure at all n locations
actaagctttggtntccctctntntcaccttcattggatgttcactctattgctctagcctctagctatacattagtttcatattcagaccagtatgcttatacttgaacagaacaatagtcttctctaaaaaaattattttagtaaatatgttactgaaaaatcttatatttttacatattaattaatgagtttatatataactaactaaacaaaaaattacgactaagaaacctatcacattaaaaatacttaaaactacaaaaacaaattacatgtaagttatatttgagaagttattttagctggcttttatttttttctttaagatcttactgataggtgtctttagaatattgattaacaattaaaatgctaaaatatttattacaaaaatcataaataacataattttatatattttaataaaaacatcattccttaatatatatgtctttattaatcgaaaaacttctattacttgtgatatgtactttaag

SEQ ID NO: 235817 - DNA, 395 bp, Glycine max
  unsure (1)..(395): unsure at all n locations
agcttgcacaccaagnaactagatccatttttattttatatatgaagaactaacttactaactaacttattaacttccactaatatatacagttactactcacaaagaagggatgtgcctttattaagcctatctaatctacctgattaaactaattaccccaagcaaagctccaattcttagcccaattatctaagtggataaggtccaactttcaagtccaatttgaccctctaaaagaaaaaatggtcgaagcttatatatgacaanaatgaatatctttttctttgattttagggactactcacatgctcccattagaggtctataatgtcctataagcccatcacaaggcaaataggtcatgtatgcacaaaatttgaaataagccacaa

SEQ ID NO: 235818 - DNA, 486 bp, Glycine max
  unsure (1)..(486): unsure at all n locations
tcaagatattgaatcaagaatgattcacggagtgttgatgataactaatatgatgacaaaaagcccacgagaatgcattcaagattgaatcaagaacacttcaagaattaagaggaaatttgatttcaagattcaagaatcaagtttcaagaatcaagaatcaagaatcaagaataatcaagttgaaaattcaagaatcatgaaaggactcaatcaagataagtactaaaaagtttttcaaaacattgagtagcacatgaatttttcacaaaaccttttaccaaagagtttttactctctggtaatcaattaccagtttattgtaatcgattaccagtagcaaagattgttttaaaatgctttaactaaattacaacgtccaattgagttaaaatggtgaatcgattcaatgatttggaatcgattccagtgtgtttaacattgnattcaactcaatgtgagagtccacctatacaaaatgcttgg

SEQ ID NO: 235819 - DNA, 410 bp, Glycine max
agctttaggatcaaactgtgcgctctacttgttttctcaagaggactacatccttctgcctgatttaacttttgtgctctcctttctcctgcacaaagataaggaccctaccattggggatgatcatggaagctcaagacttaatcaacccaaggatccactccaagcaaggctgaagatgagtgcaggtttagattattaatcttatgtgaatggccatcattttctttaatcctattttccatgttacagatgaaagaatgcttagaatccgaaatggagtacggtatggccctccctgctaatttactaatttaactccagaacgttgggatgattattctacataacttgcatttcacacgatgtagggattgatctaaatgagacatatcgaagagatatgactg

SEQ ID NO: 235820 - DNA, 422 bp, Glycine max
  unsure (1)..(422): unsure at all n locations
tcccattataacggacttcaccaactgctctcttccttgagagacaacanatcacccttccaaactccaagtttatttctagttttatcgacgaaaggctggaagaacaattctttgggcttccctctgaggaaagggacatcatggtaattaaatggaagagatcctattttaaagccaaggagaaaggaaatgctatagaaatgtttgtgttgaatggctccatggaagaaattacattttttctttcttatgatgtacccaaaagttctttgatagatatcaaagagggatataagattcatgatatttctagtcattcccctacatatattatgatgttgcaacatacataacatgtgtacgaatacaaaaataccttgggccagccatgggatgaatgtcactataagtcacagatg

SEQ ID NO: 235821 - DNA, 186 bp, Glycine max
ctcctccctatatctacccttgcccctcttatagtcgaaaccagatggattcctcattaccgaacacaacaggacattcaattaccaatacctcatatgcctctaccactaaagctccattaccacatcgttcacaagcatcaccaacgagtacaacttgatcacgaccgtgggataatcttaaag

SEQ ID NO: 235822 - DNA, 481 bp, Glycine max
  unsure (1)..(481): unsure at all n locations
ctaagctttatattatgataacagctatacatatgcatgaaatatttcttaaagaacattgaacatgaccaacttgtgataganagcataaggcataaaattaaagagaaaagtttagagatactaggttgcctcctaggagtgcttctttaacgtctttagtcggatgcatggttatggctgaggcttcgccatctcatccttcataattctttccttcgatcgcgagcaaatctgatcgtggatttagcacctgttggcatttgctctaatgccttgaaaaagagaatgttaacatgccaatgtttaaaatgctttgaaatgctcgaatcgcattttctatttgccgctaggactactcaaggctcacgcgtggtgcctatcataacccaaatgactcttcattttttgcatcactcttagagatgataagatgcagtcgcatgcatgtgtgtatagaacattcatttagcgcaacaat

SEQ ID NO: 235823 - DNA, 224 bp, Glycine max
  unsure (1)..(224): unsure at all n locations
cgacagaagacagggcagagcagcgaggaggggcggcgtgaattgtctacggggcccaaaacagcgacacaatcatcccgcgcggggaatggcaaacacggggaaaatgaacagggagancatgaaggaaaaacccatgcttggacagccattctcaagcaaccaagattcccagcatgccaaaagagcgtactcagacaataacaaccgccgtcctaaccaac

SEQ ID NO: 235824 - DNA, 393 bp, Glycine max
tattagaacttttagttgttcatatgttatatgtgttgcttaattgacataactacaattttctttgagtcttgtttttaatatttcaatctaatctagtgccattctagaacttccgttgtgtcccaccttggcttgtggtgctatccttttgctttatttttgcatgaatctcattgaattaatgtcatgttaaatatcattttggttagctttcatttcatcttttggtttcttacttgtcttcttcttcttttttgtggttaagtgttgcttacattaaggattggaagaggaaattggtgcattgcttgaaggaagattattgagtcttgaaggttaatgttcgcttccggcaagtgcaccggatcgcacatgtagtttaaaatggta

SEQ ID NO: 235825 - DNA, 401 bp, Glycine max
agcttttcaaccgaaaatatctatttatttaccaaagcgggatgccagacgagtactaatattgtataatccataccctaagtactaacaaggaatgtcaacctttttgcatggtcaacattatacatgcctagaatcgaccccaagtttcattgtcaccagctatccatctcccctaaggctaccccatagagaaagagaaaactcatccccgaaaaaggaaatcgtgttgatgaagaggcaaataaacttttgaatgcaggattcatcatagaagtacaatacaccacatggttgcccaatgtggtaatggtaaagaagtctaataataggaaatggaggatgtgcactaattatgcagacttaaacaaagcttgcccaaaagacttcgacctgctttc

SEQ ID NO: 235826 - DNA, 428 bp, Glycine max
  unsure (1)..(428): unsure at all n locations
ctatanaaactcaagctnggagctaacggctcagatccatggattatatactctatttgnctttgcagacgtcaatgttgctatacgaaccgtttagcccctatgagcacatacttaattctgatttgctttctgtcttgtgctttcccactaagaataataaaaagaaattaatagtgataatgataatgatgaacgtagttacaataataatactcatggtcaatatttcgaaagagataagataagcacaatattatggatatttgagaatacacgtgacttgtgattacaaaaaatgagactaaagaacataacattatctatggtgtgaatgctattgtttaataatatgcttaactacactcttgcgcccgaaattaatgacatttagactcttagattctaagagtgtcaaaagagttcat

SEQ ID NO: 235827 - DNA, 312 bp, Glycine max
  unsure (1)..(312): unsure at all n locations
agcttgcaagagatagatgaatgtttttttttttgngctttcaaaattttggnctagtcttactaattctgtagccttgagattacatggttatatatttcttatcaagtgattgttcaaaataaaaaaatggtgttccaatttgcatggtcctgggtttcttttctcttcgattatatgcatatatatgtgcgtgtgtgagtgtgtgtgtgcgtgcatatatatatatatatatatatatatatatatatatcaaaaatatttcacatagcagaggtaataaaataataaattgaataaacttatagaaat

SEQ ID NO: 235828 - DNA, 456 bp, Glycine max
  unsure (1)..(456): unsure at all n locations
tataaaaagacccactnttgaatcatttcaagggccaaatttactatacacacaatcctacttccaaaatgacttaggttcttcattaaaggcttataccactaattgaccatacacacaaataccaaagatattttgtgcaacatttatcaaggctaaccccgaaccaaatatgaaatgtaaaacttgtgaacaacagtcagttttcatggaaactcaagtgtaaaacaaaggtaaaataccacttcaatgaaagtcatacgatcatgccattcagtcatagtattaaaagcgcaactgctcgtggaatctggttaaacaaaacttcatggcaagaaaatagaagttaccctaatggcactagggtgtgtagcaatgcttacaatgcgagcaactcaaagtctatgaaaaactgtatcttgacattgctcacggaacgaaatttcaatgtcaact

SEQ ID NO: 235829 - DNA, 422 bp, Glycine max
  unsure (1)..(422): unsure at all n locations
agctngnngtaatttttaggtggatcccgaatatctcttgttaagcccaggtggatccaattcaattttttaaacaactgtgaaatgggcgttgttaggtgcacccatcaaaattgctggtgcacccaacaattcaaggaaataccaaaaatacccttcatttaaaaaataaaagttaatatatttttttaaaaaaaaaacacttcttcttccacgcctgtttcttcttccccttgcttccgcgcttgtttcttcttccccgtgcacccaacaatctccattcgtgcttcttcttcccggatattggcttattcccttcttcctccgcgccctcatttgcttctccatttcaaatttggctcccttcattagaatctcattgcgttctccccggatattggcatcctccattggctttgttt

SEQ ID NO: 235830 - DNA, 405 bp, Glycine max
aaacaatcaacattgacagttccttgttatctgtcatatgaacaatgtgtgtgtatgattctgttccttgcatacgaaggtcgacaaggatgtcaaaagtgcaattaacaagttaagtctcaacttatgacatgtttactatatttctacgattatacatcaatcatttgatcttacaatatacatgtatgtttctttcttttaactagcgctttgaagcaattccatgacaagtccctcaagagtaaatctaatgctaattggattgaaataaaaataagtgatttaaccacacatagtgtaatccgattaaataatgacattttgtatatttgcacttatggaatataactaaatttcatattcaatttagagtcattttcaaatcagaggcatggattggat

SEQ ID NO: 235831 - DNA, 323 bp, Glycine max
  unsure (1)..(323): unsure at all n locations
attcttgagntntaattntattttattaagctattgttgaatttangncagagcggctcaacccaacccacaagtcagcataaaggttggaaaaccatatgtgcaacagcaacaccttgacgacacaacgtgtggcaccaccatggagggtggtacaggccctaacgccactgggtgcagggcttggcagcgggagactgtcgtggagagggctatcctggcgatgacagttgtgggaaggtgcggtggagcgccatgggttgcaaaactaacaaaaaacaatagtaccagcacaacccatatgagggagatgattatgatga

SEQ ID NO: 235832 - DNA, 366 bp, Glycine max
  unsure (1)..(366): unsure at all n locations
gccataacagaatcatgaataaagcttttgtgcagtcgaagccaattaactgaaatgaaagccaatacacctttctattgtattgagctcatttttttaagctttttcctgttggaggagctacttttcattgatttttggatattaagatgaagctttgataaactcgctactatcagggatgtctatgcctaccatgggaacaaaggaggaattgtgtgatcccttggcaatggcctggtggaccaagcccgcttattaattaataaaactcggatgcaatgtttttnttattaaaaatcactaactacttgactggttgtagtgtaagtgccttaattgaaacaatgggggctatgtaaaaaa

SEQ ID NO: 235833 - DNA, 478 bp, Glycine max
  unsure (1)..(478): unsure at all n locations
tgcatttggaattgcgaaagccccactccatcattaggattagtacctgtcatctcaaacaaacaaatcaaatgtaacacgacaattatagttgctgtttgaatacctcacccactcaagtgtatcacacaattatggctattctctaatgaaacactcttgccttttaccactctaattccccttgagttcttaggcaattcaagagattatggccacaacaaagaacaattcaccaatatgtgtaaggtaaggctagagagacaaggaaaaggttaaccaagaaaaaggctaacaatgtttntaggcacaaatgaaggaaataaaattcagaatttaggaattcaagtaacaatccttcatgcaaccaatatattaccttaaagagatttttttaaagtccttaagcatgaaccattcagcccaatttttgttttatatttgatatacgaaatactgcttcttttctttttatata

SEQ ID NO: 235834 - DNA, 289 bp, Glycine max
ccaagcaccgagctgcactaaaaggaggaggggagacttttttaacccatgtcatagaaattggctaagaaatcgtttcacctaactagatatatggaaaagtagaggtattgtgctcaataacttaagacgtacccctaaagatgtttgcaatgtactttctttgtgaccatgagtttaagatacccactttcaagctgtcttatgcagaaaggaatactaggccggtaaaaaaagcctctatacctatgtaccgtaagaaccggggcaatagctctgaggatttaag

SEQ ID NO: 235835 - DNA, 496 bp, Glycine max
  unsure (1)..(496): unsure at all n locations
nttcanatgggtaanaggctcacattcactgtcttctacatcatattcaaacttggccaaataaataataaagtcatctcgactcaaagaaagtcatataagtctcatacaattaatatagaacatatatcctaatgtcacatcctatcagagcgtggtgttcccgtgtcctctagcatgaggttcttcatagtcatccacctattcatctgctcccccgaacacaagttcaagatcatcacaggatccaaacacaacaacacacagggagtgagttatcacattcctagctaatagagaaacaagacaattaaatatacatattatataaatgagataccacttgcttaaacatagctcacgtaacttcaccacttcgtcattcagaattcactctttaattatcgatcacattacacaagaagtccacacttcgatcaagatataataacacatcaattagcaagcatatgcaatagttatgctaagactcaat

SEQ ID NO: 235836 - DNA, 465 bp, Glycine max
  unsure (1)..(465): unsure at all n locations
ctttgagagaaggaagagntctctgttagagatatgtgtgttccaataatgaatgagaggggctctaggggtgaatgggttgattagttgaggcgttattcttacttgcatgcatgaacggttagatgtggcatttccccttgtgcttgaattatcagacatggttgaccacaaaataatagaagaactacaaagatggaaaaagatgaataagagaagaataagaatcggatgagagtatgagtataaggaaaaatggaatgaaagcgtgaatgttaaagtagccgctagggttttaacattgtggggaaatagatgatcacctaatatatgtcattttaattcctttaatgtcagtttagtccctccttacgtggcaagaagaagaaattgatgtgaaagatccacgtatgcgtccaggtggcacttaatgtgntacattacacaattacttacgattgtaac

SEQ ID NO: 235837 - DNA, 418 bp, Glycine max
  unsure (1)..(418): unsure at all n locations
gaccttagatcacctgcagctgcaagctgnaccaaagaatagtgtattttttatgtctatgcaaaaaaccacagtttcttggtgttccaagaacacacacactcacattataagaggcattccaaaagggtgttagtatcctcagaaatgccaaaacttgccaaaaggtaaatggtttaaacaaataaacaaatcacatactgggaaggctatggctagagaaagacaaagaaacaattgagggcgggtttcctttttcatttttttatatgaaaaaaatatattataatatataaataaaataaatgaaacagattctacagagaaaaaaggtttgataggcaacaactcaaacattccttccacaaaacagggtggagtgaaactaactaagatacctcaaactatctgaatcctc

SEQ ID NO: 235838 - DNA, 422 bp, Glycine max
agcttgctgacatcggagcaggaccactaatttttcctgctttgagaggcaaatataattttcaaatataacttgaaaaaaaaccattttaatgtggcattatcagttactaccacataaaaagaagaagatgtgactattatttcttaacaccagatgagggcttattttctatcaaataagatcattaccaatataaaaaaatgtttaagtacaaatcagtcaaacaaaagaatatgcgagactggaactaaaattgcgagggatttgctgctaagttttatatggtatataaatataaatataaatagttgttatattggccatttaaatgtacaagtttttgggctatatgtctctgtttcataagttcaaagaaaacaattaagtgtaaagaaaggctagctgaataatagcgtgtt

SEQ ID NO: 235839 - DNA, 477 bp, Glycine max
atatattcataatcacatgtttcatctgttgtcattttcacgttacttatttgcatggatctatagtattatatttttattttgcatcaaaccttagttgtaaagaaaaaaacctgtgatttaagagccttggttttctttctggctttctgtaagtgacaaccgaaccaaagttttttagtattttcattttgagcaaaattagttacatgatgaaccttttcctacatacccactccaaacagctattggtagaagcagccttcaagggcattacttcttttgagtggggatgaacagtgtatttttctattttttcactcattgggtgtcaatcgcttaagagttgaacttgagttagttttggactttccctatacaactaaatgtgcagcttagttgttgaacttccctacacaactaaatatgcaacgtagcactgtagattcttcatctggaacatggaattgtaataat

SEQ ID NO: 235840 - DNA, 405 bp, Glycine max
  unsure (1)..(405): unsure at all n locations
atggggtacccatctcattttgtactaggnggcggtccggcgatggtgcacaacaagttnttcacatccaccatgcgcgcattaacccaccattcccgggtgcccaccttcaactgagcttacgtactcccacgtagcccatatcctctgttctttcaacaccgggtccccattaatccttccaagcttccacaacatccaagcaaaacaacattcaaacagcacaagctatcgcagtcaagcaaaacagagcaaaggcagaaaactctgttcaacacatcaaccaaaaacacagcttttttcacttaaagaccacaagaaccaattcttcgatccaattcgttaaccggtggatcgactccaaaattttactggaagtctatagtacataagcctactatatga

SEQ ID NO: 235841 - DNA, 466 bp, Glycine max
  unsure (1)..(466): unsure at all n locations
tcagcactgcanacaatcaaaattagtaaataaaatagatcctcaaaaaataattcaacagtagtgccttccatatactcaaaaactaacaatagatataaggacacaacaaaatagagtaaaatgtatatcaaacttgccacgcagatcattaggcaaactgtgccccactaatatgattccacttgataacaatttgttcatgtatttctatggaagtacaatacatcttcattatgcacttgaaaggatgatataggaaaacataggaaaccacaaaatacctgtatatcagccatggagcaagtcactgcctctagatcttgagaagagacaccagttatctttgttctgtagtctgcaatatctttgtttggttttacaagatcttctagctctgacctaaaaaagtttgaaaaatatctatctacaacgttgaaaaggacaacatcttaattgcaaactc

SEQ ID NO: 235842 - DNA, 286 bp, Glycine max
  unsure (1)..(286): unsure at all n locations
gganagtgagaaacggaagccctcgagaagttcatatggtcttaacncggcacacggaagtccgagtaacgcgcagactatatctagacgctcgaaattgagcaacgaaagctctcgagaaattcatatggccataacttgtcgcacggatgtccgattcaagcgcacaatatatcgagatactccaaatctaacaacggatgctctcgacaaattcaaatggtcataacttgtcacacggaagtacgattcaggcgcattatatatcgagacgctcgaaattgaa

SEQ ID NO: 235843 - DNA, 413 bp, Glycine max
agcttcaacatcagaccacttgcagggttgttttatctactccacatggacttgatggggcctatgcaagttgaaagctctggaggaaagaggtatgcctatgttgttgtggatgatttttccagatttacctgggtcaactttatcatagagaaatcagacacctttgaagtattcaaggagttgagtctaatacttcaaagagaaaaagactgtgtcatcaagataatcaggagtgaccatggcagacagtttgaaaacagcaggtttactgaattctgcacatctgaaggcatcactcatgagttctctgcagccattacaccacaacaaattgacatagttgaaaggaataacaggactttgcaagaagctgctatggtcatgcttcatgccaaagaacttccctataa

SEQ ID NO: 235844 - DNA, 422 bp, Glycine max
  unsure (1)..(422): unsure at all n locations
tgtataaggaataacaacatagatacattgtcgngcatttacaaggaagaatggactcacacggtttctctgtatctataccagcagcacaaatacatgttgaccatgaaactcaaccatcatctgctagtcacccttcgtgcgtatatttctaagtgtaaagcagataagcaagctatacagaaaagccaacccttaccaactccttcaacattcactgaagtcctgtatcatcatatcaatcgatctcctttccttcacaaagagatcgaaacaatcataacgttaaacaattcaaacaagccctgcgattcatctcccattcacaataagagaaatttcttcctttaactttcgcattaattcatgcacaagctctatgctatgccagattccatgcggtcacacaacacagattacca

SEQ ID NO: 235845 - DNA, 375 bp, Glycine max
tgccagcttctatataagctgaaccattttatctattaacacaaggggggttttattcagaaaattaaaggttatctcttttatcttagtgagagagattctcctaaattcttgagggattcaagaacaccctggctgtatcaaaggactttcacaacctttgggtgttgccctcgctggaaagagagattctttccttcctatcatctccacccttgttctttcaaaccacaattccagaaaatccacctctgtccaaaattatctcgtgaccataactcccatttacacactcaaattaagtgattcttgagcctaaattgaatttcaaaacgagacctttctacctcgtttggaatcacctcatttggagcc

SEQ ID NO: 235846 - DNA, 418 bp, Glycine max
  unsure (1)..(418): unsure at all n locations
ngagatgaggaagtgttgaagggtgatacttcctgcttttattgttgaccacagagtggtacctgtagatatgtcgcgggggtcacgagaccttggggacgtcaggtggggtgctattgcccaaaaccaagcttgaccaatcccgacccaacccgggcatagtcggtcagtgagaacctgtgatgtacctaatcaggcgagctcctggcagtcaacagataaaaggaaaacaagaccacacagcaaggaggcttgtggtggctggccagctgtgaattttgtgtaatatgtggattgtggcctctggtaatcgactaccaagggtgggtaatcgattacaaggcttaaaaatgaagacaggaggctaagatggtctctggtaatcgattaccacggcgtggaatcgattaccaggctt

SEQ ID NO: 235847 - DNA, 421 bp, Glycine max
  unsure (1)..(421): unsure at all n locations
agcttcagatatttccaagagaggcagcaacatatttttattatgagaaanncttccttcttcatattaatattgaggttgtaactcttgctccaaccaacagtttcccatggagtaactcttgccaacctgaatctccaaattttgaattaagttttgattggatttaaagctagcttgggatgtttccatgaattgcataaacacattctccatattagaaagtattttttcttcatattgattgtaagggtgtaactcttgtccccaccaataactttccatggagtatagataacaattattattgaaatgctctcctccacaaaaatcacaatttaccagtggtgggtgaatgacccctaattgtatgctttcaacatgctcagaccacatctttattataatttccattgataag

SEQ ID NO: 235848 - DNA, 488 bp, Glycine max
  unsure (1)..(488): unsure at all n locations
taataaagtccttagtgatccatatcgagtaagtgtgattgtagtaattgagacgaagcgcanagcngggaatattactcttagttgtttttaatttaaatacatataaccgaaacacttgagtgcttaagagaaacactatccttgtgagaaatgaagcatagttgatcttctttgttgcttgttacatttgttaacctatttgtcgcaacctacccttcaacgggagggcgaggcgaaacaaaatggtgcgtcttctcatgaagaaaacgcgtggagtcgccaccaacgttcatttaagggaaaacgttataaaaaccaaaagaggtctacggatcttgaaaataacggttcgggaggtgtttacgcacggggaaggtattatcaccccacgcgtccatcacaaaggacgacaacctttaatcgagtgtgcaaaacatgacttcaaattatgattttgcctttttatattctctttattttattgg

SEQ ID NO: 235849 - DNA, 418 bp, Glycine max
agcttgggtattaagcttttttgtgaaagccataagtgtttgtgaataatacttgtaactttgttaaagttagtggaactttttagatttggatagcccaatatgatacatctagacaatcttagataccgatggttttgatgataacaaagatataaattgttgatggactaatgatttaccttaagtgaaatagggcatatttgatataagcttaattggtaatatacttatatccttatgtttttacaagttatcatccaaaggtaattggaacttatttttattaacaacaatattcagtgtccaacgcactgctataaaacaagcgttcaaggatattgtgaaaactagtacctatgcactatgtgttcttatgtgtataataggacatgactaacttacacaaatgatttat

SEQ ID NO: 235850 - DNA, 511 bp, Glycine max
  unsure (1)..(511): unsure at all n locations
actatgaaactaagcttaagagatcatccnctcgacaacattattggtgatatctcataaggtgtaacaactagacattctcttaaagatttatgcaataatatggcttttgtatctatgattgaacctaaaaatataaaagaagccataatagatgataactggatcattgccatgcaagaagaactgaatcaatttgaaagaaataatgtgtggaaactagtagaaaaacctgaaaattatcctgtcataggaacaaaatgggtttttagaaataaattaaatgaacatggcataattattagaaataaggctatgttagtagcaaaagggtataatcaagaagagggaatagactatgaagaaacatatgctccacgtgcaagattagaagccattagaatgctcttagcatatgcatccataatgaattntatactctatcaaatggatgttaaaagtgctcttctaaatggtttaattcaagaagaagtatatgttgaacaacccc

SEQ ID NO: 235851 - DNA, 420 bp, Glycine max
  unsure (1)..(420): unsure at all n locations
agcttctcccccattttcttataagaagggggagaagtgatgaggaattncgttcaaccctcctggtaattcaagaatcatctgtaattactgaaaaaaattggttctgtgaagaatatccgagccgaggcgcttccgtaactttttcgtggggattttcgcgatgatttttagccgctcttcgatcgatcttcatcgttcttcggtcttcaaccaagaaggtcccgaaaccgaacttttcaattcattctatgtaccctcagaggtcctcatttggttttacgggcttttattttcatttcatttactttccgtaccccattatgacgtgctttagtcatttgcttaagtcattgtcttgcctaaatcaaaaataaaatagaagctccaccgatcatttgagttgtaatatacggtaat

SEQ ID NO: 235852 - DNA, 506 bp, Glycine max
tactaagcttgaggcctgggatcttcttcatcaatggagtcagttgcttcttgaagatcatgacagcggaatggagaaggaagaaagatgttggagacgctacttcaaggagagtatgagtcaagaagaagctcaccaccacaagaagccatggataagagcttgaaggtaggagaagatgagtagagagagggagagaatggacacgaaattttgtgcctcatatgaggtatgaaatttgaagtgtaattctgacatcatcaaagttcaaaaaatgcatacacatggtctctatttatagcctacgtgtcatacaaattggagggaaatttgaatttctattcaaattttacttgaatttgtggagccaaaatttaactaattatgattagtaaattttagctatggttcagcccactaatccaagatcaagtctaagatgaaggacatgcacatagtgtgactatatgatgtaccaatggggtgtagcaagcaaatactcacct

SEQ ID NO: 235853 - DNA, 432 bp, Glycine max
  unsure (1)..(432): unsure at all n locations
agcttccaagcatatnttgatgaggccggagtactctttcttgaatcaagattcacgcaaggttcaagaatcaaagatacattccaacaagattaaagaaatcacgaagattcaagtgaagattctagagaagactctagatatgcaagaacctcaagaaaaacattaagataagtataaaaagaatttttcaaagaaaagattgaatagcataatttgtccaaaataatttttcaaagaaaaatcttttaccagagtttttattctctggtaatcgattaccataaggcagtaatcgattaccagaagcccaaaacatgtttataactggtttacaaagtagtaatcgattaccatgggcatgtaatcgattaccaatgtttttgaacgttgaatttcacatctcaagagtcacaacgtgggacaaaatat

SEQ ID NO: 235854 - DNA, 496 bp, Glycine max
  unsure (1)..(496): unsure at all n locations
ggtttatnntaatcaatatttgtcatgcctgagaagtatctaattacattgaaattgtttaaaacatttatatcctagagcaccctagccattntatttctcaactctcaaacttatcatacttaaagttctcaaggattggatctacagatcaaaaaagaaattaaaaaataaaaataaaaggcatatattatttatgcaaacaaataattttcataaaaattccccatgtcaactaattaacatgcaacaatgtaagtatagctgacaataattgtcaagttcaatattttatacaataatatcccataggaaaagctataaattagttaaaggaacatacttccaatgcatttacaaatatgccgctagttttagtagaaatgtcccattgaataaataaataananacaatattcattactcagtagttagtagtctcaaatttgagttataaattaaaaacaattcatcaacctatgntcaaacagaatac

SEQ ID NO: 235855 - DNA, 354 bp, Glycine max
agcttaatttaagcaactgagcacctgagcaattaatttaattgcaaggtgaacactttttgatcttaatagcctgtgtataatcaaatattgttacatacaacaagtatttcactgtgcttctaatcaatcctataaaacagtctaaaaattgtcctgcctcagtcaccacttgatgtatgtaacttggtcacagaccttaaatatttaaaacactggcatgagaaagaaataatacatgtaaaagggttatccatttgataaaagcctctttagagttccaaacaacaatattgttcaccactttctctcccatttgagtgaaaatatagtttggtgattttcaagcttcaa

SEQ ID NO: 235856 - DNA, 428 bp, Glycine max
  unsure (1)..(428): unsure at all n locations
agtattgggagaagtatctcactccccattaggttatactattcaagatcatgatgatgatgtnggaggagagacttatgcctttgtttattatcttttatttttagttttattttgggaccgtaaaactctaatgggttgtgatataagagattgatttttattattttatgccttttttttaaactaaattagtaattttatttcttaaggttgattatgttttatggacttgtaagaccaaatgtaaaccaatatattttattgacaattagaatagttacttgagtttgaattatttgaagtacatatgcaactatctttatcgcaagagtataactttctttaacttattatacttttattttgcacatttgttataagttaacattaactaaccataaattggtgcacaccttacctgtaca

SEQ ID NO: 235857 - DNA, 444 bp, Glycine max
  unsure (1)..(444): unsure at all n locations
tcgacccggaccttaagcaccgcggctgcaagcttgtccagagtgtcttgttgaacttattctaatntaaacagcattataagcacaacataataaaaactagaaccctgcatactatgtctagcactacaattatctatgccctactctatcaagttccaaggaaacaatacatttgtcaatgctaatgttcctaacagcacacaccaatgggtgatcaaaccacaagcatgcatacaatatgcttagatagaaacattgaacacatgaaaataacctcaaatagataataaaaatatttacatcaagtactcagtagaaattcccaacaaaggattttagccctccattacaagggagcagctttcacaaataggagaagggtttcagagaaaataccatattacaaagcagtggggatgtctcccccacctctaagaacct

SEQ ID NO: 235858 - DNA, 464 bp, Glycine max
  unsure (1)..(464): unsure at all n locations
nngcatctggaatgtgaaagcctcactccatcattaggattagtacctgacatctcaaacaaacaaatcaaacgtaacaagataattatagttgttgtttgaatatctcacccactcaagtgtatcacacaattatggcttttctctaatgaaacactcttgccttttaccactctaattccccttgagttcgtaggcaattcaagagattatggccacaacaaagaacaattcaccaatatgtgtaaaggtaaggctagagagacaaggaaaaggttaaccaagataaaggctaacaatgttcttaggcacaaatgaaggaaataaaattcagaatttaggaattcaagtaacaatccttcatgcaaccaatatattaccttaaagagagtttttttaaagttcttcaagcatgaaccattcagcctaattgttttttcttatatttgcttatacgaaaatct

SEQ ID NO: 235859 - DNA, 360 bp, Glycine max
  unsure (1)..(360): unsure at all n locations
agcttanaacaataaactgggcctttctttatttttctttgggcttggcgaccacgatcaacaaagtactttcggcacctactatatgttgacttcaccaacgttgttattggaatgctgcgacaatctttcaacaccttattcacacattctgataaggtggttggcatgtgaccatatcgtcgtccagatgtattcgaagccatgttccttttttcctttgaaatgcgatcaatccatcttgctatggctggactcagttgacgaaatttttctaagttttgatcaaacacatgctcgcaaggagtgtacgctgcatcaaatttgttatcatcaaaagttgtacgtagacatccaact

SEQ ID NO: 235860 - DNA, 478 bp, Glycine max
  unsure (1)..(478): unsure at all n locations
cttgttgtcgtagntgttatgcgtttaacgcgtaatatatgatntttataatggnttaagaatattaatgagaaatcatctcaggaacaggacatctgctcacaatgacagcagctgaagtcataagtcaaacaaacaagagagacatcatattcagcaatcaaaatcaagcgttaaaagtgtatcaatggaaaaaagaacatgtataaagaaaatgaaatgccaatcagaagatgttcgtaatgtccgaggaaaaaaatcaattagaaccatgctaattgctaaacatgtacgatagacacactactcagtcctctcatacaagacagcatgaagagtgaatgatacacattttatgataaaaggtcaatatcccaggagaggtcagaaggaatgatcagaggtttaacttacacaaactcttgatatgcctgtggatcaatgttctttccaaacttcatatataatttttcttcct

SEQ ID NO: 235861 - DNA, 374 bp, Glycine max
agcttatacttatgggcagccttcggactttatccccacggccaccccggaagaattaagcccagcccctactatctaggggcaactcccaccttatgaagactatcccgggcaagacgatggggaaggagatacccatcttggccccctgctccacctcaaagatccatccccacatgaactatcccaaccgaacatagtccgccatatcccgacctcacccacacccgtaaaagaatctgttccctttgcggaagataaaagaaagattgaagccctttgagagaggttaataacaatcgagggccttggcaattacccaatcttcgatttgggggatttatgtcttgtgcccaacatcgtcattcctccca

SEQ ID NO: 235862 - DNA, 371 bp, Glycine max
  unsure (1)..(371): unsure at all n locations
gtanacattcaatgtagagcgtctcgtatattaccggactcactcaaacataccagaaaaaagttatcggcgcgtgaatttgctctcatcttccacattcaatttcgagcttcccgatatattacgagactcaatcagacatccgacgtaaaagatgttgccgttttaataagttcgaagcttaaacattcaattccgagcgtctcgatatattacgggactcaatcaaacatccgagaaaaaagctattgtcgtttgaatttgctaagatgctgaacattcaatttcgagcgtctcgatatattattggactcaatcagacatccgaggtaaaagttattgtcgttgaatatgctcacaggttcaacatt

SEQ ID NO: 235863 - DNA, 407 bp, Glycine max
agcttcgagcggaggtggcggagggtcctgtttttgaagtgggagttggaactgatggtggaactgaagaagaagcaggagcaggaggtgcaaaagaagaatcctcgggttctcgaacccgagccttgcgggtcctcggaaatatgatcgaaggatcatccgggttccaacaattcttctagatatacgccaagttaatggtaaggctcaaggacttgaatgtcagtgaatctggaacaactccttgggcaatgcacaaggctgagataagagccgaaaatccgagcttggaggagttggactgggtcatctgcgagatctgatcagaaataatggagcccaggtccatgtctatcttcatgactaagccatagattaacctcaccctgtccatgttcaaatcggac

SEQ ID NO: 235864 - DNA, 485 bp, Glycine max
taatgatctatatcaaacaaaagtatggttaccctcctgtctatattacagaaaatggtgatcttcaaattcttatattctaccaaatctctagagtgaatttaggcattaaaatatttaagtataacataaattacaaatttgattcctttaaagtaactagttcactttagagaggaaaggaaggaattccaataattgataagaaaattaatggttgttattacctgcacgtgcataataaaatatagatctgttaaaatccacttccttaattttctcatctaacagttgagattcctttctttctctttgtaaagtgaattattcaaaggagtaaaatccattaattacttttctgacaggaaaaaatccattaattacatagttgatactaggtggttgataaaatgatgcattatacgtattttacagggctaggtatcatgatatgctttcaaattacatactagaaccttacaatc

SEQ ID NO: 235865 - DNA, 421 bp, Glycine max
  unsure (1)..(421): unsure at all n locations
tgcaagctttaagagaaaggaggtgactcttttcttttgaaatngaatctcaacattcaagggcactggtaatcgattaccaaaacattgtaatcgattacagccttttgaaaataattggaacgttgtaaattcagtttgaaaactttttcaaactcattttgctactagtaatcgattacaccaatatggtaatcgattaccagagagtaaaaactccttggtaaaggttttgtcaaaaactcatgtgctattcaaagttttgaaaaaactttttaatacttatcttgattgagtattttcttcattcttgaatcttgatcttgattcttgaatcttgaatcttgattcttgattcttgagtctaggctttcttctagaatcttgaatacttcttggatcttgaactcttgacttggtc

SEQ ID NO: 235866 - DNA, 445 bp, Glycine max
  unsure (1)..(445): unsure at all n locations
cgcttgcgganttggtcttcgccagtgaattgatcgaagtgtatctganaagaggcacatttaatcatcctgcttggacgaatgagaaaactggggcaaattaagagggtgaggatgagggagaaacccatgctgtgactggcatccctgtacggccaagtttcccaccaacccaacaatgtcattactcagccaataacaaaccttctccttacctaccgcccatatatccacataggccatccctaaatcaaccacaaagtctgtctaccgcacttccaatgacgaataccacctttatcacataccaaaaacaccaaccaagaaatgaattttgtagcgagatagcctttataattcaccccaattccagtgtcctatgatgacttgctcctatatctacttgataattcaatgggagccataaccatagccaatggtcatc

SEQ ID NO: 235867 - DNA, 121 bp, Glycine max
  unsure (1)..(121): unsure at all n locations
tagctcggaacaacatggatagagagagagttttcatgattaaaacacgcnccactactgagccaaagggacgcgcttacaatatatcgcacgttctcctcaactctttcaaaactcctca

SEQ ID NO: 235868 - DNA, 361 bp, Glycine max
  unsure (1)..(361): unsure at all n locations
actaagctagtcgtcttanaanaccatctgtagtgaaaagcattgtctttcgttcttgccctgaaaataaaagttcttgcattctttctggccagtcaaaatttaatctgcgggcaaaatcttccacttgcctgcatcaaaaggtaccacccaaataaaatattaaggagcatcataccatcatcttaaaagcactctagtgtaactaccatgcaaccatctctttatatcaaagagataacttcgattacctaaaatgaaaagtgaaaaaaacatggaaggcaaatagaatcatgaacattgccactatagctaactcaagtgttcacacatcatacgttccacttctctaaaaccaaaa

SEQ ID NO: 235869 - DNA, 420 bp, Glycine max
agcttgagaccgctttcacgggctatttcgattgacatcttttcatgggtttagtgacccaattcagataaatatatttaatgatggcttacaaccccattctgagcaacttctcgatgcttctgctggtggaaagattaaattaaagacccctgatgaagctatggatcttatagagaatatgacagtcagtgatcatgttattctccgtgataaatcttacacacctgctaagaagattcttcttgagctcacgtctcaagatgcattgttggctcagaataaacttttaaacaagcaccttgagaccctcatggagacattgaacaaactatcttaataattgcatgttgtgcaacttgcattattctctgtgatgcaagtcgggggatgtaccctatatggagaacgtcatgagct

SEQ ID NO: 235870 - DNA, 452 bp, Glycine max
  unsure (1)..(452): unsure at all n locations
ctaagcttatgtctatgctcgngtatggttattgaagtatgttttattcttgtcttctgagtactggtatcaggtgtttatgctacaattcattaattgaattcaaatatagcctaactgttccttgtattcttataattgggtggatcatgacatttacattctgtatgaaatgagatttacaattaaaataagcgatgttgattggcgcagatgtgtatattttgtttccctacttcttcagatattcctctccatgaccatcctgggatgactgtatttagcaaacttctctatggctctttacatgtgaaagcttatgactgggttgagcctccctgcatcatagaaagcaaagaaccaggatatgctcaaggtctgacttgtatatttcatttacttatgagttgactttcttatatcctcccatcctttcatttactgcttcttac

SEQ ID NO: 235871 - DNA, 407 bp, Glycine max
actctcttgatttggtggaatgattgttgagagaaagaacacagagcaaaataaggcttctattttcttaatcaaacgttggtgtatgttgccaatgttgtgtgcttatttatagtttctctgttagcttgtaaagcacgcaacaataagatgagatataggatttgtttttttaaaaagacatttgccgttatataaggataaattatggcttaaaaaaagatacttattttctttaaaaaaaaattatttctgaaatttaatattttgaagataatttgaatttacttatgaaaatattagtcttgagtttcaatttataaaattatttctagtgtgtgaagataccttttgtttggagtaaaaattttacaatcttagggactctggaatgtctagaatttaac

SEQ ID NO: 235872 - DNA, 448 bp, Glycine max
  unsure (1)..(448): unsure at all n locations
ggaccttnaaactcagcttccattgaattaatgtaaattcacttcaattccagtgtaaaaggaganaaatttgaaggtgcaaaagttgttgtctcgctaagcctggactgtgcacttagcgagactcaattgctaagcgagacatcagccgcttagcgagtgagatggatattgaagagaatcttccatgtcatcacgcactcagcgcgtcatcagctcgctcagcgagaagatagtctcttctgcgcttagcgcgagaatggtgctaagccaaatttcacttactcgtgcttagcgcaaaaatgacgctaagcgcgccttcacggacaaaaagccttttttaagcctgaattgcagagaaagagaagaaagtctgaatagactacgtgagcctagtgcagaacgaagaacagaggataagctgagcaaggaagaaaaagaccctaac

SEQ ID NO: 235873 - DNA, 356 bp, Glycine max
aaaaaaacaccaaatggcgatccttctccttcttggaaggaccacagatatgtacttcccaccttattcacagattttctttcttcttctctctaacttgtgcactgttactcctctcttcattcttattttttccatctttttcatttttccattttatttttctttttctacttctatttctttttcttgggcattcaatttctttttcttgaccattatttgttttctttttcctgaatgctttcacctctcacatacatcttattatcatcaatacctttcttttaacaactttttttggggcatgaaacactgtcctcatctctgctccataacctcttactcctgcatac

SEQ ID NO: 235874 - DNA, 475 bp, Glycine max
tggtgaaattgccatggttggatgagttaaacatacccattctgttttagggttttgtgatgatgtttgtgatgtttgtatgctgaaaattgcccatggaaaactgttagagatgaaatgtagagttaacctatggttggaaagtgagaatgtggtgttatgagtggaaaaagagtgaggctttgagagttggaaggctaagtctgaattctgtggtaaatggaggttaaagtgagttaatactagcttgaaatgtcatttacgacttgggagaaagcttggactgtgctagagagaagaacaaatgatcaaagtgaacaaagagccatttctagggcaaaattgggtgttgaggagtcaaattttgattcggtggaattttaggtgtaaattcagtttgagcaaagttatatagatgttatggacttgtgtgaagtgagagtttgcttcaaatttacctcattctaaatttcac

SEQ ID NO: 235875 - DNA, 329 bp, Glycine max
agcaagctaaacggaggatgtttatcttttttaacaccaaccgagggagggtccgatgtatgggatgaggactctgctcttgatgctgaccacagtctaaagcggagcgccggaacggcttggagatgaacatgcaggcgatagttcgatgcttagcaaaagtacacctgagggctgagactaaacgtctagggaatgaaaaataacctgggtaataagaatctggatgttaagatatacactgcttctaagagatcaaaactaaaagtccacttcgctcttgggttcggctggcggtagatcaaagatcatgcatcataataccatga

SEQ ID NO: 235876 - DNA, 433 bp, Glycine max
  unsure (1)..(433): unsure at all n locations
gagtatcattgggatcagatccagattatgtgtattctatatataattgataataatttaagattatatcctcaattctctctcgagtttcattttgaggatgattccaagttcaacactaaacctaaaattccattcgcttcattctcgctcattcatataccagccttctaaagccctctattttccctcctgaaaattaagacacacactaacccttctccctcatcattatcttcctttttctctcttagaagcttgaggcttcaagggtcccacccatctccatcttcaaggccttagatcttccattatccaccactattcaagttttcgcgaagcttcttcttcaaccatttgtcttcttccattatgcacgtattctgcccatctttgtcatcatatttttctcattntcttctatcattctttg

SEQ ID NO: 235877 - DNA, 417 bp, Glycine max
agcttgaattgggcaacaatgtgtggtcaattaaatgagaactactcgtggatcgcagaacaaagaaccaagacatgatgaacaaaacaaatgtcattatgaagaggaaaagcaacgactttctagaaacaatcttgaggaaagaagcattatttctctcagcaattgttatagtactccaattactatttcaacaattcacacaccactatgcactccactatttggcacaatcataaatcatggttaactttgccatgtcttaagagaaattgtacaaactacaaagacaatgaagaagggtatgatcatacacaaacaatacaacatgaacctccaaaagtgaatagttttaaagagggcattaatagcaccattcactattcattgaaattaccaacccgagatgtgatgagt

SEQ ID NO: 235878 - DNA, 473 bp, Glycine max
  unsure (1)..(473): unsure at all n locations
ntanaactntgctaactaaataaactgagacataaactattaacgtaaactgaacataaactgtatctaaagcaggaaaaataaataaagatcttgtcatgactcctcttgtggtgatgtctgctcaccatgaggtgaagaaggagtatcctgagctgactaaggtgtctcctgtgcagttgtaggccagggatcccaggtactttgtgccgcctgtaaatctgttgcatagtctgtgtcctcggcgccttcttcatcctcagagacctccaaaactggcatggtcgcaggtgagacctatggagtcatctttggagtggcctccggctaatgctgtggctgaggctcctatgctacagaggcctcacctcccccctgaagagaaagctagactcttgtgcaagccacctgtgctgtaaacacctccatgctcatgatgggccgatgctgagccaaatcatggatactttgca

SEQ ID NO: 235879 - DNA, 409 bp, Glycine max
  unsure (1)..(409): unsure at all n locations
agcntccactccagtgccgatgggagtaccttttgtgtgcgaatatcaaacgttaaaagctagaatacacaatacccttatagctaaacgacaagcaattttggatgaaatctctaccggcagcctttcacgaatgcaggtaatcaattttgatccaatgtatgcaactgaaagagatgctgatgtaacacacagctaatgtggaataatgaatcttcgcttgttggtctgattgaatcattatgtagcattgctagaaccccaaatgggatgttaaactcacttgaagctactatgacccctactcattatgccctgctatattacaatgagaggaggaacatgtcacgccaaaatgaagttgtgggtactcgccacaagaaaaaaccaataactttgacatcccccc

SEQ ID NO: 235880 - DNA, 457 bp, Glycine max
tataagaacaacattgccttaaacatgtgcatatatgcttttgaattaagacgcatcaacaagaatcaagccaaggctattgtgcaagcaatcaatggggcataacacaccaaatgattataatgatggatggctcaaattctcacaaaggtaaaatcatcactttcaaatagagctttcaaaactatcatgacatgtagagaagaaacaaggatttcaagtcacaaaatgtcaagaacttttattttcaaaacaattacccatttcttgaacatatcctgtaattcaaagaaaaacatgcaaagtcgtacgtgcacatgaaattgacccaaaatattaaactacaaatcctatgatactaacaacattaacaaatgaacacaactatcacattaacataaccaactaaactaccagaacccaagaacactctcgcccatacttaaacaacacaatg

SEQ ID NO: 235881 - DNA, 398 bp, Glycine max
  unsure (1)..(398): unsure at all n locations
agccctcaacctttgacctttaggtaaggtttattgagnnatcgcctattcaagaatcactgtattcgttactaactgggttggctcatatactactaaagaagaagctggtccatctgtgccattagtgcataagaataataatagtttttgacaatcatagttatttgcgattactgattgggttgattggaattcaatcaatcagaatggtgtatgattaattgatactatcgcaacctgccctccggcgggggcgcgaataggcctctcggtcgggccaaaggcgcgtcctccattgaaagaaaatgcatggagtcgccacccatgcttatncaaagaaaacgacagaaaaaccacaattgaaaggggtcgagggtctaccctatttgaaaatg

SEQ ID NO: 235882 - DNA, 474 bp, Glycine max
  unsure (1)..(474): unsure at all n locations
tgcggcacctcgacattccgcattggtttttgctcaaccctcctcgcaccacctttctctctacaatggcgctgatttcaatggtagactcttgtcctccatctgcacccgatgcaaccatctcaggtctctctatttgggctccattgctgagaaaaaagtgagggctattcatatttttgatctccacgagttactcacacttggaagtaagccatccatcacaaccttattatttggatttcttttttcttttttttcctgcattaaattggtaaagggtctgagccatgttgcattctcactagcacaacccttgtggttcttaagttgggtgggttaattatgaaccatgtttcttcttctgttggtgatcttccttctcttaaagcacttcacttgagaaaggtccattccttgaacttagatggcttcttcagattntgtctgcatgtccacttattgaggacttgc

SEQ ID NO: 235883 - DNA, 87 bp, Glycine max
  unsure (1)..(87): unsure at all n locations
tcaagctggaggggcgcacgccacacattttttttttaaancacnggcaatgcgtctacccttattgtgataacctcctctcccgcc

SEQ ID NO: 235884 - DNA, 451 bp, Glycine max
ttaacaaataagtcttaaatcttcacatgatatttatttttgaaatttctgtcgatcctcactaaacatgtgacttattttttaattcttcttatcgttaatatttggattgaccacttactttgtgtttattctgcagaaagcatacataagtaaaccagtgcctcagaaagatactgctcctggtcttgcatatttccacatccctctgccagaatatgctacttttgactcatcaaacatgagtggtgtgaaacaggaaccggatggcaatggcattagctctccttctgtgaactccggcttcttcacaaccttgcttgcagcaggagatgtgaaggcagttttcactggccatgatcacatcaatgacttctgcgcaatctaatgaatatacaactctgttatggtgggggatatggataccatgcgtatggaaggcagggtgcct

SEQ ID NO: 235885 - DNA, 386 bp, Glycine max
  unsure (1)..(386): unsure at all n locations
agctctgntatctatatagtgttacggagacctctaccgaggaaatacaaatcaaatattatatttatgattttttttatttgtaagaataaaaaaatatatcaataaaatttataataattcacacattttattaaatgaattaagttagaacttctcgatattatattattaggaattatgtaatagttaaacattcaaagtatagaacaaaattcttttttgagaaccaattgaaattatgtctaataaaaagagttgatgtctgacaatgcgataaattaatatatgaactttcactagaataagtatttatatttaatatccgagatcatgtctataataattaaatatttgattatatgtaagaaaccagaaatgacaat

SEQ ID NO: 235886 - DNA, 307 bp, Glycine max
atatgaaacactcttctattcctaaagctgggaataagacagaggatacatacctcttcacttaagggagaatgcctgtaatcacgctctagagagcattatactaagctcgcataatggccatcatatgaagttgctgtgaagaattaacttacactacccatggtttgctgggcatgaactgcaatgtgatctcagagggagctatatgacccgtgtgctgtaatttgctgaacactacaccctgacagcctcatgggaggatgccattctcgaatactcaggttcaagccttgatctctgatga

SEQ ID NO: 235887 - DNA, 451 bp, Glycine max
  unsure (1)..(451): unsure at all n locations
tcaagagagagagagagaganaggcactgtanagtgatctttagtatgatgatagtataaaaaatgagtatgaaattaaattaaagtataatgtagtatttgagaactatataatgtagtataaaaagatttggttgtgacttgttgcagtcagaagttgctattaaacatgctggataaccactgcagacactgcaacgagcagattgcagacggcgatgagcagcagcctctatcctcctacgacttcgtgtaccttcccattgatttcaagtatttattccatttccatgcgtgcaatcccacttatttaactaattaattgatttacccaccaagcacaatgtatcaattattattatgttntgagacagcaacaagtgcaacgtgggatatggttttgtgaacatgacttccacggaggcaacactcaagctccacaaggcttcca

SEQ ID NO: 235888 - DNA, 441 bp, Glycine max
  unsure (1)..(441): unsure at all n locations
ggacctaagcacctgagctgcagctgactttcgatctgaatttttttttcctgagtctgccatgaagaagattgaggacaacaacactttggttttcattgtcgacctgcgtgccgacaagaagaagatcatggatgcggcgaagaaaatgtatgacatccaggccaaaaaagtgaacaccttgatcaggtgagcatctatgcaatgattgcagttctgataggaatgatttcatattgcattattgctgatgaaatttgttgattggtagtgatttccgtattcacttactggtataaggcattgatgttgttgtgaatttgatgcatgatgtcatgatgtcacatgacgtcacatgttatttctagttntgatatctttttgaagaccctgttatgttgatgcatgatgtcatgatgtcacatgttatttctagtcctg

SEQ ID NO: 235889 - DNA, 470 bp, Glycine max
  unsure (1)..(470): unsure at all n locations
tgcttgctaaggttatgtatatttgtggactatggcaacagtaagtntatttaggagtgtaataattctgttcaagttatggtcaaaagacttcatagctgtagcgcactgcagcaatttatcgagaagagtaagatggatgaaatgcacatatttgttaatattttcttataattcctttttgacaatttaaaagagaaaaaatccaaatgtgttgactgtgacagaagagtggttatgtgtttagttaacattaaagcattaggataaattcaaattgaatccttaacagaaataatttttaatcatatttttacttgatcaatttctagattagtttttcagatgaactggagggggaaaaatgttgacttatattattcttcattaaagcgaaaatatatacttctcaattatcaaaaatgagatctcggggaacgatgtgttacaaccttaaaagtaaaactaac

SEQ ID NO: 235890 - DNA, 364 bp, Glycine max
acggatgcacttcttgcattgtatatttgtttgattgttatacaactattggcattatgctctttcagcattagcagaatatttcttggtttcaccattgaatttgtcatatcagcaataattgtcttctcatccttagtcaatcgaccaacgtatggactctcatacattaacttgaccatccttccttggcctccaaccactggtttcccatgaaacttaaaggaacacccacatttcctactacaagtatctattctgacaaaatctttcttcctagacctatgctgaccactccttttcaaaccaattaacacaactgaaggcattcctctcataactaatgttgtgtttgacctccata

SEQ ID NO: 235891 - DNA, 428 bp, Glycine max
  unsure (1)..(428): unsure at all n locations
gtgtgggagagtaacgttggtctacctcacattttcatatcttcgattgcaaccaatcaatcgtacatcaaacttgtggtttagagttattagattggctatggttcagctacttcatccgcaacattgcacatgaaaccaaaataaaatcggttttttatttttttgttgatggtaaaatatgtatgtgtagctcttcatcaaagaaaccaaagaaattaactactacttctatctcatattacacattaaacatttatcatttanaaatattaattatttttcaaagctcacaatttcatgatctatttgcctaacacttgtgattatccctctcttagaatgcctaagataaaaactaaaccctctccccaaacaccttacatatgaatattgtcagcaagagcaactccatatgagttaagtac

SEQ ID NO: 235892 - DNA, 396 bp, Glycine max
  unsure (1)..(396): unsure at all n locations
agctntanntcactgcgtgaagagaggcattgatttcttccagaggaaaacacattgcctaaaagttactatcaggcaaagaaggtactgtgtcccatgggtatggagtttcagaaaattcatacttgcccgaatgattgcatactgtatagacatcaatttgaaaaaatgttcaaattccctaggtgtggcgtatcccggttcaaagtgaacaatgatgaagagtgtagtagtgatgaaaactcaaagaatggcccccagtgaaggcgttgtgatatctgctgatcgttccaaggtgtaagcgtctttttgctaatggagacgatgctaaagaccttacatggcctgcaacatggagaaaatgcgatggaatggccgtcatccggctgaatgctc

SEQ ID NO: 235893 - DNA, 493 bp, Glycine max
  unsure (1)..(493): unsure at all n locations
ttctttcgtacacttaaaactcagcttaacctgatcgctaagcgacagctcatccgtggctgagcgtgacctattgtcaccaagcacaattacttacggccataactaaggttgatgaagctaaatgttggtcatggcagctaaacgagattcattgcggcaatatgatcgctaagcgagtccctctcagctaggtgcatgctcctctgtacttaagatgcatcattttagctaagctggccagagcctagcttagtgagagttgcagcttttcggatctgcaagcctcgctaagcagacgtaccctcgtgctaagctaagtttgtgttataaaaaactgattntgaatttgaaacgtcggctaagcgcacgggtccgctaagcgagccttgttgagaaaccaaatgtctctcttgctcgcttaacgcaacggtccgctaaacgagagtatttgataactacttaagtgagtgtacaacagttcactcacatt

SEQ ID NO: 235894 - DNA, 420 bp, Glycine max
gagcacctgcagctgcagcttagaagaatgggattgagggaattctcttgtgttagtgcaatatttaaatcagttgcaatgtgttgcaccctgggtatactatagtccaagccatccatagaatccactcttatacgtgtcacataatatggaatcatattcttagataggcaaatcaagtggctgatgacctaacaaagaattctctcatgaaggaggaacattatcattttttattggaaaatgttaggcaaaccaacaaatagtggtcaacctccatcaaacacctgaggtggaatagaacaatattatattattatttgatatattttcttaaaatgtaaataatagaaaagaaaattcagtgacagctccaaagaagggggagttccaaaaattaaattatatgaaaagagggga

SEQ ID NO: 235895 - DNA, 455 bp, Glycine max
  unsure (1)..(455): unsure at all n locations
ntggagtttccaagtgccaattcgtcttcgtctgtagtccagttttcttctggcttcaattcatcagtgggctttccttctgtgtccagcatcttgggatgttcccagcctttgatgacagctttccaggttctgctatccagtgatttgaggaaggccaccattcttgctttccagtattcatagttggctccatcaagaattggtggtctgttcactggtcctccttctttctccatgttcatcagaatatatctccctagatctcactctgtgatttcgagtgatggctctgataccaattganattctgataccaggggacagatgtcgtaccggatgtcacgacatcacgcttcagaacatgcagattagatgcgtccgcttgaacacgatanacatgtaaataacacacgaggattgttaacccagttcggtgcgacctcacctacatc

SEQ ID NO: 235896 - DNA, 347 bp, Glycine max
  unsure (1)..(347): unsure at all n locations
agcttngaaattgggcatctgatggcagttagctttgttttgataagaccgctaaagctagaggtggggctgaagtaaaagatgcatggatgccacccattggtgtaaaggaagagggaatatcagctgctctgagcttggtcttccttgtctctggaaaataaactgtttggtcattcacattccaacagttgtttatgatataagctaagtcaatggccggtcttatgttttcataggaggtaagggcatcaaatcccactcccctcgatctacaaaaggctgtgattaaagctagaaagcctaatctaaaacagttagactgagcgatcatggtcacttgtcta

SEQ ID NO: 235897 - DNA, 377 bp, Glycine max
acaagtgcagcacctctcaatgagctggtgaagaagaatgtggcatttgcttggggtgaaaaacaagagcaagaatttgctttgctcaaagaaaagcttactaaggcacccgttctagctcttcctgacttttctaaaactcttgagctaaaatgtgatgcctctgcagtgggagttggagctgtattgttacaaggtgggcaccctattgcttattttagtgaaaaaattcataattccaccctcaactaccccacctatgataaaaagctgtatgccttaataagagccctccaaacttgggaacattacctttgttccaaggaacttgtcattcatagtgatcatcaatcacttaagtacatttgagggcaaag

SEQ ID NO: 235898 - DNA, 463 bp, Glycine max
  unsure (1)..(463): unsure at all n locations
ctaagctttgnggtgccctttatgtgcttgtttacatatataggaaaaatcccttagcaatcccccaaataaggacttatcataacttgaaacccttatgctctcttagaatcctaaaacaaggtcaaggatatcaaaattaagcttaggggtttattcaaacaaatcattattacttttgactcaacaggggtgtaagggataaattcatcacaggttggctttttggctgagtggctaaaataaaaagaaacatgacattgatcatatccaccttatgcaaataatctaacattctaagaatgatgcaaaattaggaatttaaaaatagacattctctcataattaagttcacacagctcactgngacaagataaagttatcggcttattggaccatgatctctttccatcaagctaacctttctctctttgtgattcatgttccnactgttgactgactc

SEQ ID NO: 235899 - DNA, 407 bp, Glycine max
agcttctcccccaattatatataagaagggtgttttatttaacagaaaaggggtcagccccttatgcactcctctctctttcgaatctgcttaggaaaattgtttatgtgaagaaaatccaagccgaggcgcttccgtaacatttccgtgagtgatttcgcgaaggttttcgaccgttcttcgacgttcttcattcgctcttcatggttcttcagccttcaatgggtaagtacctcaaaccaagcctttcaattcattctatgtacccgtggcgagccacatttggtttcatgtatttatattctcgttttcatttactttttatacccccttttgacgtgcttaagccatttatttaaggcatttctctcttacctaacaataaataaattccactgatcgttgaa

SEQ ID NO: 235900 - DNA, 433 bp, Glycine max
  unsure (1)..(433): unsure at all n locations
tgaactgtggtttgctgtgttaattcgaacagggttccggtggggtcttcatattgtgaggatgcgaaccgggtttggagagcatggagaaaacctgcccaggacgagagctgaccgttgccagccatccactattaccaggccaaggcacgaccatccatgtataaggatacaattgttaggcgttcgtgttcaggggtgtgatgatattcaaaaaactatgtaattttgaatatctagcctaaggggtctgagccatcaatctggggacatcaagctttacacggngtggttgtgaaaaaaaggaaggcgatgggttatggggaaaagaggttggagaagaatcacacgatttacaggcggaaagggtagtgatccacgtatccactttgtgggtcatgtgacccctttacccacacatatatgtactaat

SEQ ID NO: 235901 - DNA, 411 bp, Glycine max
  unsure (1)..(411): unsure at all n locations
agcttactagtgtgtcgatgaaatttactgttataaactananagagcccatgggaaggccataatcaacttcatcaagcccaaataagcccttcacaatccacactgggattgttttagatagaattatagaaacagttaaattgaagataattttaagaaataagctaatgctgttgaatgtttgcaggttcttagtgctcatttccgtgcttatatacaagcattggagaaactacaattggatatagcaacatataatgatttaattggtgtagagactagaagcagtggcctattcataagagcaagggaaccactgaagaatcgatctgctgtatttgctcttggggataggattaatatattgaaggtataaccctgtccaggaaaaaataaggaaattcatgc

SEQ ID NO: 235902 - DNA, 468 bp, Glycine max
  unsure (1)..(468): unsure at all n locations
gctttcggaccttaaaactcagcttagaaatatctttaaatgatgaagaagagaaatatagtttttataagttaaaataatctttttattaattaatttgtagatcttggttatttttttaaaaaaattatataagaaaacttttataaattagttaacggttaactagtgaaaaaattattttaatttgtaaaaaaaattatctcatttttcttattttcttctcctaaaaatattacccaaacatatcatttatttgtttagcattctttattgtggtgtgtgtgtgtgaagtttatgaaagctccacctcttactctaacttaacatgcaaatgtattattttttatagctttttcaacataaattcaatgagtacatcactaatttagtcattggtattgttacattcgttcctatataaaanaaatcttatgttgtcactttaatttatatgagtatgatata

SEQ ID NO: 235903 - DNA, 420 bp, Glycine max
agcttaaaatatatatcataagtattttattctggaaacaatcctacacaaattgaataaaattagtataagtgataagttttttctttctaatttttaatataattgtgtagttaaattaaaacaattttatattaattaatctatcgactgaataatatattattacactatataataataataataataataataataataataataataataatatgatacgttaatcgtatacaaatcatgaaaacaagttcaatgattgacattttcttttttctgttggtatatattattttcttagggaacacatatgaacttgtcagcggccaaaagcgataaattaacaattgaaatttgaaacatgcgtggatcctcctcattgacttacgttaatccgaaatgggatttaatatttaa

SEQ ID NO: 235904 - DNA, 399 bp, Glycine max
  unsure (1)..(399): unsure at all n locations
agcttctacttatgtggcagggcgggcttttcttactttcttgnctcaaccgcgagctttgaccaccgctcttccttcccgcgatgcttctctttatatctgcctgagtgggcttatagcctaaaccatacttcccacgatttcctttggcatttatcaggctagttatgtcgccgttgtctttgcctaaacccattccgggttcgtaaccgttccccaacataactcgggccatcattactgctgcatcggacaggcaaggctgcccagagaaggagtccacggaggaaatgcttaccacctcaaaagactggaaagcggtttctaatgactcctctgcggcttccacataaggcatagacgatgggcagctcaccaagatgtcttcctcgcctgata

SEQ ID NO: 235905 - DNA, 455 bp, Glycine max
ctactatgcagagaatatgcaaggaagataccttcatctgacttaacatcaaattttcctaagttatcttttccattattcaatacaaaacatttacaaccaaagatatgaagatgtgagatgtttggttttttgccattgaacaattcatatggagttttctttaaaatgggtcttattaaagccctatttaaaatgtagcatgcagtgttaacggcttcagcccaaaagtattttggaagaggagtatcatttaataaagttctagcaatctcttccaaagatctattttttctttcaacaacaccaatttgttgaggggatcttggtgcagaaaagatatgctcaatcccatgcttatcacaaaataattcaaattctctattttcaaactcacccccatgatcactcataatagatataatcttgagaatatcttatttgaatgattttgc

SEQ ID NO: 235906 - DNA, 415 bp, Glycine max
  unsure (1)..(415): unsure at all n locations
agctntgcacgtatcagtcaagtgtttggtctatatcgnagccaaagngctcatcgataatggttccagtttaaacgtgatgcctaagagcactttggagaaattaccattcaatgcttcccacttaaagccgagttcaatggtggttcgtgccttcaacggcacccgccgagaggttaggggagagatcgatctcccagtacagataggccctcacacctgtcaagttaccttccaaataatggatattaaccccccctacagctgtctgttggggcgtccgtggatccactcagtgggagttgttccctctacactccaccaaaagttgaaattcgtagtggaagggcatctggtcatcgtatcaggcgaggaagacatcttggtgagctgcccatcctctatgccttatatg

SEQ ID NO: 235907 - DNA, 430 bp, Glycine max
agcttctcttaaaaatacctattacataggcacatacattttaaaacgatcacaacacattttattacaaaaattacacaaacatgatgatcatgagtttacttgaacaaaatgattttcaagcacatgaccgatgcatataacttgatgtacaaaataatctcttggtggttgacttctaagaggacaaaatgtcattctttgttggagaaaaagagaaacaaggatgacattataccttgatgcaaccacataactcatgtcggttatattcatccacttatccatggtaacctacacgtaacaatgttaattagatttatttaaagcaaaattaatccatcaaaacttaataaaaaaactaatataccatcgatatgttaaccaggcccaagccacttagtgctttttttttataaaacaaaaattg

SEQ ID NO: 235908 - DNA, 463 bp, Glycine max
  unsure (1)..(463): unsure at all n locations
ntctcncttttcttcttcttggctntgattatatgccctgagtatgtaaagttaggagggcatggtcttgcttttacaattgcatcttctaagaatctcaaggctcttccaagtcagtatcttggtcttctaaactcaactagcacagggaactcctccaaccacctctttgctgttgagtttgacactgcccaagattttgagtttggggacattgatgacaaccatgttggaattgacatcaatagcttggtctccattgcttctgcacctgtaggttactacaccgggggtgatgataattcaaccaaacagaatctcacgctcacaagtggggaacccattatagcttgcgctgattatgatgcttctcaaagtgttgtcaatgttacaatttctgaatcttctaacaaaccaaagagacctctcttgtccatcatgtggacctatcaccaatctttga

SEQ ID NO: 235909 - DNA, 400 bp, Glycine max
  unsure (1)..(400): unsure at all n locations
ggcttngcagactgcactgagacgagagttttagtttgatcacgtatacaaccccaacataatattccgaaccaaatgtaccacgacctttgcacggggccttgaaaaaggagatcaacctttatcctaatcacgaaaccacacatagataactctatatattaaaatcttgctgatccctattcctataagctggtttaaccaaaggaatctatatcttgcaagtgagaacacaatagcgcgctttataacaatagattatttagcacatcatttacatgaagatctagcaccaataacaacaatatgtaataccaattccaaaagtagcccactaagggtttgaatcaacataaaataaacaacatggcattaggaactaaacccatgttcacaaaat

SEQ ID NO: 235910 - DNA, 402 bp, Glycine max
acaaactattcgttgtacgtcattatctcatctgaatctgactgtcactatttttcccagtctcatcattgttactttagtccccatagatcaatgattatattctctcaatgaagctcttctgttttgtagcacatttaaaacaataaattgacagactgaacccatttgttaattaagtttcaaatacatatgctcaaaggttggttacaaggttttttttaccacgaacaagattcaaattcgaaatcttatttaaaaggattgagtgcaaaattatcccaaccaacgacttgttggtatcgtagatagtcttaaattgatggaagcattgcacttgtcggtccaatggcacttcatcgtcaagatgaggactaaatcttaatatgggtttcatatatt

SEQ ID NO: 235911 - DNA, 396 bp, Glycine max
  unsure (1)..(396): unsure at all n locations
agcttgccgcacagctcgcccaggcgagtttgttgttttctctanaagcaacaaccttctggaggaattttctggagggcccaagtggacctggttgctatttgcacccccctttttactaaatgcacccccttctatttttttggaaattctttgtccgtaacgttacgaaactttacgaatttcataacgatacttattttccttctgcaaggttacgaatccttacagattatgtatttactcttttttagctctcaaagaagttacggaaacttatggattacgcaaaaacacctcttttcgatttccgccacattacggaatttcacggattgcgcaagcctgcttccttttgatatttgacaagccttgggacttcattcattgtgcaac

SEQ ID NO: 235912 - DNA, 467 bp, Glycine max
tgctctaaatttacattgatgctcgtattagtgggaggatgttatatgccattctctgtttaagagtaatgtcccactggtaaaactaactttccaaatgtttgccttcgcacgaatggccccgaggaagcttgcctcaaagaggtccaggaaggacaaggcggccgaaggaactatttccgctccggagtacgacagtcaccgctttaggagcgctgtacaccagcagcgcttcgaagccatcaagggatggtcgtttctccgggagcgacgcgtccagctcagggacgacgagtatactgattttcatgaggaaataaggcgccggcggtgggcaccactggttactcctatggccaagtttgatccacgaatagtccttgaattttatgccaatgcttggccaacagaggagggcgtgcgtgacatgagatcctgcgttacgggtcagtggatcccgttcgatg

SEQ ID NO: 235913 - DNA, 412 bp, Glycine max
agctttacagcagattttagtaatgacccactaatttataattaaaataacttaatgccattaacctagggaattaaaaaaaacttaatggttgagtgtaactgaaattgtggcaaccaaaagtcacccccaacagccaacaagtcagccaccatttggtctcccaaaaggctgatgcctaggttgccaattgggcccttattacaacttgaactaaacctaactaaagcccttttagttgattaacccaaaacatatttttggtcagccaactttacaaggattgggccattatttagacaaactaaacactctaaaattgagacaaagtggtgtcatttagtcctcctccatttgggccatgatacaactcacaaccttggacttttctccttgaaacttgggcttgtat

SEQ ID NO: 235914 - DNA, 433 bp, Glycine max
  unsure (1)..(433): unsure at all n locations
tcgatcttccaccaccgccgccaccatcatcttaggtttctatattattagtactctgattttcagccttgtattttggctatattattatggtatttgaacaatttactatttccttatttgcatggtatgtttgaacaaatattaagtatgttgtttgactatgtggattttataattaatctattcatgattgttgcttcatggttcttgcttcatgatttggttgatattttttccatgaatgttgtatgaatgtttaattatatttgaaaacttcaaatttgatacgcactttggctttttgttgatgccaaagggggagagaaatanggattaaatcaagaactcacatgagtaatcaacttaattntaagataagcataaattcaaaaacaaagggggagaatggaaatatatgggagtgatcgac

SEQ ID NO: 235915 - DNA, 417 bp, Glycine max
agcttctttgtgggggagctctactaaattatctttatgtaacactcttactatctatttaatgttatttttctgtgttcattgcttctatctatgcttattttacatgcctatgacttgatcacccatttgtatgtgtagttaggctttttattattgggaaatgctttaaaaccttataacttgatagagcaagctagaaaactatatgtctagcactggagtgcagcgatctagttcatattatgttgtaggcttaatgcaactcttttataccaagtttgttgagggatcaaggacgaagtttaaagagagttaggctcattcatgtgaggaatcatggttcgagtaattctcaacataagaacataaggataacgttaaatagagaaaaatacgtcttaaacatcaagagaa

SEQ ID NO: 235916 - DNA, 400 bp, Glycine max
tcaactcccctttgttgtgtgtaacccttggccacaagcctatctttgaaacttatgatggcgccattaaacaatgtttgatgtgataaacccacctattaccaattgaaacataacttggtgaaaaaaatctccatacgaagtatgatttgcttctagagtatgtaattcatacttcatagcttttcttaatacagcatcatacttaaacagcttatgcatatgttttgggttcagacaattttgagatggctaatgtatatatttgagatgactatgagacaaatgatgatatggacagaacagtggattatgaatataaagcagtacctcgcatagaagaaatgaacctgcttgaattagaagaatgcatgttgtgaaaaataaaaatcttgagtta

SEQ ID NO: 235917 - DNA, 426 bp, Glycine max
  unsure (1)..(426): unsure at all n locations
agcttttgtgcataaaaagcacttgaattcgttcaaggtccaactccttaacagtttcttttgctnttatcggttaaaatgaacctttcaaaagtttaaaaccgaccctacgtttaattttcttgctcttaaagagctacgtaggtctgagttcctctgtgcatttgaggatacgtaggagcaaggtcgtgctcttgtcgaccccaaaagataaaaaaacataaaaaatgaaaaataaataaattttgaagtcatgttttgcacacttgataaaaggttgtcgtcccttgtgacggacgtatggggtgctaatatcttcctcgcacgtaaacaactcccgaataaatgttttcctagcgttatcttaaaattcgtagagccccttgttggtttttctaacgctttcctcgaataaacattggtggg

SEQ ID NO: 235918 - DNA, 457 bp, Glycine max
tgtatttaatgtttggtggtatttacttgtatggtttgtgtaacacgtctaaacttctttttgttgattatgaatgtcattagtttttagtaaattcttattatttttgagaatttatatgtatatagtatacattatataaactataaaaatttcaaaatagcagttatcccgctatatgcaatctcgctattgagttttttgagccagcggctccgctctgctatcagagatttaaaacattggttctatgtagtatcatgatttcctaatgtcgtcattttattttattttgttttcccctacttcagggagcatctgcagttaccaagagaactgtcagggcaaaagactcatcttcaactgctgttgctggtggactggatagcttgccccgagaagacatatatggaaagatctcaccaactctcctgaagagcttgaaagccctgattgg

SEQ ID NO: 235919 - DNA, 422 bp, Glycine max
  unsure (1)..(422): unsure at all n locations
agcnttgatcctttgagccaactatgagactaattcttggtccgcgacttagncatatttaaagctcattatccctccccaatgatgtattttacgaggatagaacttcggtcctctctgacaaactcaatgcgtgttgtcaaccaaattacacttattgggtaacttgacattttcaaaagtctaataatttaacagaaaaatatagttaaaaccttactttctaataaggcttgatgaataagattttaatcatacttctaagtaagataatgagtcaaatccaaatttatagacttaatgttacttttagtccattatgttttaatgttttttatttcggcacattcaagtttaaaattttcattctggtcctttatgttttcaaacaagttcggtttagtccttccattaccttaact

SEQ ID NO: 235920 - DNA, 417 bp, Glycine max
  unsure (1)..(417): unsure at all n locations
actaagcttgaaggaaactanatgccttagttaacctggttacccaactggtcatgaatcaaaaatctgcacctgtcgccagactctgtggtttatgctcctctgccaaccaccacacagacctttgcccttctatgcaacaatttgaagcaattgaacagcctgaagcttatgctacaaacatctacaacagacctcctcaacctcagcagcaaaatcaaccacaacagaacaattatgacctctcaagcaacacgtacaatcccgggtggaggaatcatcccaaccttagatggtcaaatccttcacaacagcagcaacaccaaccttattttcaaaatgctactggcccaagcagaccatacgttcctccaccaatccagcagcaacaacaacaacagccccagagacaacaaa

SEQ ID NO: 235921 - DNA, 416 bp, Glycine max
agcttaagcaaaaatgatgggaatgattttttgtataatcattacacatgtgataaatttattggagaaagaaatgaatacagatagatgatgtacgattaagagataagattaactgccttaataaagagacaaaagaggtaaaaacaatcaagctcatcaatacaagagagttgattatgcttagcagtatagaaagtatcactaattttagtatcaagttctttgaattagattataccccaccaactaacctttctatttaggagtcatgctctgtactaacaactatggcatcaccagctacaatgtgagatggtacctgtttcatacaaaactcatctctcaaatttttgtaacctcattgtaaagggacatcaaaataaacccatgtacaataagtaacataaaaaaaa

SEQ ID NO: 235922 - DNA, 429 bp, Glycine max
  unsure (1)..(429): unsure at all n locations
tgtgcaaatcaagtcactcccgcattatatctcttatcattcattatatgtcggnctcatcctttgcacgggaagccggaaggtccatatcaccttcttagttgtacacatggtgcactgcgcccccaaatgcgcaagtaagaagagataattttccgggctctcgtgtccgtaaaatgcattcatatcatgcatcgcataagcatctcttcataacatcataatggacatatcctgcatttgtccgttatcatattccagcctcacattttgcatgagtcatggcatcatcatgcatatgcgttcaacaaactttntgatttgcaaaattgcataccattngttttcatgtatgctcatccttgcgttttcctctacaaaacacaaacaaagaacggggaagcgtgaagcttcacactacattcttag

SEQ ID NO: 235923 - DNA, 410 bp, Glycine max
agcttcttgcgtagccgctcttggtgcttttattattccaaaaacaaatccctcttattactagctattttgaattctttagttcctgaatgtacaaccttcaaattattgctcgttcccctctttgttttctgcaaaaaagaaaatcaatatcaaagaaaacatggagagaattgtcatggttattattactcggaccagaaggaatagcatctaaacaagtcattttattcttagaatgtgaaaactctgcatatttatggagaacatggggtatgaaggcacgtaagcatgtgaatactacaagtcattttctccaattcaagggcttgattaatcgctctatgaaaaaagcatacatctggtatattggttgtgttgcaacttgttagagcatttggcaaaacaaa

SEQ ID NO: 235924 - DNA, 449 bp, Glycine max
tgcaacccatatctcttcccaggccttctctcttgttctacttcatgaggataagttggaggaccattgccgcccttaccgacctcgtcacacacccatcaccaccactccactaccacacccacctctcttaccttcaccacccaacctggcctccaccccttcccattccaaaccccaagttaaacatctaaccccagaagaaatggcccgcaaacgcgaacaaggcctatgctataactgtgacgacaaataagggcccaaccatcgttgtcgcgctcatttctttttgttgattgccgacaatcctagcaccactatcccactcgaaacctatgttaccaaaccacctatcccaccttcttttgacccaacccatgccctcataagtttcaacaccctttccggtaccactacccctgaaccactcaccggtacgggtctattca

SEQ ID NO: 235925 - DNA, 384 bp, Glycine max
agcttcaacctctacaaagttctcttcctttgtgaccaaaaagggtaatttagccactttttttgctagcttaccaacataaatttccagattttgaattacatgttgattagcttcagatgtttccatgaattgttggacaagtggcctcaataacttaagaggggggtgaattaagttctaaaaattctcccgattaatcaagttctaattccaattttaaatctatatgttcaaaatattgaagataaagacgaagatgctaactatttcaacaatattcttcaagtatgcaagatgaaattatgagagataaaatataccagatagaaaagagagaaatgcgaacttgttttattttggttcagccactttccgtgtcta

SEQ ID NO: 235926 - DNA, 376 bp, Glycine max
  unsure (1)..(376): unsure at all n locations
aacacaccaaacagaattgctaagtttttattacctatctttaactaaaagaacttataactctactaaataaccctaaattggaggagtttgatacaatttacacaagttttatactacacaaagttagtctgtattcaccgactaacattaaacttgtgttgtttgaacacctatagagtgggaatctcatgcatgaactatatatgtatgtatatatgtatgtgtgtgtggaatgtaatttactgatgatatttttattgatgatattaattgatatgaggtgacgttgatgtttaagataatgttgatcgataattgataactgcanagaatggcaataatttgttcactatactattggttttaatgaaat

SEQ ID NO: 235927 - DNA, 404 bp, Glycine max
aagatctgtctgaaatagcacacagtgttcaatgttttatcatctctgatatacaatcgtggatgctataagtcaatttacactattgtttattacctaacttattattttaaattcatacataatttactttatgttaacaacaatacgcatatgactgagacaagtatgcgagcggggaataccaaagtgtatggattccttgagccacaatccatccatagatctggccaatcacaatttgaattaaaaagttacattaagaactgaatgcataattcataacgggatgtgtaccaaggagcctacctgaatgggtaagttaaactaatcaaatgaatttaactaatgtataatgctataataacctatatcggtctccactgcactgaacataggtaaat

SEQ ID NO: 235928 - DNA, 391 bp, Glycine max
  unsure (1)..(391): unsure at all n locations
ttagagtcacctgcggcatcaagctaggcgcatactggttacttagtttatttgcacaagacactcttataactaagacaaatgcacccatatacaatcaaggcaccttcgttacctagattatttacatgtactcccaaggtgtatttgttacctacatcacacacatttcctttgctaaattcacatacattcattctctaagcactttggctatcaaaaattgcattcgngcacatcttggattttttaatacctatacatacacaaacttcatgacgaatcttgactatctacacaataaggtgctacattttacgcctttatttttttaaaggttctttttttaatacactaagccccaatgcaaatatacagttatttttctttt

SEQ ID NO: 235929 - DNA, 411 bp, Glycine max
  unsure (1)..(411): unsure at all n locations
ttccttgaatgatgtgtttttgcctaaggcttgtgattcaaggttttaaattgtggttgtggtcgtggttgcagttttgtcgtattccttatattgtgggaaattgcagacctatgtggccatgcagccatggttgtggttgcagaaacttcataaactttgactttgtggccataattgttgatggctaaatgcattcttagagaccacaggggtaattttcaactaccggcgactaatttgtctttgactttatctttcaagcatggttgttagagtnttatgattcacaataacgttngaatgcaatttggctggcaaccatgtattgaattatggatgggttttgaatcgtgtggtacgtggatgaaatcatctgagtccctgtcaccaatatgaatcacacaattc

SEQ ID NO: 235930 - DNA, 425 bp, Glycine max
  unsure (1)..(425): unsure at all n locations
agcttccatgacgtgattaanaagaatctattggtttactataacaatgaactatttgggtaagtttgttttagaagtatttctaagagaaaaaaaataatgagatgagcttttctattagttaatcattagttaatttttttcgctaataaaaaaacattagtaaatttatagaagttttctcatataattttttgaaagataagaagacatctataaattaactaatggttagttaataaaaaattcattttaacttatgaaaaaacttatcttattattttttcttattttctcctcctagtagcacttctagaaaaacttacccaaaaagtaacaagagacaaataaagttggatactctactgataactgctatgtataggtatattttgggattaaattatgtaggaatagttaacttt

SEQ ID NO: 235931 - DNA, 427 bp, Glycine max
taataaatctatatatggtttaaaacaagcttcccgctttggtaccttaagtttcatgggataatttcttcatttggttttgatgaaaaccccatggatcaatgcatataccacaaggttagtgggagtaaaatatgctttcttgttttatatgtagatgatattttacttgcagccaatgatcggggtttgctacatgaggtgaaacaatttctctctaagaattttgacatgaaggatatgggtgatgcatcttatgtcatcggcattaagattcatagagatagatctcgaggtattttgggtctatcacaggaaacctatattaacaaaattctatagagatttcggatgaaagattgttcaccaagtgttgctcccattgtgaagggtgatagggttaatttgaaccaatgtccaaagaatg

SEQ ID NO: 235932 - DNA, 426 bp, Glycine max
agctggggcttgattttgactaggaggtgtaacattcttataacaacaaatttggccttctcttaattgcctttgggcttggcgaccacgatcaacaaagtactttcggcacctactatatgttgacttcaccaacgctgttattggaatgctgcgacaatctttcaacaccttattcacacattctgataggttggttgtcatgtgaccatatcgtcgtccagatgtatcgtaagccatgctccatttttcctttgaaatgcgatcaatccatcttgctatggctggactcagttgacgaaatttttctaagttttgatcaaacacatgcttgcaaggagcgtacgctgcattaaattttttattatcaaaagttgtacgtagacatcaaactcaaattatattaatgtataaaataaaccttac

SEQ ID NO: 235933 - DNA, 482 bp, Glycine max
  unsure (1)..(482): unsure at all n locations
actaagcttacaaagtanatcatctntatataacaagcttggtaattctcttacgagatcatgcttttgtagttttgagaataatctcaagctaacatgtccaagctttttgtgccacaccaagtgattttcctttatggatagtcggcaggttacattttgttcataaggatcaccaaggtgccacaatagttccttacgacacaccctttctagttgaaggaaacattgtgtccatagaaaccatgcatgagagtcaggcattggaacatacacatttctcttgtcatgtgtcatgagtagagtagccactatctgggtaccatggtggcatgtctttttccggttaaagatatatgccacacgaattattttatccttacgtacccaaattattttgggttcttatttgatagcgcttgaaagccatggacaactcaatcttatgtagatttctacacttgaactgcatatgtccaatc

SEQ ID NO: 235934 - DNA, 415 bp, Glycine max
  unsure (1)..(415): unsure at all n locations
agctngcaccactcgagatcttgagcggttgctttttttctttgnaaagngagcngctagagaactctatctctcactttggtccttcaaacagaaagtgaatcgcatgtgataatgatatttgaggcggagtattatattttgtggttgcggcatctccaaatgcaccaaagtgtgatgcttaatctacacttaagctccatggggagggtttcaagaaggtgaaaagttaagtccatagctggttctgcatggttcatatataaactaacctggttctagattcctgcttcttccacacgtttctaacttgttggcagccaaagaagactcctgcaatggactcctttcctttagattgcagcctggctcttggagggaaacagcattctaatgtacgccatagaaagtgctt

SEQ ID NO: 235935 - DNA, 400 bp, Glycine max
  unsure (1)..(400): unsure at all n locations
tacagagaacttattgtgaacttcaactatattgtaatgtgaattgtcttgtcataatgttttacgaagtgtttactaaatgaaatctcgattatttcttcttcatcatagtatagatgtctataatatcccgaccaacaaatatcaaatagtccgtttacaatttgcaaagttttgaaatatataagttaacaagcctaaactttgtgtacaaatcattttttgtcattaatcttttgaaaacaagaatgttacacattgattgtttagatcttccagagaaatcttatacaaactgtgcttattggccgtaaaatatattgatccatacgttaagtttgaattcctaacgtttaattgaccacggaactcanacttagcagttctatttaaaaactac

SEQ ID NO: 235936 - DNA, 349 bp, Glycine max
atgggtaaagcaacttgctattgcaaacaacaatgactcttagttggtaatcaggttaggcgtgataaatatttcacaaccagatgtatatattttctactgaggagacactctcatacttataaaaatagacaacttttgttattatcccatcacttataaaataaggtgggataattattctctatccacaacccgttctgcaagacaaaaaactcattttataagactgatttcaaccgcccctaatggtcaaagttcaacactaaaatctatttggtccctactcttgcatacctactccaccccaatttacataatttattccccgccttgacgtaaaaatgaa

SEQ ID NO: 235937 - DNA, 413 bp, Glycine max
  unsure (1)..(413): unsure at all n locations
agcgttcttctacaacgaactttttattattacaacnctgaaataaagaaacacatatacacactttttcctagtcgagctctcacttaattttccatattctccctttttttttttgagtttatgcttctcttgaaattaagttaattacttatgtgagttcttgatttaatccgtatttctctccccctttgcatcaacaaaaagtcgaagtgcgtaacaaatataaaacatgcatacactactaatcattcacaagtcattcattgaaaaatctaaaccaaacatgaagcaagaaacatgaatagatcaaatatataaaaaccacatagtcctataacataattcataataatttagtcatactaagcaaatattagaagacatactacattgttcaaatgtcataatat

SEQ ID NO: 235938 - DNA, 416 bp, Glycine max
  unsure (1)..(416): unsure at all n locations
acgtgcttgacctttgagttatcactgtatgtctcccaaaatcccttttgtgtgactttaaattttgtaagcattagaggacacaaacaataatcccgcagagctaaagcgcaattcaatagcgatggcgtgacatgggtggtgcccttgctgcatgtgctgcgtgcgtcttcttgtgctcgtatgagacaccaccacctttattttctatcctatgtactgtaccattcctcagccacaaggaccagcagctatatggctggacaaatacttttgaaccttttttattnnttcttagttcaaatcaggttcttcacaattcacttacactaattctattcactgggcatgattatggtntaataatttaaggagattttacataagaatgaagtatagaatttatcaccgaatat

SEQ ID NO: 235939 - DNA, 291 bp, Glycine max
atgatgaactaagggacgtccatattgccaccgctgaagccttggaaccaaaaaccaagaaaggaagaacacgaccaaaagaaagttttgaggggctttataaggcagcaatagtgagctcaagctccgaagaggtgaaaggaatcatcacgggtcaaaggcatgatcttgaaggacgagctaaaggcttgccttatgtcgaaaagaaatttgtcccaatagttaagcgagactaaagggaatatgtgggccatcatcgatgagtgcaaagagaagcttaatctagcggcg

SEQ ID NO: 235940 - DNA, 468 bp, Glycine max
  unsure (1)..(468): unsure at all n locations
tctgatgatttcactgcttgtagctcctacatggcaccttgaaatctttccttactcacctttatctccaacaaggcctttntaatctcttctttggtttctgcaacctctccatttattataaggtctttttctttttttgctgcttctgttttggacttgagcttatcaagagtttgtgttaagttactcactattgatttggccttttcctccgcagcagacacgacttctaatttagattttgctctcaagagcttgtaactgaggtttcaaacttttgcaccaattttcgattccatgttctttaaatgaattgtggctgcactcacatgcttcagttgatttcttgtgacatccatagaggccataaacttaanaacttgttttgtaatggaagccaagtctttctttgctgcctctatttcttcttttgtaggctntaacacaccaacatgtcttgataat

SEQ ID NO: 235941 - DNA, 411 bp, Glycine max
  unsure (1)..(411): unsure at all n locations
agctttaaattgaatagaaactttcttaactgctgngaatcgattaccatatatgtgtaatcgattacacagtacaaattttgaattcaaatttaatagctgttgtaaatcgtttttggccactggtaatcgattacatcctctggtaatcgattaccagagagtaaatctgttgaaaaaaccttttgaacttagatttcttggccaaaccttttgcgacttcaattggaattcccttcctatttaatatacccttcctaagactctagagactgtcttgatcattcatcttgaatatctttgtcttgaataaatctttgagaagcatgtgattcatgtaatcctttggcatcatcaaaacattcagcttgatcctttgtctacaatctcctcctttttgatgatgacaat

SEQ ID NO: 235942 - DNA, 429 bp, Glycine max
tggtgacctttcacactatatccactcagattcccatattctggaaagtcattaatggtgcaaaatatcatcgcatgcaacctaaaagtctcaccctggattgcatcatacacatcaaccccgtctacctaaaacttacgcatgtcttcaatcaaaggagtaagggacatatcaatatcgtttcctggctgtcttggacgtgatatcatcatagacaacataatgtatttgcgcttcatgcataacgaaggaggaaggttgtaaatcattatcaacacacgccatgaaatgtgattagtggacaagttaccaaatggattcatgccatccgaagaaagaccaagtcgaagggttcttggttcggctccaaattcaagaacaagtgatcaattgtcttccactgtggagaatcagccggatgtcggagaa

SEQ ID NO: 235943 - DNA, 416 bp, Glycine max
  unsure (1)..(416): unsure at all n locations
agcttccctgatatattgagaacatattgtattactacaactntgtagtaaaacaccttctattatttgaagccacaaagttcagcagaaccacaatgaacaccaggaaatattaattgatttaatacaaattcatctgcttgcgggagatcattctatcagagcgaatcacaagccgatgaaaatgctaataacaattggttgggatcagatataaaataatacaatggttcttcaacaataaatcaagttctcatcacatcttactttggcaatccctcctcgagaagtcacttcaacaaagaggcgatgcaaatctagttctcttcctccaacaatgggaatcctgcaacaaaaatttaaatgccacacaagtaactaaaaaggagttggggggacatgcttttatgttacaa

SEQ ID NO: 235944 - DNA, 427 bp, Glycine max
tcctttaatgacttcatgaactataagtggcactggtttaaatgttgagaaaccacaaataaattgggattgtaagttagatgcacgaaacagggactataagtattgtctatgactgataagcgagccatggggagaaaagaagctaacagaagctcatatattggagccgaagttaagaaacaaacagaagtcataaaatgggaggggaagatgctttttcagtgataccatgtttctgatagctaactttaatatataatttactacactaaaacccttataattaattcatccaagacagagatccaaccatgcatgctttatcgaattcggcctgtttgaaaatatggattctctcgctcgtttactctaatacatatcccatcgatttgaaggacacgaacttaactgtattctctatcta

SEQ ID NO: 235945 - DNA, 422 bp, Glycine max
  unsure (1)..(422): unsure at all n locations
agcttaacaagatgcggcgtgattcaatattaaagacaancaagagaataatcttcttttggtttctatagtagtaatttccaatatggtacatattgtttaaagcatgtcaatttgatctctgtagttgcgttttttttttcttcaagtcaattttggcctccccaatttgatttctgaagttgcatttttttttctcttgtcaattttgtcctccccataaaatcacccttaacgccatctgttctatcaatgttgtctttagtctgccacgacaattgttttgagtggtggtagattgcaattatggaaggctgggatggatgaactgttttaaattatatgtactaaattgaaaagtcagaacaactatcagcctcaaacgaatatctaaagtttaaacctacatctttttaacatat

SEQ ID NO: 235946 - DNA, 343 bp, Glycine max
  unsure (1)..(343): unsure at all n locations
agcttagaacaatagacgttgtccttcatttaacaanacncagggcattggacgccacactcaacaagagaactttcgacacctactgtacgttgatttgaccaatgctgttatgggaaggtcgcgacaatcctttaaaaccttatcgatgcattctgaaacgttaattgtcatacgcccatatcancaaccttctctatcgtaagccatcgaccatttttccttacaaatgcgatcaatgcatgttgctatggctagactcaaagcatgaaatttttctaaaatctgatagctaaatttgcttgcaaggaaagttcgctccataaaattagctatgattaac

SEQ ID NO: 235947 - DNA, 398 bp, Glycine max
  unsure (1)..(398): unsure at all n locations
agcttgtaggattatggggtacccatcatatgtggnactagggggcaatcaggcgatggtgcaagtcgactctccacatccacaaatcacacataaatccaccatccccagttgtccaccttcaactgagctcacgtgctcccacgtagcccttatcctcgttcctctcaacaccgggtccccatcaatccctccaagcttccacaacatccaagaaattcagcatccaaacatcatgaactatccanaaccaagataacagggcataggcagaaaactcttcccaaacacattccataccacagttttcctcactcaaataccccagtaacattctctttgtncgattcgttaaccgttggatcaactaaaattttactggaggccctaaacattat

SEQ ID NO: 235948 - DNA, 448 bp, Glycine max
  unsure (1)..(448): unsure at all n locations
tgagaatgtgggtgctgaggattactattgtagattcttttcaatgccgcttctggggcttttacccctgaccgtgttgctgtgtgagttgttttttcctttttgaaaaaaaaatgtgttttggtccctcaaattgatgagagaaagttcgattttagtagtgcctatgagaatttaatacagttttagtttttcattttagcacaaacggaaaacacatttattttgtacctggttttagtctctaagaatttaataagtatttagtttttgcattttaagaggatcacatgtttttagtacctggtgagggagtgataggaaaccacagcaatttctgaaatgtagagactaaaagcctattaaatgtttatagggactaaaatttgaatttgagggactaaaacatatttatacctttttttattatttcntcttttgggggggg

SEQ ID NO: 235949 - DNA, 425 bp, Glycine max
  unsure (1)..(425): unsure at all n locations
agcttgaattcaacctagaagtcttggtcttactataccactgctagctttaaaataatcagcaagatttgtcataagattgttcaatgactaaaagatgatcatcttatcgacggatatcacactcaacactttagtcttttctctcaaaatatataaggtgctttgagagctttttatctatatagagatttacaaaaaactttacaagaaagaattaaagaatatttcgtgcaagatgattcgtgttttgttattcaaagcatctttctatttataatctgcatcttcaggtgtctcttgtctctcaaccaattgattcttcactctagatcttagtctaatgaattatggtagctggatcatttaatgtntggattaaatgcatgtcccttcttcatgcagagagtcaatgcttatagaat

SEQ ID NO: 235950 - DNA, 361 bp, Glycine max
catgagttattgaagaaaaagttctactatatggatcaagatatcaaagaaagatgagaactatctctataagctcttcaaggatgggtaaggattgacctgtacgatggaaggattagaatgctaagaggacaaacaaattctgacttattattgtggattctgagttggagaagtgaaagacacctgtcagaagatgaataatggtaaagttgttggtcctattggttcagagaatttagtttttaacagaatccaatggcattgtgtgatctgtataacccacaaaaaagtgccttgtaattgatggatcctagaaaatacaatggcatgggcaagtttgcaacaacaatgtatagat

SEQ ID NO: 235951 - DNA, 425 bp, Glycine max
ttaagtcacctgagctgcaactggcagtaatagcatatatcatttctgtctaaagctaacaaatcgcaatgccctaagtaaacatacaaatgggttagtggtgacctaaattgaaaatgtttgccgatagaaaaatgaccaaataggatactgaacatcaaaggaaaaaatggaaggtgcatcaaagtcttgaaaggataatgcacttttcaaatgcatacctttggaaaacatactcttcattcatatcattgccagaggaaagccaattcaagtcacaaaagccattagcatgagatccttcaacgccagattcacgagaagcaacttttgcagcagaggaacccttcttatactttctttggccgaaaagccaattttgggttttgagctgtatctcacttggaatcaacagacaatcagcg

SEQ ID NO: 235952 - DNA, 458 bp, Glycine max
  unsure (1)..(458): unsure at all n locations
tgtaactcctcaagcattggccctaagatttgaggtgtgacattgatcttttgtcgcatgttataggtgtaaaatatcaccagctctatcgataattgatatctgtcgaggaatctagctaatcaacattaggagagtttctcttttcaaccaagattttcatccacaaggtcgtttttctatctacaaagttttgaacctgaaatcttatttaagcaatccaaaccaattccagttgaactggcgtaatgttcatgttgaatatattcatagtttgatacctccaataataataataatatcaacaacaacaaataaaggattacctgttctatgagagatctgttgggtggggtatggtcttcctctccgtgcaataaggacaaacaatgaggaactcaatgccaatggagaangaangacatgtgtacgtgtgtccgacaagggcaatgtctgat

SEQ ID NO: 235953 - DNA, 364 bp, Glycine max
  unsure (1)..(364): unsure at all n locations
agctnataacgacagagagagtgaagagttgtttgttttttaaggaactaatgcaagggctgaacttccaatgaagaggacctttcaaacccaaaggtttcaagatactacaataacaatcaacttaaactttctttatagttcatacccacaggactacaaggaacatgtaaatctggtacattgtgccataccatgtactgcaactgaaagttcgcatcccattgacgcttctgactaggcaggatttcaggattgtaatttgttggttcaaaatccggagggtgagaaaagcctttaacatttttgaacttgatattgtgcctttgaattggctccactatttttttttttgagaaattgg

SEQ ID NO: 235954 - DNA, 376 bp, Glycine max
ttgccaaaacgcggaatgggcctggatgcccaagaactccggggtgcgagtggtgttaaacgtgtatcgcgtgtcttttttaaccgccaataccgaatgggaagctctaaacgcgtgggcttgttgagggtccatagtggcagccaatccgttgtaagcggctgtgtatgcatataggagagagtctggagaataatcgagtgtggcagtgtaccaatcacggtgcgtggggtgcacggtggaatcgtggcggtgtttcatgtgtactatgtaagtcttcttggtcgcagatagtattgtgagcttgaggagaaagatagacaaaacgaaagggaagatgatgactcatgggttgttaattacaataacaagtgtt

SEQ ID NO: 235955 - DNA, 428 bp, Glycine max
agcttctttgagaaaactgccttgagaagttagagcttagctacacacacccctctcataactaagctcacctccttgagaagcttccttaagaagattcctaaagaagctacagcttagctacacacacctctctaatagctaagctcacctccttgagatgagaagctagagcttagctacacaccccctataatagctaagctcacccccatgacaaaaaacatgaaaatgcgaaaaaaaaagtccttactacaaagactactcaaaatgccccgaaatacaaggctaaaaccctatactactaaaatgaccaaaatacaaggcccagaggaaggaaaaacctattctaatatttacaaagataagcgggctcatacttagcccatgggctcgaaatctaccctaaggcacatgagaaccctagg

SEQ ID NO: 235956 - DNA, 452 bp, Glycine max
  unsure (1)..(452): unsure at all n locations
ngaaatgaggaagtgtagaagggtggaacttcctgcttttattcttngaccacagagtggtacctggagatatgtcgcggnggtcaagagactttggggacgtcaggtggggtgctattgcccacaaccaagcttgatcaatcccgacccaacccgggcatagtcagtcagtgagaacctgtgatgtacctaagcaggcgagctcttggcaatcaacagataaaaggaacaaagaccacaaagcaaggaggcttgtgtggtggctggccagctgtgaatcttgtgtgatatatgggttatggcctctggtaatcaattaccaagggtgggtaatcgattacaaggcttaaaaatgaagacaggaggctaagatggtctctggtaatcgattaccaaggggtgtaatcgattaccaggcttgaaaacgaggtcaggaagctatgagagcttat

SEQ ID NO: 235957 - DNA, 446 bp, Glycine max
cttctcgaccgggatcttaatcacctgagctgcaacttacccccccccccctttatttgataggcttagaatgcagaagaagaagaagaagcaatcaatttaacaatgttcttttaaatgcgtaggataaaattgattgcaataaaataaatgagataagggatgagagaaatgcaaactcgatttatactggttcggccacgccctgtgcctacgtctagtcctcaagcaacccacttgagattttccactatctttgtaaaaatccgttttacaacttctgaacacccaaggaatccctttcccttgtgttcaggaaactcacaattcaagagacaaccagtctcttgattacaattgactttttgagaagaacataaagatttctctcctttagagtggataatacaattcgaagttcttggatgaactctcaataaatttgc

SEQ ID NO: 235958 - DNA, 449 bp, Glycine max
  unsure (1)..(449): unsure at all n locations
gtatttcactatactctaaaaggaagggtttcaaggtaataatcccttcaactatccatattgggatactctacttgaagaagaagaagatgcacttggagtgtatggagaaaaggaactagtgctcaaagaccagggagttttctaccgtgtatgatcgcaccttctcatttgttgtgcatatgccccaattcagatccatcttcactcgtcacatgaaacctatcattgaagaggtggattttgatgttgatgcctcagttgatctagatgcctttgttgttgaagtttatgatccttcacccttcagagagtatgttagactcatcgaggctgagcttcttaggatgagaaaagcctctgcccaagctcttgaggatcatgcccatgttgagatggaagttgatangtggcatcataatggagatttcttttacaagaaagtcagt

SEQ ID NO: 235959 - DNA, 411 bp, Glycine max
tcaagctattccatgtttgcccatatctaataagttttaggagatgcaagttattcgttcggttttcccttatattgccttagtaccatcctttttgcattatctcatattgttttttttttgtttcttcattctgaatcacatttgacagtgactggaaaaagattgaagcatttgttggatcaaagacagacatccaggtaatttcaaatgcaagttgtaactggttatttaccttagctgttgtttctgggctgttatccataaatgttgtggattgaattaggcatgttatagtttttgaagtgtgtttgattatgttacactaaggattttggcactttccaaataaagaattgtgtatttgacatgaaatgccaaaaaaaaaagaaaatttgaggacatgaacca

SEQ ID NO: 235960 - DNA, 377 bp, Glycine max
tggactgtgctatagagaaaagtaaatgacctatgtgttcaaatagccatttctacggctaaattgtgtgttgaggtaccaaatattgattccgcggacatttacgtgtaaatccagtttgagcacgcttagattgaagttatacacttgtgtgaggtgagagtttgctccaaattaaccttcttctaaatttcactgtttcaacctataaaacccactgatttgtggggtttttgacacctaaatattgtgttactgtggtgtgaaatttggctttggtttacacatgtttgatacatgatttgtgactttgaggattccatttgaacacgaattgatgataggaagtgtgattttctaaatctgcacttatgcag

SEQ ID NO: 235961 - DNA, 420 bp, Glycine max
  unsure (1)..(420): unsure at all n locations
tcacctgcngcatgcaagcttgaataaacttctttgactctctgtatgcttgttagcttatttcatttgtgctgcttaatagacatgttcatatctttgaaatactgcatatctttgtgaaaggttgttggttgaaacattactagttttctctgttcatgtgattgaaacttttgaaacaaacacgattttggctaaccactgttgattcctttcacttgaggacaagtaaactattaattctttgcttgaggacaagcaaaattgtaaatttgggggagtttgttagttgctattcataagttagtttggtattgaaaatttcaaggaaatagcactgtgcccccaatttatggttcttttgtaggaattgtcataatttccttattgtgtgattattagagtaaaaactccactttt

SEQ ID NO: 235962 - DNA, 456 bp, Glycine max
  unsure (1)..(456): unsure at all n locations
tagcaacagccccaaaacccaatttttgcgaaatcattgtcatgatttctatattaccaattttgctagctgttgatgttgcatcatagttttgctatgtcatctacctttggtctcatctctttaccttacaattcaggcaattctatcattaccctttttcaatatatagaattggcaacatgcaaacatatctaatccaggaaattccaccactaatagtcagcctataatccataaccaatgaagtcccccatctccaatttattccatcttctaattntattgtagtttctgcagatttaaaataagcgtttggttcttcgttttaacataaatctattgtttagtttataattcacccaattctgcctttagtcattttcaacatgcagaactatcaacatgcaaagagatctgattatacanaagccaggatcaacagaaaacgtatta

SEQ ID NO: 235963 - DNA, 342 bp, Glycine max
  unsure (1)..(342): unsure at all n locations
agctnnggcctttatgatgagcaccatgttgctttctctantcttaacacaacgcttacaacgactttgatgaacccccaagaggcaattcacctaaactttttttatagaaaaaaaaacatcattatgtgtctaaattaaatcaaagaaaaatatgattgtttattttagaaaaaatattgttaacgtatgtccactcaattcattacttattacatgtaacaaaaaaagctaaattcattacaggaggctggtaaaattgcttctattctgaaatcttatgaacctggctcaggtcagtaaataaactactagaaatcgaaactctggtggattcaatta

SEQ ID NO: 235964 - DNA, 419 bp, Glycine max
  unsure (1)..(419): unsure at all n locations
ttacttggaggctcctcaaggacaggctccctactaagggtaatctcttaagagaaaatgtggctatccaagaggctgtttgacctctatgtggtcaagtttgatattatcttaataatatattagtatttttnntttaaaaaaactctacacgcaaaatatcctactttgtatttaataagcaatgcgncagacctttctatttctattttttacacgttgtaaactcaaacatattaaatataaaatatataacacactaacatagataaagaccaaaaaaggaaatatagactcacctcaccttttcactataaggaacagatagtaccaatgatatatgttgagatattccaatgtgtgttacttatgaacaaagaagctattcattaagcaataattattatcccatttgaatc

SEQ ID NO: 235965 - DNA, 418 bp, Glycine max
agcttaagatgaaaattagaagcatagtgtgcttgtatgaaaaatagcttgatcaattttcgtgtcactattaaacccccacttctgatgagcaattgtttcacttcacatttcaattcaacttgctcaaatgtacaaagttctctctatttataggttgacctttcctctaaacatccatcccactaggatctaattccctctagaaattaaacctaattaaccctttaatggcttaagaaacctaaaaaagtatataaaaatgggcaaatctatattgagacacttgaaaaagaacaacgaaagctctagagaaattcaaatggtcataacttttcactcggaggtctgattcagcccataatatatcgtgacaatggaaattgaacccgaaagctttccccaaattcaaacggcc

SEQ ID NO: 235966 - DNA, 454 bp, Glycine max
  unsure (1)..(454): unsure at all n locations
acctataaaactcagcttcagagggatattgttgtatagctaagagtggcaaacgggaaagacaatgttatatatcttatgaaatgatagatagatctatctttnggttgatataatgtaataacaatttatctagccctttcttttatcaatatattatcatgcaattcaaaaggttaattcatcaattttaaaattgttgatgaactattttaaaggttgcaaaagaaacactatcaaaaagcttagatagtagtaaaaattggtaaatcaatataacttaaatgcgtaatctaaaccaaagtccaaaagaaaatttaaaaaaatccattatataattgattntgtgaaaaacatgtcaaagttatataaacctattaaattgaaaggttgcagatgaatcaatgctcttcttgtgtgctcttcaatgtgctcattcttcccttgattactt

SEQ ID NO: 235967 - DNA, 415 bp, Glycine max
  unsure (1)..(415): unsure at all n locations
agcttgtgatgaggaagtgtnaagggtttaacttcctgcttttattcgntgaccacagagtggtacctggagatatgtcgcgggggtcaggagaccttggggacgtcaggtggggtgctattgcccaaaaccaagcttgaccaatcccgacccaacccgggcatagtcggtcagtgagaacctgtgatgtacctaaataggcgagctcctggcagtgaacagataaaaggaacaaagaccacaaagcaaggaggcttgtggtggctggccagctgtgaattttgtgtgatatatgggttgtggcctctggtaatcgattaccaagggtgggtaatcgattacaaggctttaaaatgaggacatgaggctaagatggtctctggtaatcgattaccaaggggtgttatcgattacc

SEQ ID NO: 235968 - DNA, 373 bp, Glycine max
taacttaacagcgcctcggtaaaattccattaatgcttctatttgattaaggtaattgttagttaaactacaattatggttttatttttagtgtaatgcgctcgctctgattaagggtagatggcctaataggggcctaaatgaaggggtgagaagcccctatttttctgtaaatcgcgatgagcgcaataagcgtggctgtgcactaagcaagttcatcatatttgttaaatatctggatttctagatgaactccctaaacgcgatcttgtcccgcgtaacacattcattcttttctagtaaaattcaaatggttgaactcgctaacacatcgatgcgctaacgagtgatgtgtctcagacactggaattat

SEQ ID NO: 235969 - DNA, 421 bp, Glycine max
  unsure (1)..(421): unsure at all n locations
agctttgngaatttgtggtggttatatctttgcaatttantaacatttcacaacttttggcattatttagctgtaatatttaaaatttatggttttgtgtgatgtgatttgaatggataattattagtagtgctacatatctccacttttttattcattgtctcagatggagccttgttttctgatttttttttttatcaagagcttataagggtatatgaatattctgttgattatattactgtaatgattaataggttatctgatagtaaaactagctaggtcattcttggattgggttgaagagccattttaggtacttcctcctctcaactccaacatttaaaggccaatttagtgctttaatggtgtggatctgtatcctgtacataccatttatttcatcggcatatggtttggg

SEQ ID NO: 235970 - DNA, 426 bp, Glycine max
agcttccagcaaggtctttataatcaactttgtatttggaggacacaccttggcaaccagttcaataaagaccaaggtggatcctcaaacaggtcaattcaacaagggcctaacatctttcagaggacaactaagttgggaaaggactaagttataacttagaaaaaaatctttttgaaaattagtcctttcgctaagcgcctggttctcgctaagcacataatcactcatgcaataagccatgagtttaagcgcttagcgcaccaccctggcacctaaggttgattatttttgctaagatagccaaggtttggctaagccaaaatcaattcgagttgaattccgctaagcgatagactgatcactgagcgatggattcaccttggctaagcgagacccaatgtcgccaagcgcgattcattgcgg

SEQ ID NO: 235971 - DNA, 401 bp, Glycine max
  unsure (1)..(401): unsure at all n locations
tagtctaatttatgggatttcattcatttcctaccaatccttggtacccctcatttntcaattagattcatactttactggtcctcaacttttgaatttttttctttacttcccttactttgttcccttaagtagtaatttttgccactccaaacttaacggctttcccaattcctagaccttttctctcctacctctaagttaaaggtagaagcagatataacatagattttcaaggttaagggattataaaagaataaatcaatatagtttcaaagtatggtgcaagggcttaacaatatagggttgactctttggctctaggcaaaacatgcaaacatggccttgatgttggatggcttcccccgcattcttcatagatgaacgcttgtttgggtttc

SEQ ID NO: 235972 - DNA, 423 bp, Glycine max
agctttaagaataatgcgtaagagagcgttcgtattttttgatatacaaatcgatttgttgaaaaggtgaagcaatcagaagttgaattcctgggatagaaaactttaaatttgtgtctgaataagtaaatcggttctgcttcaaatgaaacttttctattgttataaaaaacttaaatgaaacctgctggaatatgcagattttgttccccttcttatctgtatcttcctaaaattttaaaattctattcattataccttctactatttccattttatttcttcgccccatctgccaccaccactccctgtcgccatcttctttcaattactctttctttaatagatttcatcatccgcatgaatttcgttataacactgatgtttcacaataataaaagtttcatgagtatcataaaatat

SEQ ID NO: 235973 - DNA, 474 bp, Glycine max
  unsure (1)..(474): unsure at all n locations
tgtcttcgttaacacaattagagtgaggttgagactcggtttaattgattctaaataacacaaaataacaaattaagcaaaattgtgtgaataaatagaatcatggctaaaagcaatagagacatgccaacttcagcagtaaaaaccaagcattaatcaggtttgccaaaaaatactagtacgtaagtaaaacaaaataaaattgatgtcctcccatgggattctcttccaaaggctttgggaaattcaatatttagcttctcaatgataagaaatccagcaacaacctttttcaactgctttcgcttttactagaaatttttactctttcgggtgcaaacatgcataggattggtgaggctattttccttcctctttccccttcaactttaattttatgaacgtcattttctaatgcgtctaaacaaaagaaagaaaaataagtnttgtggtctactcttgatacgtatgctc

SEQ ID NO: 235974 - DNA, 435 bp, Glycine max
  unsure (1)..(435): unsure at all n locations
agctntaagaataatgtataagcagggcgttcttatttctttgatncacnaaacccatcttgttgaagaaggtgaagcattcacgaagttcgaattcctggtataagaaaactttaaaatttgtgtcgtgaatcaaataacatcggtttttgtcttcaaatagacaactttctcttattgttatacaataaccttaatatgaaaccctgcctggaatactgcagattttgctccccttccttatctgtatcattcctaaaattttaaaattctattcattataccttctactatttccattgttattttttggcccatctgtcaccaccactccctgtcgccatcttctttcaattactttttctttaatagatttcatcatcagcatgaatttgcttataacactgatgtttcacaattataaaagtttcatga

SEQ ID NO: 235975 - DNA, 485 bp, Glycine max
  unsure (1)..(485): unsure at all n locations
tgtcttcgttaacacaattagagtgggttcaactcgttgtaattgattctaaataacacaaaataacaaattaagcaaaattgtgtgaataaatagaatcatggctaaaagcaatagagacatgccaacttcagcagtaaaaaccaagcattaatcagggttgccaaaaaatactagtacgtaagtaaaacaaaataaaattgatgtcctcccatgggattctcttccaaaggctttgggaaattcaatatttagcttctcaatgataagaaatccagcaacaacctttntcaactgctttcgcttttactagaaattattactctttcgggtgcaaacatgcataggaatggtgaggctattttccttcctctttccccttcaactcttaatctatgaacgtcattttctaatgcgtctaaacaaaagacagaaatanntagttntgtgtgtctactcattgatacgtatgctcttgaacttaa

SEQ ID NO: 235976 - DNA, 416 bp, Glycine max
agctaggcctctgccaaccaatttttcatcttattttcctcgccctgggtcacaaccaaccgtgataattttaatgattcaaaggcattcagctctccccttgttaaaagtgttccaaaatactgcaacagaggaggagtttgcccagcttgcacaggaacactctgccacgtaaagcagataatggcattttaaacattataactaattgaccaaacaaaaggacaccacctaaaggcaaacagtaaacatccagaaaatgaatctctgtgaataaagcggctaaaaaagcaagagacaattctcagatagcaacatcttatcaagaaacctgaaatttggcaactgtgtcacgagttccaaggattccttgtggaaattcagctgcaagatctgcagcttccttatatttgttt

SEQ ID NO: 235977 - DNA, 407 bp, Glycine max
  unsure (1)..(407): unsure at all n locations
agctttaacctgagggtgcctcatagnctttattattgggagccaatccaatccttgtgttcggactctcagccacttatgatagccgccgatgatcccattactgcttcccctaagctctctgtcctttcttcacgccgcatcccatgccttgcgaactccttggagtaccctcgcgttggggtcactaaaaccccgtgcgatgaaaggcgtgatgctttcgtctaatggcgctcctctcatggggtagccaagctgtcttatggtgagaacgggattataattaatacaaccccttggtcccatcaagggaacatttggaaatcctccgcatgaatatagaaacctgattcttccttccttctagcgagggaacctattaacagacgctcccccatgctaaccca

SEQ ID NO: 235978 - DNA, 426 bp, Glycine max
  unsure (1)..(426): unsure at all n locations
acggaatcaacaaatgcgaaaaaggatgaccctatggctgcaaactctgtaatcccgtgggtatggcgtttgaaaggggggaaaagaagtacttttaatgcaaaaacgttccccctttcgtcattcttataatttggtgcaggggtggctcgcccacgcgagctaacctgcacatttttttttttgaggggaacattaaccatgtcccctcccttctcatggattaacgtcttgcctaacttgaacttacttaggttagaattaggcgttgattacttatttntactttttaaaacaaacaaatagttactgaatactgcacaatacaaacgatatggggctgccttgcagtgacaatctctgcttgttttgcgcacagaaggggcaactatacgtccgtcgtgaccccattccacttgcattcgt

SEQ ID NO: 235979 - DNA, 415 bp, Glycine max
agctggttcttctacaacccgacgaggttgtctttttgaatggcgcgaacttcccgactcgaactcgcagttcgtgaagaaagatattggtcgatcacttcaaagaaatgaggttagtgagttaattagttaggttaagcttcttttaaccttcttttaggttaagcttcaaagaaacccagtcaataaggttaaaatcttatgttgaaggtagtgtcattgttaatattgttgtttcataagcacttatgcaaactatattgcccactaatattgttgcatctccagctccaaaggctacaagctcattagaagttcttgatataaacttagtacataatatatttgtagtatgtcctgtgtcaatcgattgtaaaagtttctagccctaatagctcaaaaggaaattcttaat

SEQ ID NO: 235980 - DNA, 335 bp, Glycine max
tatactggcagtaacaaggtccgcgtaatcaaaaactgaatgtactatgccagcaccttcagttattctataaggaaaagccagtaaaattactccttcctatgtataaatacctatgtagtgccctctggtaaatgaatgaatgaaaatcattttcattcaatgagaacaaaaggctatataatttctgtcttgcgatcaattattgcatctatctgttccaaaaataatttccgaaactaatgttgaataaataaaaaggataattggtctaaaaaatatagagaaaggaggagttgtatcaaatggggatgctatatcaagtgtgaaaaaaa

SEQ ID NO: 235981 - DNA, 411 bp, Glycine max
  unsure (1)..(411): unsure at all n locations
agcnncttttctctaccactggtcatccacaaactgaggggcaaacagaggtagtgaataggtctttatccactcttttaagggctcttctaaaaggcaaccataagtcttgggatgagtatcttcctcatgtagaatttgcctacaataggggcgttcatagaaccaccaagcaatccccttttgaggttgtctatgggttcaatcccttaacacccttagacctcattcccctcccacttgacacttcttttatacataaagaaggggaatctaggtcagagtttgtaaagaagttgcatgagagggttaagacccatatagagaaccaaacaaaggtgtattcaactaagggcaatacaggaagaaaggagctagttcttaatgagggggactgcgtttggctccatc

SEQ ID NO: 235982 - DNA, 336 bp, Glycine max
  unsure (1)..(336): unsure at all n locations
agcttgtaggggtaaagttttactattgtctcgtgnngatgcaacaattgttagccgtggcaattcgagacatcttgcccaacaaagtcaggttagccataactcgcctatgctttttcttccatgccatatgtagcaaagccgttgatcctgtcaagtttgatgagctgaaaaatgaggccgccattatactgtgcctgtgacatcctggaaatttctacccagaattttgtaagcgatatattttaaataattatatatataagtattattcagcgcatatatatatatatatatatatatatatatatatatatatatatacacacagagatc

SEQ ID NO: 235983 - DNA, 456 bp, Glycine max
gacctataaaactcagcttcacctaaggagacggaccttccagtgtggagtttataacgacaatgcctacaagattgacttgcctagtgagtataatgtaagtgccactttcaatgtgtctgatctatctctttttgatgcagatggcggagccttggatttgaggacaaatccttttcaagaaggagggagtgatgaggacataaccaaggaccatgaagcacttgaaggtcccatgaccagaggcagacttaaacaagcccaacacgtcatagagacaaggctggtcatttgtatagctgccattgatgatgattgaaggcccaagtggagaaagatgaaggcccaggggcagaggcactaccaagactactaattgttgcagaaggcccacactaacgtgaaggcccaagctaaataacgtttaaggtataatttattcttattgtaattttg

SEQ ID NO: 235984 - DNA, 396 bp, Glycine max
agcttgaaggcaaactggatgcattgttttattctggaacccagctggccttgaatcaaaaatctgtacctgtcgcaagggtttgtggtttgtgctcctctgctgaccaccatacagaccttttcccttccatgcagcaacctggagcaattgagcagcctgaagcttatgctgcaaatatttacaatagacctccttaaccttatcagcaaaatcaaccacagcagaacaattatgacctctccagcaacagatataaccctggatggaggaatcaccctaacctcagatggtccagccctcaacaacaacaacagcagcctgctccttcgttccaaaatgctgctggcccaagcagaccatacattcctccaccaatccaacaacatcaacaac

SEQ ID NO: 235985 - DNA, 386 bp, Glycine max
ggagaagatagttctggtagttggaaccttgttggatccaggataaaagaacaatgtgtcaagctaatgacgcttaacgagcgcttactaggaggcaacccacctctctttctaatttctatttttcccgcatttagatagttcaattgcttgtgattgtatgtgatttaagctcgatagtattgataagaagggttcaagttcttgtgaagagttggacaggaaaagacttatataaatttttcagttgtccatccgctaagcgcatcacttgtgctaagcgctatgtcttcacacgctaagcctatgttgcttgtgctaagcgctctgacccttcaccaattggcttgatggttcagctaagcgcacatcattgtgattagctc

SEQ ID NO: 235986 - DNA, 379 bp, Glycine max
cagcatgcaacctcgaggacgggcagaaacaacagagttatcatttgctctcccccgaacctacagatctgattgaaactcattatgaaggcccctccatacttgtttccctttatcatcgaatgcagttcattttctacgctgctacaaagctttgtgtggagacagccactcacccacatggcggtggagtattacaacctcgcattgcttattccaccggaaaacaccaaaatacactggtaaaggaaacatgcagacatgggcttctacttgctcaagaaccattcgcgttattagccactggaatatttggatcccaaaattcatttccccgcttaaactgacagaccacccaacactcttgaacactatctac

SEQ ID NO: 235987 - DNA, 367 bp, Glycine max
cccacaacatatcttgagatacaaacatcggtgactatgaactttaatggcaatcacatggagggacaattacctccgtctgttgtcaagggtaaacagctaaaagtctgggaccttggagaaaataacatacaagatacattttcaactttgctagagtcactacaacagctgcaagtccttgtttacgtgctaataggtcaacggaccatcaattgttgacatcgaaaatgttatcccatgtgcgggctttgacatcccacaataatgtagtgcaattgccacagctgcataaagattcaggaaatgaggtaatgtcataatggctgaataatgacggcaaaacatatgatctgggaatacaaaa

SEQ ID NO: 235988 - DNA, 421 bp, Glycine max
  unsure (1)..(421): unsure at all n locations
agctngnaaaacgcctggacatgagagaatttttgttgttggancggccagcggatcagggataaaggaatgtcccacattatttccatgacatgcgtgcaacaatgatgattcaaaaattttatgcaaaactagtcatgcatgcacctatgtggacactcaagcatcaagttttgtggccatgtgatactaaggcttaggattaatttttcctatttaagtcaacccagtgtttccaaaacatgctcttttataaattcatgcatctatccgagtccattttgggtgttcgggaaaattttcacagcattcacgcttcaggtgtatacacattttgtcaacaaaaccctttttgtgtctgatcggtgaatcttattcaaaaacaagctggagttaattctttttcaaagcgttttggctt

SEQ ID NO: 235989 - DNA, 470 bp, Glycine max
taagcttaccctaatcgctaagcacaacttatccgaggcggagtttgtttcttttgtcaccaagcgtaattccttacggacttaaatgaggtccatgacgctaagtgtcaatcatggcaactaaacgagattcattacgacaatgtgagcactaagcgagtccatctcagctaagtgcatgctcctctgtacttaagaatgcatcatgttagctaagctgcgagagttacagctttactaatctgcagacctcgctaagcggacgtaccctcgcgctaagccgagttactgttaaaaaaaaaaatctgattttgaatttcaaacgtacggtaaacgcacatgttcactaagcgagcctgtttgagaaaccaaacgtctcaattgctcgcttagcgcatcgggccgctaaacgaaagtattaaaaactgctaagtgagtgtaatattattacactcacatttgccagatat

SEQ ID NO: 235990 - DNA, 282 bp, Glycine max
tcactttttattttttcatatttatttaaaccaccaaggcttatctttttctacctaaaccactgaggtaagcacatgcaggccggtaattgttccggaaaacagacactgcaacaagtagtacgaactccctggctttttcagtatatgagcaagcattgactatcaattgtgagtgaaatgagcgaatatacggccctggagagaattccctgcttttgacatataatactgatggcattgtaagaaacaagagggcctgtattacgggagacccgtgac

SEQ ID NO: 235991 - DNA, 432 bp, Glycine max
  unsure (1)..(432): unsure at all n locations
ttaagtcacctgcagctgcagcttcccaaatcttagggaagtgactttgttctttganctctaccattgataacttgtcttcaatcttcactatcgatatatgatcttcaccttttgataacaaagcatccatagaccagtcgtctatactaaaatcgacttagaaactagttttagatacaatcaaaaaattgtggtgttaatagaagcccccccccccccctaatatttatcttttgagtgaaatagaaaaacataaatactaattgattagaataacttcaacatcagtattaaaaatttcaatttagcccaactttttcaactttaaccaatccatatgcttgaataacaatatttaactcttacttcaatttcaaatttatttatttattttacttcaacactacaattttttctattgaacttcac

SEQ ID NO: 235992 - DNA, 436 bp, Glycine max
tctagccaaatggacttaccttgaattaattgctttgatagcccttttgagccttggttccctttccttgttttgaagctcactacaagccttaagtgaaaaaccatgatattaccatatccttaaggaattttggagctttggaattgttttgggaataagtgtggggggtttttgtttcattggacaacttgttttgttggctatgcttcatgatgtattttgggccatacttgatgtacattgtatattggttaaatgtggacatgctgaatgaaatgttgtttctcacaggctaaagagtaaaaaaaaaaaaaacaattggaaaaaaaaatcgaataataaaattcggaataaaaaaaaaaaagcaataaagttgagtgaataagatcttaaatggcacaagaatgatgaaactcttggttctactcttcat

SEQ ID NO: 235993 - DNA, 427 bp, Glycine max
  unsure (1)..(427): unsure at all n locations
agctccanacnacaagcacgaaacggagatgtcatttctgnncncnaacaatcaaaaaggcacttttactattaaccttacatgcaaactaaggtgaagcttcaattcatattataaactaacacccaattcccatgaataaattcacttgaataattagtacttaatggccacctttcctaaggtctagcttacataactagtgctaaatggcgatatttgatgtactacttaactaaagcgaaatcctctgctattgtattaaacttttatctataaaagaaaaacattattacgtttccaatacgaggggcgaaatgcaaaaaatgctacaaaggcaactttgttccttttccatatccaataacagtgcaaacactgggcgttaagtatcaatgtaaatggtcgatataacgacaccaacttg

SEQ ID NO: 235994 - DNA, 315 bp, Glycine max
tattggctaagaaataagcttgtatcgtgccagaggatagttatatgtttgataaatgactccatttgcaaactcataatctctgtactattgatatgaacgattgcgcacctggaatatttaattgattcaattcagcttttcgtaactattcaggttggtaactacgttctatttgacatatatggacaactaatccaatcgcgacgccatgataatgcgtacatactcattttctgcaagggaaatattacatgcaactaagaatttacaactcctccccaaggcattgtgcacccattcttttgttatcaa

SEQ ID NO: 235995 - DNA, 404 bp, Glycine max
  unsure (1)..(404): unsure at all n locations
tgcaagctanctatggctgggatgtttcttatgattcattcaanaactcgcataaagaatctgtcaaacttgccaaattattttcattttctaagaaaactattttaaatttagaaaagaaagttttgaaattaaatgtagaattataaaatcttaaagcagaagttaaaacattaaaaccaatagatacaaaccaatcctctactaaatgtttaatacaagaaagcaatgaagcatctcattcatgtaaatattggaaaatatttaaagaagaaattaaagatgtaaaagattctctttccaaatttactcttggcaaaaataatttagatattatactaggaaaacaaatatgtgtttttgataacgctggattgggggataaacctaaaaaacaacaaaga

SEQ ID NO: 235996 - DNA, 341 bp, Glycine max
ttacaaaagatatttgaaatcattggaccctgactggaccatatcaacaatctatgccattatcatcttcttgtaccagcatgcttgcaatagtccaatctgatgctgaaatatacaatttcaagtctcttcctttcacaggaggtgctagcactagcagattagcaagatatctcatgatgttatcgaaagcttcttagtgttccttttcccattgaaattcaacttcatttttcaatatgagtaaaggtgaaaacactttagtttttccaaactatcataccctaatttcgtccaacgactatcgttcattggatctttgatccttgctagtcaactta

SEQ ID NO: 235997 - DNA, 405 bp, Glycine max
  unsure (1)..(405): unsure at all n locations
agctncagtaatagcaggtagggttgtatttttctactatcgnggcaattgcaacatatataagacaacaattacaacctaaatttataactataatgatgagtgacaaatttaaaaacaattaggaagtgaaacaaagcacgaaatggaaaagaaatgattattcatttcattatataagcatgccataattaatgattgcaaagttaccaactaattttcttttgcttggttccctgaagaatagatcaactatatcctggttttggatgagctttgctttcggcatcactttagacaaaagagttaataccttcagaactccatctgatggtaacacatcctttgcaatcttaccagtaacagaagatcagctagtcatgtttcatatctaactattaaaac

SEQ ID NO: 235998 - DNA, 430 bp, Glycine max
gtcactccacccatatgtggccttcacattatccttatttaacactgctgacaacaacatcaaggaattgttgcaccccacatacaaatgattctttgaatcagtttgcaatgtatcatacataggggcatgtacttgctgaaaagactcttgtccaagatcacaaaacatatcctctaagggatctcccatttctacatcaaatggttcagattgggacccactctgcatgtctgtcaattcaccatgacatatccatgttgtataattcttcttaatcccatcacacaacatatgcccccatatgtcgtcgagtatttgtcgtctcccattcaaacaatttatacacagacaaaatttttttctatcctcatccgatcaacttcttttggaaaccaatgcaataactatttcacgccctcctcatatg

SEQ ID NO: 235999 - DNA, 415 bp, Glycine max
  unsure (1)..(415): unsure at all n locations
agcttgccttgcccctggatatatttgattgactcatggncactatgaatgacaaattccttgggataaaggtagtgttgccatgttttcaaagcccgtactaaggcatacaactccttatcataagttgaatagttaagggtaggaccacttaacttttcactaaaataagcaattggatggccttcttgcatcaacacagccccaatcccaacatttgaagcatcacactcaatttcaaaagatttttgaaagtttggcaacgcaagtatgggggcattagttagcttttgtttaagaacattgaaagcttcttcttgtttctctccccatttgaaaccagcatttttcttgagcacttcattgagaggtgctgccaatgtgctaaaatccttcacaaatcatctataaaaac

SEQ ID NO: 236000 - DNA, 359 bp, Glycine max
  unsure (1)..(359): unsure at all n locations
ttntagctnttcattggtgtattatgatctccttatggtgctctaaaangngggaatgtgctcaaatatgtggggcaatattggtttgttttcttgcttgattaagttgaattgcgggtttgtatgagatggccctatgcctataatgcattttgaagtagtgggacatgccacattgtccccgctctcttgctattgatgcctaaacgcgcgcccaccaagtgttcggtgaaatgcctcaatggcattagcgcgtgatttttgtaagaaaacaacccatggggtaatttggattgcacatgttttttgggacatgcattcagtttctaaagggctagagtaattgccccacatatatc

SEQ ID NO: 236001 - DNA, 243 bp, Glycine max
catgaagagaccccaatcattcgttatgcaactgcgcatcccaaatatacatgttacgttctatgagaacctaaccattaatattgcactataaacggcctgtacgcggaagatgccatgatataattctacgctgatgctgacaggtttacaagatggacgtctgaccggtttccattcgatcaagtatcggcatgctaacaaacaacgatcattgctggtgtttcaaaattctcccatatt

SEQ ID NO: 236002 - DNA, 398 bp, Glycine max
aataacaatgagtctggtatctctcatgagcgcacaatactttccgttcttattcgttcccacggtatactatataattatcttagtcacttcacacacgttacacggtgatggccctctttggcctgggagtattttccttctctaacgatatgggccttctggtgttacgcatttcctacatacttctttttatgaatagtcgaaaataatgcacaggtgtatatagactaatgatacaattatattagactctataattgttttaatcaagaaataattttatttcttaactaatttttgagattgaattagaccccactctcattctaaaacatatatatatttgtaaaggtgaaaaatcagactaactaaaatgtttctaatcgtttatttat

SEQ ID NO: 236003 - DNA, 304 bp, Glycine max
gaggaaggagtataggtagcggtgtatgtcctccggtgtgaaaatgaacgagttctgctccgctgtgccggttgtctctggtggagatagagtgtgcgaaacagtgtcgttttatggagaattgtatctcacgaggaagagaatatgaatagatgagaaaagtggacattcagagggtgattgtgattataataacaatagtaacacttggtttttaagaactgatgttgttaaatgctttgacaacattcgctattttatagctgatgttaaaatccacccgttatatccgttttttaagaac

SEQ ID NO: 236004 - DNA, 410 bp, Glycine max
  unsure (1)..(410): unsure at all n locations
agcttantaaggggtgctgcaagagttgcatacccctttataaatcgcctatagaacccggcgagacccaagaacccccacaatgctcttggcgaccgcggtgttggccatccctgaatggcctgaaccttctccggtactggtcgtactccgtcacccaccaccacgtgacccagatactccaattgtttttgagcaaacatgcttttggagagtttcaatgaaaactaacctgctactagaatctgaaaggtgttctccaagtgaaagaggtgatctgttatagttttgctatacattaagatatcatcgaaaaaaacgatgatatattttcgcagacatggctagaacagttgattcattgtggattggaaagaaaaagcgcattacaaaggccaaagggcattact

SEQ ID NO: 236005 - DNA, 458 bp, Glycine max
  unsure (1)..(458): unsure at all n locations
ctatccaatactcaagcttgtaaccgnntagtttgtagtaatctagtttttaacaattgttttatattaatttaatgatagtgaatagctcttgattaagaaatggttaagaaaatgaaatgaagagagaaaaaatagagattttgggttctgaatttagtgatttgtcagtatttatctgttagtttgatctcctttgtacccttttcttctattaaaattatctaaatgaccttaattgagggaagccaaaaagaccactgtatccaataaaaatgtgtccttaacagccctttgaagaagtcagtagacaaattcatatctgttggattgtgctgcaaagctgccataattgcggtcatccctagcctgctttagttgtggtctttttggacgctggcttaattgtatgctcaacggtggtggattagtcccacattgactagaattgggcaata

SEQ ID NO: 236006 - DNA, 421 bp, Glycine max
  unsure (1)..(421): unsure at all n locations
agctngngcanngaaactacaggagctatgaattgttttttctcgncntccagattagacaatccttctgcttcattgcgataataaggattccattctgactcccattgataatttgtagaaaaatagtccctttcaaactgagcttcttgttgttgcatggaataacaatcgcctttagagctatcttggtacgtcgtgaattctcccaatatactttcaagatcaggagctctccctttctcataatagttgtacatagtcgattcctacctcggatcaaaggtattgatagaataaaaatagcaactggcctaatgatgctctcttccaacacaatcacaatttattagcggaatagagataacaatcttcatgatacagccggaagagatttgtcttccttacaaataaaagagcc

SEQ ID NO: 236007 - DNA, 442 bp, Glycine max
  unsure (1)..(442): unsure at all n locations
ctcttaacttcatgcagggtagcatgacttatcttataatctacaatttggttttgaaagtggaaaggcatgaaaattatgacatgcttgaaaaggttttttctagagtttggctgccccatgagggatactttgcatctaggtagcatggaaaatacctttcaatggtatgtatatatgtgtgtgaatataggtatcatggaaaatatctttcaatggtgtgtatatatgtgaatatatggcataaaatgccttgcaaagtgtgaatgagtagcaaaaaaaataaataaaaaaaatgccttccaacatatgcgtatttgaggataggtagcattaggagccttttagaaaatgtacccatgtcaaaaatggcctgaggacgcttcctanatgaatatatgatgtggattatcccttaaatgatatagatggcatggaattc

SEQ ID NO: 236008 - DNA, 402 bp, Glycine max
  unsure (1)..(402): unsure at all n locations
agcttacnaggcngaagaggacgcggggtgttactttctttatttaaaaataaataaaatttggttctgtctatttgtgcagctgtgccaaaaaaaatagtaaaagaatacacacttgagatcacccgagaagatctaatcatgctagacagtgaattaaacaaaaaaatagtatatttactcaacaaaagttatttattaaactaatagaaattactcacgttgtaatatatatggccatttgcaatggcaatatatctcactcaagtacaccaccaacgggtatgaaaatgtcttttaaataaattgtgaagaagcatggggataatttcttactaaattcgatattgtctttcgggattcaaatatcttaggaaagcataatatattggcttgggagaa

SEQ ID NO: 236009 - DNA, 465 bp, Glycine max
  unsure (1)..(465): unsure at all n locations
ntatatgtgagacaccanaatcttcaacagcagaaaccattcacaaaattccctcactaagaaccttgggattcttatgctccttcatgatcttgtaaagctacagtaaaattcacggttttcaaacattatttgatgatacataaagataaacaaaaataatatgatatacggccaaaagatacaacctgcattntatatgaattccaacatatgtattaacctanataacaggaattaattaaaaaagttaaacacttacgctaagcctgttttagaagttttattcagccaagcccaattactattttggctatgctacaatcacaaacatagaatatccaaaaacaatttaccgctatattatttttaccctgctgaactnnttgtcaagttcataaaaagaaactttnttcttactaaaanttggtaagaaantatgagactacaatgaaatatacaaat

SEQ ID NO: 236010 - DNA, 410 bp, Glycine max
  unsure (1)..(410): unsure at all n locations
agcttctgccagncaaccttagcaggctgttagtttgtctagtcttcctttttgagattgcgctatgagaatctggaggtggaggggatctccggggtgttgccatggctgcataaaaaaagaaaatataaaataagccaagtttattagcacaacgcacaagtatgaaattgtaatgaaagacaggtaattggaaattcaaaatgacaatggacaaggtaaatattattggggtatataccgcattcaagtagccatattttcccataaaccttcatcatgatcgatacgaattgcatatacatcatcctcctcattttcagcatttacagaaagcatttgtgtggagaacagtggcatgtccgtaacatcaacggttgaaacaattctattcgggagggataccactt

SEQ ID NO: 236011 - DNA, 480 bp, Glycine max
  unsure (1)..(480): unsure at all n locations
tgtggatgtgggtggtagtggtggagattgccttcgtattatcttgcaaaaacaccccaccatcaaagaagggatcaactttgacctacctgaagttgtggccaaagcccctcaaatcccatgtgagcctctgttatgttttggtttatatgatctttggtgagatttggttgtgggggtcacatgtgatgaattattatgtgatttgtaggtgtaacccatgttggcggtgacatgttcaagtctattccccaaggagatgctatcttcatgaaggtcagtcattactccaaaatactctcttctttacgacatattataagatatatagttntgaatcattntgcatatataatctttagtcaatttttatgtaatatgtatagctgttgcttctacctcttcaagttatttttcaaaacacatgtactcatgtatttaattttacaagaaaaatngataatacccatgtcatgagaa

SEQ ID NO: 236012 - DNA, 415 bp, Glycine max
agcttgcttctacaccactctatgttatcttaagcacactggtcgggcacaacacaaatttgccctgctgctgcaaaatagtcaaagtaatgcatccacctatcatcaatatctttaaatgataacatggaagccgtagtctgtggaggaatgctctgaacatatccaaattgctacaccactctctctggtcggtgtctgaccacaacaggaccccatcgtagatgacctgaaaagcatgaaatcaaatcaaagtcccgcactccatggtgctcattgtaaggcatccaacaaacatcaggaatcgtcaatccatctagacgtttcctgtacgttgatgtaggtaatgacttcaaagaagccttcgtagaatccaccggcagacatgtggtgagatctcatcttaatatggatc

SEQ ID NO: 236013 - DNA, 471 bp, Glycine max
  unsure (1)..(471): unsure at all n locations
ntaacctcatcgtctctcacagtctttagatttgggagtcaatccagtccttgtgttcggactctcagccacttatgatagccgccgatgatcccattactgcttcccctaagctctctgtcctttcttcacgccgcatcccatgccttgcgaactccttggagtaccctcgcgttgtggtcactgaaacctcgtgcgatgaaaggcgtgatgctttcatctgatggcactcctctcatgggacatccttcgcatgaagatagaatcctgattcttccttccttctagcgagggaaccatttaacagacgcccctccatgctagccaagagttggtgcacaacaaacaattcttgcgccgctcttttcacatccccggtcgaacgtgtcatacatggccaaaatggcgacgaccgggctttcctgccatgatgaaaggcgaggaaagcgtcaatcgctgctatgtccacta

SEQ ID NO: 236014 - DNA, 396 bp, Glycine max
  unsure (1)..(396): unsure at all n locations
agccttacgcttgagttgggacacccacatgncatacttgtgctctcctccctagaggcaattgtgtgactatccaagttccatcggtctcaagggaatgtatctcacttttcattgcatctctctaccgaatatctttcactgtgtcagaataagtgataggctcattttcctttgaaatggatgcaagaaaaccatgatgtgcaagagaaaaattgtcataattcacataatcacttatgggtagggtgcacctgagtctgcctttggagagggtgaacagttaaatgggcttaatcttttggtggtatttgtcacataattttgcaaacaagaacaaggttgttaggctctatgtcctctatccaataatggctccggtagtgatatatatag

SEQ ID NO: 236015 - DNA, 451 bp, Glycine max
tagtactaatttaatggaagagcatgcttgagtgaatttatattatatttcgaaaccgcccaaataagtttatttcaacttatataaatctctcatgaagattaatcttgtttcgttgtttgcaattgccacaataatcatgaactgagcgtggtagtagggatgcttctatgcgtgcagcaataaatgacactattcctgaaccaaatcgccgcttactgcaaaggtatatgattgataacaattcttttttctcatttctttccttttggtataacccactgattgctttccttgttatcttattatctgaatttgagggtttaacgctttagaatactcttattctttacgtagttaatataatcagtgaattatatattgttgatatgggataggcttctgcggttcagaaacctactacgttacacaagttacgaatagtcggata

SEQ ID NO: 236016 - DNA, 409 bp, Glycine max
  unsure (1)..(409): unsure at all n locations
agcttntgcacgggtattcatgtttcatctatgcctttngagtatgcgcattctgatttatggggaccatttaaagtgaaaactcatggtggaagctcatactttctcaccatcataaatgatttctcaagaagagtatggttgtatgtcttgaaaataagtcagaatcttttcgaaaatgtagagaatgacatactcttattggaaatcaacttggtacaaattaaaagttttaaggactgacaatggcctgtagtttgtttcacagtagttcaatgatgtttgcaggacaataggcatcaaaaggcacaaaatagtccctcacacaccatatcataatggtttagcaggaaggatgaataggacccatttggaaagagtgaggtgcatgctactaagtgcatgactg

SEQ ID NO: 236017 - DNA, 447 bp, Glycine max
  unsure (1)..(447): unsure at all n locations
gcattaggaccttaaaactcagctttatctangggtaacctcgcgggatttttttcttatggaagaccctgggggctttggtggtaagccgcggtgtgcccaggtggagtttacattgtgtttagagagagacaaattcagtgtgtttaattgggagaagaaaagaaataagtgaagacccagacctggtataagtgtttaagttaatttatgaatgtgagacttgctttcatgagaaggattatttgaattacagatatcatgcaagaggtgtctctatctctgcttggtgaagaagtatttggagaagtcttcatctattgatagggttaaatggtccacgtactctacagaatgaagcctgacaacccctggtcatagtgtattcaggcttgcactctgtgttagcttccaaatataattctaatgccctttgaaataatgctg

SEQ ID NO: 236018 - DNA, 419 bp, Glycine max
agctgggtctttgtgcttgtttaatcaaagccttatttattgctccaagtcttcaactttaacgacatttacagcaaccaagctttatttagtcaaaaaataagaaattgatagtgttgcaatgaagaagatcatcatgctgtcggaccccactcatcatattacactttgctttcagttaaagagttaaacagttaggaatttcaaatttaaagcttttatttttatttttatgtatatactatataggataggatagtagtagttaatgtgtaatatcatatcaacaaattttaagatcaagtgaattttttttttactaaattggaatgtttttacatgtatgatccacaccaaatgtgcttttgacattttaaatgcattttagacatttagagtaatttatttaaataataaaa

SEQ ID NO: 236019 - DNA, 459 bp, Glycine max
  unsure (1)..(459): unsure at all n locations
tatccataggaattgaagattatgtcagagaattttatcaacttacacattttgttcaacanattcaattagacccccttaacctacaactactatctactatactatataagattatgtttgattctattagatgatgatagtgatttcctcccaataattcaattaattaatgcgaattttatatttattctattttatttgaattaaatcttaaattattaattgatatgataaaatattaattgattgattaatatatatatatatatatatacttttttttaacatatcttcttttctgttgttcttagaaagacattgtcaaagtctctaacatgttaaacttattttaatcgggcctacatgatagttttatatttctacctttattnatttttggcatttatcataattaccaataataaagttctaataaaaagggagaaattatatata

SEQ ID NO: 236020 - DNA, 421 bp, Glycine max
agcttctagagaagaggattataattgtgtgtttaaaataatcttaagttatgtttagaaaagcttgttatcagaataattaagtccaaatgttgtttcaatgaaaaataaataaaaaaccaaagtgttatgttcctagaattcaaggactagaaaacctccagaaagagagattaaggagaggaaatttctgattttattgctagcattcctttacattttgattcatatatataggcacaaaaatgctaagctagttattctatttcctctacaggtcttaaggagcacggaagaaaataacagaatggcaatggagtagggatcctggccaacagaggaatctccctctaccaatgagaggcagccagctcagcgtttgggatttgcattggtcacaaaatcctctatgtagtgcggc

SEQ ID NO: 236021 - DNA, 417 bp, Glycine max
  unsure (1)..(417): unsure at all n locations
tctatagaaaactacatgcagctgcctcggtttaaacgctgcccagcctttgttaaccgttggatcttctcgaaatatggtttgcaacttcacaagacactggttcatgatctaaccgctgggatctttgagaagatgtctggagtgtctagaagcttccgttcccgagagcatctcttatttaagcattttagcctttgttttcgtgtagcttatgaaaaacgtcatttcttcttctttctttcttccaaagccatttctaaagttccaagaactttcttcatcacccactaccaccattagtcaccacaaaccatcggtgttcttcacatcgagaggaaccntttaaccgaagcggaatctttcaacttggcttgcggtttccgtagagaacgaaaccctcatctgacctttctt

SEQ ID NO: 236022 - DNA, 413 bp, Glycine max
agcttacacacttctgggtatttatcatttacatccacccaagcaagaagcaaggttcttttttcataatttcgtgcaagaacataatcaattgtttctctatcactaaacatggcaactttttgattaggtaaatgaaagcttgattttttaataactagccatctgacatgtatgttaaaggcaaagatacgccacattgattcatatggagacaaatacctataaaccataatcattgtaaatataacaataaatatataaacaatgagtcattatcaaacaatttatgaaatagaaaaatacatgcaatcataatactagttaatttcctcaattgactctcgctcgttgcttgaagattcatggttggacaatgaaatttgaactctatatacacctctatttatata

SEQ ID NO: 236023 - DNA, 392 bp, Glycine max
catatagggctacaaacatcttgtaactaatacatacggacattagtgggccatttcatacaccttcatggaatggacaacaatactttatataattcatagacaattactccagatatgcatacttgtttcttatacatgaaaagacacaatctctggatgtgttcaaaacatttaaagtttaagttgaaaatcaactcaacaatagaataaatggtgtcagatctgaccgtggtggtgaacactatggcaaaaatgatgtgtcatgtgaacaacgtctggggcctatatgcatgtacctataggaatgtgaaatcgtcccataatacaccatgccggggtcacctagcataaatgatgtggctgatagacgaaacataactcttaatgat

SEQ ID NO: 236024 - DNA, 419 bp, Glycine max
  unsure (1)..(419): unsure at all n locations
agcttgaaggggngcaacccaccattttctcatagtagtttgtctatcaccattgggncatcatctgcctttccttcattgggggcgccacttgagttgtcagatccctccacctttgggcatattctttgaaggattcatgcctttttttacccatgttctgtaggtgcatcatatccggagccatattataattgtattagaactgcctaacgaaggcaaccattaggtccttccacgaatggactcgggaagattttaagttagtataccatatgacggctgccccagtaaggctttcttggaagaaatacatcaacatattttcatttttcacgtacgctttcatcttccgacagtacattttcaaatgattcttggagcaagtattcccattgtatttattgacatttgacacg

SEQ ID NO: 236025 - DNA, 467 bp, Glycine max
  unsure (1)..(467): unsure at all n locations
ttaacaccaaagccctgagccaaaccatcagccaaacatgtatgttttttactcgcacacnatcctaacttccaaaatgcatgaacatcaaccatgaaggcacacaactcatgtgatcaccctcaacacccacacattcctaaacaagaccatccacgacatcaatgacccacaaatngctaatcctaacccttttgtggtaaagtgaggcataacgtgtgtaagaagaagacatagatcatttttgtgaagaggttgaggcaaggctgattaaattggcctttctaaattagcaaaatgacacaagtttttgtgttacatcaatttttatttaaaaccttacataaactataattgtaatcgctaatttcattttacattgataattaattaccagagaacacgtccttatctaaaagttgacttagtcttggagcatatgtgacaccacacataagtaggtgacg

SEQ ID NO: 236026 - DNA, 423 bp, Glycine max
agcttcaagaaaaagatggcctcagcaaattccttatttccagaagggaattccatcaatagacctccaatctttaatggagagggttaccactactggaaaacccgaatgcaaatttttattgaggcaatagatctaaatatttgggaagccataaaaatagggccttatatacccaccacagttgaaagagttacaatagatggtagttcatcaagtgaaagcataactatagaaaaacctatagatagatggtctgaagaggatagaaaacgagtacaatacaacttaaaagccaaaaacataataacatctgccctgggaatggatgagtatttcagggtttcaaattgtaagagtgctaaggaaatgtgggacacttttcgattaacacatgaaggaactacagatgttaaaagatct

SEQ ID NO: 236027 - DNA, 460 bp, Glycine max
atgatatgtttattgtgagtgtggatgcttgggtagccattaatggagtcaaaagcttggatttgcaagaaggaatgttgtacatttcgtatttttggctaagctaaattttttagctagaactaatttttgttagattggggtccacataaatctatctccagctaaaatttattactaagctaatttgtggatgggctaagttttctagcttaagctaaatgaagacatatttcattctaccttgaatgttttcttgagagtttctaaatcaatttataatatctatataattatttttatgaactatatggaaagaataaagttactattataatgattattttgttgtttgagatactaccttacaaagaagaatgtatgtaattattgttggatcaagtggcctcgaaataattaagaagatggtggttgaattaattattaatgtatcttgact

SEQ ID NO: 236028 - DNA, 427 bp, Glycine max
agcttccacaacatccaagcagagcaacattcaaacagcacaagctatcacagccaagcaaaacagagcaaaggcagaaaactctgctcaacacatcaaccaaaatcacagtttttctcacgtaaagaccacagtaacaattctttcgatccaattcgttaaccgctggatcgactccaaaattttactggaagtctatagtgtataagcctgcattttgaccgttggaatatactagcaaacatccagaactcattctgcactagacttttcacagccaaccacgcacaagcatttttctgcacttgtgcaaaattctgctggcaatttcacagcaaaaattctgcataagtgcatattttgaaaatcacccttcctctcatccaatcttgcccaaatcaaatcctacaagtcccaaatcatgtat

SEQ ID NO: 236029 - DNA, 485 bp, Glycine max
tgaccttaaatactcagctttacaacaagacgcttatttactgaaccacagctctaccaagttaaataagttcccagagagtttgatacttgggtcttaccattttatactacttgtgcaatctggtgcacttgccggccatcgaacaaatttttggtgccgatgctggggaacttctttctatttggaaagtttagttcagttctttaagtttctattctctattctttggttatttgtgaatattagcttttgattcatatttgtctttcttcttgaattggataatacgtattgctgttagtattttgtatgcatagatctcccacaggcaacctagttcctctggacttggaaattgaagccaccttaataaggaatatagccgagaggagaacgaagttgtttgcagatacgacaatagctttcattctagaagaagaagctcaatcttctagctctacatcatttgattcactatcatc

SEQ ID NO: 236030 - DNA, 439 bp, Glycine max
  unsure (1)..(439): unsure at all n locations
tagaagcactcacgagaactagagcagaggtactacatctcccanatctccgatgccaaatacatgagtaaccaattctataaagatcatatgaaaagtattagatcccagccccactcaccctaacagcaaaacacaactccccaaacattgaaacacaccatgatcacttcaaactttataagagtactaaaaattaggttttctacatcgattatttgattcttttaacatcggatatgacattgttgttgtagctgaagttggtgaaaactcaccattctacaacgacagttgatggaccgatatttaaagacataaatacgaagtctggcctcgagtcaaagccgccttagaatgatgcacattctacgtcgattctaaagataagaacgatatagaaatatgttgagacatctacatcgattttatacaaccg

SEQ ID NO: 236031 - DNA, 423 bp, Glycine max
ctgcaagctatgctgcacatattgacattagacctcctcaacctcagcagcaaaatcaaccacagcagagcaattatgacctttccagcaacagatacaaccctggatggaggaatcaccctaacctcagatggtccagccctcagcaacaacaacagcagcctgctccttccttccaaaatgttgctggcccaagcagaccatacattcctccaccaaattcaacaacagcaacaaccccagaaacagccaacagttgaggcccctccacaaccttccctcgaagaacttgtgaggcaaatgactatgcagaacatgcagtttcagcaagagaccagagcctccattcagagcttaaccaatcagatgggacaattggctacccaattgaatcaacaatagtcccagaattctgacaagcta

SEQ ID NO: 236032 - DNA, 475 bp, Glycine max
  unsure (1)..(475): unsure at all n locations
tctctgagaacacttccttgagaagctagagcttagctacacacacccctctcataactaagcttacctccttgagaagcttccttaagaagattcctaaagaagctagagcttagctacacatacctctctaatagctaagctcacctccttgagatgagaagctagagcttagctacacaccccctataatagctaagctcacccgcatgacaaacaacatgaaaataataaaaaaaaagtccttattacatagacaactcaaaatgccccgaaatacaaggctagaaccctatactactagaatggccaaaatacaaggcctagacgaacgaaaaacctattctaatatttacaaagataagcgggctcatacttagcccatgggctcgaaatctaccctaatgctcacgagaaccctagggtctttccttggatctctagcccaatctactnggagtcttctagccaatgc

SEQ ID NO: 236033 - DNA, 419 bp, Glycine max
  unsure (1)..(419): unsure at all n locations
ggcagcaagctgaagctctatatcccatatggcttttatctttatgcagntagtacaaaacatgtggtttacatcttttattagctaaccttttgtttctctcaataataaaaaatacatttttcgtttctataaaattggtaaagttcctttcttggttcatgtaaaaaaagttgtctatttttcgttcctataaaattaaagtgtgatatttttttagttcaaagctaggtttggatgataccaaacctacgtgacattttccaatttaaattttaaaatgcaatttatgagagttaaaaattatcgcaaattgtaaaaaacaatattaaaaaagagctagaatggaacccctcttcccacaacaattagcttgtctcatccaagaaaaaaaaaaactcgaacacaacaatgaaatg

SEQ ID NO: 236034 - DNA, 462 bp, Glycine max
  unsure (1)..(462): unsure at all n locations
tcttagcaattgctgcccttatcagttgttgtatgggagtatacctgacattgacaatatcaaggtgtttggatcactttgttatatgtccaccttgacttcacacagatctaagtttgatgcttgggctaggaaatgtgcattcttggggcataaggctggagtgaaaggtttcctagcttatgatgttcacagtaaacaaattgtgccttcaaggaatgtcacatttcatgaacttacattctgtttgggaatgcagaattgttaatcaagatagtccaccagacgacactcctcccttgccacttgtttattcatcacctggtccttcaccatccgaaccacctcaacacacacatgagccatctaaccatattcaacctgacacactcacctctagtcctcgacgtgataagaatcaaacttcnnattattttacgattaaattgccagcacttatcc

SEQ ID NO: 236035 - DNA, 422 bp, Glycine max
caagctttggaagctgggatcatttatcctatctccgacagccaatgggtgagtcccgtctaggtagtcccgaaaaagactggcctcacagtgatcagaaatgagaaggaggagctgattcctactcgggtgcagaatagttggagagtctgcattgactataggaggttgaaccaggttaccaaaaaggaccattttcccctgccattcattgaccagatgcttgaacgcctggcaggtaaatcccactactgtttccttgatggttgttctggttatatgcaaattactattgctcctgaggatcaggaaaagaccacattcacctgccccttcggcacttttgcttataggaggatgcctttcggcctgtgcaatgcccctggtaccttccagcggtgcatgattagtattttcagtga

SEQ ID NO: 236036 - DNA, 431 bp, Glycine max
  unsure (1)..(431): unsure at all n locations
tganaagtgcaagaaaatgaactgcattgtatggaaaacgcaatgaactcggtaagcgagcatgctgcgctaagcaagttcatcagtactcattgtgtatacaggcgttctcggaagaactcgctaagcgcacctaccgcgctaagcgagttcatcctttgaggatgaacactcattgtcgcaacgtgcccttttgcgggcgggcgaatgcgaggctcacgggtgcgctttccaaaggaggaaagatgcgcggagtcgccaccaacgtttatttgtggagaacgtctgtaaaaccgaaggaaaccggtcaaaatgaaaattctaagttcgggagttgtatntacgtttgaggaaggtattaacacctttcacgcttgtctcanaggacaaccacctacttttcagaattgtggaaattgtgttatcttaac

SEQ ID NO: 236037 - DNA, 408 bp, Glycine max
  unsure (1)..(408): unsure at all n locations
agctttgaacaaacttttacaactcataatctntagtttttggttcttggagatttcttagcaaagtttctctgaaagttatgtgattattgagttgcaaacacatttgagataaagagaggtccattcaatcaagtcttttgttcttgcatttgaatgtaaaggttgtatctctccttgactatgtttcatatggtttttacacattgttactgcatgtgcaagcgttttagtgcatgctagaataggtgtttataatttgaagctaagagtaggtttctcttaggcttagattcactaaggaccctgggttgggtgcctaagtttcattttctaggtagaatatgaaattgcttgtaaaactcacattgcctattgaaaatctaattcaggttgaattagataact

SEQ ID NO: 236038 - DNA, 362 bp, Glycine max
acccggtttgagagaaacatgatattttctacctgggagtacgtgagctcaaatggaggtgggcaacacgggatggcgggtttatgcgcgctctgtggatgtggaaaacttgttgtgcaccatctcccgaccgacacctagtaccacatgtgatgggtaccccataattctactagcttgagatgaggaagtgtataagggtgaaacttcctgcttttattctttgaccacagaatggcacctggagatatgtctcatgggtcaagagaccttgggaccttaggtggggtgctatagcccaaaaccaagcttgtccaattcggaccccacccaggcatagtcacgtagggagaacctgtgat

SEQ ID NO: 236039 - DNA, 405 bp, Glycine max
  unsure (1)..(405): unsure at all n locations
agcttgtccataaaaataggttntttgtgttcatcatttcaatttctcattaagtaaaatggatcattttcaaggtccaacgccttaaaatgatcacctcttaagtaaaaaaaagagtcgcttgataagcaagaactacgtaggtctgatttcctcatcgcaattgaggatacgtaggagcaaaagccccgcttttgtcgaccaccccaagagatcgttaatggtccaatgccttaacgtttctctcctttcaaaaacaagagatcgttaatggcccaacgccttaacgtttctcccctttcaaaatcaaaagaccgtttaatggttcaacaccttanatgaccttttgttcaataaaaacatattttgcaaaataagatnaaaacaacttaaccaaacactttg

SEQ ID NO: 236040 - DNA, 451 bp, Glycine max
taaaaccccttgttcattactaaacaagctgataatttattcacaatcacaagcaagatgctctaacatgtagaagaaaacaaattcaaatgaaatgcaataaaaagtagagaagggaaagaaaggctaggctgcctcccagtaagcgctcttttaacgtcattagcttgacgcctcttcctgttatccaagatcaaacaaggttcctacttcaagcaccttcttctcaggtctcctttcctccatcccatgcacttttagacagacattttggctaggtggatctttgtcctcatggaacaaatcaaagctgatcttctgatcttctatgcccatttgcagcattttctttcccatgtctacgacgcagctcgcagtagacatgaatcggcatccaagaatgagaggaatgtcaacatcctcttccatatttatgacaacaaaattagct

SEQ ID NO: 236041 - DNA, 414 bp, Glycine max
  unsure (1)..(414): unsure at all n locations
agcttagatggatgattatatcttctagtgaggattgggttgttgtgttgaggactcgtttcttacaaaataatcatttgcagtatgtgaaatatgctatttggtcctcaactcgtcattttatgcatattctttgtgataattctagttcgataattggctcttgcctgaagatccacttttggaatgataaatgtcttaatgataaaatctttgctcgtttaaatttaccatcacaggtggattcttctttgtaagctcaagtgtctaattctatagtcaagttggcatggaatttcccccaacaatttgtggactctttccctggcattgtgaatgatattttggccattcctatccttgtctagcctcaggaggatttttntatttggaaacatactgattctggtgagc

SEQ ID NO: 236042 - DNA, 456 bp, Glycine max
gcttctatggaggttggatctttgagctttaatgaggtccttcaatggtgattttacaccatggagatgcagcggaaggcaaaggagaagaggagaggggaggcaccatccactatggaataagccaaggaagaaggagcttcaccacaaagaattgccttggataagaagcttgaagaggatgctttaatgggggaaaagaaagagagaaggggggagcacgaaattgaaggaataaaagagggagagaagtggaactttgaagtgtatctcataagactctcattcatcaaagttacaacaagtgttacacatgcttctatttatagactaggtagcttccttgagaagctttcttgagaaaacttccttgagaagcttctttgagaaaacttccttgtgaagctagagcttagctacacacacccctctcataactaagctcaccttcttgag

SEQ ID NO: 236043 - DNA, 468 bp, Glycine max
  unsure (1)..(468): unsure at all n locations
tgcaagtgggtagctcttcagggtccattgtgtctgnagatcatttcattaaaaaggtatcctggcctggaaccttaccttctactgtgaaagagggtgagggccccaatgcttaagtacctcaacaggtacatggaaccttaccttctattgtgaaagaaggtgagggccccagtgcttaagtacctcaataggtacatgatgcgtcttttgaggttaccatccctggagcttctgatttttcaggtgcaggagtagagattatatctgatgaggttgttcttcttaagccaattgtgccagttatacatgagtgatgtgccatcattttcttctattttctaaaccctttttgcaccattttaattattgatnggtcttaattgtcaattaattaggcagttttattatttgggcccattcagctaatttgaatgttttaatctaatctcacgacataatgaagca

SEQ ID NO: 236044 - DNA, 464 bp, Glycine max
  unsure (1)..(464): unsure at all n locations
agcttgtcggccacttcgccctgaagcactttatctattttctctctggaagaagcagaaatcaagaggttagttatacaacttgcaaagcagaacttttttcttttcttcacaccaaaatcttagttttcctctagaaagtttggagaaccagcattttattctgatttactataaggaggtgagacagaaagcacaaaagatcaaacaaacacaatcatacattacaaatatcttaacattgatatattgataaatgtgcaggcgtaagaagaaatttaaatcaagttggcacatattaattgatcaaaggacaaaaaaatgtgataaaatatctgccattaaaaggtttgcaacattntttcatttaacaaggaagatctgcctccttgcacttgagcctcaanaactggcatttccaacattattttaagaacacaacccacaaacaaactgatgaaaaa

SEQ ID NO: 236045 - DNA, 426 bp, Glycine max
ctgctcattagttaatctggtaattacgagcaggagtagaattattatatccttcattatttaattacaaattacgcttaattagtacgtaatacactttatatctatctatattataatatacgtgttcctcccaaataatagcccgacactgtctctcttgtcttttctcatgtcttatgaatcttgtgtttggtggtctgaatggtattgttcaaaagagaatatctacaaaagatactctaacattcaagttagagctctcaaccttggacaataaagaagataataactgcatacaaatgaatggttttacttgagggtcctattctgctcataagaacctgagtctatgtgtgctgattatcatttaattaagtaattcgtcacctaagctgcattaactgacctaattgtgggactatc

SEQ ID NO: 236046 - DNA, 371 bp, Glycine max
  unsure (1)..(371): unsure at all n locations
tcaatggtagccataaccctagccaaggttcatcaaccttcatttctccgagaatacgacttgaacgcaacgtgtgcttgtcacggagaagccccggggccgtccattgagcattgtaaggctctgaagtgtanggtgcgaggtctaattgatgctggctgaaatttgaggaagaatcgtgtgtaaatcctgacattgacaagagatgccacacatggngcaattttgaaagctngtgttagatgtctctaatgactcaccaggaattttaactttcaccggaatgtgggtgtaagccattggtctgtttgctcaagcaacctgcgctcctgagtggttgacttcaagaccgttcaatcagagaatactca

SEQ ID NO: 236047 - DNA, 474 bp, Glycine max
  unsure (1)..(474): unsure at all n locations
tcgatccctntctctntctagccaatttctcaacccaagtatttgtttgtttaatcaattattaatctgctttaattgcaatccgatttcgtaaacatacctttccttatataccctcctctagaaaagcacaaaatttaagttcgaaaaaagattcataagggagatgtggcttgtgtgggatagcatatatgagttctctctcttctttatgcattctgccccaccaaaaccaatatggcttactatgtattttttgtcatttgctattgatatggatacatgacacatttcaattgattcttcacccataaatcgtttaagcgacatatcctcaattatttgtcttgtatgtggtgtcaaaagtaatgatgtcgccaaagtatccataaccatttatcatttgtgcatccgcccaaaatatagttgttattggctcttcaacatcaatntggaagtcataacagtatgaag

SEQ ID NO: 236048 - DNA, 435 bp, Glycine max
gttctcctagtggctctactagggatgggaagcatgagagaattgagaccggaccgaagcctccattttactgtctctgtgcgcggaactttcctactcccatatacattatatgcaaatctcaacggctgggatgtgtgaacaatgactcttaaacttggtgttcaaattttaagatgatccacccggtaacgagtcagggatcattattttattgggacagcgttaagcatatgcaggaaaagagaacattttgcaagatggacaactggaaacaaatctgagaggaataaacagtgtacagacacatcgtaaaaggacctaatatgtctctatccatagcatgggtattctcaccctattatttacctcattcttttattctatccacacaaactatatgttactccctatcccatggattaataaaacacc

SEQ ID NO: 236049 - DNA, 469 bp, Glycine max
  unsure (1)..(469): unsure at all n locations
actaagctagagcttgttgaatgcaccacgttacgcttattttattatacctgngttggccgttatgttgtggacagcgtgtttcccccattgaacgtggatacaaaacatacatagtatccaaatacaatcttaatcaataaatgatgtaacagggatgcacacaaacaatttaatcaagcttcagtttgccccctgcgtctaatcacatgccggttctgtggtgatatggttcaagctgggaggtctgccatggacgtccgtgacagattaagaggattgtctgagcgttctgtgatgttgaaggacatggatattcgccagatttctgttcatcgaagtggctagttctaatatttttcatcataacagcaacttgtgaaggattgcatctaggtaacaaatagaaaataaaagaaactagaggaaattgaaagagacaggaagacatgttgatgatggtggagct

SEQ ID NO: 236050 - DNA, 474 bp, Glycine max
  unsure (1)..(474): unsure at all n locations
tataaaactaagcttactacttgaattntatttattgttaaaatatcttcaatttctaatatcnggataattngagaaacaaagtgattacatataaataattacttatttggttaatttgtgtccaatttgttaaaaaataaacatgtttagtgtacttaatttgctttaaactatcaaataattgaaaatttcatattcattgcataaaatttaattaatttcatattatcacgtgtttactgtaggtatttgaacattatttcaactctttaaatacaaaaaaaggacctacaaatatataaaaaaaattagcatttctacatcggttttgagaagatcgatgtagaatgttgatcattctaagacgatcacgtgtgaaagatcatcttagaatgctcagcattctacatcggtccctcaataaccgtcgtataatgataagcattctacatcggtctttcagagatgatc

SEQ ID NO: 236051 - DNA, 435 bp, Glycine max
tattacaaaaaaagataactgcccgcctatgagccactagcatccagataaatgtaatatataggctaaacataaaccacattggacacatgccaaagatattacaaatatgagcttattcctggccaggggaccatccaagttgaaggcccatgttcatgatatgtataacatttagcatcatttggccctcactcacatattaacgtcttctatagggttaataaactctgagatactcacattaaaacacagaatgtcaattacaagatgtagatatcgcctcccaatggactgagaaagtaatactgtctgtagaccaaactagaatgcagtttacgaaatagatccattatggacccaaacaatgtgaatgttatcatcagaaataatgaaggcaacaacccttatctagtactaatgcacaagattaac

SEQ ID NO: 236052 - DNA, 476 bp, Glycine max
  unsure (1)..(476): unsure at all n locations
tcgctgatgntgctgntgcagcccagtaccactattgcctattgtccattctcctgcccttcaaaacctaccaaggacccttcttacccaaaaaacaaaataactgaaatacgaataatgcaattattacacttatcaggggtagggtctcaaacgcaactatacaccattatctgttactaccactactactttgtaattccattcattcatattcatactgtattctactatccaaaatcaccgaaacccttttttactgttatacacttggttcatatttgaatttcagtggtgagagattaaaagtacttttctttcttctttattttatacattcaaatttgaaaatatgtattggaatttgtaaaagtatctcatttaagcaatagtcttatntttcagaaaaggtaatattgtacttactgtactgttcaagactattatgaacaatagtatagtcttttcttctctct

SEQ ID NO: 236053 - DNA, 388 bp, Glycine max
  unsure (1)..(388): unsure at all n locations
tgatcaaataacaagcatatattcaaaaggtactaggttgcctcctagtagcgcttctttaacgactttagctggacgccttatgacttgtcggtcactgacctagtactttgcttacctttggctttggactcggttgcctattggtcggccatgtgtcgtaggcaacgctctaacctctttatggatgagctgaggtgaactctacaggtggtggcggtgtgtctattgcctgctaccggccatcccaatgctgctgtggtgcttcgccctgcgcccgcctgngggcgcagtacttcttgatgaaagctcgattggaagggggtctgatgactttgctggggcgaaagacacttcctacaactgcagagacccatatttagagctg

SEQ ID NO: 236054 - DNA, 314 bp, Glycine max
  unsure (1)..(314): unsure at all n locations
tctagccatcaggacttaccgtgaggaaagggctttgatatcccttttgagccttgagtccctctccttgtttngaagctcactacaagacttaagtgaaaaaccatgatattaccatatccttaaggaattttggagctttggaattgtttcgggaataagtgcggggggtttttgcttcatcggacaactcgtcttgctggctatgcttcatgatgtattttgggccatacttgatgtacattgtatattgcgtaaatgttggacatgctgaaagaaatgttgcttctcaaaggctaaagagtcaccaaaaa

SEQ ID NO: 236055 - DNA, 349 bp, Glycine max
  unsure (1)..(349): unsure at all n locations
agcttagataagagaaattatggtgtttcattttctttaaagtcctctcacgaggcggaggctgagccttgatctcagcataaaaattaataagtggaatgttcaaaatcagattattcataatcacccctaacagaatgctcacattgcacaacatgactaggatgaacactatgcctaacaacactatgaaaggtcttatcatcttcacgatcaaagggttgtaaatcacctgtattggcccttagtcatgcactatatgcaacaaataattgtgttctctcaacanagcgcctaacaaggtgataaaactacaactatactcaaacgatttcaaaatgagttgaaa

SEQ ID NO: 236056 - DNA, 408 bp, Glycine max
  unsure (1)..(408): unsure at all n locations
gacacaanaaaaccccctcttgcgaccgggggggggagagggacttattaaccccccacacagcgaggcgaaccgcccaggcccgaacgacaaccttcaaatagacgcgcgaccccctcctggcancccgcgaagaagacaacgaaaacaaggaccccaggcacaccaacacgagctacataacgaaagagccaccgacatccgccgatcaaaaaacaccacgcagaccagagcaacacacaaacgacagcacccgagatcacacagataacaacatcagaccataatcccaaccaagaggaaatcaggactacaaaccagcgacgcaacaacagaccaaaacgcaacacacacaggcccaagcacctcagcgacataccacgaggaccagcggagctacacgcccga

SEQ ID NO: 236057 - DNA, 312 bp, Glycine max
  unsure (1)..(312): unsure at all n locations
cctatctgcttattgggagnatatgtggctgtattttcctaacccacacatatcaattctctatatgtattgacacatagtaattatgtctataagttactctgaatacttatgattttattggttttgaagttatgctacatgaattgaatttaaatgaggacctaggtcctaccacctatacgaaccactgaagcctggcagttctggagctgtgggaactaactatggcctacggaattatgcaatgccttgcagatgctaaccctcgctatgctgccttatctggtttctccctatgaggggtaccct

SEQ ID NO: 236058 - DNA, 484 bp, Glycine max
agcttctaagaatagccttgataactgtaacataatctattgaagcttccccaaaaaagatagtgtcatcagcaaattgaaggatattcactgcaaccttgttcttccccaccataaagttgtggaagcagcgtttggatattgcttccttcatcattcctgtcaaacgttcaacaaccaagtcaaacaataaaggggccaaaggatccccttgtctcaaacctctgtgaggcttaaattcagtagttgggcttccattaactacgatagatatagaggctgatgtgaggcaccccttgacccaactaatccacctgtcatgaaaccccattcttctcatcatataaaaaaggaatttccaagacacatagtcataggctttttcgaaatccactttaaacaccaagcaagacctctttgacctcctatgcccctcaacaacctcattagcaatcagaactccatggagcagctgtctaccctt

SEQ ID NO: 236059 - DNA, 477 bp, Glycine max
  unsure (1)..(477): unsure at all n locations
ngcttgtggngcttctatggaggctggatcttcgagcttcaatgaggtcctttaatggtgattttccaccatggagatgcagcggaagacaaaggagaagaggtgagaggaggtgccatccactagggaataagccatggaagaaggagcttcaccaccaagatgagccttggataagaagcttggaaggatgcttcaatggaggaaaagaaagagggagagaaagagagaggggggagcacgaaattgaaggaagaaaaagggagagaagttgaactttgagttgtgtctcacaagactctcattcatcaaagttacaacaagtgttacacatgcttctatttatagactaggtagcttccttgagaagctttcttgagaaaactttcttgagaagcttctttgagaaaacttccttgagaagctagagcttagctacacacacccctctcataactaagctcacctcctttagaa

SEQ ID NO: 236060 - DNA, 404 bp, Glycine max
  unsure (1)..(404): unsure at all n locations
taatttcttcaaaagaagagaatgcataggagcttggtaaacttttatccttggacattatatgtacacttttagtgccacacaattcaaataccaacaacaccccgatcttaagataaaactggtaacatccttaaggtcaggtaatgaaaataatatccttattatctttatctatacaacatcctataaatctgaaacataacacacattcttaagaactagattattcattttcaagctgcagacatttatgtatttcaacattattgtcatttaaactagattattctttctaagtatatatcgacatgaggtaatcaacactggtgcatgcttgcttagntctgatacataatgggattgagagctttataagttattgcatcgatatctctatttgc

SEQ ID NO: 236061 - DNA, 491 bp, Glycine max
  unsure (1)..(491): unsure at all n locations
ctgcggcatgcaagcttatcgccatcttcaatggcggcacccattctcttgtcattgcagaaggcggaacaaccatcccgccaatgccactagcgggatccataaaaaacagaccccctacgttaaaactttgcaaacagaccctgaatggtaaatagtttttaaaactaaccccttacagtaaatttgcctagctttggtcccttntcagactgattcaggtctgctcataggaaccaaatgtctacctaaccccatcatgtatctctagtacctctggtactcttatatatatacttatttttgctgagccaaaaaaaatattgttaacaggccatgcttgtacagcaaacctagttgattcaaaatgcagcactaatgtgttcttgaactccaacaatctttgataacaaaactgaagaaaaacagggaacctagctgtgtcgaatatagtacacaatcacatatgtatgtgcaacttaatctagaac

SEQ ID NO: 236062 - DNA, 459 bp, Glycine max
  unsure (1)..(459): unsure at all n locations
ngataagccacagngaataaataatacattgcgtctacactctntgacttatgcctctttctttgcatggctaatggccttcatgagtggtggctcgccaactttaatttttgcttttaccaaagaaaagaagtgtaaacttacaccgtattttgggatgtattgggtatagaagaagaaaaaaaaaagataaatattaatttaacaaactattagtatcaatctacaatgtttatattaataattaattagaaaaaccttctaaaaaaattattaattagacaaaagaaatgttgcatcattaatagaggcaaaaatattaatagaggcctactcatcttttaattagtaattataaatttcatagtatatgtctgctgcatatataaaaaaaaaaactttaaccgttaattattagtatataatagttnttnttttcttttctttagtttctctcac

SEQ ID NO: 236063 - DNA, 390 bp, Glycine max
ccattcctggatggctctgatttgcccagggtacactgggaccccatggttactaactacaaaccactaaagaacgatcttatgatacgcataaagtacactcatgtatatttgcatatagggtgcttccactagggactagcataactggcttgagatgtccataatgaccatcgaggctcctatagacactaaagaatgatcaacataaacaagtacagagatacctatgaaatcccttaagacatgacgcataagccttatagaggagcatggagcattactgagcccaaaaggcatcactagacattcgtacaaaccagacatggtcttgaaagcgatctccactcatacactatttcatcctgatatgggataaccacttttaag

SEQ ID NO: 236064 - DNA, 303 bp, Glycine max
  unsure (1)..(303): unsure at all n locations
gctaacatatggtagctcctaatatctcccacactntttggggtgggccattcttggatggccttgattttctcagggtccacttggaccccatttctactaactacaaaccctaagaaaactatattatctacacaaaaagtacacttctctatatttgcatagagggtgcttttactaaggactaaaagaacttgcttgagatgtcctaagtgatcatctaggctcctattgtacactaaaatatcatcaacataaacaactaccaatatacctatgaaatcccttaagacatgatgcata

SEQ ID NO: 236065 - DNA, 443 bp, Glycine max
  unsure (1)..(443): unsure at all n locations
ngaccttcacaaagcctatgatcgaatggtttgttgttttgngancgacactcttaatcaactgaagattccctcttggatgattgatattctctctaattgtatgagcacttctttagctatcaattggaattcttttgctcctacatggggattgaggcaaggggacccttcacccccttacctctttgtcttgcacatggagaggctagcatatctcatttaaaagtcagtcaatgagggtaattggaaacccttctggtttgggaatagtacaggagtcacagtgttgcatttattcttcatcgatgacataattcgtggttgaggcttctctacaacaagcttaggttatcaaaactattatggatgctnttgtagtggctcgggacaaanaataaatgctcataaatctgttntattcttctctaagaatgtgaaac

SEQ ID NO: 236066 - DNA, 466 bp, Glycine max
agcttgggattatcaaccttctctcttctttttatcagactgcatcctatcttagccggcttggtaaagacagaaattctgctaacttaaatcgtcaggtggacttgtcatcactgaaatccccttccatagttaatacaaagtacagggattcacttgcatttgctttggggaaaaggttgcaaagtggctcatgtgtgggccaacccccagggttcccaaatgtagctgtctctagagattcccaattacaatctgagaggttttattatgacttatgctcttctggatctgcagataatacagtcaattcagttaatactaaaaagtaccacagttcgccagacatttcaggatactccatcccccacagggctggttatgtgtctgataataatgctacaagggatggttctgttggatatggatcttttgctagtatgacgtgctatgaccaatcattata

SEQ ID NO: 236067 - DNA, 453 bp, Glycine max
  unsure (1)..(453): unsure at all n locations
ttactgcggataggtatgctatcgtgtgttttatggattggcacccgaaaaaagcactctttttttcttcttcgattgttggtctcttctttagctgaataacatctatttgtttaatattcatattataaaagtaaaaaaaaatgattatatacatagtcgtttatgattacataataatatgatttttttacattattaatggatatattatctattcttaaaattttaattacagattcaaactatataataaatactatttttcatcattgtgtaagacactataaatattatgtttgaataatattaagaattaatttaaacttataaaatcatggtgatatcattaaaaaataaaataaaaattaatattatttctggttcaatgtgaggtggataagattttgggcaatgcaccgttactcaacntaatggttatatgttggtata

SEQ ID NO: 236068 - DNA, 288 bp, Glycine max
aaaaaccaccgagccaagggcgaaggcggagagcgtatgacacgccccgcgcaaagggaaaacccagcggggccgaatcacaacacaagatcgtgagcagagaacccaatcacaactggcagagccactatgacgcacaggccaatcaccacccacacgggaaaacagtccatggcaaccaaaagaaaaaccgcacaccaggatgaagccggcaaagaccagccaacaacaaccacggcccacccccaaaacggacgaggctcaaccagcgcacgcacacccacaacc

SEQ ID NO: 236069 - DNA, 479 bp, Glycine max
  unsure (1)..(479): unsure at all n locations
ctcanaccacagcaacacaaaanctagagtgtacaaagaccctctttttaatggctncnctaggttcgaaaggggcgaattacaatgaggtataattgaagcacactctcacctcacacaagtccataacatcaatctaaacttgctcaaactgaatacacaccaaaaattccaccaaatcaaaatatgactcttcaacacccaattttgccctagaaatggctcctggttcactttggacatctgattttctctctagctcagcctaacctttctcacatgtcctaaatgacatttcaagctagtattaactcactttaacctccatttaccacagaattcagacttagccttccaactctcaaagactcactctttttccactcataacatcacattctcactttctaaccctaagttagttctacccttcatctctaacagttgttcatcagcaattgttcagcctactacatcac

SEQ ID NO: 236070 - DNA, 410 bp, Glycine max
gatgggctaagattttgttaaaacataagcacttacacaatgaaggaaagctggagctgctgcacatgaagtccaacgctatgtcaaggaataagatcggtctgcacaatgcacaaaacaagataaaatgtcaaatgaagaattgaagttgcaggattcacgatgtccgatacaatgacctgacatcctgcccgagaatactggacttgctcgacaacgcaagataaaagtcaagtgcagaagtgaagctgcaggatccacgatgtcagatacaacgtcctgacatcctgcccgagaatactggagttgctgcacaatgcaagataaaagtccagtgcacaagtgaagctgcacgatccacgatgtcagacacgatgtcctgacatcctgtcggataatactggacatat

SEQ ID NO: 236071 - DNA, 427 bp, Glycine max
  unsure (1)..(427): unsure at all n locations
agcttgcatgcagaccagcgatatctaaccttttctgtatattccctctatgggtcctcttgttctgccatacaatggtatttcctccagacagtacccaaataactaatagcattcaggtcaaatacttttaggaatcattgtcaaacttgaaaattgtcagatntcctcttgttctatcatactatgatatgcaagccatctttttgtgaaaaaatacatggctgtgttaaataaaccaggcagcatcttttcaatatgcatgacatgaaactcagagaaaagaagttagataataaggaggaaattttacaacaagtagcaattagacttttttgcagatattatagtggtcttatgggttatctgaataggatgattagttnggtccatgatctaaatggcctttctgaaaataagttttgac

SEQ ID NO: 236072 - DNA, 469 bp, Glycine max
  unsure (1)..(469): unsure at all n locations
nnattcatgtcangggagcacaatagatattgcaaggctttattttactgactcaaccactttaaggaggatcgcacttctaaaattgtcatttattactgttataaaatcactggtgcccttgtttttagcaattctatcttggatattttattctttgattatattcttttctttggtgaaacatcaaaagttcatagttagtatactctacaatgtgtgtctatttaaacaccagccgggcagccacccatgaactcagttgttcaactttaccaattacagatatgaagcaacaaatgataaaattctaacccacctccattcatatgcaagcccaagggaagctctagtggcatagtacacaccaaagttaaggagaaaaccacgtacctgcataagcctcttctgtcaatctttcaactatatcaacatatacttaaaattcaattgcctactgaagnttatc

SEQ ID NO: 236073 - DNA, 382 bp, Glycine max
  unsure (1)..(382): unsure at all n locations
attttccaccatggagatgcactccaagataacggagacgaggttacaggaggcgccctccactacggaataagccaccgaaggataaggctcaccaccaaaagagcgcctnggataacaaactcatagaggacacctcgatggatgaaaacaatgagagacagagggggccgggggggcacaaaattcaacgacaaaaaaagggagagaacttgaactccgaagtgcgtgtcataacactctcactaatcaaagctacaacaagcgctacacatgcttctatttatagcctacgaagcttcctcgagaagatctctcgagacacatctttgagacaccagagcctacctacacacccccccctaacaactaaactcactcc

SEQ ID NO: 236074 - DNA, 282 bp, Glycine max
acccacgcgggcggcgaagagacagcatggacatccacaacctcctcacgccccagaggccccgacgcccaaggcacgcgcgtccgcggacgaaacgcactcaaacccccccacagcaagccgaccccgaaaccggccccggcaaacaccagacccgcaaagccggacggcaaggaacctactagccgcgcacaagagaacacgggcagagcgccacccaccgggagaccatcgaccgcgaaccacgggaggagccccacgagccgcgcaacgcccccaacg

SEQ ID NO: 236075 - DNA, 460 bp, Glycine max
gctaatccgagaaagaggtgcgaactcttttaactcggaacaccaaaagaaagcaaggggcttaattgacacatggaaaatacgtgttgaagctgaaatgattataaatgatgctaggtctggttcagttcagactgtcccctggccagccagacaacggctttctgaagttgctcaaggtgggaataaacattcgagagggtcagctgatgttgccatgaagagctcagttacacagctttctgcatccaaaactgcctctgcaaagattgccccacgagagaatacaagatctacatctgcatctccagggtctacgaaatcagtgccttcacctgcacccgcaactgcaaacttgaaagatggacagccctgtgttgccaccgctagagggtcctttgatcttcctgtggcaaatgccacggatgagaaaagcagcacgtctagtccatcccacaac

SEQ ID NO: 236076 - DNA, 428 bp, Glycine max
tgaacaatatacttgtgcttcattgaactgtctttgtgtttggcgagcacgatcaacaaagtactttcgacacctactgtatgttgatttgaccaacgctgttatgggtatgttgcgacaatccttgaaaaccttatttatacattctgagaggttggttgtcatgtgaccatatctacgtccttctctatcataagccatcgtccatttttcctttgaaatgcgaacaatccatgttgctatggctggactcagttaatgaaatttttctaaattttgataaaaaaacgtgcttgcaaggagtgtaagctgcataaaattagttatgaacaacaattttaagtatatatgaaacttaaattaacgtgacaatcaaatatgagatcttacccaatttcttcatcatttctttctgtttggcattattg

SEQ ID NO: 236077 - DNA, 400 bp, Glycine max
  unsure (1)..(400): unsure at all n locations
taaacctccattaattnttttgctttaccttctcttccattgttgcttcttcatttttctccatgtatctcctcacatgtcttgagataaatgttgctaacatgattctttagagttttcaccgattaaacttgctatagaagctagatttgattgtctatggttcaaatttcttgttcttgaaccatgaattgtgttgagtttaggttcctttgacttttgtcttgttattgtttggggctgaaacctaaaccatttaattcttacaaaatattaatgtagaacaaaaccttcaaatctagagtgacttgtcacctattgtagtttgcatagaggcatgtctagcataaaactgtccataaaattttatgtgcctgaatttattttttttcttgccact

SEQ ID NO: 236078 - DNA, 459 bp, Glycine max
tgagatgaggaagtgttgaagggtgaaacttcctgttttttattgcgaccacagagtggtacctggagatatgtcgcggcggtcaggagaccttggggacgtcaggtggggtgctattgcccaaaaccaagcttgaccaatcccgacccaacccgggcatagtcggtcagtgagaacatgtgacgtacctaagcaggcgagctcctggcagtcaacagataaaaggaaaacaagaccacagagcaaggaggcttgtggtggctggccagctgtgaattttgtgtaatatgtggattgtggcctctggtaatcgattaccaagggtgggtaatcgattacaaagcttaaaattgaagacagggggctaagatggtctctggtaatcgtataccaacgcgtgtaatcgattaccaggcttgaaaacgaggtcatgaagctagggaagcctctcgtaatcta

SEQ ID NO: 236079 - DNA, 491 bp, Glycine max
  unsure (1)..(491): unsure at all n locations
aatactcagcttataatcatttcaatcatcttaaagagtgtgtagatatattaaattatataannntctaaaatattctaataccacgagatctactataatcacgtgatgacctcgttatccaactcgagagaccaagtataataatagctacaacaattttaaaagtatatagattcctaaaactttataaaattcgggaacattctaataacacgggtgacatccttatctaaactcaaagacaattcaaaagtttgatttatgtaaaaaaaattgtatcattgatcaattataaatttttaaccggttaaattattaaacaattattataaaaataattaatttaagcacatattattcatttattaaattatagctagaaggataaaattattaaagtttataagtcatctttaatcattctagaagagtatataattatataaaataatatggttctttgaaacattctaataccacgagatcta

SEQ ID NO: 236080 - DNA, 357 bp, Glycine max
  unsure (1)..(357): unsure at all n locations
gttcaaataatcatgtcaaaactacaaaccacatncggacatggcaaatagatttatatatagatatagctcaacattttgaccacattaagtgatatgagaaacaatcatgagtttcaacaggttcttcggtgaaccatgattatgcttacatattttccttgtactaaggattatttcgattacgcaatccaaaaattttgaatctgaaagctgtcaaagaaagtgtgctgatggagcattggagctcaacattgcgccatttgtagaacaagtttatgaacatcttgtggagaatctaaacaacaatctcttatttggaaaaaattcatctgataataattccaacctgaacat

SEQ ID NO: 236081 - DNA, 395 bp, Glycine max
  unsure (1)..(395): unsure at all n locations
taantnatgatcattcacttcagagcgagagagcgagaggcatgttattttaannaannnaagccaaggaataacagtggaataatacttaagctgatatttctaaaatacacctagattgacttaaaagactcatgtataattcaacgatatactggcgtcttaataactcctgcggcatgtaattcattcgaattgaatgtaaatatatcacaactcatttaatttagttaactgaattcaatcaatacaagaagtaaaatatgagttgttaattataccattactatataaactcctcaatcattgtatactcataccggatatgggctactattaatgagcatactgataaaggggtacctttctttattaggtgacaatcatagcatgaa

SEQ ID NO: 236082 - DNA, 444 bp, Glycine max
  unsure (1)..(444): unsure at all n locations
gtcacctgaggcatgcaagcttgcgcantactcaatctgtctagctcatttctngtgctttaaaggaacaacatattctaagcagtcttgataagagtacagatgtcaactgtcaagtgactttcttctatatagatattgcattttattttaaataaaataaagcgctgaggttagtagcacaattcttgaacatgggttgttcttaaactattctaagcttcttttatttcttgattttctcaactagttgcgataaaaaaaattgctttgaaagagaaatgatagtagctttaggataatttactgatattctttggcttcaaaatataatagtcgntgtattcatcatcaccacgattaagaaaataatagacaaaagaaaattctactacctctagcatttgcgattagaaatgataaataacgaattaattaaccatt

SEQ ID NO: 236083 - DNA, 463 bp, Glycine max
  unsure (1)..(463): unsure at all n locations
tactcagcttgcatacttgacaagctccttgttaattgcatgagacctattttcgtgtnnngattttctctcacgtttgcttttgaaaattaaaactggtttagtggatgtgcttcttgatataattggaagcttttagctcaacaatgtttcatcatactttttctctagtttagctcaactatgaaagatactctttgttcagttgcaataaatataaaatgttctcttagttgttttaaagatgatctactggaatgattgtgtgaacacatttttatgtgccaattattcacttaaacttggtggtgtggaatgtatttcaatgacgcatatcatattaaactataatatatttctggcttttgtctcttggggtattaagcatgctcatttagctgncattttatctactctaccacgggtagntgaaagaataacgtgctcttgcacttctaattga

SEQ ID NO: 236084 - DNA, 342 bp, Glycine max
catcactgctggaactatatggagctgtatttttatcttcactatagtacttcaacggtgattttccaccattgaaatgcaccacaagataaaggagtagaggttagaggaggcaccatccactacggaataagctatgaaagaaggagcttcaccaccaaaagaatgccttggataagagcctatagaggaagcttcaatggaggaaaagacagagagagggggggagaatgaaattgaaggaggaaaagacggagagaagttgaactttgaagtgtgtctcacaagactcccatttcgcaaaatttcaacaagcgttacacgtgcttctatttatagcct

SEQ ID NO: 236085 - DNA, 444 bp, Glycine max
  unsure (1)..(444): unsure at all n locations
agaagcttctatggaggctggactctgagctataatgaagttcttcaatggtgattctcaaccatggagttgcagcgaaagataaaggagaagaggtgagaggaggtgccatccactatggaataagcctnggcaggaggagcttcaccaccaagagagtgtcttggataaaaagcttagagaggaagcttcaatgaaggaagagaatgagagagagagagacagcgacatataatattgatggaagaaagggaggaaaattgaactttgaagtgcgtctcacaagactctcattcatcgaagttgtgacaagtgttacacatgtttctttctatagcctacgtcactaactaaatgaatttcatttttatctcatgtaaatctaacaagaatattccaaggatatgccacaggcatcttagcatattccctttagatgccaca

SEQ ID NO: 236086 - DNA, 267 bp, Glycine max
agccactgagaggtgaagccacggacgctccctggaacgagaatacggtgacacctctacaaaaggggatcaccaagctacgtcgaggtaaaccaactctaatccaacctaccgcaaaacacctacccttacctctgcgtcaccaaccagagagacggagtgactgcacacgcacatcttaacattgtggggggaataacacatacacgaaaactagtgtgggagggaacgcatatcttcactagaaagaaaagaacgccccaagac

SEQ ID NO: 236087 - DNA, 471 bp, Glycine max
  unsure (1)..(471): unsure at all n locations
agcncgcttacgctagtggagacattatcactctttctgttgcatgccaacgatagngagaacttttcccctctctttctactcttctaccatagttggccttctataaaagaattttcctatttatcttccttctccgtcacctttactggaaacaatgcactattggtgcccacatttgaaaaaaaatataacttatgatggtaacgattaaagttgtttttttctttaaagtaacatctcaactcatttcattaataatgacatcttcaatacaagatgatatgtaatcataatcttggcgactaacattaaatggcgtcgtccttgctaatagatgagcggaaattaacttgtctcctaactaagcttatctcaaagttctaacaaagaaataacatgtatttgctagctttgataatggctctaaattcagtatttgctatccaatttcctctaacacccctcacc

SEQ ID NO: 236088 - DNA, 471 bp, Glycine max
  unsure (1)..(471): unsure at all n locations
agaaactcaagctgtaagcatttcngaaagggaattgagtgttgtcatttngtcganctacaaaaagaacctttacttactaagttgtaagtatctgccaaaaatcccgaccgagatatcccaatcttatgtgtaatatcaatatatttacattctcagtataatatcaattttaatctctgggttctgtacttttgtggattgttactgtggtgtacttgatagataaatcaacataacatgtgcttgtagtatgtgtatgtatcacagcatggtttgtggatgtaaaatatggaataagaaatgcagccattggagtgattcgctttatgtgtcttctcctcaattaatgatgatttacagatgttttatgacatgttaaagacaagctggagaatgtagtgaaggaattctttgtagctcttggtgtaactctgagatactattatttgtctgtgagatcaatatatg

SEQ ID NO: 236089 - DNA, 329 bp, Glycine max
ctaagtatttgcaaagatatcttaatactcaaatcagcgagtgaacgaattgaataattgattagatatatatggaaagatagatcgctcgataacactggatgtaccttatttatagcgctcaaatacaatcaaattaaatatgacattcaagcacatatctattcttttttaaggaagcacatatctaatctacttgataaagaaaatcttaaactatcttatttttatgagcgtaaatacactttctatttaatacttttattataaaatacgacctaaagattaataaaaaatattatacgagaatatgatattacctcttcatt

SEQ ID NO: 236090 - DNA, 470 bp, Glycine max
  unsure (1)..(470): unsure at all n locations
tccatggagaatgtcagagatgagaaggcattctcagattctctgaganggnttctgggtagagaattaacttcgcaaagagtcagtttggtgctataggccaacctgaggaatggtgcaattctgctgctgtctaccttaactgtgcactgntacagcttcctttctgctacttatgaattacaattggtgttaatccaagaagaagggtggggtctgggatccaattataagcaagtttgaggctaagctgagtaaatggaaccagagaaatatctctatggttggtagaaccactcttattaatgttgttttaacagcattacctctgttttatctgtcttctttcagggtcccctcagttgtcattaataggatctctgccatccaaggcaatttcttttgggaggtaaccacaagggaagaagattgcttggatatcttggagtctttgctgcactcctaaacat

SEQ ID NO: 236091 - DNA, 414 bp, Glycine max
  unsure (1)..(414): unsure at all n locations
cgcttgtggctatcctctctacttgaagaattgaaggtgttttctgttgaggcagnggattcgtcggtagacaataaatcaccaattgatttggctaagaaccctgtgtcacacggcagaagcaagcatatagacaccaaatttcatttcctcagagatcaagtgagcaaggggaagatcaaacttcaacactgtagaattgagaaacagcttggtgacattatgactaagtccttgaagagtgaaaggtttaacgagttgagagagttcttgaatgttgttagtttgtaattggtttgaatcaaggggaggtggtagaagtgattctaaccaatagataagattagttaaataaaatcaatttgacagagttcccatcctagctatcacattgattttagtgttttgatatgc

SEQ ID NO: 236092 - DNA, 459 bp, Glycine max
tagcaagctggcgcttagctcgaagacacagaaaacatttatctctggacaataggcttagtgcgcagctgagcttagcctaagtctacaattttcaaaaccaaaaaggattggagcttagcgcagcatgctggcgcttaactcagcctcaacaaaaacacactcaagcttagcgcatagggcgcgcttagcctgactagaaaaaattaaaagacagtgagggagttgagttagcaaagcagggcgcttagctcaacacacaacaagggcttagcgcacagacgcgcttagccttattacaaaggaaaactttcagaagcaaagtggcgtttagtcgtacaagttcggcttatcgttgaacaaaaattttcacaaccctaaatgtcagaacactggtcccgcttagtgcacagatacgcttagcgggcttatcacttatagtcaccagcatggatgaac

SEQ ID NO: 236093 - DNA, 473 bp, Glycine max
  unsure (1)..(473): unsure at all n locations
ggaccttaagcacctgagctgcagctatataaaaaattattatatcatttacattatnctacgcctgctaaattcatcgcaatacttcaaaatttaaaattcaaattcaaattaggatgaattaaatataagtaataatattatttaaaataaataaataacatacctttgaaatcaaattaaaaataaaaaaatgccacgtcactaataaagatgataatactaacaaattctctcctaagaccttaattagtcttcagttttgttgagtacattagttactactacctctcaagtttaacatataagcttggtatacaaggagttaaggtgcgtattntttttttttctgataattaatggaccatattagttaagcacaataacaaactcgatccaagcaatattacaacaaccatcttctagctaatgctttcaagagtcacagtgctgcagcaccacctccaatttgt

SEQ ID NO: 236094 - DNA, 392 bp, Glycine max
  unsure (1)..(392): unsure at all n locations
tactgggngcatgagaatatgctgtaggacattatgcatatacatacnnccgaggaaagcgtntgatatttcgatgacactttcaacatactaacatggagaatatcacaggttgactctgtctcttgctactgttaagtagattcaggcctagaaacagttgttggggcaaggaaatatgttccatgatcgaagttatgtatgcaacctgacatatacccaaatgcacatatgagcaaaaactcacgtatagagaggaccagagttcagccttctctcttgcctggtcttccggatgatctcgctattgcatgtttgattcgggtaactcgggttgagcatggtaaactgcgtcttggttgcaagagatcgtatcacctcctatctggaaa

SEQ ID NO: 236095 - DNA, 484 bp, Glycine max
  unsure (1)..(484): unsure at all n locations
gggtttgggcaatagcaccccacctgacgtgcccaaggtcttctgacccncacgacatatctccaggtaccactctgtggtcaacgaataaaagcaggaagttcacccttctacacttcctcatctcaagcttgtaggattatggggtacccatcacatgtggtactaggtggcggtcgggcgatggtgcacaacaagttttccacatccacaatgcgcgcataaacccaccatcccctgttgcccacctccaactgagctcacgtactcccacgtagcccatatcctcgttcctctcaacaccgggtccccatcaatcctcccaagctntcccaacatccaagtaattcaacaatcaaacaacacaaactatcacagccaagaaaacagggcaaaggcagaanactctgcccaaaacaccaaccantatcacagcttttctcactgagagaccncagtaacaattccttcgttccaattcgtt

SEQ ID NO: 236096 - DNA, 387 bp, Glycine max
taaatggaagttaacaaccttccttaatgcatcaacataatggccaagccttactaatttgtgaataaacaatattgactcaagttgtcgtaacacagtttgctgttccaaaacatgttctctctcttgaagactgcaaaatgaattcaatcaatcattttaccgaggcatggaatgctgctgtgctacataaaaagaatatacaataatttgtatagttgaacttctaaaaccattctgagttgcagcaactcaagcaataatcaggcatcttggaatttccagtccaactcttaagataacaaacacctaacaagactaacccatggaatcagcaacagatgcccaatcctatagagtacatctaattatatatcccatgcccct

SEQ ID NO: 236097 - DNA, 469 bp, Glycine max
  unsure (1)..(469): unsure at all n locations
ctcagctgctgcatggcatgaggactgcaggatgcttcacttttgtattcacggaaatgtatgtcttcctaggttcttctatctgttcaggaatcatatacaaataccattattactagcattaatcatatattctctttcgttatttttctcttttgtagtacttctcattatgctaggtggaggagagcgaggacttgaattatttattataattttgccactcattattcattcataatattatccttccactgttatcttcaacgcatttatttgaattntgtgggggaactcgagtaagttgaggagtttgacaaaatcaaagtctatagactatagcaaacgttaaattcctagttctgatgtttgacaaaatcaaagtctatataagagagccataaattcatggataaaagtctaaattagcatccctctaatcgaaggcccaaggtcataatcattctca

SEQ ID NO: 236098 - DNA, 311 bp, Glycine max
accaagggaatgaacaagttagcttgtggagaattggcgcataccctaacttcgcccggtgacactatgttacaaccatttgaattcttgtcaaccgagttgagatgcttaacactttgcgctgcgcaatccatatagggtcccgacgtttccgaaggaaatgagcaaaatacgaaaaatgggggtgaactgatcaaactgcggggtggccttcaacactgggcccattagaaagcttcatcaggaagcaaccaactcgcctatgcgagttgggcgcgaagcacctccctattcttgctataaatagggga

SEQ ID NO: 236099 - DNA, 365 bp, Glycine max
atgacccacacgatcatgcagaagcgtgagcgtggttgatgccatatacgacactggaaagctggactctatataataaagtcctagtgatttacattccttttcaatcagtctacccgtcccacgtttctgaataacaaaagaatcaccgataaagggtactgatctacttaaagagctgagcctctgactcaatgagatcagattatatcgacactgaggaacaaataatacatagattaatctctatgaacgagataatgagacttgaccacttccttgagacgcccctttggagccattaactacggatacaaggcgagacattcttggataacaaatggatgaaaaagacaacttgtaac

SEQ ID NO: 236100 - DNA, 416 bp, Glycine max
  unsure (1)..(416): unsure at all n locations
gctggagaggatgcttgagtggagggaaattaatttatgatgggggagcaccaaattgaaggaatataagagggaaagaagtggaactctgaagtgtatcttataagactntcattcatcaaagttacaacaagtgttacacatgcttctatttatagactagggagcttccttgagaagctttcttaagataacttccttgagaagcttccttgagaaagcttccttgagaagctagagtttagctacacacacccatctaaatactaagctcaccttcttgagaagcttccttgagaagcttgagctcagctacacacccctataatagctaagctcaccctcatgacanaagaacatgaaaatacaaaaaaaatcctactacaaagactactcanaatgcccttgaatacaag

SEQ ID NO: 236101 - DNA, 396 bp, Glycine max
  unsure (1)..(396): unsure at all n locations
cccaggcctangaaataaactggacatagagagggagagatatatgtttcacanacgcaaataccttcaccaaccatagatatgatgaatgatctcaattagcacgggagtacgctgtaacatagctacctattggctcttaatgagctccctgactaactgtaattatactatgaacaagggaacagcgattaacctagagagcagagatatacaattactttcaatctcaagatctctgtttacactaatgatgcacaacctacaaacgtcttctttgggttctaacggtttgggcgacaagacccaccacttcacatcacttgatggtgagacgggtattgatacattgccagattcacagaagcacgagagaagaaccccatatatgatatg

SEQ ID NO: 236102 - DNA, 435 bp, Glycine max
  unsure (1)..(435): unsure at all n locations
cttgaatcctaaaaaaccatgaggtgagggcagtttattcccatcacangcctanaaagtccttcagattcattctgtgtgtacactgctgcacgacatgagatgaaatgcacaggtcgggactcgcgtcagttgcttatgatggaacgagcctacacacttgagcttgagcgaaataatgactatgaggttccggttgatgatccttcctcgacctcagccatccttactagctcatttcacgtgtgactctaatgcgcatgctcctatctctggaaagctacatgtctgcgagaagcaattgattgaagcatcccatgacatctagctcatatgtttcaatacctctgcgaagcaaacaccacttttcgagtgaccactgtattctatcacttaaggaccagtgaactccttcttctttgcctgaggacaagc

SEQ ID NO: 236103 - DNA, 449 bp, Glycine max
  unsure (1)..(449): unsure at all n locations
ngcaccanaagacacaaataacatgagagacagtttctctctaanggncaaaaaagggaacagttgtgaaatacagagacctcccctatctggcgcgtcagaccttgcctgtaaaaccaaaatcatgtccgccctggacaacctaacaaaagaaatccggacaacactagtctaggctagggggcttgacaagctagacagacctccaattctcacacctgtcaattgtaccactcttaacactggacaataatattccatgcttgggggctcgacaaactcacgaccctcctacttgtcaaggctactacctcggacatcagacaatctccattgtgcactatctagggtccacaaaatacatgtgtcataaaatacacgtgtcaagctatgtggcattatgagtcacacataaaccctccatatcaaccctagcataggagcacaaa

SEQ ID NO: 236104 - DNA, 350 bp, Glycine max
  unsure (1)..(350): unsure at all n locations
gataacacattgcctanaagctactatcataccaagaagatactgtgtcccatgggtatggagtatcaaaagattcatgcttgcctgaatgactgcatattgtacacacatcaatctcaagaaatgtcgaaatgccctatgtgtggggtatcaccgttcaaacccaacgatgatgaggagtgtactatcgatgaaaactcaaacaagggccctccagcgaaggtgttgnggtatcttccgatcattccaaggtttaagcgtttgtttgctaatggagacaacgccaaagaccttacatggcatgcaaatgggagaaactgtgatggaatgtttctgcatccgactgattc

SEQ ID NO: 236105 - DNA, 334 bp, Glycine max
cctccgtcacacctattgcccacatacctctgggctctaaggacaagaggcaatacacatgccaattccaaattccatgtgaaataacttcttggttccttattattttttcctaaaacttgttttttgtccgccattatttcattagatgacttccttgaagataatgtcacttattcaacctgcacataaccaatattagatataacctactttattcacttgactagcccactgcacaatcatagaaaatatgtaagcacagttttatgcacaacgaaagacataaaagtccgttgccattcatagaaatatttaagcacaggtttatgca

SEQ ID NO: 236106 - DNA, 472 bp, Glycine max
ttgcatgtctagggatgctagagagagagttgtctaagctccaaagaagtttgagagattctgctgtgtgaagatctgtagagaccagagcttgaagaggaagttgttctgagagcttgagatgcgtttgtgagtggttgtgagatcctagaggtgaaggaaacatcctcaccacttgtatttttgcaatctttcatcttgctcttctctttgttgtaaaggaggcttcctggttatgaaaagctaaaatcctctgttggatcttccctgtaggtacttgatgtaaatatctttttatctatttaatgatattttgtgtgttctctgtgctatcagcttttcattctagtatgcctttaccttgatcacgtagatgcatgcttttgtagggtcattcaacagtggaaactggtctgattctaatgaccttgataggacaggactaaggtgtcgtactatcacgaggaatccg

SEQ ID NO: 236107 - DNA, 355 bp, Glycine max
  unsure (1)..(355): unsure at all n locations
ctgcagcggaagcgtagctgatttttcttttgcccnctaccctaacatctccctcttttggctttgatgatgccaaactcgaatatgacattaagtgcatttggaatgttcgagtcttgagaataaagacttattttcctttgtcaatcttgaaaattcttaatacttatgaaaagatcaattcactatatcatcatccgatatattactatataattttactaatgctaatgcaatataatgcaatacagcatgctagttaatcttccaaatgcttatgtaatacaatgcaagcaaatatgcaatacatatgcagtagttaatatctccccttatgaaaatatgcaattcatat

SEQ ID NO: 236108 - DNA, 331 bp, Glycine max
cacctctgagctcgagctgtattgcaattctggagcgatcacacagatccagtcttgagagatttgctgaactatttggagatatgaaaaacatactgtaccttgaatcggatgaccttggcttaaaagaagtggcagaatcatcttaaaatgttgtgggactcaaaactatatccctgcgtgattcgtgagaccttttgttaccaagcaacattgccatgatgcctaaactggatcttttgtacgcttcacgactgtaggggctgcaatgggtgaaaccataagagggtgagaaatatgtgagctcaatagggtggcaaacgtatatggc

SEQ ID NO: 236109 - DNA, 406 bp, Glycine max
  unsure (1)..(406): unsure at all n locations
tctcgccaggaggcataccttatctttcttggaaagtaccatagggtatggcacttcctttccctcatctgaagttgnttctttactttattctctttctttttcactcttactcttttcttcttctttatttttttcaactcttccgattttcttctatttctttttgttttcctccctctatttctctttcattgtctattatttcttcccttccaacaattattggtttttccctccactgacacctctcatctcttacctcattcttctttttagtagtagtgtccttcaaagcaactttctccttcagagcaacaacatcctcatcctcagccgccacaagcttactgcttcttgntataacaactatgcactcttctctgggatgtcttctcaatatttc

SEQ ID NO: 236110 - DNA, 421 bp, Glycine max
  unsure (1)..(421): unsure at all n locations
gttcacagncncaatccatgggcaatatgtttcggcggctaccatatggtcgtgatagaatccacgagtttactactataccagattggaacgaccatagagctgctaataacgttcctttcatatacttgccaaaatagaagagttcttaacagtgaaatctggtttatgaatgtagttgttgcggagccagcataggcaaggttccatgactaataccaggtttacttttgcttctattttaacagcaaaactatactcctggttagtgaaatcatagggaataatagaggcaattctctcaaaaagttgtggttgattgttgttggaatacaaatagatctaaaccaggcttttttaaggtctccatttgaactttaacaacttgataataaacaaaatattatccttgtgcaagcgt

SEQ ID NO: 236111 - DNA, 246 bp, Glycine max
aacataggagcagtagagaaagcaagggactatctcgcactgatgatggacaagtatgagatcgagccattgataaaacactatacttgcatgggcgaagcgctaggacaagctgggctcctacaagaggcagaagaacaataaatggcccgcctataagagcagattccattatatggggatccttgctctcatcatgtatgaagcatgggaacgtacacattgggaaacgagctgcacaaagag

SEQ ID NO: 236112 - DNA, 297 bp, Glycine max
acccacttgacctagaaaaggcaacattcatcactagtggagccaacttcggctacaaggtatgccctctggcctaaaaaatgcaagcgccacttatcaaaggctaatggacaaagtttttgtgacaccctctaccccaacatgcatataaatgagaaaaacacataaaacgcggaatctaactaaatcaactccattcaataaaactgcaagcaaatccacatggcgaaaaggtccacatccgccccactgttaccacaaaaacactctcataaaccatttcaactcaaaacaagc

SEQ ID NO: 236113 - DNA, 426 bp, Glycine max
tgtctcagcgtttatgcgagacagagacgagcttgctatttatatcgccaagcccaagaagagttaggtctatccacggcccacgaacatacgatcgcggatgagatatgcccaaatatatgcgcaacaagatgctagaggaatggcgatcgactctttacaccaagaggcaaccatgtggatggatcggctatctcttaccttgaacggcagtcaggaactatcccgattgttagccaacgccactgcgatggcggacacctactccgcccccgaagaaattcatgggcttctcggttattggcaccatatgacagacttaatggcccacataattagaaatttctatgaaacttgtatggtctctcagaccttgactagatacaactcttctgtaataaaatgagttggtcacatgtgtctact

SEQ ID NO: 236114 - DNA, 400 bp, Glycine max
  unsure (1)..(400): unsure at all n locations
agctttggtttaaatatcgagcgtctcgatatatttttggactcaaccggacttncgagtgaaaagttattgtcgttagaattagctgcgagcttccgttttaaatttcgagcgtctcgatatattacgggaatcaatcggacttccgagtgaaatgttattgtcgttcgaatttgctacgagcttcggttttaaattttcagcgtctcgatatgttacgggactcagtcggacttccgagtgaaatgttattgtcgttagcatatgctgcgagcttcgcgtttaaattttgagcgtctcgatatattacgggactcaatcggacttccgagtgaaatgttattgtcggtcaaatttgctacgagccttcattttaaatttcgagcgtcacgatatatta

SEQ ID NO: 236115 - DNA, 448 bp, Glycine max
  unsure (1)..(448): unsure at all n locations
tgtagcacattcgaacaacaagaactggtcactcgttagtctgattgagtccgcgaatatatcgggacgctcgaatataaaaccgaagctcgtagcaaagtcgaacgacaataacatttcactcggaagtcctattgagtcccgtaatatatcgagacgctcgaaatttaaaaccgaagctcgtagcatatttgaacgacaataacatttcactcggaagtccgattgagtcccgtaatatatcgagacgctcgaaatttaaaaccgaagctcgtagcaaattcgaacgacaataacatttcactcggaagtccgattgagtcccgtaatatatctggacgctcaaaattttataccgaagctcggagcaaattctaacgacaataacatntcactcggaagtcctattgagtcccgaatatatcgagacgctcaaaatttaaaaacc

SEQ ID NO: 236116 - DNA, 407 bp, Glycine max
  unsure (1)..(407): unsure at all n locations
acctctatcaaacattctcagaccaacggtcaggcagaggcagtcaatatagttatcctttaggccatgagaaccaaattgacaagtctaagggtctatggaaagaggaacttagaatactttgagcctaccatcgttcaccccaaacaatggctaatgaaaatccttattgattcacatatggcacaaatgccatgatccccatcgaagtaggggaactgtggacaaggagactattgttccaacaacaacaaaatgaagagacataaaggtagaactcaagacaatagatgaagtctaagagatggccaggatcagagaataaactacgaagctctgagtgatatagagatataatacaaaggtncaaccacgagcctttcaacccagtgacctcgtactgtgag

SEQ ID NO: 236117 - DNA, 468 bp, Glycine max
  unsure (1)..(468): unsure at all n locations
ntggaagnnggaagcaatgcctatgtcgtgttttctccggngtaaccacactcgtccggtgctgctntgatggtagctcgcgtgatgttagggcacgggtatgaggccgaaaggggtttgggtcacaatggcgatggcgtggaaagcttggtggagttcaaagagaaccgcggaaggttcgggctatgatataagcctacaccgcccgacgtaaggagaaatgccctagaaagaaggggcagaagcatgggtcagttgcaaggaccacaaataaaaagagctcccttatatcacatcaacgagagtttcgctagcgcgggtatcagtcgccttatacgattaactcttgtatagaaatcattttccaaaacttgtatagttccctaatttatgattatttcttactgatctttgtaaagaaattctgtttatggataaagctgtatctagaatattgccatttggatt

SEQ ID NO: 236118 - DNA, 403 bp, Glycine max
  unsure (1)..(403): unsure at all n locations
ctatctcattagaaacattcgatttgaagttatcaatgaatccagatgctaatacaacatatggaaattcataatccactagttgatggcttcttaacataatatctttaatcagaagtatccaattcatttgaatacttgatttcatcccatatacgatttgtacgtcgctcgcagtaacttgagcattattgctggaccttagtggtagaatgtacgtaatgagatacactatcattctatcttcaactatcagaccaccaacttctaggcggtttctaagaatccttgttgggtcaaggagcatacctctataagttngcatcttattgtagccatatgcaatcttcaaatttgggatccaccatatctatcctatactttttccaactccacatcatga

SEQ ID NO: 236119 - DNA, 385 bp, Glycine max
  unsure (1)..(385): unsure at all n locations
ggaagaggagcataaaccacagactctggcgacatgngcacaatttttattcaaggccaattgggttactatgttaacccaggcatctagtttaccttcaagcttcttagtctcacctgatgacaatgaattcgtggctacttcatgcactcctctaatgacaatagcatcacttttggcactaaattgttgggtccttcataaaaatattggaggacaagctgctcataaatctggtggtgacggcaactaacacatagttttataaatctctcccagtattcatataagctttctccactgagtcgcccaatgccctaaatatcctatctgatggtcgtggtcctagaaacacggaaattttntttctgacaatactatcttg

SEQ ID NO: 236120 - DNA, 369 bp, Glycine max
tgaaatggcgtaaatttggagcaaactctcacctcacacaagtctataacatcaattcgaaccttgctcaaacctggatcttacatcctaaatattcccaccgaaatcaacaatttgacttcctcaacaccccattttaccctagaaatggctctttgctctctttgggccctttgttcttctctcttgtacagcccaacgctttctcataagtgcctaaatgacatttcaagctaggattaacttactttaacttccacatgccacttaaatccaaaattggcccttcaactctcaaaactcacttcttttccactcataacaccatattctcactttctaaccctaggtactctaaccttcatctta

SEQ ID NO: 236121 - DNA, 409 bp, Glycine max
gattcaagactccaagagcatgatccaagaatccaatccaagactcaagattctagagaagaaatcaagaagcaacaagtcaagacttcatatacgataagtattataagaatctctcagaaaccaaatagcacaattttgtgttacaaaagaactttctcaaatttcctaagtaccagagtgattactctttggtaatcgactaccagttattagtaatcgattaccagcgaccagtttgggttcaaaatgtcttcaaataattcataacgtcccaaaatgattttcacatatctgcatcgattacactatattagtaatcgagtacaagtgaatctgaacgttggaactcaaatccaattgtgaagagtcataacttctcataagacacattgtgtaatcgattaca

SEQ ID NO: 236122 - DNA, 310 bp, Glycine max
tcagacacaccccaagagttggtgaatgagaatacgccaagaagaacacatcgatgactcttcaaattcattttgtcctgcctctccttaaagtggagcgtggtggtgctcctctcactaatacacctgagggtataagatatctcggtaaatcggtcccaaccttcggcatcacagtcttaacctttcaacaattaatctaacaaaagtagtatggccaagggcgctctctttgtattgaacaaaaattattggccaaacaaaacaatcgataacctcaaaaataatcgacatattcaatgcaaacaca

SEQ ID NO: 236123 - DNA, 435 bp, Glycine max
tcgaacacctaagtgttggtttatttaatgaaataatataataactacacaaactttaatttgccttcaccaatgaaaatagtacttaaaaaaaaagaagctatctcctactactacatttacactcaaaattcaaaataccgaatttatcttgattaaaccctagagaacacacatattgtattaaattaagttttctagctgctatatccaacgcaatattatcaagcacatgaaacgtaaacatatattagattcctttatatcattatagaaagtcgttggtggatcccattcaattaatataatagagaaagataaaagaaactcataagtggagacagaaataatattatgaacttcaagatccaagatcgaactccattactccatgtggcaactggcaacaatatttagtcaaaataattcatcata

SEQ ID NO: 236124 - DNA, 476 bp, Glycine max
  unsure (1)..(476): unsure at all n locations
tgagagatatgcaatctcgcacagaaactatgatgtccataatttaactcatcaactcaaacaacagatcaaatgataaagatgcaacttgaacgacccagcacagaaagttgaccttaaaattgagacataaagttgctacaaaggatgtttcaaacgttcacacaggtggatcgaaattcacgcaatcacagaaaaaatatcaaggaaaaaataagaatcataatttggattaaaaaggagaagaaggttaccagagagaggggaagaaaactggaaagaaggctaatggattggagtatgtatcttaatggaaagaaggagaaagaaatgggatcaaagaagagaaatggattggttacgtcaaaatatgaatgcgtgtgttgccaatcttaccctgaccggtccataccgtgaaaaggactgaaccggcgaattatgaagaacacgacanaatatagtaatcaaactgattt

SEQ ID NO: 236125 - DNA, 395 bp, Glycine max
  unsure (1)..(395): unsure at all n locations
aactagctcagcagaggccaattatgagtgtagagcagttcattgagaagatggcctggcttggaacccaaccttcttttgtgggggataatgaaagttttacagcccaggcacctcaacaacatgagccagaaccagaaaacgatcactcatctgaagccaccatccctggagttgttgattttgccaaaagaagattagagacgagatccaatgaggctgctcatcctggaccagtgccagcatcagctgatgcaccatttcgagtagtggatccatcttcacctcagcatgcagcagacgcttccactcatgtcttagagatacatgagggtcagaccataccaagcctggccttggatacttctcctnctgctactctaatatggcatcta

SEQ ID NO: 236126 - DNA, 470 bp, Glycine max
  unsure (1)..(470): unsure at all n locations
aactcagcttgaaaacatccggaaggccaactccaacatttatctctttcttngaagncntactgcaattaaatcatgtaaaaggtggtatactatntttcctacctcgaccttctatccctataaaaatgtaaaaaggtttttgtcgagaaggttttaacgaggcacacctaaacttatactatcaatgaatacatttttccaacaattatacttgtcatttttttttatagtaccctctcgaataccctttttggcagaggttgaactctacgataacaacatgtgttccctctcgaataacttatttgatcgaggatgaacttatttcgttaagcaatagttccctcttgaataatccctttggccgaggatgaaattatcacaatatatcgtaaagttccatcccgaatactctcttttgtcgaggtcaacaccatacgataaaaatatatgcttcttgccgaata

SEQ ID NO: 236127 - DNA, 432 bp, Glycine max
  unsure (1)..(432): unsure at all n locations
agcttcaattatggcatgcagaaattatanaatactccttagatactatatatagattttctccctaatttatacctcgtttggatagtcaatgaaacacggaggaatgaaattgataaaacaaattagaaatgaattaaagtgaaattttaaagttgttcgcattaatgaaactaggaaagaatagaaggaaatatttttacttctttaattaaatcaaaaagtaaaagaaaagaaataggataaaatatgaatttgacaattttgcccttcaaatatgacatgataacatagaaaaatcatatatatgcatgcttgtcataaaaaatatatatcattacatgttgttattccatagaaaannaaaatcaaatcgcatgaaccanaattnnttttcattagtaagtgttaatttttgtagaaatatcaatt

SEQ ID NO: 236128 - DNA, 387 bp, Glycine max
  unsure (1)..(387): unsure at all n locations
tcaccaaaagntcattagtgttttcaaatatgtacttatgtgtttatcctgggaatctacgatggcctttgctcctttttatttagttaattttgctaactgataattagaaatttagaaaacagagagcgggaaaagtaaaccatccaaaatgagcggcgatgtgcagcaacaaccatgtaaggcaggtatttaagttaatttatttaaagacttggcccaaattctagttttctactctcataatattccgaaagaggaaaaggaaaagttaaaagagaaggagatttttttttaagaaagaaagattgtggtttcctaggtcttcacgattttggtttccggtgggaaaagggtaacagtaagtcttgtataacatggtatgta

SEQ ID NO: 236129 - DNA, 365 bp, Glycine max
accaaaaaaggtccttctccttcttggaaggtaccacaggatatggtacttccatactttcgtacacaactttatcactgttactcttctgttcctttgcattgttttcatctttctcaattgatataatatgctcctctctatttcttttatcgactacatatgtacttttcctggtcattagattgttttttctggaccattatttgtttctctttttcctaatagctttcacctctcacattatttttcttgccctcagtagctctcttttcagcagcttacttcttatgcacaacactcttctcatcctcagcctccacaaacctgttactccttgtcatcacaactttgcattcctcctt

SEQ ID NO: 236130 - DNA, 407 bp, Glycine max
  unsure (1)..(407): unsure at all n locations
tggaccttcnggnaacgtgaaataaggaggtgtttatttaatacngagcgcattaagtattaactagctcggttattatataactaaggatgaagatgagccatctatatcattggtgcacgagaataatgatgctattgatagcgtaagttatttggtgcactcatctgcttgattgttatntaacctattagtagcgtcgcatgactaattgaatacaaatcatattttgaggtagtaatgcttctcagcctttgttgagtctgatccacatttactgagatctgttacaccagctaagcacaattagcccctgtctcatgtcaattggatgacataccatttaaagatatattatcaatacaattatcctctactagggtgaccaacatatacttaaaagaact

SEQ ID NO: 236131 - DNA, 309 bp, Glycine max
atctaccagacacaactttcttgtttgtgctgtcagccagtcctacagctgagcacaagccatagtcatacctgcagcaacctccaaaacagctactaagcctacctctattctcaacctcatttcttacaccgtctatgacaataaccaccgaaaatgtataatcaagcatgctcacactgccagggggaaatcatactaatatttactatgttactactggaatactagataattactatgctggaatggaggctctgctacgcccttttccttccatgggatcatctcttcttttgacagcttggc

SEQ ID NO: 236132 - DNA, 304 bp, Glycine max
  unsure (1)..(304): unsure at all n locations
tcttatccaaggcacatcgaggaggagaagctctttcttttatggcttantccttaatggatagcgcctcctctcacctcctttcctttgacttccgctgcatctccacggtggaaaatcaccactaaaggaccccattgaagctcaaagatccagcctccatagaagccccacaagcaagccttcatcaagtggcatcagagcacaagagcttcaagtaggtgctcctcaaacctccattaatttttttctttaccttctcttacatagggggatcttcattattctccatgtatctcctcac

SEQ ID NO: 236133 - DNA, 476 bp, Glycine max
  unsure (1)..(476): unsure at all n locations
cggagagggtgcttcaatggaggataagagagagggagagtattatagtagggggagcactaaattgaaggaagaaaaagggagagatagtgaactctgagttgtgtctcccaagactctcattcatcagagttacaacaagcgttacacatgcttctatctatagactangtagcttccttaagaagctttcttgagaaaacttccttgagaagcttctttgagaaaacttccttgagaagctagagcttagctacacacacccctctcataactaagctcacctccttgagaagctttcttaagaagattcctaaagaagctagagcttatctacacacacctctctaatagctaagctcagcctcatgacaaacgaacatgacaatactaaaaaagtccttactacanagactacttaaaatgcctcgagatacaaggctaaaaccctatactactagaattgccataataca

SEQ ID NO: 236134 - DNA, 408 bp, Glycine max
  unsure (1)..(408): unsure at all n locations
tgagctgcagcttngcaaaaaattgcattgaaattctttgcatatgcatacacatgcatatgggttatcttgtgacagtgacaagatctgtttttgagcaattgtcaaataccgagccaaatccaagacagagacgaatcgaggcaatcggtaacgcggccacgatttgctgcgcaatgtcatttcctggcttcaagtacttggggacgggcacgagtggaggctaggcccatgatccacagatcgccatcccacgtccagctccagacaagcgagaagcgctactgggaggcagcctagtatcctttaaattcctatctattattattggaatctttttaaggtgatggtcagatgcctaatttaccctaggggcttcgagtaagcgaacgtcgacccatagagagc

SEQ ID NO: 236135 - DNA, 455 bp, Glycine max
tctcgggggagcatcaaagaaaggaacagagcatgtgcatgcttatatggagaaacgcattcagaagaggctacatgacaaagggaagggacaaacatttcatattcctaaggttacacaaggtagacaagaattgattgctggaggttataatgaagaaaatgcaaggaaggatcttgcatgtgctattatcatgcatgaatatccactttcaatagtgaatcatgttgggcttagaagatttttagctacactccaaccacaatttcaatgtccttcacgaaacactataaagaaagagatatgaagctgtcggatacaaatgaaggaagggtggcaattacatcagatatgtggactgcaagcaaccaaatgaaagggtatatggctgtcacaactcattacattgatagctcatggactttgcaaagtcgcatatcaggtactagcaacat

SEQ ID NO: 236136 - DNA, 491 bp, Glycine max
  unsure (1)..(491): unsure at all n locations
tgaggcatgcaagcttaaatcaaagaagagtctatgaaaatcttttttatcactttcttttaaagacggtttttcaaattaaaaaatattagtcaattattgtttcataaagtaaaatagtaaacaaaatgaaaaattatttaaaatgaacttttgtaaccatttttctggcaatttaattttttttaaccgacttgactttgtcatcatcaatttcttttttttagttttttcttcttgggtttttttgaccaatgacatggacaattcatgtgttttccaaaaaataaaattatggttttcatcnagtttcaattgaattgactaatatttttttattctttcctatatattaatcagaatatgctagactcatagaanaatcatattttataagagnaggtactttctaattgtcaaagtgcatttgcttttatcatagaaatatcggagtatctggcaataataataataataataataataataat

SEQ ID NO: 236137 - DNA, 275 bp, Glycine max
accactatgattggctttcgtgttgatcactataacaaataatcagctccttttagtcaaagtagatctatcacagtaaaacacatcttttgatgttgtttggaaacttctagaacttaaacttcatttattcttcataggatgcgacaaatcctgaaagaatgtcttgtgagacaatttctgcgaaatgaacctcatacacaaagtactaaatgaaagcttaaatgtcatctttaataatttatcagatcatgacttatgcatatttctgtgtg

SEQ ID NO: 236138 - DNA, 468 bp, Glycine max
tcaactacgcctcttaaatattagaagtgctacaagtttattatttgcaattatagtctatgaagccatataaatttgaaaataattaccagaatgaatatattgattctttcttctacatgttgagggaaaaaataggtgtgtgtgatcttaatctatttgctaattgcttcttttttccgtatagaataattctcttccattcaacaaatatgcatttttgacaacgcacaacgcttatgccattgatggggagccatctcacacaggcgtgccacgagtaacttttaccaatcacgaagacagtgtcacccaacagctaaatgtatgctatatcagtactattagtctattaattatagcttaaaatatcaatgcttgggttctcataaacaatgtttaagtcacccttgtgtctcaacaatggttatattgtagaatggaatacctggactaatgtgattttga

SEQ ID NO: 236139 - DNA, 420 bp, Glycine max
  unsure (1)..(420): unsure at all n locations
tgactagaattgggtgttgcacaacaccaataaactgtatttctgttaaccattgcttatgaccctacatgaaataagggaaaatagtcaaaggaaattcaatgtcaaaagaaaataaagaacattttaactcctctaagccaatgattactaacaaatataatgtaataatatagttaattcttcaagatagtaaaagattgatccattaatacatcacaattccttcatattttttggtaagaacaatatatgtgttctctatcaagtaatatcaaattacatctaaacaattataccacacatgaagaaacccatctatggagttacattactcgtattgtctgttgatgtaaaatatgcctttacatgtgacacattcaattcacacagataaatttccagcanaaaatatggcta

SEQ ID NO: 236140 - DNA, 473 bp, Glycine max
  unsure (1)..(473): unsure at all n locations
ggtcttgacatattagaagtctatacacatgagttatactttctgaagaatngcttatgattaatagcatgttttcgctatatttcttttaataaaaagagattttaagtgaattagtaattagtgaggatagaagtaaaaagaaaaaaagaaaaaggaaaaaagccagtaatatgtaagttataagctagtcgaagtaataagccaaaaattacataaataaaatagcataatgtatatctaataaatctattttgattaaaataactagtcaaactaacttatactagagtgttgtgttaaacacaattggaaaaaattgttgacggcaattattatctaaatacgtttatgatttatattattatcaaaaattataatcttaatagaaggaaaaaaaaaacaccttaatggttntaaagctattgaaagcatagacacaattgaagaacacaaaaagatgtgaagttgac

SEQ ID NO: 236141 - DNA, 468 bp, Glycine max
  unsure (1)..(468): unsure at all n locations
ttaaatactaagctttaacatgttttattaagtgttaggtcaaaaatgttgcttttatcacatgtgtggtaatgagacaaatacctaatagtcagtttatgaatagtttaagggttcactaatatatacgcatnttttttagcatagcacgttaacaagttatgtctagatattgtcttaaaatatacaaacaatgtagttctcgtgtgcgtgcgtgcgtgtgtgcatatacgagggagataggactgacactagtgcaaaatttggatttaacaacagggatttaacatcggttattatttctaacatcaattcctttttcacggctgctaaaataagcatttaacatcgattattatttacctgatgttacaagaaatatttaacacgtctttgtttacctgatgttataatttcttttgcactattgcgtcatggcgggtcacggcagccatggcagacatctat

SEQ ID NO: 236142 - DNA, 413 bp, Glycine max
  unsure (1)..(413): unsure at all n locations
gggcgatggtgcacaacaagttttccacatccacaaagcgcgcataaacccaccatcccctgttgcccacctccaactgagctcacgtactcccacgtagcccatatcctcgtttctctcaacaccgggtccccatcaatcctcccaagcttccccaacatcaaagtaatacaaaattcaaacagcacaagctatcacagccaagcaaaacagggcaaaggcagaaaactctacccaaaacaccaaccaaaaccatagcttttcttacttaaagaccccagtaacaattccttcgttccatattgttaaccgttggatcgactcgaanattntactggaagtctctagtacttaagcctacattgtgacgcgtgggatctactagcanacatccagaactcattctgtactac

SEQ ID NO: 236143 - DNA, 457 bp, Glycine max
  unsure (1)..(457): unsure at all n locations
ttgactcgagttatcaagagaagatgaaatgagttttggcataaataaccaaggatctatcatctatgcttcaatattttctttcatctccttcaacagattttttcttattcatcttctcttcatctttctaaaagtctttgttcaatactttctctttcaagaaaagctctttgataaaaaacttgcgctattcatctttttcattctcttctccctttgccaaaacaatgaaggactaaccgcctaaattcttttatgtctctcttctcccttacaaaagattcaaaggactaaccgcctgacaattattttgatttttcccttcccattaagcaaaagatctcaaaggactaaccgcctgagatatctnttgtttcccctaccaagattcaaaggactaaccgtctgagaactctttgtctcaacacattggagggtacatcctttgttgtac

SEQ ID NO: 236144 - DNA, 402 bp, Glycine max
tcgcctaccttattggtgatgtgtttaattgtgtagcaacatgacattctctgtgagctctatgccatcatctggcgttcgcctctctgactgaccctggacctatatcctatgccctaagtactgaggactggctcattgccatgcgagatgcacttagccagtttcaagaaaacgttgtgtggtaattagctgaacctcctgaccattatactgtcttttgaacataacgggatttgagaatagatataaatgaacatggtttaattattagacatttagccatctctgcatcaaaagggtattatcatcaatgctgactcgtctatgaagaaacatatgctcctgttgctcgattacaagccattagaatgctctcggcatagagcatccataatggat

SEQ ID NO: 236145 - DNA, 410 bp, Glycine max
  unsure (1)..(410): unsure at all n locations
agcttagatatttataatacagagatgaagtttgtagtttaaaagccacggatgttataaaaagatttaaatagtgtaacaatgatatagaaaaatttaagattactcctaatcttaacaatgatatatgtacaagggaaagggagagtgtgtactcttatgtgtataataaattttatatgacctttatgagtttatgtttctaagtgcgagaatatcaacattcacaaatgaatttggatcctttcctgcttacggtaaacatgagaggtcctgtttaataaattttaaacaactattatgcttaaaacttaatctattgntacaataaaaaaaactaactttaattaactggacactcatttctcctattaacnnagtaaaggaattggagacaacaaaacattcac

SEQ ID NO: 236146 - DNA, 466 bp, Glycine max
  unsure (1)..(466): unsure at all n locations
cttgtgaacctcatacatgttcaaatccttcaatctcactatatcttgcaaaannngggtatttgctgaccagtaaaagcatccataactggattggaaatgatccatcaaaagcaatgaaggatacaccaacacgtaccacaaagcatggttgacaaagcaaaacgctattgaaaacatctacgacaactaggaaagatcgtaccacgatatatcgagattattgcaagctatggaacgatttcttcttgatgtggtaatggaaaaggattaaacattgccaatgccaccacaaggatgtcaaccatagagggttttgtcgtgttccattgccttttttaggagcttcagattgtgtatcgatgaagtntaatattgcaagcccatagnttaagtcaatggaacatagttgtacggtaagtacaaagagacctttcttgttgacaatatacaagatgacaaccat

SEQ ID NO: 236147 - DNA, 475 bp, Glycine max
  unsure (1)..(475): unsure at all n locations
ataaaataccttattaatnctagccaaaaggagtagcttttcgatttgtaaggaaaacccattntcccatagggttgccactgaatcatcaatttatcataggagtaatagtaacacattttttttagggaaaatagttcttaattcctgtaatttcagtaaaaattgatattattattagtctttgtattctaattttggataatttaatctctgaattttacaaaaaaaaaaaaaaaacagtaattttcgttcatcctcacagtgaaaattgtctgctatgagaaacaaaacactatttttttttcctgaagtttaaggaccacaggaatcaaagttaaagttccaggactaaaaccacatattgtattataatttatctatatatattaaaggtctagaatatatattcttattaaaatactatttttttataatgaatacagagccatcttaatcttgcctattcataaat

SEQ ID NO: 236148 - DNA, 414 bp, Glycine max
  unsure (1)..(414): unsure at all n locations
gagtcaagcgtttggagatacaatacttacagcggatttgatatgaacacttatcaagacatggactataatccagacaaagattcctctcagttcactgattttcagattgcaaattttcattctcatcatcacattctcagctactgttattctaatcaactaactaaaagctctagctaccgggactgattgttaaaggtattagtcatgtccaactactgctattctgcttccttgtacatttttgctcgggtgtggccgctgcatgattaatatcagaatgctactcttttcttcttcttttgtgaatgagaatatagccatagagactntcatcttcccaaaagccatgaaatggaaatcaaaagtttcgaaataaggtaattatttaaagtatattcttataatttg

SEQ ID NO: 236149 - DNA, 508 bp, Glycine max
  unsure (1)..(508): unsure at all n locations
cggtcnattgaaccatctgcactcgggatccggaatactataagcgcctgcggcttcagccaatggcttgcctgaccaatttctatttatgacctttgaaccttgatatcctttccttggtttgaagctcactacaagccttaagtggacaaccatgatattaccatattcttgaggaatttttgagctttgcaaatggtctgcgaataagtgcggggggttatatgttcattggacaacttgttttgttggctatgcatcatgatgtatttcgggccattcttgatggacattgtatattaggtaaatgttggacatgctgaaagaaaagctgtttctcacaagctacaacaaaaaaaagacagttcggataaaaattagaataaatactgagcagcccttccgttgcgtgaatggaatcctaaatggctcaacaacgacgaaactcttaggtcttcctctcaagaaaagatctgatctgtactaagtctattgtcatatttggacg

SEQ ID NO: 236150 - DNA, 458 bp, Glycine max
  unsure (1)..(458): unsure at all n locations
agctgntgcctcanaacacattgnttcccacatcctatgctctagtaatcgattaccagacagtttaatcgattaccagaagacaattttaaaaatcagattttaaaaaaggttttgaattagaatttcgaatcatgtaatcgattactagatgtttgtaatcgattaccagcaacgacacttcagaaaaaactttgaaaagtcatgacccttcaaaatataactgtgtaatcgattaccagtgaagaattttagaaaaagctttttgaaaagacacatatcttcaaacaattttcaaaaggcacaaagggcctatatatgtgtgtctgcattgtaaaatcaagagagagatattctaagagaacttaattgccaagtgctctctcaacaacttttgggaaaaacacttccaaatctattgagaattcatccaggaacttcaaantgtattatcatct

SEQ ID NO: 236151 - DNA, 273 bp, Glycine max
gatcgaagaacgatgaagaacgaatgaagaacgtcgaagaacgggtgaaacctttgcgaaattcttcacggaaaacgttacggaaacgtttcggaagcgcctcggcttagattttcttcacggaaacgaattttccaagccaatttcaaagagagagaagtgccaaaggggctgaaccccttccttcttcacttcctcccctatttatagcaaaataggggagggtggtgccgcccagctcgcccaggcgagctcagctcgcccaggtgagcc

SEQ ID NO: 236152 - DNA, 444 bp, Glycine max
  unsure (1)..(444): unsure at all n locations
agcttattatccaagatcgctaagaagaagatcaaggaggctggcagcgtcgttgttctcaatgcttgaatttgatggtgtcgcttttttgaatgatttaggttttttttattttgttccaatatgtctccttttggatgacattgttgttgttcaatctatgctatatttcatgatttaatttacggttttattattttaatttatgcattttagaattttgcttatttatgttgaatttaatcacgtttaactatgatagcttgatgatgttaaaatctatcgaaattgttaaaattgtgcttgttagctnttgtattgttggacatatgacatttgaaattaggttttatgctatggattgaacttcacctaggagtnttgttctttttgtgtgattcattntacattcggtaaatgacaatgaanacaagtgattagagt

SEQ ID NO: 236153 - DNA, 470 bp, Glycine max
ttaagtcacctgcggcatgcaagcttcttagtttcgtacttggtgacttggcaatcaacgcattgagcaacaaagcgagagacgtcatcttgaaggccgggccaataaaaattggtcatgagacgagccacggtcttggcgacgccggcgtggccaccggtgggggtggcatgatactctgtcagcagggtggtgatgatgggtatatcggaaggcaaccagatacggcctttatacaacagcagtttgtcagcaatggagaactcacggtggtggtcgggatgattctgaacatcaagcatcttttgctgaaaggtcgaattcgtgcgtgactggtcatggagctcatctaaaaaagtgagacaagggacggagagaatgagaaaggcttgagaagctcctttcggtaacctagataaggcatctgctgcctgattatggctccctgagcgatactggatatgataatc

SEQ ID NO: 236154 - DNA, 412 bp, Glycine max
agctagaagccattgtctccacaccgcatctaatgatgaagttccctaccttgataggagagactgtgactgtcaaattagatcaaaagcaagcacgacaatgctacacaaaaagcttaaaggtggcaccttatcctcccaccaaggagcctaccaaacctcaccccacaacgaatggtaccactcaagtcatgagcatggacgaaggatctccagtccaagccttgactatcttccaagtaagcctggatgatgaattcgatgtagatccgcgtgatgacacttttgacagagtcccaaagcctattgaaagcttgtcaagctacagcttaaatccaatcttgagcaatctatgcaactcagtagggacctcaccaaccataagcacagacacatagttgatgtcctacac

SEQ ID NO: 236155 - DNA, 347 bp, Glycine max
agcttctcaagaaggtgagcttagttatgagaggtgtgtgtgtagctaagctctagcttctcaaggaagttttctcaaagaagcttctcaaggaagttttctcaagaaagcttttgaacgaagctacctagtctataaatagaagcatgtgtaacacttgttgcaactttgatgaatgaaagtcttatgagacacacttcaaagctccacttctatccctcttttattccttcaatttcgtgctccccccttctctctttcttttcctccattaaagcatgctcttcaagcttcttatccaaggcaattcttggtggtgaagctccttcttccttggcttatgccct

SEQ ID NO: 236156 - DNA, 338 bp, Glycine max
  unsure (1)..(338): unsure at all n locations
agcttgaaattgaacaatggaagatcttgagatattcaatcggtcttaacttttcactcggaagtccgattcaggcgcataatatattgagacgctctcgtgaaattcacatggtcataacttttcactcagaggtccgattcaggcgcataatatatcgagatgcacataattgaacaacggaagctctcgagaaattcatatggtcataccttttaactcggagttctgatctangcgcataatacattgagacgctcgaaattgaacaatggaagctctcgagatttcaaatggtctaactctaactcggaggtccaatcaggcgcaaatatatc

SEQ ID NO: 236157 - DNA, 343 bp, Glycine max
agcttgatgatgatgaacctagcaattgtgacgatgcctttagaccacgtgattgattccagacttcacgatcaagcgtcatgaatctaatccaagattcaagattcttgagacgaaatcaataagctccttgtgaagacttcctataaggatggagattaatagatttctttctaaacaagctcgcacatgagtgttatacaaaccaattttctcaaattctttaagctaccagagtgattactctctggtaatggactacctgttatcagtaagcgattaccagttgtcataccctaatttcgtgcggcgacctgtgctcgatgacatgcgaccattcttt

SEQ ID NO: 236158 - DNA, 426 bp, Glycine max
agcttcctccttattttcaacttgttcttttctgttgctgcgctcctccacctaccacaatatatagcatatataattagctacaaaacattcttcatccccgttaatcacatttctcaaattgaaacaaacgattaggacttcagataaaaaaaaatagaaatagaagatggacaactaatctgtatgagagaacatgtgaagtcactagtgatgtgcataagtgaattcaagaatcaacaagtagcaagattcaagacatttgagtctttaagctctttctccccataataacctaaacgagattttaaattgttatcgtggttgcaattttgttacaattctcgatattgtgaaaagaaattgtagatgcgtctttaataaccataatggtacagacgaaatcgtagttatgaaccgtattga

SEQ ID NO: 236159 - DNA, 405 bp, Glycine max
  unsure (1)..(405): unsure at all n locations
agcttgccgcccagctcgcccatgcgagtaatgttgcttcctccagaagcaacagccttctggagggcccaagtgggcctgtgttctatttacaccccctttttactaaatgcaccccccttttctattntttttgtaattctttttccgtaacattacgaaactttatgaatttcgtaacgatacttattttccttccgcaagggtacgaatccttacggattatgtatttactctcttttggctttcaaagaagttacggaaactcacggattgcgcaaaaacacctcttttcgatttccgccacattacggaatttcacggattacgcaagcctgctctcttttggattgttgagacgtctcgggacttcatttattgcatgtcatcaagtaataatccccg

SEQ ID NO: 236160 - DNA, 448 bp, Glycine max
  unsure (1)..(448): unsure at all n locations
agcttctcagatccggtcatggaaagacttggctactgccttcattangcagtaccaatacaacacggatatggctcctgatcggaaccagcttcagagtatgaccaagcgagaacatgagtccattaaagaatatgcccaaaggtggagagatctcgcagcccaagtcgtcccgcccatgactgagagggagatgatcacaattatggtagatacgttgcctacgttctactatgagaagctgataggatacatgccagctaactttgcagacctcgtcttcgccggagaaagaatcgagtccggactgagaaaagggcaatttgaatatgcctccaacgttgcccccaacaacaacagaagagccccagtggtgggcgcgaggaaaaaagaaggagatacccacgcggtcaccaccgccccaacatggatgaaagcgccccaaatg

SEQ ID NO: 236161 - DNA, 438 bp, Glycine max
  unsure (1)..(438): unsure at all n locations
agctngaagagtttatagccatccagatccgaacagattgttagcattcctctattgatttggttttttttactagccttgtatttttcacttgtgtcaaagggaatttgttattctccaaacctttttataacttcttctcttgatgaaactattcttttaaaacgctcagacaaacccaaaagagaaagaaaaaggtttccactttaaagaaaaaatttacagacaataatttaatcagacaaacctttttcaaaagggctttcacgcgatcatatgcttctctaaggagtttcacaacctgcagaataggtagaggtgtatgacttttatttttgataaaacatttcttagaagaggaagcaaataatggaaacatgatattcttagttaaagtatataaattcacaacacttgcctctgcatcaatacgtgact

SEQ ID NO: 236162 - DNA, 418 bp, Glycine max
  unsure (1)..(418): unsure at all n locations
agcttaacctacttaggtttctatgttgaaggattgtggttctatcttntctagagattagattggattaaataaatttttaaggggttgaataaatatctactctaattaattttgattaacatttacagttaaagttaaccattcacattatagtttaacgattaaaatttcaacaattttgtaatttcctttacatattaaagtattttataatgattttagttattagttcttaatgttattaaaaagtcaaaatatcatttgattgcaaacttgtaaactaaatctaaattttcttaaaaaatggacctgacagcgggaggggatttataaccatacatctaatttattctctgttcaatgtagaaaatgcattttgattagattgcgcttcaatagtgtataactaaaaaat

SEQ ID NO: 236163 - DNA, 444 bp, Glycine max
  unsure (1)..(444): unsure at all n locations
agcttgaatatgcctttgatgaagtcatgaatctttacctttggttgttctttcgacgaccttgttaattaataggaaacacttttttgcaacccaacaaaagaacttatcttcgactttgaatggagcaattcttgccattgcttgatcacctttacttgcaaagctagcatagattccataggatgactaattagcttctaccatttcaagttttccatcttcattccaaatgaaaagcttctgatgaaatgttgatggaactgctcctactccatgtatccattctcttcccagtaacatgttgaagttagcttgcaaggaaatcactanaagagttgtaagtcttgatggaaggttgcttgtgcggcttctatggaggctggatctttgagcttcaatgaggtcctttaatggtgattntcaccatggagatgtagcgga

SEQ ID NO: 236164 - DNA, 465 bp, Glycine max
  unsure (1)..(465): unsure at all n locations
agcttcagaccaaagcaactcaaaatctaggcatctaaaaccctctaatttagtggattttcaaggtttgagaagtgaaaatgagaatggggtaaatttggagcaaactctcacctcaaacaaatctatatcatcaatctaaacttgctcaaactggttttacgacaaaaactctaccgaatcaaaatttgactcctcaacacccaattntaccctaaaaatggctcttgccttcactttggtcatatgtttttctctcttgcacagcccaagctttctcatatgtcctagatgacatttcaaactaaggtttactcactttaacctccatttaccactgaatcccgttttagccttccaactctcaaagccttacttcttttctactcgtaacactacattctcactttctatccctaggttaactctaccctctcatcctagcaattnctcatcagcaatttc

SEQ ID NO: 236165 - DNA, 452 bp, Glycine max
agcttcaccttccatggcttattccctagtggattgtgcctcctctcacctcttctcctttatcttccactgcatctccatggtggaaaattaccactaaaggacctcagtgaagctcaaagatccagcctccatagaagcttctcaagcaagcttccatcatgatgagaaaaaagatgacagagaaagctaagagaatacttaataaaaccattaaaatgagaagttggtagaaacacttggtttatactgattcactcaaatagagctacgtctagttctcttttatagaagagtaaagggttccattaatctaaaaatttgattaccaaacaagtattctatcctttcactcctggctatacaagtattcttctagccacttttggcactaccttagagttcccctgaatctaagaacacctaagtatattttaacaataagccacttc

SEQ ID NO: 236166 - DNA, 416 bp, Glycine max
  unsure (1)..(416): unsure at all n locations
agcttntagtatgtttaagaatttatttcaagacttttgttaaagctatatctganaataataaatcactttgtgtaattaacatgaaaaatgtatcgatatggtcaaagtgaataattacatctttaaagatgcgtctttcactttaaaacgattgaaccctttctttctttctttcttttttgtgaaagatgacagattcaacggccgacacaatagacataaactttagaacaattatataatgatgattgttttggatatatcaagctcaaacaatttgtagtggctcttcttttatagaagacccttcccaaagagaaacaaaggatctacatatgtcatagntaagttggagaagaagattactttcccaaattgggggtaaagatctagtatatgtgaccgacactatg

SEQ ID NO: 236167 - DNA, 339 bp, Glycine max
agtcctctcaaggcgaggacgtgtagttctctgtcggtgagggtaactagtacccaaggtgagggcgtgtagccctctcaaggcgaggacatgtagtcctctggaggtaagggcgtgcagccctctgatggtgaggacgtgtagtcctctcaaggcgaggacgtgtagtcctatgacggtgagggtaactagtacccaaggtgagggcgtgtagccctctcaaggcgaggacatgtagtcctctggaggtgagggcatgcagccctctgatggtgaggacgtgtattcctctcaaggcgaggacgtgtagtcctctcaacggagatggtaaatattacc

SEQ ID NO: 236168 - DNA, 421 bp, Glycine max
  unsure (1)..(421): unsure at all n locations
agctnggccaattggaagaattgcaaaattntgtctttatatgtcaaatctgcatttcttaatggccctttagatgaagaagtttatattcagcaactccccggatatgaagtcataggcagtgaagacaaggtgtacatacttagaaaggctctatatggactaaaataggctccaagggcctggaataaaagaatagactcctttctacatggtgaagactttaaaaaatatattgtagagcatggtatctatgtgaaggcaactaaggatggtggagtcctgctaatatgcctatatgtggatgatttgctgattatagggagtaatccagctgagatagaaaagttgaagggcaatctcaaatctgaattcgagatgtcagaattaggcttgctatcatacttccttggtattgagt

SEQ ID NO: 236169 - DNA, 446 bp, Glycine max
  unsure (1)..(446): unsure at all n locations
agcttgagccaaaatcctgactcactataaactcttgacccagggtgagaatgccaatccttaccctcggaagcaaaaaaagaatagaggggaaatttccgatcaaagaaaaagagaaggaaaatttccaatgaaagcaaaaaagaaatgaaggaaaattccccaatcaaagagtgggagaaagcaaaaaaaggaaaagaaggaaaattccccaatcaaagagtgggagaaagcaaaaagaaaagaaaggaaaattcccaatcaaagaatgggagaaagtaaaaaaggaagaagaagaaggaaagaaagctcctgatcaaggatcgaaagaaaccagaagaaatgtgcagagaggtctttggaccagacaatatctgaacagtacagaattgtcccaaatgaacgananaagaaggaaagggaaccacgacctaaaatagtcttct

SEQ ID NO: 236170 - DNA, 421 bp, Glycine max
agcttgtgctattccaagttcattaatcatacctttaagccagaatgcttccttcactccttcagctagggccatgtactctgcttcagttgttgaaagagcaacaactgattgttgatttgctttccaactgattgttgtaccaaacaaagtaaacacatatcctgttaaagatttccttgtgtctacatttcctgcaaaatctgcatctacataacctgtgattgctgcctcatatgctgtcttcttgtaccttaatccaactttcgaagatccatttagataccttagtgtccacttcacaacttcccaatgtgcactgccaggatctcccatgaatctgcttataatacttacagcatgagctaagtcaggtctgctacaaaccattccatacattatgcttcaacaccactggcat

SEQ ID NO: 236171 - DNA, 300 bp, Glycine max
  unsure (1)..(300): unsure at all n locations
agctntagtctttagccttcaattatataaaagttccaagtaggacaaagtaaaaacaattaaatgaaaaagaaaaagggttaaacaaaaaatattagtccttaatgtcttgttgtaagaacatacttaacgtgggtcgtggcttgtggctcgtcttgactcttgagagaaagggctctgagagagaagggttcaaagaggcagcggcgatggagagatctggcaatggattgcacagtggcatggttgtcataagagagggcgatggcgaactggtggagctagagggggggggggtct

SEQ ID NO: 236172 - DNA, 458 bp, Glycine max
  unsure (1)..(458): unsure at all n locations
agctnggcagctgacattggctttttggaatcattcgcagacatgtcttctgaacctgaaaccagcatctcaggcttgatggtggttgagccgtccatggattgactatgctggtgtctaactctgggcctttcattagtcccaataacaacattctcggtagaagaggtgggtgcccctgacgccggtgttgaagccgatgctcccacagcattagacggctcaaccatttgaaacgtggacgttgccgacgatgaattgaacttatccatatcaaggtacatggacagcaagtcctcctcggcatcatcggagaaggaaggaccatcaccacctccaacaacaccaaggtcactgtcgaaactaatatcatccggtaaagtgagaatctccgaatgagcacgcctatgacctctatttctcggnggattatcaggcattctgctaatatcatgact

SEQ ID NO: 236173 - DNA, 340 bp, Glycine max
atcacccttaacccatgcgctatctccttcccacgacacggtgctactccttgcttatactgcgatccactgttcttgatatttcttctggcgaacggcagctctacaattaatctatttgtcccatccattatgatccacccattattctcactaggtgcaagtattccgcttagcgccaatgtcagcaaatgtcaatacttttcacgaattcatcattttattattctatttttttcaagctacagagtccgaatctcttctgtttgggtttaaagactcaagcttttataaaggatatttggcgactgtgtatgcattatccaattctcattttctc

SEQ ID NO: 236174 - DNA, 389 bp, Glycine max
  unsure (1)..(389): unsure at all n locations
agaatcaatatagataatattatgaagtggaaaaagatccatcattagtcataaccaaccaaaatcataaataagtcataaccaaaaatataactccaaaccagtcataaattcacaaagacaccattaaaaatccaagtcattaaaagactaaaagtccaacataccanaaagataaataaagtgcagaanatgataacttaaataccatagccaaaatacacggctctaaaaagaaaatataaactaaactctaagaaggtggaggtggtggtggaagatcgaagctctggcgaatataacccacatcttcttcaagctgtgtgagacagatantcattctggcaaagcgaatatccaatgaatcanaacgttctccaacataagta

SEQ ID NO: 236175 - DNA, 451 bp, Glycine max
  unsure (1)..(451): unsure at all n locations
agcttgttcgcatatcgttcgcatgtatgatatctactctatcaaggttgaagtagaggagaccttcaatcctatcacgcaacgtggcagacaaaagtgggcagttaacttgaatgaccattattgtcaatgcggaaagtattctgcgcttcactatccatgttcacacattattgcagcttgtggttacgtgagcatgaactactaccaatatatagatgttgtttacacaaatgagcacatcttaaaagctntctccgcacaatggtggcctcttgggaatgaagcggcaattcctccttctgatgacgcatggacacttgtccctgacccaactacaattcgtgcgaaaggtcggccaaaatcaacaaggataagaaatgagatagattggctcgaaccatctgagcaccgacaaaaatgtagtagatgtggaacagaacggcacaac

SEQ ID NO: 236176 - DNA, 353 bp, Glycine max
  unsure (1)..(353): unsure at all n locations
ggatcttaagtcacctgaggcatgcaagctntgagctttgagcacccacaagactntcagtaccctagtaccaacagtgtatgtagggttctgttcgagccacacttcgaagagcagtgtagggggttctgtgggtttgagcacccacaagacttttagcaccctagtaccaatagtgtatgtaaggttctgttcgagccacacttcgaagagcagtgtagggggttctgtgggttcgactgaggggtttccggcactattgaaaacaatgtggaaggaggagggcaaggttttctagggcgcgggttgtaaatgtgaagtttaacttataacataacacatccgtttctaag

SEQ ID NO: 236177 - DNA, 517 bp, Glycine max
  unsure (1)..(517): unsure at all n locations
attggtttcgtgaccctgcaggacccgngatactctacaggcgacctgcnagctgcaagcttanatggccgaaagggacaagtcttgggtggaatgcatggctatcaaggaccaaatgaaggcttgtcaaaggtcgaagagaagtttgaccgatcactttagtagaacaaaagaatatatgttcacattcattgaccagcataatgagaaggtagacctagctgctgaccatgggccaagactagaagacgatcatgcgacagtatcggctctaccaatggaatgggacgcaggagagagagtgattgaataattgctctgcgaggcgatgaactggatggatagattctctctcactctgattgggagtgaagagctttcaacgctgttagccacagccaaggcaatggcggatgtatactcatctcgccgatgaaagtcatgggctttttgatcatctccgacacatgatcgaggtgatgtcccacatgcatatgaaccactgatgcgtttgacg

SEQ ID NO: 236178 - DNA, 205 bp, Glycine max
cttctaatattcctaggatcaatctgatgttgcgacttggaatcttgaagtattgtcttgaattttaatcttgaaaagcccatttgcatcaattgcaacacatcatcatgatcatcatcaaaacatcaaagcccattgcatctacacatgtgttctccaccttcgagattggagctatgtctcacgattgcctaagtgcggaccc

SEQ ID NO: 236179 - DNA, 403 bp, Glycine max
agcttttgagtgaaaggatgtgactcttcacctttaaatttgaatttcgacgttcaaggacactggtaatcgattaccaaaacattgtaatcgattacagccttttgaaaatatttggaatgttgtaaattcagtttgaaaacatttccaaacttatttcgctactggtaatcgattacaacaatatggtaatcgattaccagagagtaaaaactctggtaaatgttttgtcaaaaactcatgtgctattcaaagttttgaaaaactttttaagacttatcttgattgagtcttttcttcattcttgaatcttgagtcttgaatcttgatcttgattcttgagatcttgaatcttgattcttggttgtaggctttcttcatgagtcttgaattcttcttattc

SEQ ID NO: 236180 - DNA, 386 bp, Glycine max
  unsure (1)..(386): unsure at all n locations
agcttcattaagaggcttcctctagaatcttcctcgtggcttctttgagaagctagatccttatctattcacacccctctattaactaaattaacctccttaaaaataattacggatgaaaataacgcagcaaataatcaaacatcaaacataattactaataatatatatatatatatatatcagggtgttacaccacctattttagggacttggtgcctaataatacctattttgggcaccaacaaagcacaaggatttaagctcttgcgaaacanaccctcatccaacaacttctttacttgaggaataaaatcaagcccaagaggcgtgacaatgctagcaagtgtctttttacaaaagagaaaatgtggaggttgtctaag

SEQ ID NO: 236181 - DNA, 299 bp, Glycine max
aattaatactattaagttctcgttgggcagacaaataaaatagatggcacaacataaatctgttacgcgtgtacgatacaatcgtgacataatcgacaacacataacgacatgcatgcgtattaaagtttgagcacgacaccacattgactgacttgactacacattcgttaggaatcatatacacgaaacatgttcacgcgtgtctatcttgttgtataaaagtgaggcatcttctgtgagaccatgttgtatctgagaccgactaatagtccacatatcttgcttcacatagtctcc

SEQ ID NO: 236182 - DNA, 330 bp, Glycine max
  unsure (1)..(330): unsure at all n locations
acaatgatggaggccatgatgagcatgaagaagataatggaagccaatgcggttacaattgccgctaccagcactgttgctaaggtgaacccgatgcccccatctggcctcaaccaaatgaatcatccaaccttagctatggtaggcaaaagattgggaagtatgaatggccccatgatgtgcaaattcaaaacgagcacgccttcccgccatatggcttgcctcccaacttacaccagccaatgtggcgtacacttccaatgagaatgcaataactccactcctatacttatngagagccaacaacctcaatctgatcatgcacatgtc

SEQ ID NO: 236183 - DNA, 393 bp, Glycine max
agcttgaagttcaaccttgacaactatgaggcattaaatatatacaactataaaagaaatagatgaaaatatcaaacaataatattacacaacctaaaagtcataacctatgtttacactgaattcaaatagactcttgagtgttagggtcagacatataataaacagagaaaatttctacgccaaaacgacgatatataaaaactattcatatctcttcacttactaacaataacatttttccgaggttgcaatttgttcctataaaaaatggactcaaaccctacctaagttttgccttcatcaaagacatattgtaggtaatttacatagcaggggatttcattcactgcttctaaggatggggtggtctaatatgaagcaatcaagaaa

SEQ ID NO: 236184 - DNA, 417 bp, Glycine max
  unsure (1)..(417): unsure at all n locations
agcttgttgacacgcggagatttacgtcatcttctacgctttcaagatctgncatactcaaatttgagtcacgctgacgggcggaaatacccgagtggttatccgtataaacattcttttttgctgtctgtaagacgaaaagcctgatagcaagcagagactaacgtcgttttctgcgcccttcgtcaatcgcggccgacaagtcccgttgacacgcggagatttacgtcatcttccgcgcacacaagatctgtcatactgacatttgagtcacgttgacgggcggaaatacccaagtggttatcgcataaactttctttttgctgctgtaagacaaaagcctgatagcacgcagagactaacgcgtcttctgtgccttcgcaatcgcggccgacagcccattgacaccggagatta

SEQ ID NO: 236185 - DNA, 229 bp, Glycine max
tgctctttaccaagtctggatcttctttgtatatgcatttgatgattggcctaactgcaaatcctaatgtgcacagaccatgcaatattggccgcgagaatctttggaacaacgttaaatttaaattaactatccgaacaatgaattcatccatatgatagaaaatgaccccaaaagaatggtcacatacaaactgatggcgtttatcttaaatggacataccactatg

SEQ ID NO: 236186 - DNA, 457 bp, Glycine max
  unsure (1)..(457): unsure at all n locations
agcttgtgctccaggaaaccactttttatgatgatcaaatgaangcaaattttctgtcactaatgcatcaccaattgaaaaatttgaatcactaaaactccaagcaagaatcttagcactgtctattatcctccctgttgaataattatttgatatcagtagtgatgtttttgttcttcaactgggtgttgacatcagccacaaacagttcacttttcctggttcctgatgctgtagtagtcttcgtattgtgaaatttgaaattaatattgttgcaaaggcagaacaatggaaatttcaaaatatgaaagtgcgaactcacatgtggaaatctatcaatgaattttgctgcattagcaacttcagtggcagctctgatttcttcatttgttgccccatccttaccataggcaatgttttctttgatgctgcaactgaagagtattggttcctgact

SEQ ID NO: 236187 - DNA, 272 bp, Glycine max
gactcacaccaaacatgtatgtgtagtatgctttcaacaaattccttcataaataattaccataatgcataaacctagtaaaattacccatcatatctcccaaaacccagtacccacgaaaatttatgtgagaagaagtctacccaaacctgaaatttgaagtcccacaatgtagaggtgcgcttcacgactccaaaaatggcttcctttcgcgatttggagcagaaatggtgagcaaaggttggagctttgatggagcttcaatggtggag

SEQ ID NO: 236188 - DNA, 338 bp, Glycine max
  unsure (1)..(338): unsure at all n locations
agctntgagcaaattcaaacgacaatttctntttattctgatgtccaattgtgtcccataggttatcaagacgctcggaattgaaaacggaagctcttagaaaaatcaaacgacaataatttttaactcggatgtgcgattgagtcccataatatatcgagacgctcataattgaaaactaaagctctgagcaaattcaaacgacaataacttttgactcgaatgtccgattgtgtcctataggatatcgagacgctcgtaattgagaacggaagctctgagaaaaatcaaacgacaataactcttaacttggatgttcgatggagccctgtaatata

SEQ ID NO: 236189 - DNA, 453 bp, Glycine max
  unsure (1)..(453): unsure at all n locations
agctntcaccccataattccnccaaatttgggctaattttctttgaaccaaaatttccttttatgaatgatgctctcctacaacctaagacaagttagaaggagataaactgtacaggctcaaggttcaatcatacaagggataaatcaatcatgcagaaggtaagctttttcgctaaatggctatcttcaatcaaaacacggccttcatcctcttcaaactcatgtattcattccatactcatagattcatgcagaaaccattacttactgctagtcgttctctcgcaattaaagatcacactccaccgggttgcggctaatgcattccttcacaatcaacctgacaaaccaactaacattntcagtcataatccaaattccatattctttctcttctaataactgcatgctcattcaaggcttatgatctgcgcatttcagttcactcaca

SEQ ID NO: 236190 - DNA, 407 bp, Glycine max
  unsure (1)..(407): unsure at all n locations
agctngcaccaacattcagtagttcaatacactcttaacaaatagtcatcatccatccacaattccaatcattcatgcttaatatgatgcatgcacctgacctcaactctcatatgcaatgtggtaccatccccaaggaagtagcctaagcgtgtccacatgacactctcacttaggaaaactaggaagtaagtgtcgaggtcaccctatcgtggacaggaaactctcccccccacatggtgatcagcctgagtctcaagggagttccaaaccgagtgatatgccccctagtacaagtattcctcctcacaagaaactataattacttactaacaaagtttatactatctccatgtcatatgaagtatgaaacacgggcaccatcaaatgcactaaacgtggataat

SEQ ID NO: 236191 - DNA, 427 bp, Glycine max
agcttgaacaatagttgttaactcaacttatagaacactgctaacccctagattattagaaaaaccctaatccagttcccttggtcatctctaagaacaccaccaccagttgctaaatggccatcattcttcactgaaccatctacactaaatttgcaaaaaccttcatgtggtctttaaaaaacctaatattctactctttaagattaaaaaagatcagctcttgaaatctacatcaatatgatccatattgcaaaccttgattgtattccaaacctctgtagcaaaaaaaaaatctctaaaaagatgcacatttgtttcctgttgattaccataaatagcacaaacatcattatttgaaaagccataatcatatctgttgatgttagtctttaaacctccattaataagagaccaaaagaacata

SEQ ID NO: 236192 - DNA, 451 bp, Glycine max
agcttgccacccagctcgcccaggcgagctatgttgtttcctccagaagcaaccgccttctggaggaattttctggaaggcccaagtgggtctggttgctatttgcacccccatttttactaaatacacccccttgctctattttggtgattctttttccataacgttacgaaactttacgaattttgtaacgatacttgttttctttccgtaatgttacgaaaccttatggattacgtaatcatccccttttttgccttccagaacgttacagaactttacggattgcgcactaacacttccttttaatttctggcaagtcacggaacttcacggattgtgctacaatgctttcttttgacttccggcatatcacaaaacttcaagaattgcctaacgatgggtgccaagtacctcgaagtggcaaacgagggtcgcatctacaacggat

SEQ ID NO: 236193 - DNA, 413 bp, Glycine max
  unsure (1)..(413): unsure at all n locations
agctnttcgattcattctatgtacccgtagtgtttcacattgtgtttcgggcattnttattctcgttntgtttactttttataccccctgttgacatgcttaagccattttgcttaagtcatttctcgcttaacttaaaaataaaataaatttccaccgaacgtttgaattatattatccgttaacttcggttaaaatcaattccgaccgttcggtcatgccgtaaccacgttggaaatcaaaaagaggtaaaaaataatataataatcaaaaaatatctttttagtgaaataaagcggaaaatcaatcggacgttttctctttgggatttctcattcttaatcgaattgattaataactaaagtgaaactaaggctaaaatcaactcgcctagtcaagctcgtccacaaaaa

SEQ ID NO: 236194 - DNA, 441 bp, Glycine max
  unsure (1)..(441): unsure at all n locations
agcttggttntcggcaatagcaccccacctgactgtttcaaggtctactgacccccgcgacatatctccaggtaccactctgtggtcaacaaacaaaagtaggaagactgactcttccacgctttctcacatcaagcttgttggattatggggtacccgtcatatgtggtactaggtggtgatcgggcgatggtgcaaatcaactctcccacatccacaaatcaaacatgaacccaccatccccaattgcccaccttcagctgagctcacgtactccgacgtagcccttatcctcgttcctcttagcactgggcccccatcaacccctccaagcttccacaatatccaagcaattcaatttccaaacatcatgaactaccctaaactatgaaaacagagtaaaggtagaaaaatctgcccaaaacacattcacatcttaca

SEQ ID NO: 236195 - DNA, 423 bp, Glycine max
  unsure (1)..(423): unsure at all n locations
agctntcaaccgttcttcgacgctcttcattcgttcttcatcgttcttcgatcttcaacgggtaagtacctcgaaccaagcttttcgattcattctatgcacccgtagtggtccacattgtgttccgtgcatttttattctcgttttgtttactttttataccccctgttgacgtgcttaagccattttacttaagtcatttctcgcttaacttaaaaataaaataagtttccaccgaacatttgaattgcattatccgttaacttcggttaaaatcaattccgaccgttcggtcgtgccgtaaccacgttggaaatcaaaaagaggtagaaaataatataataatcaaaaagacatcttttagtgaaataaagcggaaaatcaatcggaccgtttctctttgggatttctcattcttaatcg

SEQ ID NO: 236196 - DNA, 457 bp, Glycine max
gcttgcacacaagattctccttggctggcacttcataactctttggttgggtcttatagatgtcttcctctaaatccccatgcaagaatgcagttttaacatctagctgctccaagtaaagattctctgcagcaacaatactcaaaataactctgatggtagtcatctttacaactggaaaggagtctctgtgatatcaattccctgtttctactgaaaccctttcaccacaagtctcgccttgtatcttcttctaccgtcagattcttcctttagcctacagacccacctattttgtaacgctttctttccttctggcaatttagttaaagaccacgtcttattcttctgaagggatgtcatcttatctttcatcgctagcttccactcaatagtgtcattcccctgcatagcctcactgaaacattctggctcaccaacatcagttaacaacaaa

SEQ ID NO: 236197 - DNA, 195 bp, Glycine max
  unsure (1)..(195): unsure at all n locations
tctatgccactcctggtactatccttaatcaatgaaactcgctaactaagtacaactaagattcacttaattcactcaagtttctttcatccagtaagactgataccattgcanaaacttgatcgttatgtctcaaattattctcttgttattcaacaacttaacacgaacatcttcaagctttatatagacttc

SEQ ID NO: 236198 - DNA, 361 bp, Glycine max
  unsure (1)..(361): unsure at all n locations
agcttaaacattcaatntcgagcgtctcgatatattacatgactcaatcagacatccgagtaaaaatttattgtcgtttgaattggctcacacgctcaacattcaattttgagcgtctcaatatattacgggactcaatcagacatccgagtaaaaagttattgtcgtttgaataggctcagagctttaacattcaatttcgagcgtctcgatatattacgggactcaatcagacatccgagtaaaaagatattgtcttttgaattggctcagaggttcaacattcaatttcgagcgtctcgatatattacgggactcaatcagacatccgagtaaaaagttattgtcgtttgaattggct

SEQ ID NO: 236199 - DNA, 455 bp, Glycine max
  unsure (1)..(455): unsure at all n locations
agcttattactagcattgtatgtagcacttaaatgtttcttatctctaatttcagntcttgaagtacttcgctagttaacctgacttttcctaattgaacagaattgaaattgctatcctcatatgtttgttaatcacacatcatctgtgaatttgtgacaggttcatacataacaactcatttagcagggaaataccagccggattaatatctaaaaaaatcatttataagtaagtatgcttagcaatggaacaattttcttacatattggtaattatatgcaattaattgctttaaatgctcatcgatttgactaggaaatggaatcagtttgaacataatagaacaaggatattttcaactagtcttgtaccaagatttaagtaacatccatatttaatttctgctctagctaggatggtattcttgaactatacagaggaaacaagaagca

SEQ ID NO: 236200 - DNA, 436 bp, Glycine max
agcttccagcaaggtccttataatcagcaaggtctttgaaggaaacaccccgacaaccagttcaataaagaccagggtggatcctcaaacaagccaattcaacaagggcctaacatctttcagaggacgactaagttggaagagaccttgactcagtttatgcaggtaatgatgtcagatcataatagtattgagtcaacactaaaaaaccttgaggttcaggtgggacaactggccaagcagatagttgacaagtcattcaacagttttggagcaaatacaggcaataatcctaaggaggaatgcaaggctatgatgactaggagtaaaaagtttgtggaagctgaggatgaagagagtgtggtgtacaaggagcaaatgggtgaaaagataggtgctgaggttaaggaaaatgatgtgaagggtaaagagaatc

SEQ ID NO: 236201 - DNA, 454 bp, Glycine max
  unsure (1)..(454): unsure at all n locations
agcttgcttgtggggcttctatggaggctggatctttgagcttcaatgaggtcctttaatggtgattntccaccatggagatgcagcggaagacaaaggagaagaggggagaggaggcgccatccactacggaataagccatggaagaaggagcttcaccaccaagatgagccttggataagaagcttggagaggatgcttcaatggagggaaagaaagagggagagaaagagagaggggggagcatgaaattgaaggaataaaagagggagagaagtggaactttgaagtatgtctcacaagactctcattcatcaaagttacaacaagtgttacacatgcttctatatatagactaggtagcttccttgagaagctttcttgagaaaacttccttgagaagcttctttgagaaaacttccttgagaagctagagcttagctacacacacccc

SEQ ID NO: 236202 - DNA, 496 bp, Glycine max
  unsure (1)..(496): unsure at all n locations
ntgaattcgatgcnatctagtacccgcgatccttagagtcacctgcggcatgcaagcttgagctataagaatacgacaaggatatgttatttatcctcgtccactggcgcatctccaaaccatgtcccttgagcgtgcacaccctgtattggtagataagccattcatgatcatgaggggcgtctccatccataattggaaagctgacaccaagctctctagatgaaagactggcacaatcatgcaatactattagcagctgcagcgtgtcttatgtgtgctattgccatgtaggagaggacatatcgatttatatgttatattaaggtttacgcattgaaaaatgcgagtaactcttagaagcgaacatagcgtcgaaaatgcttcatcgcgaaggatcatgtgacgaggttcacaacactatacattcctactaatcatgcccttcaacgagtntgatcttaatagataacaacacactatgacttatgcgttg

SEQ ID NO: 236203 - DNA, 432 bp, Glycine max
  unsure (1)..(432): unsure at all n locations
agctttacgagcgcaagagcgtctctactgtgatattntatgagacaagggacaagtatgctttgaataagctatattatcttacacaagatggagttagtgaataaatcaacattagcttacaaaagtaaatggtatctttagtgaataatatatttacttgcacaaagtgatttccattgacaaatctaattgcaataagatgagtgagatgcaactggtgtgagactcctaagtggaaagatccaacttggcagcctagataagtggaccgatacaacattatatcaaccagtaataacataacccatgtcgggaatgatcatctacttcacagtaggcattgggccggccacattcaacatacaaagaagttattaatgtcaacaatcgttcttctaagccaaataattgaacatacggagagtatca

SEQ ID NO: 236204 - DNA, 383 bp, Glycine max
  unsure (1)..(383): unsure at all n locations
tgcaagctatcccatgacagctaagtgaccgggatatgtcactccggagacagctccaagaagacttgtgggtagctgcacaacatcatgaatctttgcttcgtcagaagtcgagagcaagatgggtcaaggagggagattctaattcccattattttcatttgctagtaaatgcaagaagaagagataattctctgcaaggtttatggattgatggagcttgggttgaagatccgccaagggtcaaggagacaggaagacaatttttcatctgcagattccaaaaagtggttcacaatagacccctcctagatggngtagaatntcagtcattagatcagtaccacaataacttgctgagtgggagatttacggaggaagag

SEQ ID NO: 236205 - DNA, 406 bp, Glycine max
  unsure (1)..(406): unsure at all n locations
agtcttttacggtgttaagaaactgttgtttgttccctanaggtagagggcatcatctcatcaaccataaagggcattcaattttacctatatatgcgtgtgtttgtgattgaattattgaagggtaacgggtaacattttttaccccatttgattaccaaaggcaacatagccttgatgggtaaacagaataataaaggcacactcatcatacaaattccatttaaaatatgtgtcaatgatagcttgtcaacatttaattaggctggaccaacaactttatttgtttgaggatattggaagggaagaggaaccttacatccacatttggtgtagagagagctcagaccatggccaatgcgggaccagattggtgggtgcattatagcctgtgaaagaatcctat

SEQ ID NO: 236206 - DNA, 424 bp, Glycine max
  unsure (1)..(424): unsure at all n locations
agctntataagcgcaggtttggaagacaaagtttatgtggttgcaatatgcgaagatgatgttccgagtacattggacttggtacgaccatgccctcctgatttccagctgggaaattggcgagtggaggaacgccccggcatttacacaacgagcataatgtaaacctttacaattttaaaagctctatagttgggcctaggctttagagtttttccttttgttaaggctttgtgtcttttgtttttgaatttataatacaaggatctttcttcatctgttcctacgtctctacccattctcattcatttgcatgtttacttctttttctgaaacggcagatccgatgatgagtcccncgaaggtactaatacctgggacccgcctatcaacttcgagcaagaaatgagtcaaacggaagatg

SEQ ID NO: 236207 - DNA, 333 bp, Glycine max
  unsure (1)..(333): unsure at all n locations
atcctctcagtcacctgcggcatgcaagcttggttcgaggtacttacccgttgaagatcgatgaactatgaagaacgaatgaagaacgtcgaagaacggttgaaacctttgcgagattcctcacggaaaacgttacggaaacgtttcggaagcgcctcggcttagattntcttcacggaaacaatttttccaagcaaattcgaaagagagagaagtgcctaaggggctggacccctttcttcttcacttcctcccctatttatagcaaaataggggaggtggttgccgcccagctcgcccaggcgagctcagctcgtccaggcgagcagggtt

SEQ ID NO: 236208 - DNA, 441 bp, Glycine max
  unsure (1)..(441): unsure at all n locations
agcttggttattatttatcctctttgcaggatctctctatctgtgtaactagacatctaaatggctgcgatcaacatatgataatccttagaagattaggccctccgttacagtggaatgttatcgtttcttgatattggaattggagaaaaatatgttgtgcaaccctagtataaattccttaaagaaagtgatttttctcatggtgatgaaatctcattctactacaggtgtcatgaataaatttggaaaagtattattagaagtcaaaaggattgggacgacactgatagtgactaaattaagcttaggttgtttgttttgtttattaacattatcatggtcaatgagtaatcttgctcttttcttctatgcaaacaatctaattattattaatggtacatatatttntatttctgtactatctttcattctaatact

SEQ ID NO: 236209 - DNA, 407 bp, Glycine max
  unsure (1)..(407): unsure at all n locations
agatgatgacaccaagctcgaaagtcaagatcacttcatgataacaaagatgatgacattccagaatgaattcaagaatgagttcacgattgagtcaagaacacttcaaggatcaagaggaaagaatcaagaatcaagatttaagattcaagaataatcaagatcaagattcaagactcacatattcaagaatcaagagaagacttaatcaagataagtattaaaaagtttttcaaaccattgagtagcacaagaagttctcacaaaatcattaccaaagagttttactctctgataatcgattaccagattatagtaatcgattaccagtgggtttaaaatgttaagaatntcaaaattcaaaatgaagagtcacatctgttgagtgactactttcgaacaattca

SEQ ID NO: 236210 - DNA, 459 bp, Glycine max
gcttcctacgtgttaagctataaatagaaacatgtgtaacacttgtcataactttgatgaatgagaaacttgtgagacacacttcaaagttcaacttctctccctcttctccttcaatttccgtgcccccctcttctctctctcattctcttcctccattgaggcttcctctctaagcttcttatccaaagcattctcttggtggtgaagcttctccttccatggcttattctctagtggatggcgcctcctctcacctcttctcctttatcttccgctgcaactccatggctaaaaaatcaccattgaaggaccttatagaagctcaaagatccagcctccatagaaacttctcaagcaagcttccatcataaggcttcttcttaaacgataggagtaacatgatgagtgaagacgaatcttgagtaaggaaaatgcaccataaaagagaagtacaat

SEQ ID NO: 236211 - DNA, 569 bp, Glycine max
  unsure (1)..(569): unsure at all n locations
cgacaacgngacatcacacgcgccacactgccaaccntatgcgaagtccacacgcacgaaacnnnnanccaaccgnncaacagcgcggtttgaaatcgaggccatngcaggaccgcgacncnaanagcgaccggcagcangcnagcnacacacgagacagacccagactataccattattagacagcaaacaaacagaggcgaagcgggaacgcaaacacaaccagagaacacagccgggccctcgcaaacaaagaggagcaacgccctctatggaaccaaccacagggcacaaccgtgactaacacccacaccaaagacacaaaaaagccacacgaacaagcccccatgaaggaaaccacaccacccaagcaagaaaaaaggccgccaggaaacgacagaaaccaccgccagcgcgccaagacaatggagcgaaagacaaccaaaaaacacccaacaggcgaccagaatgaacaacacaacgacgcgaccagaggcggaaccaaaaagaacccaccacaaagaaaaaacgaagaaccgccaaaacacaaaaacacgcgaagaggaacg

SEQ ID NO: 236212 - DNA, 444 bp, Glycine max
  unsure (1)..(444): unsure at all n locations
agctnttcanaaaatatgaacatgactntttgtattaatgagtcggatcgagctaggttttaaataggcgacccgacctactttcacccttaatgataatagataatttataagtgtgattcttgaaacattctagaaaaacatttgtgattttatcaatttccttattttaaacaaatctttttatatataaaagttagggaattattattattattattttaaggctaagttacaattttattttttttagttntatttgggatttttatcttctttttcttccttgcgattttaatacccaaaatttaaaaaataatcattttgatttaatcttcaaccttgtatacatttatttttatttatttnttaactttacattataaaattatttgtaattgttgaaatattattttctaccttaccataatattgacatatcat

SEQ ID NO: 236213 - DNA, 426 bp, Glycine max
  unsure (1)..(426): unsure at all n locations
agctntcggatcaaaccgttgnttgtccttttgtgacaatgctcttcaaaccgctttacatgacaaaagaacgcataaacgttaaatgaatgaacaaataacaagcattttcattgatcacggttcactatctacagccattgactcttgaatatcagagttgaaaatacaaaacatacacatgaaaactcttaaaaccaccattacaccactgccactaaacacttgccatagacagaatgaactgagaaaagagcatgctgtctacatgtaccaaatcactgtcttcatttcatacccccaataaaaaagcgacatgtgagtaaagaaaatttccaactttgaaagagttttattctttataccacgtttcactttcaattgtagagccattgaaggaaggaacaagggttgaaatggagatac

SEQ ID NO: 236214 - DNA, 399 bp, Glycine max
  unsure (1)..(399): unsure at all n locations
gcttccttttagtgcgtcacgtttaataccgttctcatggtggtgcgatcctttgatggtactcagcgggaagtaatggaggaaatcgacattcccattcagataggcccccacacttgcaatgtggtgtttcaagtaatggatataaatcccgcctatagctgcctcttgggaagaccgtggattcatgccctgngagtggtcccttcaacgctccaccagaaattgaagttcgcagtgggtggacttttagtgatagtgtcgggtgaagaggatatgttagtgagctgcccctccttcgcatcgtacgtagaagcggcggaagaatcattggaaacggctntccaatcctttgaggtggtgagttgcgcctctgtggaaccaagtccgtcgctacct

SEQ ID NO: 236215 - DNA, 402 bp, Glycine max
  unsure (1)..(402): unsure at all n locations
agcttgtggagacctttactactaggcagtggtatcttgtggtggacatcttgggtatgcatgttaggtcggctctaactgcaatggtatatcgaaaggggctaaggatatcaagcttggccaagcaaagtcacacgagtggggaggttgttaactacatggctattgatgttcagagggtaggggactactcttggtatcttcatgacatgtggatgcttcctctgcagattgttcttgcccttgcaatnttgtataagaatgttggaattgctgctattgcaacactgattgctacaataatttccatcgtcgtcactgttcctattgccagngtccaagaaaaatatcaagacaaattaatggctgctaacgatgaaaggatgaagaaaacatctgagt

SEQ ID NO: 236216 - DNA, 414 bp, Glycine max
agctagccacccagctcgcccatgcgagctatgttgcttcctcctgaagcaaccgccttctggaggaattttctagaaggcccaagtgggtctggttgctatttgcacccccatttttactaaatactccccttgctctttgttggtgattctttttccgtaacgttatgaaactttacgaatttcgtaacgatgattgttttctttccgtaatgtagcaaaaccttacggattacgtaatcatcccctttttaccttccggagcgttacagaactctacggattgcgcactaacacttccttttaatttctggcatgtcacagaacttcacgaattgtgctaccatactttcttttgactttcggcatgtcacagaacttcacgaactgtctagcgatgggtgccaagtacct

SEQ ID NO: 236217 - DNA, 418 bp, Glycine max
  unsure (1)..(418): unsure at all n locations
gcaagcttcaagaacgagaatgattggtggtgttatatttagcaacggtggtggttggaggagaggctttgagggtgggggcatgcgatagtgatgatagtgaagctttactctttatgtgaattagagaagacgggaagtgaagagtctacagcttatgagttaacattaatctggactatgctaagacacacttgagtgtattatttntggctaggctcaataagaagcacttcaaacacatatacttggtcaggtttaggtaccgacgatgtaaaaatgtcattatgaacccgcctaataatacatgtgtcaacccgcttttatgactcctatatcatggtatacccacccagattacacttttctctctcgattgttatcagtttgggttggactgagttcactcgaacaccct

SEQ ID NO: 236218 - DNA, 402 bp, Glycine max
  unsure (1)..(402): unsure at all n locations
agtcacctgcggcatgcaagcttctcattctcacctttctttgcctatagttctccagatatactantttcatgtttggcgctgcatctcaagttcagacttgcgtaaaagtggaagcaactacgagtagcttccacgttttttgtgatagtataacgcgatttgagcattaaatgcatatacttgaagtggctccatgctatgactcttaattcaaaattaagttatttttaatgttttctattttctttgtcatgaatagaaatatgttgatttgaaaaaggagttgagcacaacagatagacatattttgatagaaacgggattcattcgtcaatggtgaacatcctcataagttcatattaaattaccttgctaccctcgaaacacctacagaattga

SEQ ID NO: 236219 - DNA, 449 bp, Glycine max
  unsure (1)..(449): unsure at all n locations
gccgatttgccttttgatcgtgataaacccactttgtaagagcttcgagaaatttataatgtaagatgttgtttgttttgggacactcacggtgaataaggggatctagaatccatgaattccgacaacggtattaagtcttaagagttaaagggggaggcattttcataaatgactatatcactacgttaaaataaaaatatagctgaactagctggggaccaatttaaggtgttaattatgtgatgcagaataataaacacaagtacagctgtacaccgctaaaaaataccattccaactacaaacaaactctatgtggctatctgtcatcatgaaccacttcagtacttcatgtttaatcataaattcgtactatctttgttgtgatcgattattaagctgaaaaataaaacgtctgcctaattcctctacgcagattgaaaggcn

SEQ ID NO: 236220 - DNA, 459 bp, Glycine max
agcttatgctgcaaacacttataatagaccccctcaacagcttaaccaacaacagaagaataattatgatctttcaagcaacaaatacaatccaggttggaggaatcatctaaatctgagatgggcaagtcctccacaacaacaacagactatccctcctttccagaatgttgctggtccaagcaagccatatgttcctcctccaatgcagcagcaacaacaacaacaacaacaaagacaacaagcaactaaggccccttctcaaccttccttagagaagttagtgaggaaaatgactatccagaatatgcaatttcagcgagacaagagcctccattcagagtctaacaaatcagatggggcagatggctacttagttgaaccaagctcaatcccaaaattctgacaaatttccttcacaaactgtgcagaatccacaaaatgtgagtgtcatcatct

SEQ ID NO: 236221 - DNA, 122 bp, Glycine max
gcttcaccggatgatgccgatcgaacattttctaatgtacttcttccaatggatattcagggattgaacagaataaacaatggccagtgtcggtcgatatatggccccgactgatatctttc

SEQ ID NO: 236222 - DNA, 398 bp, Glycine max
  unsure (1)..(398): unsure at all n locations
agcttagcattntccaattgccatgatgtaatcttcttcttgacagtctctcatcaagttggagtggtatcacagcattgaactaagttgatcgttccaatggttttgattgctgcagataaagtgtgtgattgtgagtttctggtcccatgagtaacagaggtgaggtagtttgtgccttcatggttgggatgatgttgcacgtgccggtttgttgttgagagaaaagatgatcatccacgtctcgtgtgtgcataggagagtgtctttgccctctccacaacattagtttcaacaactgacgttagtcgaaactggatggtgagaatcaaaagagtaaaaaataaattcaactgagactaaagtagaatgatttatactataaagactaaaaaaaa

SEQ ID NO: 236223 - DNA, 422 bp, Glycine max
  unsure (1)..(422): unsure at all n locations
agctntacatctaaagcgaacacacaattgacatgctcctgagattcactagtcgatctcgcaagcaactcgattagactagcgattgtttaccaaatttcagcgtaaacaaattggcacgcccagtgggaccggtcaattgtgtgttttggttttaaattattattaaagttttgtttagtgcagttggtttattgcattcttaattgttttgatcttgtatgcatttaagaagtgggaaatctgttccacacttaactgaattcaaaactcgtacaaggatggctagaccacccccaagtaatcgaaacaatgaccttccaaatatggaggggcaaccaacgcagacatctgtcagtaatgccaatataaattctggcataagagcaattcctgaccaaactgttggcacgataagttcg

SEQ ID NO: 236224 - DNA, 417 bp, Glycine max
  unsure (1)..(417): unsure at all n locations
aacttatgatgaggttattgtatgtanggatgaagacctaaatcacgttaacaaaataaacagcattgatgaaggcctaaatcacgctgcctggctatttggcactcaacctgcaccacccttaacgtcttggcctatccgccactgacctccccatgatgcctgacgaatcccatagtccaacatctgaatgccacaactaggcatagcaatgaaacccgtactcgtggatatccgcccaaatccatcccgattntgatggagaatacctgagttgattaggtacgggtttgagttcgaggattacccgacttatttaatcggtgtcgagttcggggacaaggatgtcattacccattccatactncattccgtacccaccccattgatgaaaattattaaattctattaattact

SEQ ID NO: 236225 - DNA, 341 bp, Glycine max
agcttattgtgcataccatatcttacagggtatttttttaccttatgtagtgatgtcggatattattttttgaacatcgcactttcttttctacctgtttaattagctgttaatagaatgctttatttccttgggctgctattatctttgagcactgcctcctgttattatatcgcttgacagttgactctctcattatttgtttgctatatagcttgaaggagcccaaacggctcaatctcgggacttgtttgcgatatcatgctttcatatggatcttcttagtgaagctgaagatgcattatgtcatgccgatgagcccggtgcagaggtataaaaca

SEQ ID NO: 236226 - DNA, 299 bp, Glycine max
  unsure (1)..(299): unsure at all n locations
gacatgtcaagaagaggccggcgttttcttgaaaatcatctggcgtatggatacctacataagggcttcaattgtatgcttagtgccaactgttgcgataacgaacattggcagccaacaatgagtgcctgtcttccatttggaccaaaaatgattattttcttgctggacttaatattaataccacccgttcgcatttntgaatctgggatgatgtttagcttaacctttatagatagaacaaacttggagccatatgacatgtgatatttgttcttgcacaattatcataatgcatc

SEQ ID NO: 236227 - DNA, 422 bp, Glycine max
  unsure (1)..(422): unsure at all n locations
agcttaatcaattganaattgacggtgtgagattctccctggactctactnaggggcaatttccttggcaccctttatcatgttcaatttgttggtaagtttaggtcttttaatccaaaaaaggaaacttggttaccatgtgagagtaatttggataaatgaaaattgttttggttgttatatgcatgagtatttcgatgcttgtttgcaataatgtaatatacaaaagtacctaccacatagagagtgcctacgcaatttggaatcaagaagtttcagattgtgtgattgcattctctagcaccaaagctattgcattgaaaaattactgcatacccaaaattactttataaagttgcaaccaatattacttggcaaaaaagtagtctaaagctactctgtcatcatggacctcatgtatg

SEQ ID NO: 236228 - DNA, 391 bp, Glycine max
agctagtagaatggctagacatgatacatgtcattgcttggtttggttcaaggataaaatggatgccccacattatttccatgacacaaatgcaaaaaatgatgatttggaaattttatgcaaaactggtcatgcatgcgcctatgcggacgctcaagtgtcaaatttttatggtcatgtttatgtttctgtttagtgcggcgcgaaaaagtcgctagcgcacgggattttggttggtaatcaaagggagaagaccattataggtcgcggaatactttccttctgtctgttcattaggtgacaattctgtattgctcagatattgtgcggtccaaagacctttctgcacatcttttctgttttcctgcgatccctgatcaggagctttctt

SEQ ID NO: 236229 - DNA, 53 bp, Glycine max
  unsure (1)..(53): unsure at all n locations
agcttgtaagctntcaactaaagtgctntcgcttgggccgactactgctctat

SEQ ID NO: 236230 - DNA, 362 bp, Glycine max
ctgcaagcttgagcaaattcaaacgacaataaccttttactcggatgtctgattgagtcctgtaatatatcgagacgctcgaaattgaatggtgaagctctgagcaaattcacacgacaataaattcttactcggatgtctgattttgtcccgtaatataacgagacgctcgaagttgaatgctgaagctctgagccaattcaaacgaccataaccattctattcggatgtttgaatgagtcccgtaatatatcgacacgctcgaaattgaatgtgtaagctctgagccaagtcaaacgacgataacggtctactcggatgtctgattgagtcccggcacatatcgagacgctcgaaattga

SEQ ID NO: 236231 - DNA, 166 bp, Glycine max
atgtttattctctaaggtttggaagaacttacttcttcttgaaacaaaagaaagaaggattcacagcttaagctaactggataccccaattgataatacaattactagctcctagaaacaaagagaaggtctttgggtgattctataatcaattatcacacatgat

SEQ ID NO: 236232 - DNA, 411 bp, Glycine max
  unsure (1)..(411): unsure at all n locations
agcttcttatactaacgtcacaaggaatgtggttgttagattcataaagaaggaggtganttgtcgatacggactccccaagaagatcattactgataatggcaccaatctaaacaataagatgatgcaggagatgtgcgaagacttcaagatccagcatcataactctaccccttatcggccaaagatgaatggggctgtagaggctgcgaataagaatatcaagaagattggtcaaaagatgacggtgtcatacaaggattggcatgagatgttgcctttcgccctacacggatacagaacctcggtacgaacttctactgggggcaacaccgtattcttggtttatgggatggaggcagtactcccatttgaggtagaagttccttctcagaggataatggcggagtc

SEQ ID NO: 236233 - DNA, 273 bp, Glycine max
agcttgactcacaccaaacatgttaagtttagtatgctttcaacaaattccttcataaataattaccataaggcataaacctagtaaaattacccatcatatgtcccaaaacccagtacccacgaaaatttatgtgagaagaagtctacccaaacctgaaatttgaagtcccacaatgtagaggtgcgcttcacgactccaaaaatggcttcctttcgcgatttggagcagaaatggtgagcaaaggttggagctttgatggagcttcaatgg

SEQ ID NO: 236234 - DNA, 415 bp, Glycine max
agcttattgttccctagaatacaaggtatgctgaatgtacctggatctttacattcttcagggatttggggaacagatttacgcggagacatttctgcccatactaattctttcacttcctttaagcttccgcttattagtgcacagctccttcaagaatttagcatatcttggaatttgctttattgcatccagcagaggtatgtttacctctacttttctaaatgtttccaatatctccttctctgcctcttccaattttttgttggaaattgctcttggagggaatggaagagggatatgctgcttctctttagattcacctgcatagaaattgttagggaacttactctttaaatctttgtcatcatctttttctagagtaaagtgagggtgggcaggttcatttgcggat

SEQ ID NO: 236235 - DNA, 411 bp, Glycine max
agcttcaacattcaatttcgagggtctcgatatattacgggactcaatcggacatccgagtaaacagctattgtcgtttgaatttgctcatagcttccgtattcaatttcaagcgtctcgatatattacaggactcaatcagacatccgagtaaaaagtcattgtcgcttgaattagctcagagcaataatattctatttcgagctcgtcgatatattatgggactcaatcggacatccgagaaacaagttattgtcctttgtattagctcacagcttccacattcaatttccagggtctcgacatattacgtgactcaatcagacatccgactaaaaagttattgtcgattgaatttgctcatagcttccgcattcaatttcgcgcgtctcgtatattacgagactcaat

SEQ ID NO: 236236 - DNA, 446 bp, Glycine max
  unsure (1)..(446): unsure at all n locations
agcttagcacaatcggcgcgctaagcgcatttccaagcatttcaaaagcagtaagggattggcgcttaacgcatgctgccgctaagcccaactcgtgaaagttcacttccagaatggatatggggcttagctcangacaatgcacttagcgctgctacaaaagatttttccagagatggagtggcgcttagcgcatcatctctgctaagcccactgcttgaagtttacttccagtgaagatgttgggcttagcacagtgatgtgcgcttagctgaactatntagccaactatccaggggtctaagcgcttagcatgagcaagctcaggcttagcgggtgaagacatggcacttagcgaatggacaactgaaaaanaattctaagtctcttctgtccatctcttcagctagggcttaaaaaccccctttgtcactacntaaacagct

SEQ ID NO: 236237 - DNA, 383 bp, Glycine max
  unsure (1)..(383): unsure at all n locations
agcttgtgcatccaataccctgatgaggatgtcccatatgttcttaaaacaggactgattcatttgcttccaaagtttcatggccttgcaggtgaagacccgcacaaacatttgaaagaatttcacattgtctgctccaccatgaaacccccagatgtccaagaggatcacatatttctgaaggcttttcctcattcattagagggagtggcaaaggactggttgtattaccttgctccaaggtccatcacgagctgggatgaccttaagagagtattcttagaaaaatttttccctgcttccaggaccacagccatcaggaaggatatctcangtattagataactcagtggagagagcctgtatgagtactgggagagatt

SEQ ID NO: 236238 - DNA, 445 bp, Glycine max
  unsure (1)..(445): unsure at all n locations
agcttatgcgcatgtttccttactaacgttcacttgcggaagacatcctattaaccgaanaatgcacccatatacaatcaaggcagctgtgttacctacattatttacacgtatttccaaggtgtatttgttacttacatcacacacatccccttggctaaattcacatacatgcatactccaagcattttggggtacccaaaaattgcacatgtgcacatcttggtatttctaatacctatacatacacaaacttcatgatgaatcttgactatctacacaacaaggagctacatttcatgccctttttcaagtttttgctacctaaagccgcatgcaaattcaagcatattctcctttgctgactaanattgtattcaaattatatatatatcttttggaatatgtggttttttcatacaacattcaacatatgtatatatat

SEQ ID NO: 236239 - DNA, 554 bp, Glycine max
  unsure (1)..(554): unsure at all n locations
tcgtactctatacnaataacgccgctcatctatctntgtactttttnatcttctttactccagnacacgcccnttgancttattgatccactcgacccggaactntaaancgactgcggctgcaacctataaacgaaatgcagtgtagattttctggctctataggggcgatttacttggcaccctttatcatgctcaatatggtaggaagtttatgtcttttaatccaaaaaaagaaactcggttacgatgtgagagtaatttggataaatgaancatggttttgcttgtatatgcatgaatatttcatgcttgttgagtaatgtatatacaaagtacctacacatgagagtgcctaccatttggaataagatgtttagattgtgtgattgcattctctagcaccaaagctattgcattgaaaaattactgcatacacacaaatactttacaaagtgcaaccaatattacttggctaaaaagtagtctaaagctactctgtcatgatggacctcatgtatgacaagctaatacaaatggtgatgatgctgacg

SEQ ID NO: 236240 - DNA, 307 bp, Glycine max
  unsure (1)..(307): unsure at all n locations
gctggacatttatcaatatatacagggagtttattagaaaatagagttatctttttatctattgagagtgattctcctaaatcttgagtgattcaggacactctggctgtatcaaacggacttcacaacctttgtgtgttgccctcactggaaagagtgattctttacttcctttcatcttcacctntgttctttcaaaccacaattccagaanatccacctcttcccagaattatctcgtggccataactcccattttacgcactcaaattaagtgattcttaagcctaaattgaatttcaaaacg

SEQ ID NO: 236241 - DNA, 422 bp, Glycine max
  unsure (1)..(422): unsure at all n locations
tagtggatgggcctctctacctttctctttgttttcgtgcattcatggtggaaataccattaaggacctcattgaagctcacagatccagcctccgtagaagccccacaagcaagtttccatcatgaactntgaactataattctaaaatgatcaaagttcacaaaatgcacacatatggcctctatttatagcgtaagtgtcacacaaaattggaggaaaatttgaatttctattcaaatttcacatgaattagaaattgaatttgtggagccaaaatttcactaattatgattaatgaattntatntatggttcagcccactaatccaagatcaagtccaagattctccaataagtgtgcttaggtgtcatgagacatgtaaatcatgaacgacatgcacacagtgtgactatatgatgt

SEQ ID NO: 236242 - DNA, 443 bp, Glycine max
  unsure (1)..(443): unsure at all n locations
tgcaagcttatttcatcaattaaccttaactatactgttttgacttatttcttaaatgtgacacgtatatatactttaccaagtgctatatgctattgtcgtcttattctacatggctcaagctgcaggcacaacgaccaaatgcaatgtaatcatatnngtattttctcttaaggggcatgttattggagtggataagaacttctatatattgtgcaaatatagtaatgcaatttaacttggtttattacgcgtgtactttttggtcgtttatcttcatttctaccttcttcattattataagaaaatcgttcttgaaattgagatcataaaaagttcattgntaaatattntcatgtgtttttaaagatctatttaanaaatatcacaaaaagctagaattgattctaataatttattttaaatctataattaccattcat

SEQ ID NO: 236243 - DNA, 428 bp, Glycine max
  unsure (1)..(428): unsure at all n locations
gagtcacctgtgcagttgttcaagtttgtgaatgcaatacaacgtgaatgtttgtgattcatacaactgtgcactatntctagaatgagatcatttgtgcaatagagaaagaatttcaaaagtgaagtagatgtgacataagtattaaacttctcaattctttttcatgttagtttaactttctttgggactttatcattctttatctatgatgcagtttagcccatgtcagtctcagctagtgcagcgccactattangggattgactgtgtgaaaatggatttaagtattaaaattctccctgccaccaatgatgtacatggaggagtcattgtggacttaaaggagcctatggactctaaagattntgctactctgcttagatcttcacttttacatttggaagcacagggtaacattatgatct

SEQ ID NO: 236244 - DNA, 416 bp, Glycine max
  unsure (1)..(416): unsure at all n locations
tttttatatgtttcctcggaatgtttttgcaaagggtttcatatgatgaggcaacaaaaattgctttttcaaatggaaaagtttctttcggcatgaaaatagtttgtagatactacaaagtattttaaaccttggggtgagttagactaatatagatacactatagtatntgatgatacactgcaagtgaaatggtcatccatttatggttctattaatgcactcacaatgtctttacatgattagctgaagaattttctatatgatttgttcttctagactacgccttgtcactgttatatcctcaaagatatctttgatactctntcaatccactttttaagacttgatgatcacttctttctctttagaaggtaatgatgaggaggatcaccatgagcactggaatggatcta

SEQ ID NO: 236245 - DNA, 492 bp, Glycine max
  unsure (1)..(492): unsure at all n locations
taggacctaataaactcagcttatatgcaagctcanagganaattataatcgtttagaaacaactaacacttgaaaatgaatacctatgaatactagatgctttgaagaaatgagtaacgaacctacacgctatcattcaaattctttatgtagaaaactctttgtatattcttataaagtttgaaaagctctcagaacatcttgaatactctaagacaaaaaactaaatgcttagatttcacatttgtttgtaagatgattaagatttaatcagttagcaaatcaaacaacatatcttctgatttgtatagaaccaacagtggcttggtaggacaaagaatattccgctgttaaagcttgacgataaactctgttgtgagagctaaaagtaaccgtgacacatacttgtaacttttgtgagattagtgaaacttgattgtaaccaaaaactgaacttagtctgaatggtagagacaaaccaatataaatat

SEQ ID NO: 236246 - DNA, 348 bp, Glycine max
atattgaaagaagcccatttattgatgaagttaggtctttcctatgaagatctcaatcttattatgttgcaaagacatcaagaaggccttactcaaatgatctatcaaaggctacattgaatagacaacatcagaatgaagcagtactagagtcaacattagaatgatgtaattgaggactctgagaatgtgatctcataatgatattctaaagatagactagaatcaagatgataaacatcaaatttactgtattttcatatgcaatttgagacatttatttgatactttaatatactctaggctttattttgaaccaaattcgttatgttttcagtttttaatata

SEQ ID NO: 236247 - DNA, 457 bp, Glycine max
  unsure (1)..(457): unsure at all n locations
gcttcaatggagganaaganagagggagagaaagagagaggcgggagctcganattgaaggaagaaaaagggagagaagttgaactttgaagtatgtctcacaagactctcattcatcaaagttacaacaagtgttacacatgcttctatttatagactaggtagcttccttgagaagctttcttgagaagcttctttgagaaaaattctttgagaagctagagcttagctacacacacccctctaataactaagctcacctccttgagaagattccttgagaagattcttaaagaagctagagcttagcaacacataccccctataatagctaagctcacccctatgccaaaatacatganaatataaaanaaaaaaaaattcatactacaaagactactcaaaatgccctgaaatacaagtctaaaaccctatactactagaatggccaaaatac

SEQ ID NO: 236248 - DNA, 515 bp, Glycine max
  unsure (1)..(515): unsure at all n locations
cggcccatggtaattttganatcgatctcggacnctggatcctctagagtgcacctgtgngcacgttagcttgtctantggctatacatgatacacgtcacggttagggaaggttcagtgataaaacggatgccccacattatttccatgacacagatgcaaaaatgatgatctggaaactttatgcacaactgagcatgcatgcacctatgtggacactcaagagtaaacttttatggtcatgtgattatcggctgaggatacatgtcctctatgttagtcaacccaacgactccaaaatatgctattttatcaatgtgtgcattcatgcgagtacatgatgggcgagcgggaaaatattcacagcgttcacccttcaggtgtatacacattattgtttcaagaatcggttatgatcagtgaatttgttgatagaaaagatgaaggtgattttttataaaagcatgtaggatctcaagttaacaagtcatgtgagtttaaactacgtggctctn

SEQ ID NO: 236249 - DNA, 449 bp, Glycine max
tggatgatgacgacgtctgttatcatgaggcacacagacacacactcacacacgcacacgcacacgcttggtactattcgatcgatgatatcaagttgcattctcctcctttgtgctcgaattcatgctggtcgtaaaattaaggggagtacttatgtgagatcttgagtgaatgcctatatgtctccccctgaggcatcaacatatagccgaagtgcgtaacatgtataagacaatcatgtgctattagtcattcacagggcgatcatgggagaatatgaacccatcatgaagcaggagacatgaatagatcaaatatatataacaaccacatatatgacatacacatgaatagagaaagagtctatcaagatatcttaaccattcatgaatcgtagagagatagtacttcatagaatgacatgtaatccagaaagtcattcctaatg

SEQ ID NO: 236250 - DNA, 342 bp, Glycine max
  unsure (1)..(342): unsure at all n locations
agcttgtcggccgcgattgacgaagggcgcagaatactgacgtagtctctgcgtgctatcagggctttcgtcttacagatagcaaaaaaaagaatgtntatatggataaccactcggggtatttcgcccgtcagcgtgactcanaagtcagtatgacagatcttgtgagggcgcagaagacgacgttagtctctgcgtgctatcaagcttttcgtcttacagatagcaaaaaaagaatgtttatatggataaccactcaggtatttccgcccgtcagtgtgactcanatgtcagtatgacagatcttgtgagcgcggaagatgacataaatctncgcgtgtc

SEQ ID NO: 236251 - DNA, 410 bp, Glycine max
  unsure (1)..(410): unsure at all n locations
tgtgccgtatgttgctataaataggggatgaagtgaagaagagtatggttcagccccttacgcacttctctctctctcgaaatagctgaggaaaattagttccgtgaagaatatccaagccgagacgcttccgtaacgtttccgtaacgtttccgtgagtaattacgcgaagattctcgaccattcttcaagattcatcgttcgttcttcgttttgttcagtcttcaacgggtaagtacctcaaaccaagcttttcaattcattctatgtacccgtggtggtccacattntgtttcatgtattcttgttcttgttttcatttactttttatacccccttttgacgtgcttaagccatntatttaagtcatttctcgcctaatctaacaataaaataaatctccaccgatc

SEQ ID NO: 236252 - DNA, 311 bp, Glycine max
  unsure (1)..(311): unsure at all n locations
agctntaagtgaaaggttcgggagttgtatttacacacgggngaaggtattagcaccccacgccgtcgtcataagagacggcaacctttaatcaaatgtgcaaatatgacttcaatttatattcttttccctttttacgttcttatgtttttttatgcctttttatgtttttatctttttgtggacgacaagggcgtttccctttgctcctacgtattcctcgattttgatgagaaaatcagacctacgtagttctttntgtgaacaaagcgtttggttaaattattttttatccttttttgcaagatatg

SEQ ID NO: 236253 - DNA, 477 bp, Glycine max
  unsure (1)..(477): unsure at all n locations
ggggcgaganatagaaattgtctaagctagatntccataagtgcaagaattacattgtgcattgagtcgcaaggtaatttgtctctatgtgagtggactctatgcaaggttcactctgagtacatatatctgatgggaggttagcacactaacttangaagttaacatgctaatctagaattaatattaggataagatttaccaactttatcaaaaatagtttttatcatttttgcttaagtctactttaatcatttctggttaaatattcaaaaggaaaaaatacccgtatatggcagaatttggcacgtccatcatgtaacatcccatttttcgtaaaataatttaaaaatgattgttatttgtaaacaaacagagttttagaanaatgatgaagtttttataattaaataaataaggagaaataactctattaattaaaataatagttctggagaacataaaaagggtatttta

SEQ ID NO: 236254 - DNA, 325 bp, Glycine max
atatatgcatgctcataggataatgataatcgtttacaaacatgtaacactcgaaaatttacacctataaatactagatgctttgaagaaatgagtaacgaacctacacgctgtcatgcaaattctttatgtagaaaactctatgtatattcttataaagtttgaacagctctcaaaacatcttgaatactctagagacaaaaaactaaatgcttacatttcacatttgtttgtaagatgatcaagatttaatcacctatcacatcaaacaacatatcttctgatttgtatagaaccaactgtggcttgtgaagacaaagaatat

SEQ ID NO: 236255 - DNA, 341 bp, Glycine max
  unsure (1)..(341): unsure at all n locations
agcttcatcctcagatccctcttgttggactgggctcaatatagacaaccctcttaggtgtagactaacttaaactaaggttcatccttagatccctnctggtggactagacttagcttanatagattatgagagttcggcctaattagcctaagctatgttctcagatccctctcgttggactagacttagaccagacagcattatagtaatagcatacttaaaaccanaacttaatccacagattcctcttgtaagactaagtttcaattctgctgcattcaagatatacggcaacaatacatttcccaatgttaaatcacctaactatgcaagcaaat

SEQ ID NO: 236256 - DNA, 433 bp, Glycine max
  unsure (1)..(433): unsure at all n locations
tccatcaagtggtaatcagagcacaagagcttcaagtaggtgctccttanacctncattaattntttttctttaccttctcttccattgntgnttcttcatttttctccatgtatctcctcacatgtcttgttctaaatgttgttaacatgattgtttagagtttccaccgattaaacttgctatagaagctagatttgattntctatgattcaaatttcttgttcttgttcttgaaccatgaattgtgttgagtttacgttcctttgagttctttcttgttattttttgtggctgaaacctaaaccataaaattcttacaaaaatattaaagtagaagaaaacctcaaaaatctagagtgacttgttcacctattgtagttntgtcatagaagtcatgtctagtcatgaaacttgtcacataagatttctta

SEQ ID NO: 236257 - DNA, 335 bp, Glycine max
  unsure (1)..(335): unsure at all n locations
agcttattacataaattatgttaacatgggattggaatgtgattcccaaattcttgagactttcagtatgaatatgttgtggtaatgtatataattcttgtaagcttcatacatggttaatcttcttcaatcaaccctttttcctacttacactctnttagctntacacaaatcaaattcttaattaaacaactacatcacacttgcacgcctaatgacaaaaaagaatagcaatgagaaaagggctaatcacatgtttaatgataaaatgtgatcaaacccaaggatgcctcgaataatcctttggtgacaccccaaatcagcaaacaatgatg

SEQ ID NO: 236258 - DNA, 465 bp, Glycine max
tgcaagtgaaatcgaattacttgacttatgtacgcaacacatagaatagtttacactagaatcagaaggtgtggtcaaaagagtattctatatgaaatatatctcgatacacgtcctcgaactatagagtatcaacattgctaagaacaagaaatcacgaacaaccatactatctatgcaattaaggcaaaacaccatactactaacatacccagaattataaggttcttataataagtatacaacgtacatataagaagtcagaatttaatagttaatagggatgtattaaagaatcacaaacttcaactactacattcacgacacataatatagtgagttaactagtcatgcgtttacacatcaagaaagacatactcatccaagacatatatatggtttataaaggtttcacaacattaatccacacatgaagatagaaataagttattaacaacatacatg

SEQ ID NO: 236259 - DNA, 357 bp, Glycine max
  unsure (1)..(357): unsure at all n locations
ngagatgaggaagtgttgaagggtgaaactttctgcttttattgttgaccacagagtggtacctggagatatgtcgcggnggtcaggagaccttggggacgtcatgtggggtgctattgcccaaaaccaagcttgaccaatcccgacccaacccgggcatagtcggtcagtgagaacctgtgatgtacctaagcaggcgagctcctggcagtcaacagataaaaggaacaaagaccacaaagcaaggaggcttgtggtggctggccagctctggattntgtgtgatatgtggagtatggcctctggtaatcgattaccaagggtgggtaatcgattacaaggcttaaaaatgaagac

SEQ ID NO: 236260 - DNA, 359 bp, Glycine max
actctaaggattcgcctagttaacattcctggctaacttcaatacctaatttccttaaccttcaatggccaaaccgcctaaataggtttcctttaaccaataagtttttaacctaatctttcatacttttttaagtggttacctttggatagttccaacattattttttttaccttttggtttcaaacctccacaagaaaaaccgcacttaagaaccacatgagtaataattatctaatgtaatggcgaggtactatcatagggacctttattagaatttagataagtgagtccctcagttatggaagaaaacagagagatagaaaaggaaaaaagagtgaagaatagtcagatgaaga

SEQ ID NO: 236261 - DNA, 538 bp, Glycine max
  unsure (1)..(538): unsure at all n locations
cggcgtgacatttgacnccctgcatttggngacctttatttgactccctctcatatacgcgcagcactctattatcaacattcacaagtggagatctttgcacacgagcttcaggtaagcgtctcttatccaatcgagagtgattgccctaccttctctacagatgcaagacctcacttgttgcttcatgagacttccacatgctttgtgcgtaatgctggctacatgaatcgatacaagttccacttatttaactagcctagaagctaccttcgaatttctatgagtaaacatctcctgccatagtcatgaaccatgaattgtgtcgagttacgactcttagagagtggtcctggaacctatagtggctgacacctcaacaccttaaatcttacctaggaattacatgattaggagcacctgagcatctagagtgacatgtctactctattggacttcgccatataacctatcgttaaccatgacactcgtccaattagagctcctatgcagcgccggatgatatctgacttgaccg

SEQ ID NO: 236262 - DNA, 488 bp, Glycine max
  unsure (1)..(488): unsure at all n locations
tgtctaccacacttccaatgatgaacaccacctttagcacanactanaacaccaaccaagaaatggaatttgcagcgaanaaacctgtagaattcaccctaaattccggtgtcatatgctaacttgctcccttatatacttgataatgcaatgatagccataacccctaccagggttccttaacctccatttttctgaggatacgactcgaacgcaacatgtgcatatcatggaagagttccaggacattccattgagcactgtatgacctcgaagcgtaaggtgcaaagtgtaattgatgtgggctggttgaaatttgagtagaatcgcttgtgaatcctaaacattgacaagcgacaccacacatggggtaattttgaaagctgttgttagatgtctctaatgactcatcangattttcanatntattgccattattgtaaccacagttacaatgctaaataaaaaatgtaaatttgacatctttg

SEQ ID NO: 236263 - DNA, 333 bp, Glycine max
  unsure (1)..(333): unsure at all n locations
tcccttgccgctgcagcttaacattcaatttcagggtttcgattattacgggattcaatcatacatccgagtaaaaagttattggcgtttgaatttgctcagagcttcngcatgcacagtcgagcctctcgatatactacgggactcaatcagaccaccgagtaaaaagttattgtcgtttgaatatgctcagagcttcggcatgcaagttcaagcgtttcgatatattacgggactcaatcagacatccgagtaaaaagttattgtcgtctgaagttgctcagagcttcgataatctatttcgagcgtttcgatatattacgggactcaatc

SEQ ID NO: 236264 - DNA, 450 bp, Glycine max
  unsure (1)..(450): unsure at all n locations
actcggatgtctgattgagacccgtaatatatccagacgctcgaaattgaataccgaagctcttaaaaaattcaaacaacaataactttntactcggaagtcagattgagtcccgtaatatattatcgagttgctcaaaatggaataccgaagttctgtgcaaattcaaaccacaataactctttactcggatgtctgattcacgcccgtaatatatcgagacgctcgaaaatgaataccgaagctctgagaaaaattctaacgacaacaactttttgctcggctatccgattgagtcctggaaaatatcggaatgctcgaaattgaatgctgaacctctgagcaaattcaaacgacaataacattcttactcgggtgtctgatggagccctgaatatatcgagacgctcgatattatataccgatgctctgagaaaattcacacaacaa

SEQ ID NO: 236265 - DNA, 140 bp, Glycine max
tatataaataacaatttcaattgattaattggcataccagcttttttaaatataattcatgaatgtaatgaaatcttttatacaattttttattattatagaaaacgtgtattgtatatggtattagcgacaatgacata

SEQ ID NO: 236266 - DNA, 379 bp, Glycine max
  unsure (1)..(379): unsure at all n locations
tatcttagcgagagtgattctcctaaattctcgagagagtcaagaacaccttggctgtatcaaaggactttcacaacctttgtgcgttgccctcgctggaaagagtgattctttccttcctttcatcatcacccttgatctttcaaaccacaattccagaaaatccacctctgcccagaattatgtcgcgggcataacttccattttacgcactcaaattaagtgattcttgagcctaaagtgaatttcaaaacgagacctttcacctcgctttggaatcacctcatttggagccctgtagcttcagttattgacatttctatatttctgtccagccaccacttaacctacgttntaccatcccattcatcccatttat

SEQ ID NO: 236267 - DNA, 283 bp, Glycine max
agcacctgcagctgccctgggtctatgacctaggaattcagccatggcagatgcccgttatcttataatataaaataggttttctttgttgggccctgtattttgaccattctagtagtaataggtatagccttgtatttcacgcatttgagtatctttctaatagggactttataggattttcatgtattttggcaatgggggtgagcctaactattataagggggtgtgtagctaagctctaacttcttatctcaacgaggtgagcttaactattaaaaag

SEQ ID NO: 236268 - DNA, 341 bp, Glycine max
gcttcttgagaagagtcctaaagaagctagagcttagctacacactcttttctaatagcttagctcacctccttgagatgagaagagagagcttagctacacacctcctataatagctaagctcacccccatgacacaatacatgacaatacaaaaaagttcctactagaaagactactcataatgcctcgaaatacaaggctaaaaccctatactactagaatggtcaaaatacaaggcccaaacaaaggaaaaacctatcttaatatttataaagataagcgggctcatacttagcccatgggctcgaaatctaccctaaggctcatgagaaccctagg

SEQ ID NO: 236269 - DNA, 359 bp, Glycine max
  unsure (1)..(359): unsure at all n locations
atattacaacaaactgcaatttccatccttttcaaacttgtattttcttaaatatttttgctacttgagttggaatattatgatttatgaaccattgtattatgttatgattttaatattttatagaatgtgttgttatttttctatatgataatatgctgtagtaaccatgcctgngttctagaatatttgttgtattcccatacctgtactagtactggaactcatacatgtatccatgaaacacagatgacaaaatattntcagtattgctctgttgtttgtctggtattgccaacctcacctaatgggataggatttttgtgcccgtgtatgctatttgtctgttatatgatctg

SEQ ID NO: 236270 - DNA, 470 bp, Glycine max
  unsure (1)..(470): unsure at all n locations
ctttcccattaaaatatcaattgcaacatagtgacactntgtatgtccatgctcgcctgtctttgacgtagagacctctacaacctgtcaagataaatcgacaaacaaacaaggcaaaaaaatatgtttacttaactgattgtctcagatcataataacagacaaatagcatacaacggcaacaaaaatcctatcccattatgtgaggttggcaataacagacaaacaacagagcaatactgaaaatattttgtcatctgtgtttcatggatacatgtatgagttccagtactagtacaggtatgggaatacaacaaatattctagaacccaggcatggttactacagcatattatcatatagaanaataacaacacaatctataaaatattaaaatcataacataaatacaatgttcataaatcataatattccaactcaagtagcaaaaatatttaagaaaatacaag

SEQ ID NO: 236271 - DNA, 292 bp, Glycine max
  unsure (1)..(292): unsure at all n locations
attggttgcaagtaccttacatacgattattttgacttttatatacacatctatacggctgttatagttatattttggggctttacctctcagccacaaatttatgatgtaatcagcaaagttctctactgatggccctgagttctcctgctcttgatattgcttgagaattctgcaaggaatgaaatcatatggctgtctaatttagttttagtctgtagtacatattccaaatgttgctgtaagaacataaagtataaccatccataannatagttactgcagtatatgc

SEQ ID NO: 236272 - DNA, 446 bp, Glycine max
  unsure (1)..(446): unsure at all n locations
tctcacaatgaaacagttaatggaagttaccatacgctgcatgattgtcagaanaaattaaagtccacggataataattcattaaaaaaaaaaagtgcaaatctactacagatccaaactcgagcactgcataagatcaggaacattaaaatatttaacttgctttaaagaattataagcatagctttccaatttgagagccgattagattttcactacatttagtgcagtgaatttcataactgttgaagatccatgcaaagcattttctcaggttctgtgaccttgcataaccattaacataacatttatcttgtaaggcttttgacagaacattnttccttggaaatacttcactggaaacatacctnctaacaaagaattctncagttgaaagccgaagatatgaagtacatttcgttaccacaatacccatataatccaat

SEQ ID NO: 236273 - DNA, 133 bp, Glycine max
ttgataaatatcatatataaatagtggccgaatattatatcgtaagcaagaaactaactgctcaatgataacatgatcacctacatatgatgttataatggcttatcataacagcatgccacatgctttttta

SEQ ID NO: 236274 - DNA, 378 bp, Glycine max
  unsure (1)..(378): unsure at all n locations
tagccttgttcctncctaccttacatgtttcatcaaacttggttctgaacactcactttgctccaacaacagattatcctttggggagttctacaagctcccatacatcattattctgaaactggtctagctcttcttgcattggtttgacccaatattaatcagacatggnatcatctatgtgtttttgctcaatctcatataagaatgatgtgttcttaagagagttccttctctgtacttatgccataggatcacatatgatctacgctctagatgttgtttcctcaacaggcatacagttggttctctggcctcttcaggttggttgtccactggtgagttagacgcaagttggttctgactcgacacaacagt

SEQ ID NO: 236275 - DNA, 328 bp, Glycine max
  unsure (1)..(328): unsure at all n locations
agcttgttaaaaaaatgaaagaaacgaaaccgaatttgaacgaaataaagatgaaggccaaaaaaccaagaaatgaattaaaagtctcggatttggaaacttacctgctgaagaacgaagaacggatgaagaacagtgaagaacggaagaaaccttcacgggattgcttacgaaaacatctcggaagcgttacggaagcacctcggcttggattttcttcacgggaaacaattttttcacccaaaacagttgaaatgcatagccagngngatcatggacccttagaacaggcccnnttttttccttttatagagaaaaagtgggagga

SEQ ID NO: 236276 - DNA, 466 bp, Glycine max
  unsure (1)..(466): unsure at all n locations
ttgatggcactattgcaacaacaaaacataactcacaacaatttacatgttagtcaaattggtacaactagcaacaaaggtagtactctatccattacttgtagtgtaagcaagatcagtcaagaagagtggatccttgactcaggtgccacagaccatgttacagtctttcctcataaagttggtaatcaattataggaggaggcagcctactggtaatcgattacatgaatattgtaatcgattacatgccatctgttctagtgtaatcgattacaatattcatgtaatctagtgtaatcgattacaatattcatgtaatcgattaccagaacaaanaatagccttttcctacaagaaaacttatttctaagtctaaaaacttatactatcttaagagttaattatactaacaagaaaagtaaactaaattaaacaaaacaagcgtcatacttaatcagaacac

SEQ ID NO: 236277 - DNA, 319 bp, Glycine max
agcttgcatgatttacatctccccctttctcaagcaaattcttcttgatatcatcaaaatcttcatgatcccgactcgttggtggaggatgcatgaatgacaatcaattcatggggctccgaataaaagtggagattggaggataggcgaatagcgctaggcaatcaattcgcggtgtttccgactcgttggtggaggatgaatgaatgacaatcaactcatggggcttcgaataaaagtggagaatggaggataggagaatagcgctaggcaatcaattcgcggtgctgcagactcgatggtggaggatgcatgaatg

SEQ ID NO: 236278 - DNA, 412 bp, Glycine max
  unsure (1)..(412): unsure at all n locations
tctccttatttgctataaatagggggagaagtgaagaagaaaagagttcagcctctttgccacttctctctctctcgaaattgctgaggaaaattatttccgtgaagaaaatccaagccgagacgcttccgtaacgtttccgtgagtaattacgcgaagattctcgaccgttcttcaagattcattgttcgttcttcgttttcttcagtcttcaacgggtaagtacctcanaccaagcttttcaactcattctatgtacccgtggtggtccacattntgtttcatgtatttttattctcttggccatttgctttntatacccctttntgacatgcttaagccatttatttaagtcatttctcgcttaatctaaaaataaaataaatttccactgatcggttaaattatatca

SEQ ID NO: 236279 - DNA, 340 bp, Glycine max
  unsure (1)..(340): unsure at all n locations
tcagaattcaatttcgatcgtctcgatatattacaggtctcaatcagacatctgaggaanaaagttattgtcgtttgaatttgctgagagcttcaacattcaattttgagcgtctcgatgtattacgggacttaatcagacatccgagttaaaagttattgttgtttgaatttgctgagagcttcaacattcaatttcgagcgtctcgatattttacgggactcaatcagacatccgagttaaaagttattgttgtttgaatttgctgagagcttcaacattcaatttcgagcgtctcgatgttttacgggactcaatcagacatccgagtaaaaagtta

SEQ ID NO: 236280 - DNA, 567 bp, Glycine max
  unsure (1)..(567): unsure at all n locations
tctcttccgcacttntctatactcttcactcngtcataatantatgtactttttctcncagcgagccttgcgacntcgattgaccccttgatggacnccttgcattaccggcacctagacactcaacctgaattggaactatacaaatcgctggttactgtaacgattcaattgaatgactatgaagtcagtgcgcactcacactagaagtgaggaaaagtaatgctgataccaaaatgaactaanaaaaacaacagcgtcaatggcatcaaacaaagcatagtgccaaccacataacctatagaacattaagaagcatgagtgttaaattcatgataataccgtacaaatgaagagacttcctatttactaatctctagagagccatgagttttctatacagaatcccacactctcacgttctggttataatgacaataaaaataactaacaataatatggctttgccactttaacattgcaatcagtccacatacgaaccaatgatttattatcatttcgtatttatgccatcaacacggtgatatttactgaaacattctagcg

SEQ ID NO: 236281 - DNA, 338 bp, Glycine max
  unsure (1)..(338): unsure at all n locations
cagagttgngagcagcanagggatctattaaatataaactaaagataaataatcaaatagtattgataaaagaaatgtgcataaatcaagtacaaatccttcaaaacaaagtaagaacaaatagtgattttagaagaaaagagaaaaagaagcaaaacaaaggataagcaactaaagttagaagctaaacgtaagaacaaaaccaaaaccctcgaaatttaaggtgtgtgtgagagaactgaaccgaaggaattgtgacctatgaagaacaaatcatagtgaaaatgcatagaagagtgtcattttttttaactaagaaatatatactttacggcatg

SEQ ID NO: 236282 - DNA, 434 bp, Glycine max
  unsure (1)..(434): unsure at all n locations
ctcatccaaacatggcaagttcaacatgctntaacanatttcttcacaaataaccatcatgaagcagaaacctagcaagactacccatcatatctcccaaaacccaatacccacgaaaatcaagtgagaaagaagtccacccaaacctgaaatttcgaggtctcacacgtagagatgcgcttcacgactctgaaaatgccctcctttcacgatttggagcagaaatgatgaccaaaggttggagctctgttggagcttcaatggagaatgaagaagaaagaaaaagcaacgtgagggagagggagagagagcttctgaaatgtgggctgagtgaggagagagagagagagttgctttttagtttaaaaaggttntttcctcttttcttattattttaatttaagctatgccacatatctncatttgagtggagc

SEQ ID NO: 236283 - DNA, 357 bp, Glycine max
  unsure (1)..(357): unsure at all n locations
agcttctaataatgctcatctgggtgtctnttctttntcctggatgctntactgtttggacagtgaacatattataaaccagtagctgagacttcttaggccctttgttgtgtagatataaatctgaaactagatgatcaattataaccaagaagttatttgtggtgagctatacagtagtttcacgcttacttgctaacatggtatccacatagtgtactgttgttctatgtaaactttctcgtaggtggatgtcgggttaagctagagccgatgctatacattatcactgcagttctgttacttcaaataatagacatatctgngtctatatctattgaaatatggactgcatat

SEQ ID NO: 236284 - DNA, 451 bp, Glycine max
  unsure (1)..(451): unsure at all n locations
cgaggctgacgtattccctcanattcgacgtcgatgagctcgcctcagtctatgacttccgcatcgacaagtctcaagttcgttcaccgtatgcttctatttctcttcgttttcgagaaattcgaaacttgtgtgttgaggtcttgatttgcttctgatgagtttcagcggcacgccatactggcttttttaagaggcttctcggcggtggtttccgctccgacgagcagcaagaagacgctgattggcgaggctgcggccgaatgtgagtacttattgacgactgcttttcatgcagtgatggtaatgtttcttctagaagcggacttgtgaatgctgatgtgattgttctggacgaagttgattaccttagtgacatatctcgtggacagtctaagaggagattgtacgcattatattttgactctacatgttacgtagcttgctcaac

SEQ ID NO: 236285 - DNA, 311 bp, Glycine max
  unsure (1)..(311): unsure at all n locations
agcttgagatgaggaagtgtagaaaggtgaaaacttcttgctttatttgtgaccacagagtggtatctggagatatgtcgcgggggtcaggagaacttggggacgtcaagtggggtgctattgcccaaaaccaagcttgaccacatccgaccgaacccgggcatagtcggtcagtgagaacctgtgatgtacctaaacaggcgagctccttgcagtcaacagataaaaggaacaaagaccacaaagcaaggaggcttgtggtggctggccagttgtgaaacttgatngatatgtgagatatgggctctggt

SEQ ID NO: 236286 - DNA, 125 bp, Glycine max
acatgtcttgtgctgcctgttgatctgattaattcttccacatctcagcgattaaccttgccatagagcgctacacttgatcttctatggctctaatatcctggttttgctcttgaaccatgaat

SEQ ID NO: 236287 - DNA, 333 bp, Glycine max
agcttgttcgcacatcgttcgcgtgtatgacatccactccacaaggtttgaagttgaggagacctttaatcctattacacaacgtggccgacaaaagtgggcagttaacttgaatggtcattattgtcaatgcagaaggtattctgcgcttcactattcatgttcacatattattgcagcttgtggttacgtgagcctgaactactaccaatatatagatgtttgttatacaaatgagcacatcgtaaaagcttactccgcacaatggtggcctcttgggaatgaagcgactattcctccttctaatgacgcatggacacttatccctgaccc

SEQ ID NO: 236288 - DNA, 541 bp, Glycine max
gtcgcgcccgagccgttcctttgggcacttatatacgcatcttgtaggtcaccccagatactccgcatgtgctcgagctgatacaatatgtacgttcctggtacagctaatcattgacctattcggttgttcagtcacactacatttctacgagaatacgactcgaggcctacgtgtgcgttgtccaaatgaaaactctgtgcgtgtccatcgaagcattggcatggctgccgacagcgtactggacgcgaggatctatattggtagctgtgctgaaactatgatgataatagtgctgaaacgctgtacttgactcgacatgccacgcatggcgcaaatttccaagctggtgatagacgtaactaatgactcacacgttctgtgaatcttgaccggaatgtgggcgtacgctattgttgtgtttgctctagcaacgtgcgactctgagtcgctactcgcaagaccggcacatatgagaatactcatgttgcaaggcgcgggcggcgccgtagaacatcgacgccgagttcatactaatacg

SEQ ID NO: 236289 - DNA, 391 bp, Glycine max
  unsure (1)..(391): unsure at all n locations
gcttatgatactngttaatgttntcttactaattgtggttatttgatttttttgtattaatttcttttataataaactcacccctcacaatttttgtaccgtgtggttggtacctgtgatgatcgcgatcttttgtgggagcagaatgacaacagtagtggacgagaagtaagattcttttgtggagtcgtcgagccgacatgatgacattgggattantttgggagaaagttgtgttttgtaatcaactcctncatagctggttctgtaattctttttggtgattngaagatgtaaatcacaaaattaggtatatgtatgaacanattattntccattatngtgaatatgtgtactanggtactatacctatatatatatatatatggat

SEQ ID NO: 236290 - DNA, 481 bp, Glycine max
  unsure (1)..(481): unsure at all n locations
tgtgtgtaattgggttggctccttcccacattgctntcaaggatgaatgtggaatttagccattgatttcaatgttggaaagtctgatcgcaacaggataaaagtcactggaaagcagaagaaagtacgtatttttctcaagtttgaattttcacgctcttcttctctctgtttctagatatgtatgaagaattagtaaagctgattcctatcgttttttggtgcacaactgacaaatactttcatattagtgatattacttttaagactagaagtctagaatgaatggctntgtcgttgttaatgatatcctttcattatttctccaagtgaattgagttgcaaattttagcaattaataattaaacttgtaagcattaggcacttatccagctcacggttgtgatattggtgcatacatcggcagccatttccttggtttagagtctcctattttgntctctggagctgtggttacgtc

SEQ ID NO: 236291 - DNA, 503 bp, Glycine max
  unsure (1)..(503): unsure at all n locations
agaacaccactccggttctggaacttgagttcgngcccttagatcatttgacctgcagctcggcagatcagatcgcggaggctctcatgaacatgcaggttggttggaacaagatagatggatgccccacattattattcatgacacacatgcttaaatgatgagttggaaactatatgcataactggtcatgcgtgcacctaagtcgacactcaagtgtcacaattttatggtcatgtgatgctatggctcaagattcaattcctctatattagacgacccagcgataacacaatatgttctgttatcaattttgcattcatccgagtccatgttgtgcgtctgagaaaatcttcacagcattcacccttcaggtgtatacacagttttgtcaaaactaattattatcagtgaaattttttcaaagaaagatgaagtcatctctttcaaagcatgttgctattaacttgacaacttaattacttattcttctttttttatta

SEQ ID NO: 236292 - DNA, 443 bp, Glycine max
  unsure (1)..(443): unsure at all n locations
ggcatgcctgttaaactgtttccaacttctttctatcttcagtgtatntggtcatcactttctcaaagagtaggttgcacttatgcaccattccataacaatttgttaggtgtagctcgctgattttcttctaatgaataaatgcagcaaactctttgcggaagttctacaaaatgtgaaaatagataaaacaaaaagacatttagatggttgttgtcaaagtaagtacaatatattcaattgcatgatttgcaacatcagaatgaacaaataaataacattattaaagttaaggatgtgggcttacaattttgctacaggtagctgtatccttagtcaaagcttctctaaattntgtcatctaaggagcaaataattntatgaactaagctaatgtcaaattgtactgaaccaccttattacaataagtaacgtatacttac

SEQ ID NO: 236293 - DNA, 225 bp, Glycine max
ccggcaagcaatactggcttttctaagaggcttctccgtggtggcttccgctccgacgagcaccacgaacaccctcattgtggacgctgctgcaaaatgtgattacttattgaccaccgcttttcatgcactgttggtaatgtctctcttagaagtggacttgtcaatgttgatgtgattgttctgaccaccttgattaccttagcgacatatcctcgggtacac

SEQ ID NO: 236294 - DNA, 144 bp, Glycine max
tggcatttgcacccccatttttactaaatacacccccctgcctttatttggggattcttttttcgtgaagatacgaaaacttacgaaattcgctacgatacttgttttcttttcataatgttacagaaccttgcggattacata

SEQ ID NO: 236295 - DNA, 275 bp, Glycine max
taagcaagcgagcttctggcagtctacagattaaacaatcaaaaccacaaagcatggaggcttgtgtggtggctggccaactgtgaactttgattgatatgtgggttatggcctttggtcctcgattaccaagagtgggtacatgattacaaggcttaaaaatgaacacaggaggctcagctggtctctggtaatcgattaccaaagggtgtaatcgattaccatgcttgataacgaggtcaagaagctatgagagcttctggtaatcgagtacc

SEQ ID NO: 236296 - DNA, 470 bp, Glycine max
  unsure (1)..(470): unsure at all n locations
tctataaaactaagcttacanatctggcaacagagaaatatatggtaggtacctagtactggtacaaggtttatagtgtgacagcaggaacatctcacacttgtagcaccacgtgtgtacattagcaatgtcgtacagcctccacaataaagttgtgacatgtccattcctgcacgggcaacatgaaattaaagggttccccagatgtaaccatttagttaaagtccaatacatgttaatgaatacttaatcaagctgaatgcatagtttcttatcagattatctctgtctccagctctctccacacacacacacacagagtatcttttaaaataatatgccaatgttagctacacacacaatttcttgattctttttatcttaataaaagcatatagctaacatttctattgatctttcatcatcattgatcttcaatctcttgaagaatctattanacaagcataatc

SEQ ID NO: 236297 - DNA, 206 bp, Glycine max
agcttatccggcctcccattaataggacctttatttaaaaatattgcatgccaaggtaggcatagcagcaggagaaggaccaccagcagccagccacagatacgccggcgccacctctatggtagccaccatctctggagtccatttctgctcacttgcgaaagatggagcttcaaatggatgcatatatgcagcatgtgaccgat

SEQ ID NO: 236298 - DNA, 419 bp, Glycine max
tctacttatgtggcagggcgggcttccttcaccttcttgtctctaacgcgaactttgaccattgttcttccttcccgcaatgcttctcttcatgtctgcctgagtgggcttatagcctaaaccatacttcccacgatttccttgagtatttatcaggctagttatgccgccgttgttttttcctaaacccatcccgggttcaaaaccgttccccaacataactcgggccatcattaccgctgcatcggacagacaaggttgcccaaagagggagtccacggaggaaatgctgaccacctcacaagactggaaagcagtttctaacgattcttctgcggcttccacataaggcatggaggatgggcagcttaccaagaatatcttctcgcctgacacgatgaccaagtgcccctccacta

SEQ ID NO: 236299 - DNA, 363 bp, Glycine max
tcactgttttgactaataagttaattaaaatgggaagaaacatgtgcaagggattctaattgttgtcctaattgaacatgtgttagtacaaaaacgtatcgttacgtaaatcgtgaggttctgaaacgtatcgtgccttacagaagaaaacaagtatcgttcataattcagaggtttttaacttacggaagagaaactacaaaaacgggcaactgggtgttttataaaatggtggtacaatgtatattcaatcggcccttctaaggttctggcatttttgcttatgaaaagcaccttcttcctgtgcacgtagtgcacacttccttttttgtaaaatgctgcggggccctatgttcttaaaat

SEQ ID NO: 236300 - DNA, 303 bp, Glycine max
  unsure (1)..(303): unsure at all n locations
tccaataaccaaggtagaaatagtattactcgaattgacaacattataaagcttgagaacaacctncaaaagttgcatgctatagccacttcctgttccaaccatgcaaagcctccctgaagattctgcccagaacccatcaagactaaacattattgaacttgggaaacgcttacggctcttcaatcttttgccacgtgtgaagtttcccacacggtaataggagctggcacttcttattaacaaggtagctccaactttgagtaagccagagacatcagtttcatacacactctttattcg

SEQ ID NO: 236301 - DNA, 367 bp, Glycine max
  unsure (1)..(367): unsure at all n locations
ggagacgaaggtcatgtgttcgcgatatgtgaagatgatgttccaggtccttcggatttggtccgacattcccctctggatttcaactggggaaatggcgaatggaggaaccgcccggcatttaccccaccagccatatggaacctttacggttttaaaaaccctatagttgggcctaggcttanaagtttctttttgtaagggcttgggtcttttgtttttgaattataatacacggatctttcttatctgttcctgtctctacccatctcattcatttgcatgttaccttcttttctgaaatgcagatcgatgacagtcctcgaaggtcaatacctggacccgctataacttcagcaagaatgan

SEQ ID NO: 236302 - DNA, 203 bp, Glycine max
ttgctttaccttctcttccattggtgattcttcattttttctccatggatctcctcacatgtcttgtgataaatgtttttaacatgattctttaaagtttccaccgaattaacttgctatagaagctagacttgattttctatgggtcaaaattcttgttcttgttcttgaaccatgaattgtgttgagtttacggtcctttg

SEQ ID NO: 236303 - DNA, 342 bp, Glycine max
  unsure (1)..(342): unsure at all n locations
atttgcggcatgcaagctcgcagctcagcaattgtccatgggtgagaccttacaaacagtcacgtttcagctgaatgaaatcttcatcgtcttcccctacgagtccaacacaggtccctgcccactacctttgttcatcttcttccctgcacaccatcaccgaataaaattgatgttctcgattgatgggagtgacccctctgggtggatcttcaagatcacccagtacttcgagtaccattcaaccccagaggcagagagacttaccattactgcattctacatggatggctgtgcgtnggcttggttccaatggatgaacaacaatggccaattcacgtc

SEQ ID NO: 236304 - DNA, 472 bp, Glycine max
  unsure (1)..(472): unsure at all n locations
tgtgcctcttcacgtctggaatatgaatgtagcatatagatccaaagacccttaggtgctttgctgatggcttcttcccgttccaagcttcaattggagtcttgtcttttacagacttagttggacatctgttgagtatgtaaacagcagtgtagactgcttcagcccagaatttgttaggtagtcccttctccttgagcatcgatctagctatttccataactgtgcgattctttctctcggacactctattntgttgaggagaatatgagactgtaagttgtcgctcaatgccttcatcctcacaaaatcttttaaactcgcgagaggtgtactttntgccgcgatcacttcttagtacttttatccgttttccactttgattntcagcaagggccttgaactntntgaatactccacagacttctgattttatttaaaanatataccatgtcatctagagaagcatcat

SEQ ID NO: 236305 - DNA, 400 bp, Glycine max
  unsure (1)..(400): unsure at all n locations
gagtcacctgccgcatgcaagcttgttggacctcagagttgtgtcaaagggcatgagtcatcatcaaatcatacaacaagctctacaattgtagcaggagggattcgaagctaggtgtagctcgaagaggaaaaggaagaaagctgccaaggccaaggatggtggcaagggtagcagaggtagatgatttcattattattattttttatcaccaacattgtaatggttgaaaacgttaccgtaacgannaatctttatttcatttgtgttaaggggagtttccaaaaaatattaaaactggggaggaaaaaaatatacattgtatatgtttataacggaatcacgattctatcgtaataagggggggggggtgcanaaacagtataataatgaaattatg

SEQ ID NO: 236306 - DNA, 414 bp, Glycine max
  unsure (1)..(414): unsure at all n locations
tcattaagaggcttcctcaagaagcttcctcgnggcttctntgataagctctctcattagacttctttgagaagcttgatgcaatccttcctacgaagggaccaatcactagaaccaggagcaagaggctccaagaagattgggctagagctgctgaagaaggccctagggttctcatgaaattcagggtagatttctgagcccatgagccaaggttgagtccaattatctntgtacatattagactacgatgtcattatatttggtccttatatttagggcttcatattgtaggtagggtaccctagaaatataggattttttcagcccttgtattttanggcacctagactagttnttgtattaagggtagtcttgtaatttcacatgcactaagtggatatttgatgtgtg

SEQ ID NO: 236307 - DNA, 290 bp, Glycine max
tctcttaaaggcatgccaaatcgaaagataaagaatcaccatgtaattttgataggaaaacatacttgctcactgcaataatagatctttgtacgacaaaagaaataattggtgaaaggcattgaatgttgcaattaatgcaatccatcgaccatttctctttctatatagatatcacacgagggaagattgaagatgtgagaaaatgaataatttctaaagtagtcctcctatttataccaaatgtccctttgctcaagatagataacgagttgctgaacattcaattt

SEQ ID NO: 236308 - DNA, 424 bp, Glycine max
  unsure (1)..(424): unsure at all n locations
tacatctacgatgactttaatactgtttatacatcatgaccgtttgtcttctttatagaaacaaaccagatgtttgctgcttcatatatactgataagagaaatcagtgctgccttttgcaaggactcctnatcttccaacttcaatttaaaaatatccatgaagagattttaaaatgaaagttgattaaaatatatcttcctttgaacacttatgtcaaaataaccattttattcttcaatgtctaaattcaattgattttatggctggatctctggatacatattcgaaaattaatcgataactcatgccacgaaaaaggtgttacctgcacagttatccagcaactgtatcagcaaagattcgctattgaacatctacacattatgaaagggttaattaacccatccacagtggctacttg

SEQ ID NO: 236309 - DNA, 342 bp, Glycine max
agctttgattagcttatatgaatatattagtattttctaatgcgtaactttttccatttggtttttgctaatggaaagtggttggctttcttggtgtgaaaatcatatgctaattatgtgcagactaaatttctacaagccaaggtaaattcttctaatacttatatactggaacttataatcacgaaggagatattatatatctttgctggtaatgttaactatgaaggtcttctggatcgggactctttttagtttttcaaaatcattatattatttgaatttttaatttcaagataaattattattttattagtcacttaactgtcaattaatacaact

SEQ ID NO: 236310 - DNA, 481 bp, Glycine max
  unsure (1)..(481): unsure at all n locations
tcttgcgtagcccctcttggtgctcagaanatccacnaacaaatccctcttattactagctattntgaattctttagttcctgaatgtacaaccttcaaattgttgctcgttcccctctttgttttctgcaagaaagaaaatcaatatcaaacaattcaggctgaattgttatcgttattattactcgaaccataacgaataacaactaaacaagtctctcttattcaaatggaaatggatgttgttccaccagcatcatcagctntggaacaggattttggtctccaaataccatggttggaggggattagatcaagggcctaaaaagcattatttttctacttggtgggatgacctaagagccatcatccaacaccagagtatgaatcctgctcttaaccaaatttgctggaaggtgggtaggggagatcagttcctcttttgggaagatccttgcgctgatgacgngactcccttaaa

SEQ ID NO: 236311 - DNA, 373 bp, Glycine max
  unsure (1)..(373): unsure at all n locations
ttctaatgacaaactagacatttaaatgcctccccaactttacaccaaagtgtatcatagtagttatggaatggcagccttgttacaaactctggaaaaanaaaagtgacatttggacttctattcttcatccaaagatgaaaaaattgagctggaaaactaaattttaccaagctttggaaggcaggtttctagctatggacctttttctctattcatcttgggaaccttgcccgaagagaagaaaagatgacatatatggataaggaactagtgatcaggagtttgttccaaacagactggtgcccccaatattacatacacatatattagtagattatttttcacatcatgattntttctctaaaataan

SEQ ID NO: 236312 - DNA, 430 bp, Glycine max
  unsure (1)..(430): unsure at all n locations
gtgtcttttgtgtttgaatttataatacaaggatctttcttcatctgttcctacgtctctacccattctcattcatttgcatgtttacttctttntctgaaatggcagatccgatgacgaagtccccgaaggtactaatacctgggacccgcctatcgacttcgagcaagaaatgagtcaaacggaagatgaaggaaacgaggatgtgggacttccnccagaattagaaagaatggtcgcccatgaggaccaagaaatgggacctcatcaagaagaaacagagctggtagacttacgaattggcagtggaaaaagggaagtaaagataggtacaggtattaccgcacctatccgtgaagaattaataatnctgctaaaagactaccaagacatctttgcttggtcataccaagatatgccccggttgagt

SEQ ID NO: 236313 - DNA, 284 bp, Glycine max
  unsure (1)..(284): unsure at all n locations
agcttgagacttgccacatatctttctctagttgttcttttgtcagcatgggctgttatgatggattcggtatctgaggggaacttcatagcccaggtgagggggtggacanctatcacacgctaaagcatttaaaagccggacgatcaaagaagtatattgtangaagtgtaggcatgcactatcccttatcaaaattntagaccttnnntgtttggtccctcatggccaaacttagtgtatagctatatgcatcccttggttcctactctttctacagcaaa

SEQ ID NO: 236314 - DNA, 463 bp, Glycine max
  unsure (1)..(463): unsure at all n locations
tgtcattggtcaatacatccttctatgctaataatcatttaattcgttctctntattgaatggattaattattgtgatgtaaatttcaaaattaaaaatgaagtgaattactcatagaattagaattggtagaatcattaaaagacgatccttttatcaagaaacctcaatttcaactcatttttatttattggctgatatcttataaactaataaagcaaatctatacacctataaaaaaaattgcagctccaatgataatagctggagagactcggtcatatgcatttgcaatatacgcaacaagaaatgccaataatcctgccaacagtgtcccgaatcctctgttgagccctttgcataaagttacccctagaaccaaaagaaattaaaaaaatattaagatcatgcacaaataacatgcnacagaaacacattatntaacataggaatatagaaatat

SEQ ID NO: 236315 - DNA, 282 bp, Glycine max
  unsure (1)..(282): unsure at all n locations
catgcaagctntgaatgctctattctatggagttgacaataatatcttcagactgatcatacacttgcacagtggccaaagatgcatgggagatcctgaaaaccactcatgaaggaacctccaaagtgaagatgtccagattgcaacttgtggctacaaaattctaaaatctgaagatgaaggaggaagaatgtattcatgacttccacatgaacattcttgaaattgccaatgcttgcactgccttgggagagaagatgacagatganaagctggtgagaa

SEQ ID NO: 236316 - DNA, 378 bp, Glycine max
cttatatttgtctcttacgagcaagttcattcccaaaaacttattagatatgaactaatatatatttaaaacctgcctctcgctgtatcaaactgactgttgaaagtttatctaacctttctttggtgtcacctcttcctattcgatgttcttatagaagaaacactatgattaaaactcactaattcagtagcaagaaattctcactaacttgaatgtctcctatgaactagaattttcttcattaacttgaatgtctactatttatataagtactgctgttaattgatttcttgagtgtctactatgaactacaatttttttcagtactttataatgtgaaaatttcacataacttcatatatatgagagagaaac

SEQ ID NO: 236317 - DNA, 170 bp, Glycine max
agctagggattaggttgatccgcaataggatagttgaagttacggatcaagttgatccggaagaagcatgcggatcaacctattatgcttgcggatcaagatgatccgcgtgaagctctactaattttaaaaaggtgataataagttataatactgaaaatggttttaat

SEQ ID NO: 236318 - DNA, 411 bp, Glycine max
ggctacacaaataacctgtgattgtgtcaatctcctgtgattgtgtgtatgaacattgaagtaggaaccattagcctatgtgacatctaggcaataaccagattgagatagtttggtgtggccatgactatagctctaatagcagccatgatattaagagtacctttttgtcaacctaaatacagtagagttgagagacatacagttcccttctacctaattatgatctcatgtctcccactttcttctccaatctctcttcattatctgactctatttcaatgattcagctctctccataacctgtcctgacatgttggaatattctgtaacctaagtacattgaacacgaggaatatcaataatgaggcataatattttgcctaaatatagttcattctatacttcaaa

SEQ ID NO: 236319 - DNA, 348 bp, Glycine max
  unsure (1)..(348): unsure at all n locations
catgcaagcttgtatagttccccaatttatggttattttggagtaaattntgtaaataaatcttgttttatggttaacgccgtctctagaacatttccattggatttaatgatgaaatctatgcattttcaggtgaaaaagaggctaagttttgaattgcaaaaaacaacagttggactaaacgcatatccaccgctaagcgcagcttcaacgctcttagcgcaaaggagaatctggcaaagcatcagcatcaaatccgtgcactaagcgtgagatcagtgagctaagcgcagtaggtgccttcagccaggctaagctcgagaatgacgctaagcctaatttcactta

SEQ ID NO: 236320 - DNA, 476 bp, Glycine max
  unsure (1)..(476): unsure at all n locations
ctcagcttgaggtatttattggtataatttgcctgttccattaggcttttaatgtctttagaggttacttcctcgttgacatcttttgtcttgaatggaattgccatgacaggtttattgttactgtctttgatatttggtagttgatattgtgttgtgggaggtaattccgattggattaactcaccatccttcacttgccagtttgttatgacatttgttgttggatcacctatgatgtcttgtttccaagggtaatctatatcctttctgatggcataagcatgaaaccaatcaaagaaaatgacattaattntgactctttcgacaaattcgtagaacttgtcttggatttgttttcggtttgtacccttgtaatgttggaaaaaccatctcttttgaggttcattctccggagaatagaaatctttcctaanggtttccttatcaatgctaaaagtgtcagataacatcat

SEQ ID NO: 236321 - DNA, 453 bp, Glycine max
  unsure (1)..(453): unsure at all n locations
tctgaggttgtcgtgtgtatattagaggatatgttcaatgaattatccagacaaggtaatgaaggccttgatatgactttctaggtctaatattaaaaagtgtgaaataaatatgatgcttatttttattgatctatatattattcttgtgtaatgtctaagattattatcctttcaatcgtaaaggaagaaaaaattaagaggaagaccaggcagcatcccaatgagcaatcccacattntgattgaggttgatttacttgctaatattgttgacataaggctttggcaagctcaagaaattatagaattgctcaaacctacggtaagttccttcacaccatgtcttaatcttctgtcctgtgggttatgttgtgtgaatcgactgctatcgagggttactttcatctctggtcagtattattaagtttgtgatccctaacagtgatacata

SEQ ID NO: 236322 - DNA, 373 bp, Glycine max
  unsure (1)..(373): unsure at all n locations
tttgatctcttttttgtgctctaaatggtgggagtgtgctcaaatatatggggcaaatttgatttggtttcttgcctgaatacggtgaattaagggtttggatgaaatggccctacgcctataatgccattttgagtaatggggcatgcccacattgtccccggtcttttgtattgaccactaaaacgcgcgcccacccaatgttcggtgaaatgcctcaatggcattagcgcgtaatttttgtnaggaaacaacccattgggcaatttggttgcacatattttnggacatgcattcattttcaaggactagagtaatgcccccatattcctangctaggaaccaaagtttatgcaaagtcacaaaaggagtg

SEQ ID NO: 236323 - DNA, 353 bp, Glycine max
tgtcaaggaggtgagcttacgtatgagaggtgtatgtgcagcttagctctagcttctcaaggaagttttctcaaagaagcttctcaaggaagttttctcaagaaagcttatacaggaagctacctatgctataaatacaagcatatgtagcacttattgtaactttgatgaatgagagtcttgtgagacacacttcaaagttccacttatctccctcttttatttcttcgatctcgtgctcccgcctctctctttctctccctctttcttttcctccattgaagcatcgctccaagcttcttatacaaggctcatcttggtggagaagctccttcttccatggcttattccct

SEQ ID NO: 236324 - DNA, 174 bp, Glycine max
cacaatggcatgtttatatggcagaatttcagtcttccgccatctgtcattgataacaactgatcagggaaagaagcactacattaaaaagtataagagttagaagcaatgaataaagagttggagcaagttatattagttctccacaggacatcacgagcacttagaaaagct

SEQ ID NO: 236325 - DNA, 463 bp, Glycine max
  unsure (1)..(463): unsure at all n locations
taagcttaatgatcagcacanagccatcatttgtaactatccaggacccagcattaaaaatgtataagctgtaatcaaatagaanattcctttccaatcatcaagattagtatccaaagaanaaaaaaacatgaaaaaaaaggaaattctgatttaatatacaagcactggccactcagtcatgtaccagcattgggcagggctgccataaaggaattgtaagaagactcaagatcaaagtgaagctgcctcgcctgttgttccgtcaactcatcagctgcacccatcttagataaccttgcaatccattccttcattntggttntcccctcaaaatcaggcggcaggaatgtcaacttattaagcgaagcataaaggtccgagagcaatgggtgcacctgatccacagccaccatgttaagtttcaaggaatccattgaagtaataaaattctgaacacact

SEQ ID NO: 236326 - DNA, 367 bp, Glycine max
  unsure (1)..(367): unsure at all n locations
agcttgcaaaatgcgcgctaagcgcgcgatctacatgcgctgagcgaggtggtgtcgcgctgagcgcgcatactaaggccccaaagccactttagcagctataaatagagagtcagttcaggggatcgacacaccaccacagaaccctcctctcctaggggtttcacttactccctttttttctttcaccccttctcgttgtaaaatctcaatggccatgagtggctaaacccttagttaaggtctgacaggcctagaagccaatgcaatgtatgatgtactcttcactatttatcaatgcaataccaggttnttctttcctattntcttttctnngtttacctttgcatactcatcttatattctg

SEQ ID NO: 236327 - DNA, 421 bp, Glycine max
  unsure (1)..(421): unsure at all n locations
tatccaaacaggaaaaaataacatatgctttctatgcttctgatagacttgaactttatatatttgatcaaataaagagtacactagatgaatttctcaataaatatttataggagaaaaaaataataaggtaaaatgaattaaatntctttgtcttcaactaacacagctaatttaactcataagtacttactgagaagtttatccaaataaggtctaaagcttaatcagataccgaaacgggtatggagggagtaaaantaattttaacaaaaagagtgtgacaaaaaacaatgaaatgaaagagtacttcgaaattggtcttctacaggtgtactgatggcccatccattattacgacagataanaacaacagggggcctcatgactgctgcaaaattcatagcagcatgaaaaatct

SEQ ID NO: 236328 - DNA, 346 bp, Glycine max
  unsure (1)..(346): unsure at all n locations
agctagcgctgatccaaaaatttcaaaaatcctatatgtctaaaacattagtctcgcttagcgcacagacgcacttaggcgggtcatcaatgaaactcatcagaaggatgaatgtgcttagcgcaatcatctggaaacctacaaattcatcaattgcgatgaacaggctaagcgcagcaggcgcgcttagcacgttcatcacaatttctagcagaaacacaggggtcctcaccccttttagtagcatntcccctaatgggcttaaaacttaacttaaatcctaaaatagcaaaccctaaagctaaaaaccctaacctaaacagcaatgcaagctaacaaagcaaga

SEQ ID NO: 236329 - DNA, 348 bp, Glycine max
cttatcaatgaatatcctatagaaccatatcattgaaaatccctcagacaatatcatacatgaaactatgttgatagatgtgcgaacatacgtagctatcatggtaaatatgacaccttatactgatggcatacgaacgttgattgttacactatatacttatgagatatcactgatctcttgatatattatgtcattccctatctatatttatgaacgaacattgcatctttaccacaagattattatgattttgcttgtgccacacaattatattatgtgattatgttacaataattacagaaggagctgctgctttagcatacagcctattgtatctatgtgtat

SEQ ID NO: 236330 - DNA, 267 bp, Glycine max
  unsure (1)..(267): unsure at all n locations
gcttctatataagctgnaaccatttatcaataaacacaagtnngagtttattcagaaaattaagagtttatcttttttatcttagtgagagtgattcttctaaattcttgagtgattcaagaacaccctggctgtatcaaaggactttcacaacctttgtgtgttgccctcgctggaaagagtgattctttccttccaatcatcttcacccttgttctttcaaaccacaattccagaaaatccacctctgcccaaaattatctcgtg

SEQ ID NO: 236331 - DNA, 458 bp, Glycine max
cggaagctctcgagaaaatcgagtggtcatatattttcacacagttgttcgattctgcgaaataatatatcgagacgcacgacattgaacaacggaagctctcgagaaatctgaatggtcataacatttcactcggatgttcgatccggggacataacttatcgagacgctcgaaattgaacaaccgaagctctcgacaaattagaatggtcgtaactcttcacgcgaatgttcgattcggggacataactcatctagacgctcgaaattgaacaacggaagctctcgagaaatttgaatggtcataagttttcacacggatgttcgattcgggaacataatatatcaagacactcgaaattgaacaacggaagctctcgagaaaatcgaatggtcataacgttccacacagatgtccgattcagggacataactcatctagacactcgaaattgaac

SEQ ID NO: 236332 - DNA, 153 bp, Glycine max
gcttgtgcattcgatatcctgatgagggtgttccatatgttctcaagactgtactaataaatatgctgaccaagttacatggtctagcaggtgaagatcctcacaagcatcttagggagatccatataggaaatgccaccatgaaacaccctg

SEQ ID NO: 236333 - DNA, 210 bp, Glycine max
tataatctcacagcgctgtggagagtcattatatactataacctctaccaaggttatgtatattgaaaactattaacaggtcatgcggaccagacctactgctattacgaaaataaatcacagaacacgtaaaaatattaccttattgacaaacgctcaacataacgcaatcacattattcagacacattgtaaaagtcaagctaaaaaa

SEQ ID NO: 236334 - DNA, 396 bp, Glycine max
  unsure (1)..(396): unsure at all n locations
agcttgatggtgtcgataataaatcacatgtttgtcatcatcaaaaagggggagaatgtgaatgtatgtatacatgatttagatgatgtcaaagaagaatctaaccaggctgcttcaaatgataagcatttgctttcaaaaataattaagaatgctttaacaaacaaagccttgtttcaagattcactaaagaccaagccttgccttnaaacaaagtgctttcaagacatgcaaggctctggtaatcaattaccaggaagtgtaatcgattaccagaagacagggttgagaaatagctgttgaaaagggttatgaattgaatttaacatgaatcgataccacatgtctgtaatcgattaccgcaacgaaactttggaaatcaaattcaaagtcata

SEQ ID NO: 236335 - DNA, 470 bp, Glycine max
  unsure (1)..(470): unsure at all n locations
cccattttctcccctntggcaacatcaaaaagccaaagaacttgggaatcaaaacagatatataataatgaagtggaaacagatcaattacaaagtataaggcataaccaaccaaactcataaataaggcataaccaaaccagaatccaaacagttcaaaattcaaaaacacatagtatcaaagcataaaagtctgaaatccaaatactacaagataaataaagtactgaaaataataatctaagtagcatagccaaaatacacggcttataagagacatagaattagaaactaaattctaagaaggtgaaggtggtggtggaagatcgaaactctgacgaatgtaacccacatcctcttcaagttgtgtgaggcgaatatccattccggcaaaacgtgtatccagtgagtcgaaacgttcaccaacataagaacgaagaacccgtaattcggaaagaacttcagtcatg

SEQ ID NO: 236336 - DNA, 412 bp, Glycine max
  unsure (1)..(412): unsure at all n locations
agcttaataggccttctttgtcgggataagcgactaccctaaatgcatgacgattattccacttatgaatcattggggcgaacaattgcccccaattttcgtcatgtttcccttttaatggtatgccatgaatgtttaaggttgtgaaggagacttttgaattgggtgctgcatcccaaattgtctcaatactctgtccggttggtgccactcaataacttgaaacaaattagtggcaccaccgcgtaccacgcgagacttccgactaaacanacgggaggcaacagtgatataacggttgatgggtgctcccacacaaactgcaattaacaacatagttgtgaacattttagtanaataacacatataantttttattnntacaaatacatagcatgttcttacctcatga

SEQ ID NO: 236337 - DNA, 473 bp, Glycine max
  unsure (1)..(473): unsure at all n locations
tgcccaatgtctcaataatntattttttgctatgtcagaaatttcccaaggttaattacttcactgtaaatcaccttgaagaagaaacatggttttgtaatggtcatcctcacctttttggcaaaatggaacagatgcccaatggtaataaatgttccattagaacatgacaatatgagactttaaaccttttaacttatggtctttcatagatacgaggcttccaatgtttgatgagtatccctttggaactttaactccatgaagaaacttacaaaaagatatttttttcttttctagataaagtataagttgtgataagtgtcatatttcagttattgttggtattaaaatgttagcacttatctttcgattgtaatagttttcttataaactttccttaaacctagttgttttatatatattgtacatctactaatgtttttggttcaatatggaatatntatcgatga

SEQ ID NO: 236338 - DNA, 316 bp, Glycine max
  unsure (1)..(316): unsure at all n locations
agctngtaaaactataatctatattgacattcaaatatgttgtattaaataaaaaccacacgaatgctaatatataaaaaaatctttatattttagtcagcgtctgccagctcaattaaaaaaattttgatatgcattgtggttagatcaacaaaataactttgttctattttaattattgcttgaacgtatcatgcgacagtaacacaaacttcaaaaatatatattgcgccaccttccagagctaccattagctgaagattttatgtggtatggaatttataaccactatttagcataaaaaaaattgtccgaa

SEQ ID NO: 236339 - DNA, 481 bp, Glycine max
  unsure (1)..(481): unsure at all n locations
acagcctctgtgaccgcggagacgccgacttcggagcgagcgtttattgccgactatcaacgacgatctcaggaacttcgaacataacactctcacagcaattgctgatcaagcgtttctacaccgttctatgaatgctgagaagaagcagaccatgttatacgcggaaacctgctacacgtattcaatctgatgaatgctgtcctatagccgtaaaactgcgacgatgtacccgtgcaccttcacagggatgacgagcgtttcggacgcggtattcacgtagagctgaatgttcatgggcgtggaactgacagctaatgtccttactagtcttgcctcgtcttggaggtcacttgaagctgaatgcgtatgtcgtgaaggagttctaccttacaatgatcgctattgtaatggagaacatggtcatggcgaatatgactcgctagtagacccgaatgtactgaacgcccgacgttcttcn

SEQ ID NO: 236340 - DNA, 369 bp, Glycine max
  unsure (1)..(369): unsure at all n locations
aggtcaataatacggaaacattgccctttctggacttcacacatccatgcctcacccgctggacagacttcatttaaaacggttttatcaaatgctngtaaactggtcatgcgtattctcctcgggttaagcagcatcaaatgcgtaataacgtgcgttgttgtgaaaaccgcgttggttttgtgggcatgaatcacgacagacatcgtgtactgctaaagcggaggctntgaataagcgcatttgaatatcggctggctgatactttgctgcttggcttaaaccatgtggcgcgccagataggaacaccagacagtccatctcaaaacgcagttcaatagttggatgggtattgtcagtatcgatata

SEQ ID NO: 236341 - DNA, 464 bp, Glycine max
gagatgtatcggagtggacgcgacagcctgttacttgaaatgaccaatttctcattacgtcaagccgacctgtcagctacggtcaatttattctctaaggttcgtcctgatgatgcaggcaacttatcttatatcgatactgacaatacccatcaaactattgaactgcgttttgagatggactgtctggtgttcctatctggcgcgccacatggtttaagccaagcagcaaagtatcagccagccgatattcaaatgcgcttattcaaagcctccgctttagcagtacacgatgtctgtcgtgattcatgcccacaaaaccaacgcggttttcacaacaacgcacgttattacgcatttgatgctgcttaacccgaggagaatacgcatgaccagtttacaagcatttgataaaacccgtttaaatgaagtctgtccagcgggtgaagcatggatgtgtgaag

SEQ ID NO: 236342 - DNA, 350 bp, Glycine max
agcttcagcacaagaatattatgactgaaaaatgatataacctaaaatcatcacaaaaacatgattcaagggtagaatctataaaattgaaccatagaaatgcaagaacaagtgtagatctaagaattaatcggtttatttttctgaatctactataaacaacaccaaaccacaagataatggaggagatacatggagaaaatgatgaaaaacaaggaattaaagtaaattgactgaacaaaagatagaggaagcaaaagaacatcacttagatgaatatgttcttgataccacatgatgtagctccatgtagagtttgtaggccttggatcttcttcatcaatggagta

SEQ ID NO: 236343 - DNA, 470 bp, Glycine max
  unsure (1)..(470): unsure at all n locations
tgtggactataccttcgactgaacacggccatgtttctgtctgggcccggattcaatgcgggctgcagcaccggctccgcttccctaactgtactggaggcggttgcgatggctttatcctctatggttttctggagttntaacatgacctccgagatggaagccatttgatcttttaaggctgatagatcggccttcatctgttcctgcacaccctcttcattatccatttttctggatcgagtgttataggggtgccttggtgttttcttagttatgatgaaattcctaaagaaataaacaacgatgagtatgccaccaaaacatgagtatgcaaatggatgatcggaccacttggatccaccccaagggtttttagataacatgatgagttcagaacttcttaatttataaaaagaacacagctttcatcttgccaagaatatacaaaaggttttacaaaagaacct

SEQ ID NO: 236344 - DNA, 191 bp, Glycine max
tgcggtatttcacaccgcatatggtgcactctcagtacaatctgctctgatgccgcatagttaagccagccccgacacccgccaacacccgctgacgcgaagcccttgaggcccatcgaatataacttcgcgtcatgtatgcttacgaatcattatcgacgagctcgaccttgcttgttattccaggaccg

SEQ ID NO: 236345 - DNA, 403 bp, Glycine max
  unsure (1)..(403): unsure at all n locations
agctngactggtaagtttcaactatcacagaaactaatcttttgttgaatnctncatgttattgtattttataaattataaattattgtcctcataatattttggtagtaaaaaagttgaggagaggaataaaagtaaaattggaggctacacaacccccagagtggtaaccttttctctttcgaaatgcgtctcttcaattgttgaacatattatttaatattaaagacttaatttcattccaggggacgagagatggcgatgggtatatttcactaaaagttgagtgaataaattaaatttgaaaaagagagaaagaagtccagtttgcaaagaaatgacanaaaaaacttctcatatatttataaactaaagataactataaatgctanaataataaatg

SEQ ID NO: 236346 - DNA, 196 bp, Glycine max
tcaagcatcatgaatcccatcccggattcggagatgaaatccagatgctacgagtccagactgtctttaggatatgtattaacagaattttttctatacccaatatcgtaatcttgtgctacaaaagaattttctcaaagtttctcagttaccagagtgattactctctggcaatcgatatccagttattagttat

SEQ ID NO: 236347 - DNA, 134 bp, Glycine max
tccaactgataatgaaataatatttttatattcctagaattattttttttgtgcttagagacatgctggtgccatatatcattttatatttatttttataaacccctctctttattttaatatataactatata

SEQ ID NO: 236348 - DNA, 464 bp, Glycine max
tcttcgtcagtgacctctatgcatgatttcgtctcagtcatcattacttatctcttcttccacgctgcatgtgctactgtatttatattattgtagattactcattgctcatgatatgaaattgttgatcccataaatgctttctgtatattgcctcctactttcaagtgtttatgaatttattcaatttgatgtaaattaaaaaaaaaaagattatcctaaaacactcaattttattcaaatatatattatcttaacaagagatccatgagcaatgaatgttgcgaaatatatggtgtaggatcacgatatgaatgattcattaccctaacgaatcactgtaaaagcaggtaaaacgaacaggtcaataatctaatttcaattctcatatgtttgcattcaaaaacacattccttaacttgaatgtcgaagtatatttctaagtattcactcatcaccatcga

SEQ ID NO: 236349 - DNA, 415 bp, Glycine max
  unsure (1)..(415): unsure at all n locations
gatcgattaccgatgaagaccgattgaggaccgtcgaaaaccggtggaaacttttgcaagaatcctaacgaaaaccgtaccggaaccaatccggaacggcctggcttaagatttctttaacggaaccattttttccagccaaattcaaaggagaaaaagtgcctaggggcttgaccctttttcttcttgcattcctccctnattatagcaaaataggggaggtggggtgccgctcagctcgcccaggcgagctcagctcgtccaggcgagcanggttgctttcttcagaagcaccgccttctgaggaatcttctgaggcccaaatggccctggtgctatttgcaccctcattttacctaatacacnnnccctctgctgtttttttggtgatcttttttctaaacgtaccgaaacn

SEQ ID NO: 236350 - DNA, 482 bp, Glycine max
  unsure (1)..(482): unsure at all n locations
tcttttggaccttgaacaggcaactaactcctctntcanaaccatgccatgtgctctcgactggtccctttcttcccttcgcaacttgagttcactattgctaccccatagagctccgcgaaatttgttccggccatactcttccttgcgagccctcttggtctcttgttcaagggctcttgcggtaattgcattctcttcccgtaacccggcgcactccttccgaacgtgtgtagcagccaacttgaacttctcctcggcgagttttgcctttcctaactcgcttttgagagcttggacttcttcgtcctcttccggtgcttcaaaattctctttgctgacgacttttaacttggcgagccaatctaaacctcgtatgcgaaccttcagccattcgtggtacccaccaatgatgccattacgaatgcctctaagctcttgatctttccttaacggngtttcccatgccttatggattcttt

SEQ ID NO: 236351 - DNA, 512 bp, Glycine max
  unsure (1)..(512): unsure at all n locations
ccccccccccggtaattttgaaanccnttgnanacctcgggatcctcgtagagtcgattggcaggcatgcaagctnntagttgttatatatatatatatatatatatatatatatatatatatatattatacatatanntttttatctgaagatatatntatataagtttacattataattctaatatatttacgttaacgtatgtttacgttatatggaatataatatatntatatatatgtnttaatatgattatgtttaatataattaatggttctaatatttatgtatatatatattacttataaatattcaataacgtatttttaatgcttacgtatcattacgttaatatattcaataagtttttaatatattaattacttatttatatatatataccataattnttataatacaattaattacatatggtatattaatgtgtttactatatataatattatnattatttaatgataggtttatgaatattgctattattaaattc

SEQ ID NO: 236352 - DNA, 408 bp, Glycine max
ggtatcggcgtattcactggagtatgctgctatcagaccactgttgtgggactctaacatgttgataaaaattgctctggaggctgacttcaagcatgatatttattattagagaaaggattatattttttttataatctgatatagaatgtaattatgatttattcaatcatataaattatatctatctactatcgagatcgtgtgcatcaaatattgttctaattgaacgacagttaacagggtgtcaaatgattcacatttagtatattttaaactcttttattacgtcgatgatcatttatatgaacaaaatgtcaaatgatgttgcattgatatacaattttgcatgtgtaatctatgtgaaagagactttcaatccaacatcgaatcttaatgaaacattat

SEQ ID NO: 236353 - DNA, 352 bp, Glycine max
  unsure (1)..(352): unsure at all n locations
aggtgcgtagcccaccattntccatagtataatactggtaatgtgtctactatcattgcatcgtttttcgtcattgaggtgccactttgagctgccaggttctccacctttgggcgtatttttgaaagatttgtgccccctttttgcacatgttctgtagttgcatcctatccaaagacattatactgacactgcctaacgaaggcaaccactaggtccttccaagaatggactcgggaaggttccaagttagtgtaccangtaacagctacccagtaagactttcttggaggaatgtatcagtaattccttatcttttgcacatgcccncatctttcgataatacatcttt

SEQ ID NO: 236354 - DNA, 422 bp, Glycine max
  unsure (1)..(422): unsure at all n locations
ctccttgtctatgcnttcatctttttgcatctacgaccaatctctgcccttgtcaatgcccaaaatgttacatgtctcattgttgtgacgcgttctgggagtcatgtgattgcttcgagatttgtttataatgttgtgagatatgacatcacgtgccatgagatttgctgaaagtcacaaattagattcaagtgccatgagacttttgtcacaccgctgtgagagttgatagagtacttttattttggtcccccatcattccatggatgtttgggactaaaaaaataatatttttagttggtggaccaaaatcaaaagtgtttcaacattgagggactaaaactaatttaagcccaggctaattaactaagagtctaagaggttaatgaaaaanatctctatctaaaacaactactaaaatg

SEQ ID NO: 236355 - DNA, 385 bp, Glycine max
  unsure (1)..(385): unsure at all n locations
tcaaacgatagatacattaatacacgagtatcattgttgcactgttagggttgcggctaaattcaaattagtggtgactggcatcatgctaaatattgccttactataaaaaaataaaaatgaaatacaaaattttgcgcccattttgtgttggcctactagcgtataacgttggtgtcgagcatgatgcaatgtataggatattattttagtcattntgcttagtgttagtgttggggaaaaaatgtggatcaagagcgtgaaaatctcaaattctataaaatatgtacctttattatgtcagtgacacctaattttaccttgcaatgtgtgcacaaaagtggtctatagacatgtgaaagtcactggttgatgtgtgcaaaat

SEQ ID NO: 236356 - DNA, 462 bp, Glycine max
  unsure (1)..(462): unsure at all n locations
accttctcacagtgtgctatatcatcatctgcttgggtatcttattggattttttgatggccattgtgaaattgattgttagtactctttgcacaccttcaagttgttaactttgaaagggtctcttgagggtgctgaaagtgtgtgattcatggggcgagtttggagaggctttagttatcattgggacattggtatgtgtggaaaatagaaattgagttttagagaaaacagggtcacgtggatgtggggacatgtagcagaccacacccaaattcttcgtacatgtctgcgagagttgcaagcttgaaaagaanagattcagattctttttttaatggtggatcgcaacaaattcaaaatatttaattattcatatgtagttaataattgtttttgggatctagaaaatgacgacaggaaaatggatagaatgaaacttaggtatcgctgtgatggata

SEQ ID NO: 236357 - DNA, 307 bp, Glycine max
  unsure (1)..(307): unsure at all n locations
agctntaacatgtcactatgtgtccagaggacctatcctncaatgagcttaattagtattcgtgcattacacacatgcgttcaatatatggattaaaacactggacgtaagttaataaaacacaatgttttgagtgcatttatgctaagtcacctaaagcacgtcggatctcttatgaaaaaagctatatcttttcaactaccttcatgttctctttctctctcttcaccctaaacacttaatcgtcaccatcactcatcattatgacctttcacttttaaaactctttgaaatctttttgatattc

SEQ ID NO: 236358 - DNA, 484 bp, Glycine max
  unsure (1)..(484): unsure at all n locations
tactcagcttggtacacgcggagatttacgtcatctttcgtactcacaagatctgtcatactcacatttgagtcacgctgaccggcggaaatacccgagtggttagccgtataaacattcttcttgctatctgtaagacgaaaagcctgatagcatgcgaagactgacatcgtcttctgcgcccttcgtcaatcgcggccgacaagcccattgacacgcggagatttacgtcatcttcggcgctcacaagatctgtcatactgacatttgagtcacgctgacgggcggagatacccgagtggttatccgtataaacattcttttttgctgtctgtaagacgaanagcctgatagcatgcgaagactgacatcgtcttctgcgcacttcgtcaatcgcggccgacaagcccgttgacacgcggagatttatgtcatnttccgcgctcacaagatctgtcatactgacatttgagtcacgctgacc

SEQ ID NO: 236359 - DNA, 348 bp, Glycine max
  unsure (1)..(348): unsure at all n locations
gctgtgattttaactattgaagaaaaataatacactatataaaaaatcttgatatcggtgctcattgtaaaatctatccaaagttccacattcttccgtatccaatactataataaagaatgttttgctggtttcaaagctatcccatcttgatttagtgaccacacaatgctnttttcccaggctcctagttctcttaaacggtgattcttgttctttttaaagagttaatgagatttcataagatgggtatgcaaaatactgggatgttgaatcaaactcaatctgcatcacattcatcattttttttaactatctttgattatgtgcattgatgttaaaatactc

SEQ ID NO: 236360 - DNA, 282 bp, Glycine max
  unsure (1)..(282): unsure at all n locations
tctagccaaatggacttaccttgaattaattcctttgatagccctgttgagccttgtttccctttccttgttttgaagctcactacaagccttaaatgaaaaaccatgttatcaccatatccttaatgaattctggagctttggaattagtttgggaataagtgtggggggtatttgtttcattggataacctgttntgatggctatgcttcatgatgtattttgggccatacttgatgtacattgtatattggttaaatgttggacatgctgaatgaaatg

SEQ ID NO: 236361 - DNA, 386 bp, Glycine max
  unsure (1)..(386): unsure at all n locations
agcttgtattgtcactcagatcttgactagttatagctttctaaataaaatgagtttatctccacgttttactccaaaaaacagtgcgaatcaagtcactcccacattttatctctagcaggcattgtatgttggtctcgtcctttgtcacgggaagtcggaaggtccatataaccttcttaactgtacacatggngcactgcgcccncaaatgcgcaagtaagaagagataatcttccaggctctcgtgttcataaatgcattcatatcatgcatcgcataagcatctcttcatggcatcataatgaacatatcattcccgcatttgtcccgtatcatattccagcctcacattttgcatgnagtcatacatcatcatgcatatg

SEQ ID NO: 236362 - DNA, 470 bp, Glycine max
  unsure (1)..(470): unsure at all n locations
ttgagccanaatcctgactcaccataaaccttgacccagggtgataatgtcaatccttaccctcggaagcaaaaaaagaatagaggggaaatttccaatcaaagaaaaagagaatgaaaatttccaatgaaagcaaaaaaagaaaagaaggaaaattccccaatcaaagagtgggagaaagcaaaaaaagaaaagaaggaaaattccccaatcaaagagtgggagaaagcaaaaagaaaagaaaggaaaattcccaatcaaagaatgggagaaagtaaaaaaggaagaagaagaaggaaagaaagctcctgatcaaggatcgaaagaaaacagaagaaatgtgcagagaggtctttggaccggacaatatctgaacaatacagaattgccaccaaatgaacgantaaagaaggaaagggaaccacgacctaaaatagtcttcttcctttattaccaaccaaaatcccgtg

SEQ ID NO: 236363 - DNA, 380 bp, Glycine max
  unsure (1)..(380): unsure at all n locations
agcttggttatggacaatatcaccccacctgacgttcccaaggtctcctgacccccgcaacatatctccaggtaccactctgtggtcaacaaacaaaagtaggaagactgactcttccactctttctcacatcaagcttattggattatggggcacccgtcttaggtggtactaggtggcgatcgggcgatggcgcaaaccaactttcccacttccacaaatcanacataaacacaccatccccagttgtccacctttcaactgagctcacgcactcctacgtagcccttatcctcgttcctctcagcaccgagtccccatcaaccctttccagctttcataatatccaagcaattcaatcccaaatatcatgaaactac

SEQ ID NO: 236364 - DNA, 452 bp, Glycine max
  unsure (1)..(452): unsure at all n locations
tcatgatgatgaatcaagttgattcaagttattttgatgatgactaagatgatgacaaaaatatcaaagaatgatttcaagattcagccaacaagttcaagatcaagataaatttcaagtttcatgagaagatatcaagaagattcaagaatcaagataagtttgatttcaagattcaagagaagattaattcaagattcaagagaagaaatcaagaagacttcacaagggaagtattgaaaagatttttcaaaaaacaaacatagcacaattttgtttttcaaaagagcatttctcaaaattttctaagttaccagagtttttactctctggtaatcgattaccaggttcctgtaatcgattaccagttgcaaagtttgatttcaaaagcttttaactgaatttgcaacgttccanatggttnttaaatggtgtaatcaattacaatatat

SEQ ID NO: 236365 - DNA, 478 bp, Glycine max
  unsure (1)..(478): unsure at all n locations
aggacccccaccacctcggtgcctggaccttgnnntgcanncnccnngnanttctacgtaaccgtcgagcaccgggaatccttgagtcgacctgcggcatgcaagctgggttcgaggtacttacccgttgaagatcgatgaccgatgaagaccgaccgaggaccgtcgaagattggtcgaaaccttggcgaaattcctaccggaaaccgtaccggaaccgtttcggagccgcttcggttaaaatttcttcaccgaaccatttttccagccaatctcaagagagagagtgcctaagggctgaccccttttcctctcacttctccctattatagcaaatagggagatgatgccgcccactcgcccggcgagcgggttgcttctcagaagcacagctttagagaatatctgggggccaagggcctggtgtattgcacccatttactagacaccaccttgattttttggatcttttgaaaga

SEQ ID NO: 236366 - DNA, 371 bp, Glycine max
ctatgaacttggaaaggaacttgaactatactatagccttctcgtgctggtgtatcttgatattaggcagaggcaattctcaaggaacatcaagctcactttcggataaggttcatcaagttgaatggaaatcttttatcaccctcatcttgttcttggacttaaacctcatgcagagggataagggtataccattataatgattgcatagttggtcatatagggttaattgaaagtatataatttctctatttttttcaggacagatttgtttaataattataaatggattcatagctccttcttgactttcagcttctacagtgcattcatatcaagtgataacattctcttttatgaataataacatg

SEQ ID NO: 236367 - DNA, 381 bp, Glycine max
  unsure (1)..(381): unsure at all n locations
gacatgtgcctgagatgcattaaaacctaatctcaccaggaaagctagatgaagctgggatgacaaaccagtcagtgccgaaagatggaatcatagtagagaaagcatggtcattgctcgaggaaaaaggaaggctcttgtacatcatgcaggaaagatatgcaaatgggagatgaatgttgttcaaatacaaccaagggattgtggcacaaaagattgtgtcacatgagtgagaaagggttggagtttctagcagggggatcatttccaaacataaaggccagtcacttgaaggtaacaacgcanaatgtctttcaaagatcgatgaggctggaggagaaaataatctagatctgtcactagatgttgctcacgctgaaa

SEQ ID NO: 236368 - DNA, 249 bp, Glycine max
tgcaacatttctttctacacattacatgccatataactattgttcgtaaacagaatacatagcattatggtgagtctaacaagataaggacacaacatgttactatcttcatttgtgaatggaaaataaatacgaaggaaaattgtcttgcacaaatatgtataatatagcatctattatgggccttcccaaaatcaaaacatagcatctattttggttcgacttttgttgaaagtgtgtaccccccgc

SEQ ID NO: 236369 - DNA, 126 bp, Glycine max
ctgttcaatggcttcaaatggttgcttgtggcgtccttaatttaatgactggtttattattattaattaaattaccaaaacccatgtgaaaatttttttcctcctccttttccttttcccctcctt

SEQ ID NO: 236370 - DNA, 484 bp, Glycine max
  unsure (1)..(484): unsure at all n locations
taggagagatatacagacattgtggtgcctaggaagctattaccggagaggaatgtggtagtttattacactgagttcgacaagttcaaggaggaactcgagagaagacactgtgatgagaagttgactgattgtgccgatggctgtatagacattgctattgtgaaggaattttacatgaacctctatgaccccaaggataaatcaccgaagcaggtgagggtgagaggtcatctagtgaaatttgataaggatactttgaacacattcttgaagacccctgtagttctggaagagggggaaaatttgtgtacttattccatgtntgcactcctgagacctaatcctcaggagttggctgctaagctctgtatcccagggagaggattcaagctaaatgctgatgggcagtctttgaagatactgatgaagaacatgaccactntagcttcgacatggagcgttctttccttttctaacctga

SEQ ID NO: 236371 - DNA, 439 bp, Glycine max
  unsure (1)..(439): unsure at all n locations
tgagatgaggaagtgttgaagggtgaaacttcctgctnttattgttgaccacagagtggtacctggagatatgtcgcggnggtcaggagaccttgnggacgtcaggtggggtgctattgcccaaaaccaagcttgaccaatcccgacccaacccgggcatagtcggtcagtgagaacctgtgatgtacctaagcaggcgagctcctggcagtcaacagataaaaggaaaacaagaccacaaagcaaggaggcttgtggtggctggccagctgtgaattttgtgtaatatgtggattgtggcctctggtaatcgattaccaaaggtgagtaatcgattacaaggcttaaaattgaggacaggaggctaagatggtctctggtaatcgattaccaaggggtgtaatcgattaccaggcttgaaaacgaagtcaggaaactt

SEQ ID NO: 236372 - DNA, 315 bp, Glycine max
  unsure (1)..(315): unsure at all n locations
tgaatctgcggccacatcatggactcctctaaggacaatatcatcatttcttgcactgaattgttgggagttggaagccatcttctcaatcagattcctagccccaacanggatcatatcactaagagctccacccactgcagcatcaatcatactcctctccatgttgctaagtccctcatagaaatatngtagaaggagttactcagaaatcttgtggtgaggacaactngcacacaatttcttgaatctttccagtactcatacaagctctctccactaagttgcctaatgcctgaaatgtctnttctgatg

SEQ ID NO: 236373 - DNA, 405 bp, Glycine max
  unsure (1)..(405): unsure at all n locations
actatgaaagctgccaactgaatagcatgttattcaacctttagctttatctattntgttcgttacaggatgcacactttatggtggagctcatgggtcaggcttgtgcattcccactaatgaaacgtctcatgaagttaattacgtgggaaaccggcctgcacaaaattgtaatgcaagcggattttatggatttcaacatggtcaaccttaccagcatcataatctatggataacttaccctggtgattacctcaatagagtccaaggtgggccatctaacatgccacaacaacgacggcctagcttatctgagagaacaacaaagctggaagaaactcttgcttaccttatgcaagtgtcattgactaatcataagagcacagagacagtcataacaaatct

SEQ ID NO: 236374 - DNA, 496 bp, Glycine max
  unsure (1)..(496): unsure at all n locations
agacaacaaccggttatttgaacnccatgcgntacactgtatccgttcgagaacntgacncnttagacnaccctagaaacaaacccagactaagttttttttgtgagaactctttctatacaaggtgtggccttgctagcaacctattttgaccacatctttgcaaatttgaggccatgtatatggttagagaaaatcgaacgtgtgttactgactacaatggtattcttcccagatacattattcaaatatatcagttattaccctcccaggaataatttccaaaataacaatacatattagctggtgaacatactcaatgaagagaaaattcgatattataaactagggcttaacaatattagttgtgacaatcatactattgtggaggaagatccatggtatacacctttccaatgaaaagcatcgcataatctgactcctttagtgtgagaaaaagaaaagctacccactttttaaatcggctgctaattcg

SEQ ID NO: 236375 - DNA, 538 bp, Glycine max
  unsure (1)..(538): unsure at all n locations
acccggcaatgagacttgaatgacngcnctgatanactcaagcttataacaacacactattaactctgtgtaaagactagtacagatcttgactctcgtgtactcccttactgaggaccttggcgaagacctttattcactcaacttgagactttatcttccttcatctatttatatgctcgaatatggtgctgcgcaacatggaacacgccatcccagttcgtatatatctataccgcacacgtgttcttnatagaacacgcccanngctggaccctttcccatgaattattttaggttctaattagaggcgtagcctatactgaagatactagcgtggacacgctcactggtgcgagaatgaaatgtgcgtatacatgatgaatcagacagcttccatggatcccataggtgtcataactatctaccagggaacacacaattgagacgtacttgccaccaataatattatcccgaatattgtggctacttgctattcaatgaaccgaaaacaattctgattggaaccacgatgacc

SEQ ID NO: 236376 - DNA, 375 bp, Glycine max
  unsure (1)..(375): unsure at all n locations
gcaagctcgccgcccagctcgcccaggcgagcaaggttgcttcctccagaaggaacggcccaagtgggcctggttgctatttacacccccatttttactaaatgcaccccctttctatttttttgtaattctttttccgtaacgttacgaaactttacgaattccgtaacgatacttattgtccttctgcaaggttatgaatccttacggattatgtatttactcttttttagctttcgaagaagttacggaaacccccggattgcgcaaaaacacctcttttcgacttccgccacattacggaatttcacggatcgcgcangcctcgcttcttttaatttctgagacgtctcaggacttcatttactgtgcaac

SEQ ID NO: 236377 - DNA, 458 bp, Glycine max
  unsure (1)..(458): unsure at all n locations
tataagaacaaaactgccttaatcatttccaaatatgcatgtgatttangacgcatcttcaagaatcaagccaaggctattgtgcaagcaatcaatggggccaaacacaccaaatgattataatgatggatggctcaaattctcacaaaggtaaaatcatcactttcaaattgagctttcaaaactatcatgacatgtagagaagaatcaacgatttcnagtcacaaaatgtctagaactgttattntcaaaacaattacccatttcttgaacatatcctataattcaaagaaaaacatgcaaagtcgtacgtgcacacaaanatgacccaaaatattaaactaaaaatccgacgaaactaacaacattaacaaattaacaaaaccattcaaactagcanaaccaaagaacacttccccccatacttaaacaacacattgtcctcaatgtagcacaat

SEQ ID NO: 236378 - DNA, 325 bp, Glycine max
  unsure (1)..(325): unsure at all n locations
agcttatgcgcatacttctttacgaacgttctcttgcacaagacattctattaactaagaaaatgcacccatatacaataaggcacctttcgtacctaaaatatttacatgtactttccaggtggattttgtaccttaataacacgcattttctttgcgtaatttacatacatgcctactcaaagcactttgctatcaaaaatgcatacgtgcacattctgggttttctaatacctatacatacacaaacttcatgatgaatcttgactatctacacaataaggtgctacatntcatgctcttttcaaagttttttttactacct

SEQ ID NO: 236379 - DNA, 453 bp, Glycine max
  unsure (1)..(453): unsure at all n locations
ngtgcagatcaaatcactcctacatttcatctctagcatgcatcttctttctttacccactcctcacgtttggttatttcggggagaaacaccataactaaacgcaccgcaagggatccctatcgcaccagatccaaatctagaacgatgggtgatcaagaggagactcaggaacagatgacagccgacatgtctgctctgaaagaacaaatggcctccatgatggacgccatgttaagtatgaagcagctcatacagaagaacgcggccaccgccgccgctgccagttcggctgccgaagcagacccgactgtcttggcaactacgcaccatcctccctcaaacatagtaggacggngaagggacacactgtggcacaatggcagccctcacctgggatacaaccgagcggcttacccttatggatngccgcccaactattcaccacccgtc

SEQ ID NO: 236380 - DNA, 374 bp, Glycine max
  unsure (1)..(374): unsure at all n locations
nggtttgacctttcaatatgtaattcagaagactttttctctatgccagggaagttctctgtaaaaacaatctttcgtctactttcggttagttggtaaactaacctcattcaaaagtggaactttctgaggtgatactgtcaaaatcttctgatcactgcaaaaggactctttgatgattaactgtcttcattgctttgtaaggaaaagcctggcagtgtgtttcctataccactggtttgtatcgcatctaaggctacgggctgcaaactatgagagtcataattggcacattatatgtatgtaaaaaaaaaataggacggtgtgtactcactgaaacaattcatgtgatggtatgtccatcaagatctttn

SEQ ID NO: 236381 - DNA, 542 bp, Glycine max
  unsure (1)..(542): unsure at all n locations
cgctacggcncttgaccccatgtattgagtgacactctatatacgtgacactatagattactgaagcgttgagctgtgtgcactgccatcttgctctaaattcgtttgacctacagagtagtcacaccgctagactatgtctatagtgagtcagtgataaccttatatgacgtgatagagggctgctatatgaccattaacaagctggagcaatccataccctacccgagcatattcgatcatttacatcatgtaatgttatttgatctgcgagctcctttcttactacacatngaaggtacctatcaccacactgtaaagaggatcagtgaaggtggacatgtgtatgtgtatgataatgagtagaatgtgcactctggttattctatactgagtagagtgagttagggacgaggctcaaactagaagactggtcgcatcatatgtctttactcattaccgggagatgggtaggacttgctnagtattaacatggagctgaggcccatctgttatgactgcagctatagagttctcttatn

SEQ ID NO: 236382 - DNA, 341 bp, Glycine max
  unsure (1)..(341): unsure at all n locations
agcttaacactaagaaggtataggccatgattcctgcaactgcctctggactcantttgtggagaaggcctgtgggctcttccgcttccattcttgctcttgccaaagttaacccgcctatctngcatgaatttcttgcttcctagaacttgatcaactacatcaaaccaatgaatgccataattagttagttaattaatactactatatatgttagcaggtacacttcatacataaccaaaatgctataaatattccaagtgtctggccattgtgcttangaacattgtattattgcttactacaactttgtaggaaaagtcagttcctgttaattgatc

SEQ ID NO: 236383 - DNA, 326 bp, Glycine max
  unsure (1)..(326): unsure at all n locations
tanacactcgtgttatcgattacgatcgtcctgtaatcaactttaacaaagaggtttaactatagaggaaatcttctaactttagaactattcttctaacccctacatgatgatgcatgatgcacatatgagatgatagagactaagatgccccgcacggtctaacaatcaatacagatgccactcaagagagttgggcatgtaaagaataaaacatcttatagctcttcttcaagcttcaaggctaagtactcatgttgctcctactatgtctaacaatattttcatggcacacaacgtatctatttatatagaagaacatatat

SEQ ID NO: 236384 - DNA, 380 bp, Glycine max
  unsure (1)..(380): unsure at all n locations
agctngtgactctnggcaatttcttcaaaactagtcacttaaaaaagttgtgacttttgaaaaaatcttcagaaacaagtcacttgaagaattgtgacttttggaaatgtatnntttcgaaataagtcactggtgtgtaatcgattacacatcaacagatgtgacttttcattttgaattttgaaaattaaaacatttagaagctttggtaatcaattacaagtattgtgtaatcgattacacaacgttaaaatactttaaaactgtttaaacataagttgtaactatttgaaattgaaatcttaacgttttaaaacactggtaattgattactaccttctggtaatcaattaccagaggagtaaactctttgcgtatga

SEQ ID NO: 236385 - DNA, 352 bp, Glycine max
  unsure (1)..(352): unsure at all n locations
nnggccttgatttcgggaactaattntctggaactaattaaatagtctttatttgctggaactaatttttatttttaaatttttaagatttaaaaaataaatattgagaagaaaatattaggaattttataattcctaattattaatatgtgctacatattatattataatatttatattagttatttagttcaatatgaagtgatctatttaaatgaacccattagattgtaagaaaattgatatgggcttaagtttggtttattaggaaataatgaagatcttaataggtttaaaacctaaggcatagttatagttcccaatacaccaaatcaataaatagtttctcatc

SEQ ID NO: 236386 - DNA, 329 bp, Glycine max
agcttaaagtatgcccatgtcattcatccctatgtatatgttgttgaagtattggcgatcagaatggccactccttggattatagggatgaaccaagctcatgcttatacaagaaggttcatcacgtcaagttgaaatatggaagtaaccgtctggcacaattgggcaaaagatgaatcgagtcacatcactgcttcgtctactgccaaacatatttacgattatcgatgtccttgttacttacaagttcaccttgacaaagatgtcatggaccatgttgaaaatctcaatttgatcaaccccatatctcgcgtgaaaattcgaaatac

SEQ ID NO: 236387 - DNA, 378 bp, Glycine max
  unsure (1)..(378): unsure at all n locations
cttagggttattgcttttgccttaaggagttgtaactcatccatctactcttcttcatgaacctttagtgaccccagaagttcattcatagccagatttttcaagtctttggcttctgttatggaagtgactttttgtctcaaaattttgggtagacttctcagaacttattcgattctttgatgtgttgcatacctttctcccagaacattcaactcattcaccaccgtattgaatgtagtgaacatntcttttatagactcatgtgtctgtatcttaaacattcgagagttaaaatattgacttttgagtcttttacccgaactgtactgtcatgtgatgatttcagtgtgttcaaaacctcttgagcaggttcac

SEQ ID NO: 236388 - DNA, 147 bp, Glycine max
  unsure (1)..(147): unsure at all n locations
tgtntactgtgattctatcaattcaatactttatattgagctctgtatcagcttccgtactcaatgctgttattcgagcggccatctatagatgaacacacgaattgatgtgcgattgggctagccttatagtaacccggacatgaa

SEQ ID NO: 236389 - DNA, 454 bp, Glycine max
gagatattccaactctctcatgacttgtgcatactcaaaattttcattcctctttgcaacaacaattgtcccatgttggcccttcccccacttctctagtctttctacatctctcatttgtgtctttgccttgtaatttgactcctcaagcatagaagaaagatggtttgctgtcttcttcgcattcgaaagctcagattctgcttgagcttttgcagattctgcagtccatttgctctccttgtaccttccaatatcccttcttgctctgaggagttcctttgttcttgaagagggcttctgagaattgtgagagacaaaaagaattaaagatttgataaaaaaaaatgcttcaccagttcacaaattgcaaatacataagagaggttcgcttctgttctctgaagctaaacataccttatcatcatagaagttaacagcagcattaactgat

SEQ ID NO: 236390 - DNA, 467 bp, Glycine max
  unsure (1)..(467): unsure at all n locations
gctttatccaagggacttaccttgaattaattcctttgatagcccttttgagccttgtttccctttccttgttttgaagctcactacaagccttaaatgaaaaaccatgatatcaccatatccttaaggaattttggagctttggaattgttttgggaataagtgtggggggtttttgtttcattggataacttgttttgttggctatgcttcatgatgtattttgggccatacttgatgtacattgtatattggctaaatgttggacatgctgaatgaaatgttgtttctcanaggctatagaaaaaaaatcgaaaaaaaagaaaaagaaaagcaataaagttgagtgaataagatcttaaatggcacaagaatgatgaaactcttggttctactctctatgtttaatttttatctntacttctttttattctcttattctttttattaatatgcacttaattccc

SEQ ID NO: 236391 - DNA, 428 bp, Glycine max
agactctgacggttggacatcgtatgctgttcagagttcgtcactccaactttgtattatttacagacttgacggatagaaactatggcctgtaaatgacgtcgtagagagatgaccgatggagcattaaacgtgattcaacttctagctgatcaagcactttgcttatcttgcttgatcaacactacgtctgctatgatcactagtccaatcaacttttacttctgttacgttgacggagcctaagacggatgctccaacatcttatgcacagatgatcaagcactcgaatcatgagcttaacctttaatgcctgacataactaccatctatttagccatgcttgatacatcacgactacatacgacactatcatatgctagtttgtagatgcaaattgtgaaacttagtatctatttgtatcaaat

SEQ ID NO: 236392 - DNA, 482 bp, Glycine max
  unsure (1)..(482): unsure at all n locations
aggacgcgcnnattggagcccctgcgaattgacncccctgcgtatatacgngacactctacaatactcaaactctgagatcttcgtgcctgtgacgggactggtcttgaaacatttattcacccatctcctgacttgacgatgatatgagctttatacattcttgctttgatcctccggccgatccttagattactgtcattatcttaacggtcaggactctatgacttgttattaacctcctgaaacttcagaataccgcctatggcttctgatacaactcgaactctttatacatgctacgtgttgtaaactactctttttcgctgaagattctctcccggatcggccgcatatcaagctgccttaatgcgagaatctacgtctccgcgctcgaatcgccagagcaagatgtatcgatttcctgattatagactaactcagcctattgaacaaacccaatcgagtctctccctcccaccc

SEQ ID NO: 236393 - DNA, 176 bp, Glycine max
  unsure (1)..(176): unsure at all n locations
agcttcatgatgatgaatcaagttgattcaagttgttttgctaatgacaaagatgatgacaaagagcccaacgaatgatttcaagagtgagtcaacaagttcaagatcaagtttaatttcaagtntcaagaaaagaaatcaagaagattctttgatttaaagattcaagagaagat

SEQ ID NO: 236394 - DNA, 83 bp, Glycine max
atctgctcaacaacatagaccacagactcttgcaacaggtgtctgatttctgattcatgcggagctgagctaccaagttgacc

SEQ ID NO: 236395 - DNA, 351 bp, Glycine max
  unsure (1)..(351): unsure at all n locations
gtaagctatttaagctgagtctagtcacataagagggatttgaggatgaacctaatttaaggtaatctaaaccctaggaggcttgtttaatttgaccctatccaacaagaaggatctgaggacaaagctggattgattcatctaactaggatcgaggttantaatttaggctacacatagaacacaaatcatgattgttagaaaacatcttatatgcatactggttattgaaagaccacattttactactactgtatttactactgcatttactgtttagacagactagttaattgtctaatcatattataatgttctttacatgcttttctgattaacctgctaacattn

SEQ ID NO: 236396 - DNA, 316 bp, Glycine max
  unsure (1)..(316): unsure at all n locations
tcttgcgtagccgctcttggtgctcagaatatcccagaaacaaattcctcttattactagctattctgaattctttagttcctgaatgtacaacctataaattgatgctcgttcccctctttggtttctgcaaaaaagaaaatcaatatccaagaaaacatggatgaagtcctaaagatgccatgtacatgtgtatttctgaagatatagtatttatattccatcaagcatacattgactgttgattacatgtaatagactttntataacatggttgccccaaatcacaattaataagcacaactaccaatctttc

SEQ ID NO: 236397 - DNA, 404 bp, Glycine max
tagtcatgactaatgaagatgtacctctcacttttgtcatccaacttggttctatttcatttggtatgtgcacatgaccaatgcttccaaaaacttttagatgtgaaatgatgggcttcctttcattccatgcttcttgtggtgattttcctcatacacttctttgtggagactggttaaaaaaggtaactggacaagccactgcttcttgccaaaacttctttggaaagttttggtggatcaagtggcctcagaataattaagaaaggggggttgaaattattatttctaaacccttactaattaaaaattactcttcttaggcctttacttatgttgtaaaaaaatattgagttgaagagaaactaacagaaagtaaaagcggaaattaatgcacagcggag

SEQ ID NO: 236398 - DNA, 214 bp, Glycine max
  unsure (1)..(214): unsure at all n locations
tatgcgacagtgacgaacttaatgcataaactataccattattggatgtaccatgttccaaatattactctcaatgcaactactntatctcctcgattagtggcaaccacgctggtcgcctcttgcccctggctcgttcaaatgtaacattgatgtatcgtgtatagcatatcatcacacctgcacccctgagatgggtgtatgcctttgtgat

SEQ ID NO: 236399 - DNA, 392 bp, Glycine max
  unsure (1)..(392): unsure at all n locations
agcttgtaggccttagatcttcttcatcaatgaagtccnttgcttcttgaagatcaatggcagcggaatggagaaggaggaaaggtgattagagatgtcacttcaaggaaaaaatgagtcaaaatcaagttcaccaccataggaagccatggataagagctagaaagtatggaaagatgagtggagggagagggagaaaaaagagggtaccttagtaatgtaggatttttcagcccttgtattttangacacttatanctagttttgtattaagaaataatttataatttcacatgcattaaatgtattatttgatgtgtgtatgttggtagataaaattaattgaattagaagaagcacaatgcacatgatgtactaccatgtgagatgtg

SEQ ID NO: 236400 - DNA, 312 bp, Glycine max
  unsure (1)..(312): unsure at all n locations
tcgagatcttcgtgcctttgacggcgaccggtttgaatccatttattcacgcatctcgtgatttgacgatgatatgagctntattcatcgatgctctgatactcgcgccggtccttaaagatctttcattatcataatgttaacgaccttatgactcgttattcacttccttaacactttagagacatcgcctttggtgatatgtttagaactcggtacttttcaatctatgttacgttgcctttaaactactattgatctgtctgaatgattctctgcacggaatgagcctgctatatcaatcgtagcctt

SEQ ID NO: 236401 - DNA, 186 bp, Glycine max
ctcatgtagtcgcctcggacaaataccatttctgatagtatactacttaatattaaataattacgtatataacattatattacttattctagcgaccaaactcttgtttagtgttcacacactcatctaaaaaatatacacccaccctgcactaatacttgattcaattgtatcaccgttagacag

SEQ ID NO: 236402 - DNA, 94 bp, Glycine max
ggctttgatgcactatcttctacatcatattcaaacgtgtgcaaataaataatatagtcatctcgactcgaagaaagtcagatatgtctcatac

SEQ ID NO: 236403 - DNA, 401 bp, Glycine max
  unsure (1)..(401): unsure at all n locations
aactctattgtgacattttttgtgctcgtcaccagaaaaacatttgtacattaccaattaacatcctcttatatttagctctttcactaattaaaacattcacagcgttccattcatatgtttaaccaatcatatctctacacaacactaaccattaatatgatgaaagtgtactctcaaccaaattatcaccatggaatccgatgcatgtttaataagactagaagagtattcatagcgattgacgacttcgaatatttctatcaataaaatcttaatatgaatctcttttaaaataaatcatagcgctgagctctttatcactatcgaccgacaaaaanttatcatttatctaatggttacaggagaatatgacacgttacataatctctaaacctata

SEQ ID NO: 236404 - DNA, 458 bp, Glycine max
cccaagatattcagttcttactcagaactgtactaagcatgtatactaagtgctattaacagcttgcgtatgcacctcggactgtgggtgacaagtggttgaagtaacaatctattgccctactcgcttcacgagtgctacgctcttggcttatgatctttaagctcctatcactaactatgctgccttggtataccatggagtctcacagactacttagataacatatcagccccatgggaagcatcttcatcttgattacttgtgatacaatgatccattgtacagaccctgtctactcccacgcaaatggtagtcctaccattgcttggtgatagctgcccgcaaacgtgactcatggttgaatctttcgtgagattcttcagaattggcagtggagatacattgcatgaggctgaacgtagactatgactttatcaacagtgattgctccaaag

SEQ ID NO: 236405 - DNA, 446 bp, Glycine max
gttcgaaggacttttccgtcgaagatcttataaccatgaattaccaatgaagaacgtctgagaactggtgaaacccttcgcaaattccctactgaaaccttaccggaatggtttcgaagcgtctcgggtttgattttctttcccggaaccactttttccaagccattctaaagaaaaagaaatggcctaagggcctaaccctttatcactttactttctcacctatttattaccaaataagggagatgcctgccgcccaacttgcccaggccaacatggttgcttccttcagaaacaacattcttcttgaagaatcttctaaaagggccaagtggggcctgttggtattggccccactttttactagacccccccctgcttttttggtgattctttttcgaaagtaccgaaactacggattcgtaccatcctggtttcttccgtac

SEQ ID NO: 236406 - DNA, 489 bp, Glycine max
  unsure (1)..(489): unsure at all n locations
aagcacctgagctgcagctntatnnanaaagagcagagaggatctctggnatantttttcataccacgnattcttggaggagatgatgaattttacgtgcatgaccttatgattagattcatagtgaatctaaaaaaaaaattatagaaatattattttaggataacagttaagagtttaagaccttaattatggtggcatcaaattaaaaagttgataaatattaagatacactaaataaataaataaacatatatatatatatatatatattggtttattttatatgtgagataaattagataatattaatatttaagatagaacgtacataattgtatgatatattttaaaattcatttataatatactattttatcgtggaaaagtatatgaaaactatctttgggtttatttataaattttatacattcttaaattataaaatatgttatattaatgactcaattaacatataacaattattac

SEQ ID NO: 236407 - DNA, 458 bp, Glycine max
  unsure (1)..(458): unsure at all n locations
agcttganaanggctagacatgatacatgttatggtttggtttggntcaagggtaaaagggatgccccacattatttccatgacacaaatgcaaaaatgatgatttggaaattttatgcaaaactggtcatgcatgcacctatgcggacactcaagtgtcaaatttttatggtcatgtgatgctagggcttaggatttatttcctctattttaaatcaacccaatgtttccaaaatatgttcttttatcaatttgtgcattcattcgagtccatttcgggcgtccggggaaatttcacagcattcacccttcaggtgtagacacgttttttttctcttcaaaaatcggtcatgatcaatgaattnttttttcgaagaagagttggaaatcatctcttttcaaaagcatgtcggtttttagctagacaacttattttctctttttccacctttttcctt

SEQ ID NO: 236408 - DNA, 153 bp, Glycine max
ctttttgccaccacggggacagctatgacttctctcttagggcaccacccgctaagatctgtcagaactcagacaccttaattctttaagaccctgatgtcagattctttaaaccctataacactcgtacttgttaaagaggctccttggtac

SEQ ID NO: 236409 - DNA, 418 bp, Glycine max
agcttctctccagcaacatcttagaccattttatatatctcatgggtaacattaaagcatttaaaaaagtcaacaaaagtaaatgttaacctccttccctttctacctctcaagtttttagtgcttcgtgccgttttttttaaggttaaaatgaattttttatctttataaaattggtaaaatttaaattttgttcctgtaaatatttgttttttttcgtccatatataaaattatagtgtgttattttttagttcaaaattagattcggatttcaaacctacctgaccaaaaaatatattgactttttttattatggaaacaacatactatttttgttcaattttatcattctcccagaagctattttggttcactttctggattcattactcaatgagcacattacaatattgaat

SEQ ID NO: 236410 - DNA, 448 bp, Glycine max
  unsure (1)..(448): unsure at all n locations
agcttgttgaatatgatgctttgttgctgtaccgtttccttgacattcttcaggatttgcatggcgatgatattagagaaacggttagtttcatgccttcaccacaccactcttttctttgttttttgttgttatgtttaggtttgtggggttatgaaaaagatcatttttttttttgcttagtagtgatggatttctgatgcccccacttggaattttatggaatggtaaaatgtaaagatggtagctttggctaactttgatggattcctgaaacccctcttttggtatttgctaaatggtaacgtttttggtattggaacattgtcatttggtggaaagagggtcaaaatttgtctggggtatgtatgcactctggaatgggtgttntgaattatntntttatgggcttatgggtcctgaaatgtttgtctgcgtttcttatcat

SEQ ID NO: 236411 - DNA, 337 bp, Glycine max
  unsure (1)..(337): unsure at all n locations
agctttagttctgaggttttttngtttctttntcagggaattgctttctgtactacccaaattgcttcatgcacttttcatattgtttttcagaatcattttggaagcaattccgaaaacaatatgggaagttaaaaaaaaaacccaacttcaagtaccccacaaaatgggcttagttatggcttttttttttcattaccatattttgatatcatttgctatgtccactcccctctgtttctaagtatagttcccttcttttttaaactcaaatgaattaaataaccttatctcaaactcttttctttccctcacatgaacgagcaatccccccccc

SEQ ID NO: 236412 - DNA, 441 bp, Glycine max
  unsure (1)..(441): unsure at all n locations
agctnttaccagagcatgcagtttatctctatctatctccagaagacttcacctttcttgcaaacctccatgcacaagtgtatgtgtgagatcaagccactgtctaccttcctggactgcacatctcaagggccactgatgtcaagatagttgctaacaaggtgtatccatgactacctatttgtgatgctgccaaaaagaaaaggttcaagttgtactacactgaagagatgccctcaaggaaaatgaagatggaagtagtcaactaccctcgcaattggagttccctgtttagtgggaataagcttgtttgtgctcctgatgcttacaatgctaagaccttctagattcaaaccatgtggatagatgctctaaagggcctcattttctgttctgatggaagcaacaatactaagcatcataactttattcaagtggtat

SEQ ID NO: 236413 - DNA, 409 bp, Glycine max
  unsure (1)..(409): unsure at all n locations
agctttggaccgtgctatcaatgttcttttctgtncgancgagtggcccggggtcccctcacggtatgcgcaggtcgtgctacggttataccatcttgggaatggggactagaagatctttcccgggaccaccacggccaattggttggcgatgagagacagcaagagttccccatatgtcatcgggatcggggcgaagatctgtgcctgccttggcgaaaagttcctgccgtgtttgcgcctaactgagcgttgttggccgggtgaggttgattcatagctggatttcggagagcttccccctgtatggatgtgggcgcccttggttgggtgagtgccgtatcggaagagaccttggcgcgagccgcaaaactcgggtgatgttgcgcatatcggtgggtaccatggg

SEQ ID NO: 236414 - DNA, 395 bp, Glycine max
agctttgagagcggagctaacttatacactagtggcgaaggagaagctgacggtgccatccactgtggtcaggaaagaatgtgatgagctaaaaaatatcaacgtgacctcggttgatgcgttaacacaggagacgaataaagctcgaatggaagaatggagcaagaacaagttccgaagggctctgtggggcttcaaaacccagctcaaactaaaaaaggctgatattgacatatcaaagatggaaagcatggtgttagatgataagttaaagaattgtcaaaggtcaaagatatgtttgacagagcagttgatccccatataagacaatatgttgataatattgatcaatataacgagaatgtgaacctagttgctattcacacgcagatgct

SEQ ID NO: 236415 - DNA, 406 bp, Glycine max
  unsure (1)..(406): unsure at all n locations
ctgcggcctgcaagcgtgcgatcgtgttttattatggaaacatccccnagcactgccacaatntctacatttgagaccttacccccaaaggaccaagaactcttacatgaanttggtgatatatttcccaaagagataccccttgtgctacctcctttaaagggaatagaacactatatagacttagtcctaggagcaagccttccgaataggccatccaataggactaaccctcatgagactaaggagatagagtctcaggttaaataattgttggagaagggccgggtctaatagagcctaaacccatgtgctatgctagtgttgatggtgcctacaaaggatggtacatggagaaagtgtattattgcatggccatcaacaccatactgtaagtaaggctccc

SEQ ID NO: 236416 - DNA, 391 bp, Glycine max
gacacccctgccgccgcggtaaactaaatgtacgacagaaagaaaccttattgttctgccctcaaaacatgtattgagtattggctagcaccataaaataaaaaaacattccgggatacttctacaattatctgctccgcattctgtcccaccatgccctaaagcatttagctattctccacatgtcttttgttgatatcttggtgttctcctctaatggctttatcaaaactaccaagtggagattacgaggacgataacggagggattgtcaaatggtcttattattcccgataatggaggaagcagtttattcactcgctgccacctgtacaagatcttttgctactctggtcaaatcctaaagacctgatataatatctttttccgt

SEQ ID NO: 236417 - DNA, 390 bp, Glycine max
  unsure (1)..(390): unsure at all n locations
agctntanttantagcctatttcgaggtattatgttattctgaaacttatgtcctcatttattacattgttgcttgatatgtagcctaaagatttccaaataatagcagttagttactatttagagagtatagcttaaataggaggttgagtattgagtgggattcagctttgttagaaaaggttgtagtggcttggttgaaaacaaaaaaccccatcatcaaaaaacaattgaatatgatggatttattttaacttataggtaggtataggtttaaggtgaattgtgtctataattatagatatatttataaaaatattgatttaatagatagaatacatgtattaaactctaccacatctttaatagatagaatacatgatgaggagc

SEQ ID NO: 236418 - DNA, 390 bp, Glycine max
  unsure (1)..(390): unsure at all n locations
agctnggaaggctctatatcacaagatatattttattattatnactcaatcctaattcttgtgcttctctttattgatcaattgtatgtatcttatgctaaataaacccacaaaaccctttttttccctaattgcatgttttgtatttgatgtttgagaaaatgtgtgaatcgaatcatgttacgagttttcttttaatgttgtaaaatctcactgacattttgatgtcatggattgtttgcctgcttttataaaaaaatggtacataacggttcattgtaaccttttcaaaatttgagcaacattttcaccatagaaggtgatatgtgtcatgaccatgtaattggtattttgggtcaaaggtgaacattttattgattagctaatgaa

SEQ ID NO: 236419 - DNA, 488 bp, Glycine max
  unsure (1)..(488): unsure at all n locations
gatccttgagtcacctgaggcatgcaagctttaaaagacttagacatgttacgctttttaactttatcatgaaaaaagccagaggtttgacactgaaagagaggaagagaacaaatgaattatttcactttggcattcccttattggaaaaagagtaaggggtcacaaaataagtttgttagtaatatgggcctatagtgtagatgtaattattctcattcacccagtcaacacttctacttggataccctntaataatagaagaatgcgttgctcgtaagcagttcaaaattcatagtaaagtatgtcaattcctgtttcaagtcattgactatacgagaagaaccagattggttctgacaaacattaagatagataatcttcttactccttaagggtgtgtgtggctttatttgaaaaaactcaggatgaaaaaagtttccaattatatgtatagtgaaaaaaattttaccttataacatagtttg

SEQ ID NO: 236420 - DNA, 435 bp, Glycine max
  unsure (1)..(435): unsure at all n locations
agcttaacaaactctggtatcaaagctccttcacggngcttgtttcgagagaaaagaaaccgtagtttttcttgagagaagagtgtttgaagtatgacttctaaaagcactttcgttcaacctgcaattcttaagtttgatggtcattatgatcattgggccatgcttatggaaaatttccttcgttcaaaggaatattggagtctggtggagaatggaatccctgccacagtagagagagaagagtttactgaagcccaaagaaagccaattgttgagcaacaactgaaagacttgaaagttaagaattatttgttccaggctattgatcgaaccattttggagaccgtccttaataaggatactgccaaaaatatatgggactctatgaagcagaagtatcaaggttcaacaaggggtcaaatagcataactc

SEQ ID NO: 236421 - DNA, 368 bp, Glycine max
cgcaagcttgactcatgagtggtaagttgaggtctaagtgtattggtcctttcgttgatactaatgtttttccttatggtacagtcgagatcaaaagtgactccacaaacaagagcttcaaggtcaatggacaccgacttaagccattcctcacaaacccttctttattggacgtagaggtggaagagactttcttactccaccctactctttctccaccttgacttaaggagtttttcttttcctatgaccttctttacttttattacatttatctgatactatttgacgggttaattgctcttaatcctttaattgtgctacatcgaagacaatgtgttgcttatatatggggggggggagtgtcc

SEQ ID NO: 236422 - DNA, 399 bp, Glycine max
  unsure (1)..(399): unsure at all n locations
agcttctagtgtacgactattctatcttgtatagncagagcaaagcaacatagcggctaacgctctgtcccgccagaatgaacaagtcgcaaaggcctcctagatattatctgtgcctcactttcagttcctcgatgacctcaaaagtgaattaatggctactccaaagtatgtcacattgttcatggctgtttgtgactacactttagatcattctggattcaccttcaacgatgagttgctacttcacaaggggcacatttggctgaacaaggggattcattcattccccttttgctcgaggaattccacaaatcccctttgggcgatcatactgagttcatcaaaacattgagtcgccttcacagagcttcacatggccagacatgagaaaagatg

SEQ ID NO: 236423 - DNA, 460 bp, Glycine max
  unsure (1)..(460): unsure at all n locations
agcttattaaagggtctcatattataaagaataaaaatgtatgctggaaatctgtgaagattttngaactttatcttaatcaagaaacagctagaggcaggtagaaaagaggaaaaatattgtatttgagagagacttaagtttcatttcgttccatttaaaggtagtcttttttttttttttaactttgttttaaattataattctttaatccagttaggggtaaacgagggataggtttagacaaatttatctttgttcttgatatggtcatttatttgaatccaattcgatcaacactcaaaatataaataataagggactgactntttaatgtaacatgtcaatcatagcaatatatatttatagtttaattgtataataaaataagtataaaaataaattaatttttatattcagaatatatttcaaataaataatataattataaatataatat

SEQ ID NO: 236424 - DNA, 413 bp, Glycine max
  unsure (1)..(413): unsure at all n locations
agcttcaacattcaatttcaagcgttccgatattntacaggactcaatcggatagccgagcaaaaagttattgtcgtttgaatttgctcagagcttcggtattcaatttcgagcgtctcgatatattaagggactgaatcagacattcgagtaaaaagttattatcgtttgaatttgcacagaacttcggtattccattttgagcaactcgatatattacgggactcaatcagacattcgagtaacaagttattgtcgtttgaatttggtcagagcttcgataatcaatttcgagcgtctcaatatattacgggacttagtcagacatccgagtaaaacgttattgtgcgttgaatttactcagagcttcggtcttcaatttcgagcgtctcaacatatttcgggactcaatc

SEQ ID NO: 236425 - DNA, 343 bp, Glycine max
agactatggtggacggagagacttgctgtccactcttgcattgaccacagataatgacgctttataattgcagaatggggatgcccttaacaccacctgtgtaagagattttattcctgcctgttaagagcagaggtccaaatatttgaagccttatttggactccatttgctttggagaatagacatgtggaggagtaactgggttcttgatgctgccataggtaacagatgtccttagagatgctgccatgaattatgacacccctcttctgacttgtcaccaggcatggcgactttgtgaagtttacctagtatacgtcattactctactgactgatgct

SEQ ID NO: 236426 - DNA, 425 bp, Glycine max
  unsure (1)..(425): unsure at all n locations
agctngcatgcgaggccatgtgtttacctttattgataactatgagaagagtgcgactggtagtagagtttattatggcgttcattcgttacgattttctctgtttctcttgtacagatgcactttctaatgtaataaaagatatgcttctggctcgagattctctaatattgattctatgcaaagtgtgtccgcatatgatgattggtaagctctccacctactaataatttaaggaaaaatagaacttggacactcgtgttatatcaagacaatgttgaggaaggcagattgcaatgccaatgtgcatccctagttaccacgcaggccatagcctttctagttaggctctctaattggcaccctacaatatgctttcttattagaggtggtcatgttaaacactattacctactgctgaagat

SEQ ID NO: 236427 - DNA, 443 bp, Glycine max
  unsure (1)..(443): unsure at all n locations
agcttgatgtgagatttctgtggaatagtcactcttcctactttngtttgttgaccacagagaggtacctggagatatgtcgcgggggtcaggagaccttgcggacgtcatgtggagtgctatttcccaaaaccaagcttgaccaatcccgacccaacccaggcatagtcagtcagtgagaacatgtgatgtacctaaacaggcgagctcctatcagtcaaccaataaaagaacaaagtccacaaatcaaggaggcttgtgtggcggctggccagctatgaatcttgagtggtatctgaaatctggcctctggtaatcgattactaatgatgtgtaatcgattacaaggcttaaaaatggagacaggatgttaagatggcctctggtaatctattaccaacggtgtgtaatcgattacagggctcaanaatggagaaaggatg

SEQ ID NO: 236428 - DNA, 371 bp, Glycine max
  unsure (1)..(371): unsure at all n locations
agctttgcggatatagttttcacggtcaatcggatcaaaatgcgtatgagaagaggcccatttaatcatcttgcttggacgaacgagaaaactggggcaaatgaagatggtgataatgagggaaagacccatgttgggactgccattcctatacggccaagtttcccagtagcccaacaatgtcattactcagcctataacaacccttctacttacctaccacccagatattcacaaaggtcatccctaagtcaaccacaaaacccaccttccacacaacccatgctaaacaccacctttagcacgaaccanagcaccaaccgaggaaggaattatgcagcctaaagcctgtagaattcaccctgttggac

SEQ ID NO: 236429 - DNA, 432 bp, Glycine max
  unsure (1)..(432): unsure at all n locations
agcttgctaattgtttattatgaaattgatgtgttattatgtcttgatcggagtgtgtgattcctgtgtattgtgattgatgattgaaaagtgtgattgatgaatgacaaagtgatgaaatagtgtgagatatgctaagtaaattgtatttggctactatatgttgngttgtttctctctagtagttagaaatgtgataactcactcccggcttgttgtttgtgtttggatcctgtgatgatcttgaactttgtgttcgggggagcagacgactaggtgaattgccttaaggaacattatgctgaaggacatcgagacacaacactctgatagaatgtgacagtgggacattaagttttatattagttgcatgatgttagtctattttattttatttcactgatttaataaaatatctantgtaaatttgat

SEQ ID NO: 236430 - DNA, 310 bp, Glycine max
  unsure (1)..(310): unsure at all n locations
agcttgtaaagttcgttctcgaatgatgctctgatattatttgtctgacaagtggcctcagagctcttatgaagggggggatggattgagatatacgctacttttctcctcattaaacatctatctcacttttgactgaagtgatgaatgacgcttagtgacaatgtgtgtatagaataatgtcaaggaagcaccttgaatgtagatataacgcactgacatttagatgacatggatggaagagaagctgctanactagaatggtacttggcgggtcatgccctccttttcaaaatcagagcaacatttt

SEQ ID NO: 236431 - DNA, 455 bp, Glycine max
  unsure (1)..(455): unsure at all n locations
agcttgttgaattntatatggattatctttatggtcatactatgatttcttattagntgactagagannatttttacactaacagtgcacaaaagttaaacttagtaaaatttaaaagaaaacttcatatgcatcactcaaacatcaagtaaaaaaaaaacttaacatctctaatatcttatatcaagaaattataaatattcaaatattaagaaagaggtcaatatacctaacactcttattgtacctttagtacccctggtactttcatttatatatatatatatatatatatatatatatatatatatatatattatgttttttgctgaacaaaaaaaaaaaaaaagaaagagagaggtcaatatgtacacagactatgctaatcttacattctaccctcaccagagttagacccttaatttaccaactgcagtttaatgtgagacctacaa

SEQ ID NO: 236432 - DNA, 380 bp, Glycine max
  unsure (1)..(380): unsure at all n locations
agctntgttcacttgaagtgtatggctatatgctaattattatcaaactccgtttttacgctactattgaaatattactaaactattaaactatctatcagacgaggatgttactgctaggcgatgcgctaggtgtcttgttttttacgctactagtctttggtttccgtctgcgtttcctttttctctgttgcaacaaaaaaattagaacaataaaaacatttcactcgtcggtgctaatactaaaatgggtcgaactacggatctaatttacttaattgaaagagtaatataagtattttaatattatttttaatttttataaataaataaaaaattaaaaatggatcgttcgatcgatctgtttcggctgacttatt

SEQ ID NO: 236433 - DNA, 448 bp, Glycine max
  unsure (1)..(448): unsure at all n locations
ttgtataataaggtgtaagcttatcatattctattgcattggatggctgntccttntcagcattccgaactgtatgacaatcttgactggaatgttcgtagccatcctgtttacggaatgacattctctctttaccccatttctggcccttcttcttgttggtaattccattccactgaaatatttcctgaaacattcagtttaaatttacaaatcaattgaaatatcatgacaaaaataatagcatatctcctgatactctaatacctccaaagttttgaccatattacagaactgaatggaattacatctgtgcaccacactttgattagttaatcaagatagtaagntttacaacttcaagctattcttatccctttagtgagaatcagaatatggattacacaagctgttcaagtgctatcanatttatatctagatacattga

SEQ ID NO: 236434 - DNA, 423 bp, Glycine max
  unsure (1)..(423): unsure at all n locations
accctaagtcacctgcggcatgcaagctataataaaaaaagatggatanattatttccaagngaanctgcaaatagntntggtagcatcgagttttcataaggaatagcatccttttttgatgtcaaagaagataaaacatctcccaacctgtaaagacattttcaaatgcagcaagaagtaagacacagaaaattccaacaaataaatggtcctcattcctcacactcaattggttaaaaacttcaatatgaaagaaaaaaggaagttcatagttcgtgaatttagcaaggagaaatcagatcagataatattacaattttgtggatttaaaccagtactaactaatttgtgattcaaaatagtatgccaaacaggtctagatacctagtacaggtatgacactgtataattctcaatctaa

SEQ ID NO: 236435 - DNA, 443 bp, Glycine max
  unsure (1)..(443): unsure at all n locations
agctntagaagatgggctaggattttgtttttacataagcacttanacaatgaaggaaagctggagttgctgcacatgatgtccaacgttatgtcaaagaataagatcgggctgcacaatgcacaaggcaagataaagtgtcaaatgaagaattgaagctgcaggattcacgatgtcggatacaatgtccaggacatcctgcctgaaaatactggaattgctaaaagcattgaagctgcaggatccacgatgtcggatacaatgtccaggacatcctgcccgaaaatactggagttgctaaaagcattgaagttgcaggatccacgatgtcggatacgatgtccaggacatcttgcccgaaatactggcatatanatctgtatatctttacagattattggtagtagcagaattagatgatctttttggaacgaataaagata

SEQ ID NO: 236436 - DNA, 456 bp, Glycine max
  unsure (1)..(456): unsure at all n locations
agctntagtcatgcaatctggtggtgggattacttatcttgtgaaactactcctctgatggttatgaggagtaaatgtgagttgcacctgattaaaggtctttacaaataatgtggtggtagtttgttttgttgaattgggaccttgggcggtggtcgtcatatttgctacaaagcggaccaatggggtatcttgggttttgtagaagtatgtaccaagggtggaccttgggttttgcaagagtgtgtactaagggtgggccttgggttttaaagatgtgagtaacaaggatgaacctcaagtttttgataatcttgtattcatgaacagataaaggttaggaatatagaagaatgttcagggtagaccttgcgtacctctagttcctatggagacgagacttattataagaaaggatgaaccttggatttgtgagccttggactggtgacatgtt

SEQ ID NO: 236437 - DNA, 389 bp, Glycine max
  unsure (1)..(389): unsure at all n locations
ctaaagggaaancatatgattgctttgaagaagaacatcataggtcatttcctcttcatcgtctaatgtcacacaaaaggaagtatcagatttagaacaagtctttaccttagccttattgtcttgatctaccatgagacaaatgttggcttgttcataattagagatgcaactattctcattgtatgagacatcccatgtgatcataataattttgtttctcttgtcctgagagcatctcctcttctttagctgnggacctttaagcttcataagattagggctctgcacttcaagcaaataatgtcattgctcccctctttgtttntttctttgaatctaagaatctttcttaatgatgagtgttggaaattcctttcttcttcatg

SEQ ID NO: 236438 - DNA, 388 bp, Glycine max
  unsure (1)..(388): unsure at all n locations
agctntatgaaaaccattatgcttctggttatcganngcaataatctggtnatcgattaccagagagtaaaaactctctggttaaagggtttgagaaaaactcatgtgctactcaggttttgaaaaaactttttaatacttatcttaattgaaccttctcttgattcttgaatcttgattttgattcttggaacttgaatcttgaaacttgattcttaattcttgaaatcaaatttccttttgaaccttgaagtgttcttgattcaatcttgaactcattctttgattcttgagatcatcatctttgttatcatgaaatggtcttgatctttgcgctttatgtcatcacctttggcantcatcaaacttctttgaatcaatcttgatt

SEQ ID NO: 236439 - DNA, 296 bp, Glycine max
agcttagtatcttgtatgatgtgcggatattatattctcatcttacaacttataagaataaactctcttatattactttgatgacttatatgaatattcacatactctttttggactacaaaaacaagcacttttgcatgttgaacttaatatatcagtcaatctcaataaatctatatttcttaacgctatcattcccaaacacccactgtttcaaccttacattcacttacaacgactcccttatattacacattcaaggtgcaatcacacacactctataaaatacatcattt

SEQ ID NO: 236440 - DNA, 460 bp, Glycine max
  unsure (1)..(460): unsure at all n locations
accttaagcacctgagctgcgcttggcatcaggatttaagggttataattgtatctcggaagcacagcctctgtacttgaagaattgggttgtgagtttgggcttttgttttgtgtaattagtttacttaggtagttagttagttaggtagttagataggtaggtagttagttactaacactctacatattggtgttactttgatagttagggactgaacttcattgggagaacttgaactttantttgtacaaaacttgttgtgcaagctttctcttttatcttttctctctctttttctctcaattgatcttcattcttcttcatattttcacttctgttccaccattttctaacacaaatttcatggtttctccattggtgatgatcatggagggctaaaaaattatataatccaaggatccactctacgcacagctgaaattgagttctagtttgg

SEQ ID NO: 236441 - DNA, 152 bp, Glycine max
agcttggaaggctctatatcacaagatattcattatactatttctctattctaattcttgggcttctctttattgatcaattgttcgtatcttatgctatataaacccacaaaatcctttctttccctaattgcatgtattgtatctgatgt

SEQ ID NO: 236442 - DNA, 412 bp, Glycine max
agcttgagggaaaacttgatgcctgggtctacctattaactcagtttgccatgaatcagaaatctggacctgttgctagagtctgtggtctatgttcttttgcagatcaccatacagatctttgtccttttttgcagcaatctggagtcaatgagcaacctgaagcttatgctgcaaacttttaatagacccactcagcagcaaaaccaacaacagcagaataattatgatctttcaagcaacatatacaatccaggttggagaaatcatccaaatctaagatgggcaagtcctccacaacaacagcctatccctcccttccaaaatgttgttggtccaagcaagccatatgttcctcctccaatacagcagcagcaacagcagcggtcacaacaaagacaacaagcaactg

SEQ ID NO: 236443 - DNA, 444 bp, Glycine max
  unsure (1)..(444): unsure at all n locations
agcttctcatctctacagaattgaggttacttcatcattcaactctgccattntgagttcatttagagtcctttttgcgtagacagtgaaggcaatagtggtaactattgcaataatgaaagaaataatgttgtatacgatttccacagtagtcaagtggtgcttcccatactgtgcgtctgccaatgtctttattaaccgaccactgagaagaaaagatgttagtttatttaaaagaattaaaaagaaaacaagttccaagctgagtcacatctatatccatcaaaagtcatatttggttctcaacttctcaattctcattttcatacatgtggtgctaaaaaaaactcgggtagggtagggtacttgttaagccatgaaggaccataaatagaaagaaacaaacctgtagatatagatgaaagcttctggtaccattccagc

SEQ ID NO: 236444 - DNA, 433 bp, Glycine max
agcttgtccttagatccctcttgttggactaggctttacttaagcagcccttgtaggtttatactaatttaaactaagcttcgtccgcaaatccctcatttaagactaggctcagcttaaacagcttacgtaagtttagactaatttaacccaagcttcatcctcagatccctcttgttggactagtcttagattaaacaccattatcatcacaacatattaagaaagctaaaacttaatccgcagatcccttatttatgactaagtatcaatcctgcttctatcatgttctaaggcaacaatacatttcctaatgctaaagtcacctaactgaatatacaaatgggtgatcagaccaagagcatgtggaaattaagcattgaaagaagcattgaacacagaaaacacaatgaattagatattaaaggaatta

SEQ ID NO: 236445 - DNA, 457 bp, Glycine max
  unsure (1)..(457): unsure at all n locations
agcttaaaatgtggtggatcactagaatnttttattgtggnggnttcaaactccacctacgtagtgacatcttttgccttgcttgaatcttgtatagacttagaatgcaatatagaaaattcatcgaatggaacatctttactcataatgacctttctttctaactaagaccatattctgaattctttaacttcatttccctagctcacaaagatacccttcttagctctagttgtagccacggatggcaatgtgtagggtttgggtagggccttataatactcgcccacattccctcacatgtaataattttactctccatccctatacctaatggatatttatatgctcatactcacattttacttatgtataaagttaataaattaataaaaatatattaattaaacaattattatcangtaagatttcattcataaatgattcaatcattaca

SEQ ID NO: 236446 - DNA, 293 bp, Glycine max
  unsure (1)..(293): unsure at all n locations
ccggatccttaagtcacctgcngcntgcagcgtggctcgggacagtgttttattcaccttggaggagcggcaaaacgaaatgagctctattaaagattaaaagaatcacctaaccagagacagaggtgtcgtctggagctatgagtataacagtcacgacatgataatggaggaagcgaccatatgaggggcaacattgatgcttacggctgagagagagtgagagggtattcagaaatgaacttgcaacggacttctaaaaagaatctcaacatccattttttagaaaccga

SEQ ID NO: 236447 - DNA, 402 bp, Glycine max
  unsure (1)..(402): unsure at all n locations
agcttgaagctaatatatgatgattggattgagagggagagtgacnaatgaaattttgagagagagaagagggagaatgagatctgaactttgaagtctaatttctcaaatcatcaaatttgcaaaatgcacacacaagacctttatttatagcctaagtgtcacataaaattagaagggaatttgaatttctattcaaatttcactgaatttgaatttgaatttgtgaggccaaatttggagccaaaattttactaattatgattagtgaatttctgctatggttcaacccactaatctaagatcaaattcaagatttttcactaagtgtaattaggtgtcatgaggcatgtaaaacatgatgtacatgcacacagtatgactatatgatgtgacaatatg

SEQ ID NO: 236448 - DNA, 449 bp, Glycine max
  unsure (1)..(449): unsure at all n locations
agcttgttgcactcatagcatattatggatgttnttatttttgtctntnttctccttgaacaccttttgaaacaataagaaacacactaaagggggggggggttgaatagtttgtatataaaagatataaactctttgtgatataaaggataatatatatatgtatgtattaaacacaagtcgtttaccgaggataaatcaaatatatattgaagattattatggttgtttactgacaaataaaattcttgaaatattattttcaataaacacttattgttataaatgtgatagaaagtgttataaaatgataataaattatattgaaaaagagaaacacttatttatattgattactaacctgactacattcattttcctttattactgtaaaggatttctaattataattattacaaaaaatttttaaactatattttaatttaaaa

SEQ ID NO: 236449 - DNA, 462 bp, Glycine max
  unsure (1)..(462): unsure at all n locations
agcttcaagcngcttaatggatccaggttattgcatttaatggcaaagggccgtatgggggtcaacagaggagcattaaccacacacccttgcgataggtacagatttctaattcaaggccaactgggttaccacgttaaccaaggcatctagttcaccttcaagcttcttattttcagctgatgaagatgaattcgtggctacttcatgcactcctcaaatgacaatagcatcatttttggcactaaattgctgggagttggatgccatcttctcaattaaattcctggcttcaacaggggtcatgtctccaatggctccacctcaggcagcatctatcatgcttatctccatgttactgagaccttcataaaaacattggagaagaaattgctttcaaatctggtggtgatggcgactggcacatatgtttttgaatctctccaatattcataaagctct

SEQ ID NO: 236450 - DNA, 188 bp, Glycine max
ccttatcataagttgaataagtaagggcaacagctcttaactttcactataataagctatcggatgttcctcttgcaacaaaacaaccccactacccacatttgatgcatcacactcaatttcaaatgattttccaaattatgcataggaagaatgggtgcattagttaacctatgtttgagggcagc

SEQ ID NO: 236451 - DNA, 430 bp, Glycine max
  unsure (1)..(430): unsure at all n locations
agcttctacagaaggggtgtgcctaatttctctacatttgtctcacctctcaatgagctagtgaagaagaatgtgacattcacttggggtgaaagacaagagcaagcattngctttgctcaaagtgaagctcaccaaggcaactattctaactcttcctaacttttctaaaacttttgagctacaatgtgatgtctctgtagtgggtgtgggagttgtatttttgcaaggtgggcaccctattgcttattgtcagaccctaatttcgtccgaggcctattattcattgatgttttgattatcgttagccgaactgcgttgttcgacaccatttaccgtacaagacgaaagatcgttcaatgttttgatcaagaacacgaaagataccaaaaaagaggggcaaaaggttccttttactaagatttctggac

SEQ ID NO: 236452 - DNA, 372 bp, Glycine max
  unsure (1)..(372): unsure at all n locations
agctntggtgctgtccctgtgggagctgcttagtctatctcaagtttaggtagtggacttggttcaagctttttcccaaggcgtatagatatacagatacgtcgaggtacattaatttattttttaattttctaggtcctgctgttttgcataatgcttttaacttatatctaacttcatttctattattaggtacctcaacaacctcatccaataccaatcaagaagaacgcaatgagacacaatctgcctcagacaaagaaattcaggtgaaagttctgttaatcaggcaacctctaggcgtccagatgcattcattgctggggagccaggagtaatgttaatgccaattataaccatggttgcagcagc

SEQ ID NO: 236453 - DNA, 433 bp, Glycine max
  unsure (1)..(433): unsure at all n locations
agcttaaagtatgcccgagtcattcatctctatgagatgtngttaaagtattggcgatcagaattgccattccttggattatagggttgaaccaagctccagcttttacaaaaaggttcatcaagtcaagttgaaatatggaagtaaccatcctgcaaaattggggcaaaagatgaatcgagtcacatcactgcttcgtctactgccaaacatatttaggattattgatgtccttgttacttccagtttcaccttgacaaagatgtcatggaccatgttgaaaatctaaattgattcaaccccatatcctgcgtaaaaattcgcaatacttcgactgtacatcattcgcatgcatccatgcttntcattggttgcattctcattgcattcttccttgaaaatanataaaataaaataaatgaacttatcaaaa

SEQ ID NO: 236454 - DNA, 461 bp, Glycine max
  unsure (1)..(461): unsure at all n locations
agctcattgtcgttggaatgtgttcaaagtcttttgtttgaatntcgagcatctccatatactacgggaaacaatcggacatccgagtaaaaaggttttgctgtttgaattttctaagaggttatgatttcaattttgagcgtctcgatatattacgagactcaatcaggcatccgagtaaaaagatattgtcgctagatttttcttagagctactatttccgattatgagcgtctcgatatattacgagattcattcggacatccgagtaaaaagttattgtcgtttgatattgctcagagcttcttgtatgaatttcgagtgtctcgatatactacgggacacaatcggacatccgagtaaanagttattgacattntgaattgctcatagcattcggtgtccattacgagcgtctagatatatataaggatncattctgacatacgagtaaaaagata

SEQ ID NO: 236455 - DNA, 453 bp, Glycine max
  unsure (1)..(453): unsure at all n locations
agctaagagaaagctgagaatttttatatantaagngancacgnattccgaaatatagggggagaaaacggatgcacattttatctatatacaattgtttgttgcttgcttgaatcttgatttcaggtattgtattgtcatcatcaaaaagggggagattgtagatgcaattggttttgatgtttcgatgatgatcatgatgatgtgttgcaattgatgcaaatgggcttttcaagattaaaattcacgacaatacttcacgattacaagtctcaacattcatatgatcactacaatattatgaagggaattcctaattgaattagcaaaggtctggccaactgatttaaaataaaatgtgttatcaaagggtttactctctggtattcgattaccagaggatgtaatctattaccactggccaattctgttttaacaactttaaaattctat

SEQ ID NO: 236456 - DNA, 347 bp, Glycine max
  unsure (1)..(347): unsure at all n locations
agcttcccgagaacgtgcctggatggaactgtttaccggcttcctagagcaccatcgatacatgtgttgtatggcttctggcccaactctcctgttaagaatgagtaaaaaagatggtgacccctttttggaatatgcgcaacgatggtaggatatggtggatcacatgacattcgtccatgagtggcacaaagataatcaccctgatggtctacactctgcctatgttctactcttagaagctagtgggcagcatgccacccatatttgatgatctagtgtttggcggggaatgaactgacgtcgtaccgaacagaagaaaccttgaatacgtnttctcctcttca

SEQ ID NO: 236457 - DNA, 429 bp, Glycine max
agcttggagggattgatggggacccggtgtttataggaacgaggataagggccacatgggagtacgtgagctcagttgaaggtgggcaactggggatggtgaatttatgtgtgatttgtggatgtggatagtcgacttgcaccatcacccgaccgccacctagtaccacatgtgaagggtaccccataatcctacaagcttgaagtgaggaagtgtggaagggtgagacttcctacttttattcattgaccacagagtggtacctggagatatgtcgcgggggtcaggagaccttgtggacgtcaggcggggtgctattgcccaaaaccaagcttgaccaatcccgacccaacccgggcatagtcagtcagtgagaacctgtgacgtacctatacaggcgagctcctggcagtcaatcgataatagaac

SEQ ID NO: 236458 - DNA, 380 bp, Glycine max
  unsure (1)..(380): unsure at all n locations
agcttgttatccaagtgtttatcttggggtgtagcaccctcttccaaggcttataccctagtggatggcgcctcctctctcctcttatcctttgtcttccgctgcatctccatggtggaaaatcaccattaaaggacctcattgaatctcaaagatccagtccttcatatgaaaccgcacaagcaaacttccatcatttcctgtgatgatattttgctataaactgaaaactgaactgatgacaccatatgtttagccccatgtacccctctaccatgagtgntaagattaagttgagaggtaacattatgagctctcaaatcgttagtgtattgtcctcataagtatactgggtaagtttaaatttttgaactccaaat

SEQ ID NO: 236459 - DNA, 448 bp, Glycine max
  unsure (1)..(448): unsure at all n locations
agcttctccgccatttttctatatattgttgagaagngaaggggaaaaatgttcagccctcctggtaattcgagaatcacttgaaattagtgaaaaaaaatgtttccgtgaagaaaatccaagccgagacgcttccgtaacatttccgtaatgtttccatgggtgatttcgcgaagactttcaaccgttcttcgacgttcttcgttcgttcttcgccgttcttcggtcttcaaccgataagttcccgaaatcgaactnttcaattcattctatgtaccctttgtggtcctcatatgttttcacgtgcttttatattcatttcatttactttccgcacccccttttgacgtgctttagtcattcgcttaagtccctttctcgcctaatcaaaaaataacataaatttccaccgatcgtttgaattgaatatccgctaattctgttaaaa

SEQ ID NO: 236460 - DNA, 424 bp, Glycine max
  unsure (1)..(424): unsure at all n locations
agcttgaagagggaaatacacagaggcatttatcttttctttgagccaagnttagatcttttacgaagatttgtgagtctttcaccgattgtgatattcctataggtggaggagacatcctcattcctttgtaagcaagcaatttctcttaattctttttcttcatatgaaaaggagcttccttgctatggaaggctaaacccttagctagggattcttgctgagtaattgacgtaaactctttccctatctaattaagatagctcttatgtgcccatcgtttatatcaatacttaattattgcatgcttgtggctcgatcacccatatgtgcgtactgttaggggtattaacatagaaagatgtattgcctccttacaactagatatagcangattatgtcaccgtatgtttaacaccgagtg

SEQ ID NO: 236461 - DNA, 464 bp, Glycine max
  unsure (1)..(464): unsure at all n locations
atccttaagcaccgcggctgcagcttgcagattggtcttcgccagtgtttgattttgtgggtccgaaaagaggcaaatntgatcatcctactaggacgactgagaaaactggggcaaataaagagggtgaggatgagggagaaacccatgctgtgactgcaattcctgtacggccaaatttcccaccaacccaacaatatctttactcagccaataacaaaccttctccttacccaccacccaggtatccacaaaggccatccctaaatctaccacaaagtctgtctaccgcacttccaatgacgaacaccacctttagcacaaaccaaaaacaccaaccaagaagtgaattttgcagcgagagagcctgtagaattcaccccaattccagtgtcctatgctgacttgctcccatatgatttaatgggagccataaccctagccaaagttcatcaatcttcatt

SEQ ID NO: 236462 - DNA, 387 bp, Glycine max
acccaagcgacgaggctgcagcttccgactggggggggggtttgtctttttttaccacaacaaggggaagataagtcaattgaaaaccgaatcgctctcccacagatatgagcatacaaagaaactatctgtcccttccatgcaacagacttgcgatgaaacgaggacacgaagaatttaagaccaccacatgagaacagaagtgcttaaagtgaatgtcgaacattgacttctaattatgaagcgaataagaatatttggattttgccagggctaggggtcagaaaaagcggggcccaacacaccctggcataaagttcttctcaccctatatatccctcgtttatacaccaactgaggggtgtacatcatgcggcatgaaaaatt

SEQ ID NO: 236463 - DNA, 322 bp, Glycine max
  unsure (1)..(322): unsure at all n locations
agctnggnnacctcattcttcactagatttatattgtttcttttgagncttccctgaggctggcttactggtttaaccccatcctttaaatttattcgatgcatacatgtggatgggctaataccaggaatgtccgccagggtccagcctataaccttcttatgcttcttgagaatagataagaacttcttctcttgctcatcagggagggagacagatataattactggaaaacctttgctatcattcaaggaagcatatattaaatatgatggcaaaggcttcaattctggtggggccggctggataatggtaaaaagag

SEQ ID NO: 236464 - DNA, 367 bp, Glycine max
  unsure (1)..(367): unsure at all n locations
caagcttgagccaaaatcctgactcaccatataccttgttccagggngagaatgtcaatccttaccttcggaagcgaaaagaatagaagggaaatttccaatcaaagaaaaggaaagaaggaagatttccaatctaagagaaagcaaaaaaagaaaagaaggaaaattcccaatcaaagagtgggagaaagcaaaaagaaaagaaagaaaattcccaatcaaagaatgggagaaagctaaaaaggaagaagaagaaggaaagaaagctcctgatcagggatcgaaagataacagaagaaatgtgcagaaaggtctttggaccggacaatatctctataatacagaattgtcaccacatgaacaaaaa

SEQ ID NO: 236465 - DNA, 459 bp, Glycine max
agctggtggttacgcgagcattatttactttccttatatagagggtggttacacaaatgagcacatcttaaaagcatactccgcacaatggtggcctcttgggaatgaagtggcaattcctccttctgatgatgcatggacacttatccctgacccaactacaattcgtgcgaaaggtcggccaaaatcaacaaggataaggaatgagatggattggctcaaaccatctaaccaccgacaaaaatgtattaaatgcggagcataagggcacaataggcgccaatgtccaatgcaatctgaccgtgggagaaattcatttaattgatttatgtatgttagatgagtgacttgtattgtgtgagggtctattcaatgtatttactttgtggtgtgcaatgaaatcgtcagttagttatttttgaatgtgtacttctggcaagaaaattatacattacttat

SEQ ID NO: 236466 - DNA, 392 bp, Glycine max
aaaataagagccatctcacttatccagcgagagtgatcctcctaaattctggagcgatacaagaccaccctggctgtatcaaaggagcttgaccaaccgttgagtgttgccctcgccgaaaagagaggagcattccttccttacaacttcgaccttgttctgtcaaaccatagttacaaaaaaaaccaattcggtcgagaattatctcgtggccacaactaccatatcacacactcaaagaaagggagacctgagcccacctgaattcagaatgagacctctccccttgctctggatcacctcatatggagccctgtagcttgagatatcgacatttctatatttgcgtgcacgccaccacgtgacctacgattgaccaacccatctcttaa

SEQ ID NO: 236467 - DNA, 401 bp, Glycine max
  unsure (1)..(401): unsure at all n locations
agcngggacagttggaagaggtgtaccngttgtttgaaaaagaaggccagcagatggagcaaatgataaatatgtttttccttgatcaccttactcttttatntcataaatcatctgcaccaaaaactggagaatgacaagaaggcaataatgtaaagacgaaccatggctgactactcttaattagctagtgatcttatgcttaacgaatgtattcaattatcctgctctctccatttgttttggccacgagtcactggactattagttcaatatcatacaactccatcttgatgtaaagcgtcttttaacttttttttttataaccaatctgacatgcatctctagagaatgcgtcgtctgtatttgtagatacaatgagatcttttttttcaaacata

SEQ ID NO: 236468 - DNA, 432 bp, Glycine max
agcttcagagaaataatataatatggaaataatgtcattacttcaaaatcatactataaagaattgtcctaatatttaaatatcacagataataattttttaaaattaaaaaaagttagagggaccgcggtccctaaccctaggagtaagtctgttccagtcaatgacttatagtttcggtaactttttttttttttacaaatccacaaatttaatgattcaatccattaatgtaatattttaattttatttattattcttcataatttttagagtattttaatattttttagattaatccattccatcattaatgaaactccgctggattcggatttgttaggaagaatatttttcttcttcatagatttgatagaaagaatatacaaactaatccaactaaaatcaaaatattttaattcaattaaatga

SEQ ID NO: 236469 - DNA, 404 bp, Glycine max
  unsure (1)..(404): unsure at all n locations
agcttatccatgacaccttctttattaggccanacatttgcataaaactccatgactactttaggatcatatttagccatgggctctgccatctgcgtccaatgcctccttgcaattttcgcctgaaattatgtatactcaccctcagctagctagaccagcctttccttgagaaaacaccaatctttaatcacttcaaagcggcattgatgctcctcacttggtgcccatcaaactcgatgtctaaaggtggagctgtactacattcctctcctgtagaggtcttcctagctcttttagcagggagattcttcggggccatctgggacaaaagcaagttgaaactagaatcttagcaaaatgttatttttcacagaagctaatatgtgcacaagtttcggaat

SEQ ID NO: 236470 - DNA, 458 bp, Glycine max
  unsure (1)..(458): unsure at all n locations
agcttggcggaagtgtatgtggtatctctatatcgagcagagtcagccaatggaaaggggaagagctcgcaatgaaagcaccaatgatgtaaaaaggattctctaaattagagggcagaggaacctctaagaacatattagagagaagaaatagacaatattttcattgataacttttcaccaatacaataaagaatttataaggacaacaatcctaacaaactcaaatattttttccaattcccctataatagaattccactactatcttctagaatgatccacaaagaaacccattataatatatcacttgtagtgaatctaattagtccaattctttggctntatgttgacctgcttgggcctctccttaatagctaggtgggctgtcttagtctactaacaactattcaaatccatatcaaagaaggtcatccaccacttaggatgggcctgcc

SEQ ID NO: 236471 - DNA, 383 bp, Glycine max
agcttgaagtgagagtgtgtggaatagtttttcttcctaccttcatacgttgaccacagagtggtgcctggagatatgtcgcgggggtcaggagaccttggggacgctacgtggggtgctattgcccaaaaccaagcttgaccaatcccgacccaacccgggcatagacagtcagtgagaacctgtgacgcacctaaacaggcgagctcctgtctgtcaaacgataaaagaacaaataccacatatcaaggaggcttgtgtggcggctggcctcctatgaatcttgagtgatatttacaacatggcctctagtaatcgattaccacgggtgtgttatcgattacaaggcttataaatgaacacaggaagttaagatgacctct

SEQ ID NO: 236472 - DNA, 363 bp, Glycine max
agcttctccatccgatatggatgagcggattccttcgtttttcctctacatgatagcggtgggcaagaagaaagctcatctttagttcatctcgagattgaccaagccatagagcatattcgatggtcacacagggaccttatcatcatgccttaagatacagcgtaaggcgagttactcttgtaatcaactgctcgggaactatcttctcaaagattgcatatgagctaccattagcctccccttaccaaacataatgcttatcggattttgcactctttgctgagacaaccaccgttaagcaacataaaattatatatataccacattacacacaatattttagagcatcacatatgtact

SEQ ID NO: 236473 - DNA, 466 bp, Glycine max
agcttgttgaagaatgggcagttcccttgttagcattgttgatatatatgaggtggagttactgtacttggaacattgctagagtattcttactaacagttcgacgtcatctaatttacgccttttgttgcatatcagaggtttagactgtattgtcttggaaagttgagaagcaatccttggtcagaactagatggtcttcagccagagacaaagataataaatgagctgctggaaaagattaacacaaagggcttcctcaccatcaatagccagccagctgtcaatggggaaaagtcagattctcctactgttggtgggtgtaaaagaagttaatttttatctatgcatgatattttctggatgtaggtttagagcattgtagtttgtactagctatagatggatgactaactttctgataccaagtagatagttgaatatttctttagggttattttgaatga

SEQ ID NO: 236474 - DNA, 376 bp, Glycine max
  unsure (1)..(376): unsure at all n locations
agcttacacnanaatggaagaggaagaagataagtgtttatttctagctttcttagcacttgcaattgcaccaatcaatggaagcaagtgagcagaatcttgcttctccttcttgtgttcacggccagaccagcatcatagaggaagaataggtttgtttttgcttccaagtgtgtatgggctgaatgtatgagagagaagagaggattttgagtgctcaccaatttatgaagtgaaaaatgaacagtgaatgtgagtggggaattggtgttggccgtgttatgttccttgggaaggaaaggtggtgttgtgataggtctaagcgggtggtggaaaaggattatgtgtcactctgtggtgataggaagaattggtg

SEQ ID NO: 236475 - DNA, 456 bp, Glycine max
  unsure (1)..(456): unsure at all n locations
agcttaaaaagaatataattatgctttatataaggtgtactttttggatgnggnatagctctaatgatttataacacgggcaatgtgaattgttggttggatgataatgatcatggattgaattgtaatatgttttttcttcacacaattattagatttcacaaaattgatcgagatcctttgattactatgttctaaattgcaagagttactgtgaattttgagcataagttttttttaaaagtacaaaacgctataatnttgactgactctatttaaaatattagagaacaaaacattagagttactttgttcagtctttcttagcaaagaaaattataangtagatttacataggatttccctattgtcaatgcataacaccaattttgttattttttctcgattcttgatgaatttaaggaaacatttttcaactatagagaataatgtatg

SEQ ID NO: 236476 - DNA, 457 bp, Glycine max
  unsure (1)..(457): unsure at all n locations
gatccttaagtcacctgcggcatgcaagcttgttcaacttaagagtcctgctaatgtcattggttaaagaaataaacagagttnttattgaaggattccattggaaatcaagagtgtgttgttacacttctcaataataaaaaaaaaaatcctttatacctctgaattcttaacatgtaactttaagacattagttagcattttcctttacttaaaattgttaagattacttattttcatgctttcatttcttgtgtatatttcatcataataggatcatttccctgtgaaggaaaaacaataaacaaggaacatgtttttgaagatgcattgtatagtacctgaatctgacacgtctaagctctcttgttccatcagctaactgcctgattgtaatgtaaactcctggctcgtcttgttctacccattctgtctccatttcactggcattgctgat

SEQ ID NO: 236477 - DNA, 439 bp, Glycine max
  unsure (1)..(439): unsure at all n locations
agcttctgcttatgtggcaggtttggcttttcttactttctngnctcaactgcgagctttggccactgcttttccttcccgcggtgcttctcttcatatccgcctgagtgggcttatagcctaaaccctacttcccacgatttcctttggcatttatcaggctagttatgccgccgttgtctttgcctaaacccattccgggttcgtaaccgttccccaacataactcgggccatcattactgctacatcggacaggcaagcttgcccagagaaggagtccacggaggaaatgctgaccacctcataagactggaaagcggtttctaacgattcttctgcggcttccacataaggcatagaggatgggcagctcaccaagatgtcttcctcgcctgacacgatgaccaaatgcccttccactacgaatttcaacttttg

SEQ ID NO: 236478 - DNA, 462 bp, Glycine max
  unsure (1)..(462): unsure at all n locations
agcttcaagataatcattggtgtcgttgtttttgccgngagagttgctggagttggatctacggtgggtggaatagtaggaaatgaggaaggatttttggtggcgggaccagagcggtaagaggtggagcggcgagaagttgacgacgacgacagtaaacgaaaaaaatcaaccgagcttagaatggaaacacaaaaaagatatttggttgggattttttgttatattgtgcaaaagcaagctgcctagcttgacgacgtgacttcataggtctggaggtgcagagctaggtacaattataaaatttaaaaaagttgaactttcaatcaatcaaaaattattcttgacataattnttaaaataattattgtgaaaacaaacttactatacacacaatagttcatattattaaaattagtggtaaaatattttatgcctatcaatatataatatatatttttt

SEQ ID NO: 236479 - DNA, 442 bp, Glycine max
agcttcaagaataatgccctcatcaaacttcttatttccagaaggaaattcaataaataggcctcctattgttaatggagagggttaccactattggaaaacccgaatgcaaatcttcattgaggcaatagacttaaacatttgggaagccatagaagtaggaccttatgtacccaccatggtggctggaaatgcaacaagagataaacctatagaagagtggactgaagatgaaagaagattagtgaagtacaatttaaaggctagaaacatcattacttctgctctaggaatggatgaatattttagggtttcaaattgttagagtgctaaggatatgtgggacacttttcaagttacacatgagggaacaactgatgtcaaatgatctaggataaatactctaactcatgagtatgaattatttaggatgaagacaaat

SEQ ID NO: 236480 - DNA, 457 bp, Glycine max
  unsure (1)..(457): unsure at all n locations
agctntacaattgcaaaagggaaatattttgttattgatgtaattgagaaagggaatggagggaaggaatgacttctaatgtttgcttctccttcttttagcctttgccttctataaggaattgtattctcttgaattttttgtgtgttttttccttcttctctctccttcttttataggggcatatcatcttagtttttacgcaaccttcgcactgagcgcgctttctgtgcttagtgagtatggcggtaatcctcgtgctaagcgcgactttttcctgaattagcatgttttcctgaattagccttcactttcctgacttatcttcttggcactaagcgtgttgtgcccacttcgtgttgagtggctgggatgcgcacttcagatttccaatttgctcttttgggctttactttactcactanacatcataagttcatcaactcttaatattttc

SEQ ID NO: 236481 - DNA, 367 bp, Glycine max
  unsure (1)..(367): unsure at all n locations
agcttagggtgagtaggtgctcctaaagtatccaaaaataagataaatgatgtatcataanattagtttgcttttgaaacagcaaagaaattttattgaatcattatagagacacatgatttatttcccaccacatcgtctagagtgtttcacagtgttagagaaattggtattttgtaatggttattgtatttgtcttactctctaaagattttnttgcttttgttgtaccctaaaaggggctatgtatagggcaggctcccttatgcctgaacctgtcacatctttcctttctattgtacttcatcatatattattaatataagtgggtgccaagtgagagaataactctcgagcacttttgatc

SEQ ID NO: 236482 - DNA, 362 bp, Glycine max
agcttataagaagatgattgccgtactcttttccagaaatgcccgagaaggaggacccatgaacgtgaatctacccgaggctgttgagcacgcaatcagaggggcacaacgctccatatgattatgatgatggcaggatcgatttcttacacagggccactcatcactatctactttgagactcttagctctatcttgacctgtaggggagaattaatgctttgcactcgcaaaatgttacacttttatgtaataaacaaccaccgatcttttgaacatatcctattactcctaattaaacacgcaaggtttacatgctcgcaacttgcccatatattaactaactatccgacacactaacg

SEQ ID NO: 236483 - DNA, 293 bp, Glycine max
  unsure (1)..(293): unsure at all n locations
agcttgcttgcaatacatatcctataggattgatcttgacncccaaagagcttgaagaatggcttatccttttctatgagcttcaggaggaacctatacaaagacaccattttgccattcaactctcaaacttccctgacgttggtaaagctgtgcatttctagtatcgacgaacatttgccaaggttgggctcaatcccccggtgggtgaccatgaaccctaaaaatgtttcgttgtctacctcaagggagcactatacacggttaaggagcatgtcatacttgtgaatctc

SEQ ID NO: 236484 - DNA, 430 bp, Glycine max
  unsure (1)..(430): unsure at all n locations
cttaagtcacctgcggcatgcaagctttcgatcattgtatgtgcccgttgtgtgccacattgttgtttttgcattnntattctcgctctgtatactttttatacccnctgtggacgtgcttaagccattntacttaagtcatttctcgcttaacttaaaaataaaataaatttccaccgaacgtttgaattgtattatccattaactctgggtaaaataaactccgaccgttcggtcgtgccgtaaccacgttggaaatcaaaaagaggtgaaaaataatattattactctaaagacatcttttagtaacaataaagcggagaatcaagtggacgctttctctgtgggatttctcattcttaatcgagatgattataactaaagtgaaataaagggtatatcattttgctatgcagctcgtccataaaaa

SEQ ID NO: 236485 - DNA, 340 bp, Glycine max
agcttactaatcaaaaagtaatgggattgtttatggattttgcgagagagggatctactaccagtggagtggttgatgaagaaaagaggataatgaacaatttcgagttgtgaaatgtgttgacattaacgaaacacatgtatttgagaaagaggagaaaaagaaatggaaaccctagatctgagaaaaaaaaagtgagaagaccttcttttttttactaaaagacctcgtgtcgtatagatctaagggactttttaaaataattattttaatgtgtgaagctttctatcatggttaaataaaagggagtataaggaatacacttatatgtgccatgcgt

SEQ ID NO: 236486 - DNA, 333 bp, Glycine max
  unsure (1)..(333): unsure at all n locations
agcttcactaagattatattgttnntttttatcttaaggcaaagaggtgcaatagtggtagataatttggaaatagaaaatttaagcatcattctcaaccctctccaaagtggtgaaatgaggaccttattggcagacttcaagttgtctatcaacgattatctgcaggagctcgatttttctcctgtgagagtactagctgagattattgaattcaacatcaatcgccctgctgtatttagaagaaaatcgttcatatctggatgaatagtagcatggaatagggtcattactttttctggaagaaggcgtagtgcctcacatttttaaact

SEQ ID NO: 236487 - DNA, 432 bp, Glycine max
  unsure (1)..(432): unsure at all n locations
agcttcaagccttgagtgataagttaatctctcatgtagncctttaattntatgctgagttggtgtctagctagcaatttcttgtattatttggatgcattggcatttcgcttttctctgattgtttagtgggttgtatcttcctcctgtcccattttttgaatattggattttttctgataggggaaggactggaaatacttctcatgttagggttccaccatatgtgtcgtgtgttgttaaagacaagcaaaaattggttcaaaaaaatcttgtcctaccctaaaaccttgcacactgggtgcaacaatatatttggtgttagatatatagttgttttgtttgtctgttaacttggcttggacttccttcangtatcaggtggttggaggcatagtatggcactcacgtctactggactactatttggat

SEQ ID NO: 236488 - DNA, 420 bp, Glycine max
  unsure (1)..(420): unsure at all n locations
gatccttgagtcaccgcggctgcaactgcctaagagacctgaggattatctgctgaaggaaccagttccgctcccgaatatgacagccaccgttttaggagcgctgagcaccagcagcgcttcgaggccatcaagggatggtcatttctccgggagcgacgcgtccagctccgggacgacgagtatatcgacttccaggaggagatagttcaccggcagtgggcatcactggttacccccatggccaagtttgacccagacatagtcctcgaattttatgccaatgcttggcctacagaggagggcgtgcgagatatgcgatcctgngtgaggggtcagtggatcccgttcgatgcagatgctntcagtcagttcttgggatatcctctagtgctggaggagcgtcaggagtgcgagtat

SEQ ID NO: 236489 - DNA, 337 bp, Glycine max
  unsure (1)..(337): unsure at all n locations
agcttagcgagacaacactgtttgaaccttcataattntctcccttntacctgaaattgaagtgaaatttacattaaattcaataagaaggcttctattgagcacaaatgaaaactaaaatagaaatatttacaatcctaccaaaaattaaccataaattgcgagatttatttacattttggaaacttttctatacaaaaaattagtcataaaagatgactaacaccacctgtgatcgattaaataatcaatgtaatcgattgtttcgaagaattaatcaattattttatcatttcaatctaataaagggttattcccaacatcttcaaaagctttc

SEQ ID NO: 236490 - DNA, 367 bp, Glycine max
agctttaatgcaatgagctatgtttgatatgctatggataaacaacttagtacagaaatgtatcattctatgactttcccaaagtatcacttccaaatcacttgctcatatttctctttcttctttcgtgtcgaataacaaagcttaagtgccctcttatagacttcagtgaagagatccattacgggatttatgctttccttggtatgaccatagtgagacaaccggaggcttgccacacgtcacattctacaggagagacacggaataaaagtatagacaacatcatgtactcctttctctacaccgctcatgactcacaagaatataccttctaatatcttctattgtttagttgatactccaa

SEQ ID NO: 236491 - DNA, 145 bp, Glycine max
agcttgagaggaggatgtgtggattgctctttattcccgctgttattagggaccacataatggtacctggagagatgtggcagtggtaatgagaccttgttgactacatgaggggagatattgaccttactcatctgtgaccgtt

SEQ ID NO: 236492 - DNA, 388 bp, Glycine max
  unsure (1)..(388): unsure at all n locations
agctgttaaccttgacgtgggagtttctcttgccggnntgatatgttcacacgctcgctaaagagagacaaaagctggtgcaaatcaacactccgatatctcatgggtggaatggatgaatgcatgaaggaatgcatattacacagatgtaatctacgaatgcggtggtccggggaattcgtccccttcttatacacaatgtctaggggtagcaaagtgccccaacgtacttttttaaaaaggcgacacggaccctccgttggtttgtatacagaagggatcaagacagaacccatatgctatgcctatgcaaaagacacaatgccggaatgtacacagtatgataatattcactgaacataaccaaaacggtatatgataccttatg

SEQ ID NO: 236493 - DNA, 416 bp, Glycine max
  unsure (1)..(416): unsure at all n locations
agcttgaaggcaaactgtatgcattggttaacttnggaacccagctggccttgaataagatatttgtacctgtcgtaagggtttgtggtttgtgctcttctgctgaccaccatgcagacctttgcccttccatgcagcaacatggagcaattgagcaccctgaagcttatgctgcaaatatttacaatagacctcctcaacctcagtagcaaaatcaaccacagcagatcaattatgacctctccagcaacaaatacaaccctggatggaggaatcaccctaacctcagatggtccagccctcagcaacaacaacaagagcctgctcctcccttcanaatgatgctggcgcaagcagaccatatanttctccaccaattcaacaacaggcacaaccccagaaacaatctaacagtg

SEQ ID NO: 236494 - DNA, 298 bp, Glycine max
  unsure (1)..(298): unsure at all n locations
agtcccgtcaagtagtcccgaagaaaaccggcctcaccgtgataaaaaatgagaaggaggagcttattcctactcgggtgcagaacagttggagagtctgcatcgactataggaggctaaaccaggttaccaaaaaggaccatttcccactgccattcattgaccaaatgcttgaacgcctggcaggtaaatctcactactgtttccttgatggttntctggttatatgcaaatcactattgctcatgaggatcangaaaaaaccacattcacctgccccttcggcacctttgcctat

SEQ ID NO: 236495 - DNA, 327 bp, Glycine max
tcgcctacgtcgtacgccgcctcaaggaaactgactgcgccattcgcaaagcctgtagctacaccatgggtgcccttgtcacgtattatttgaagacataccttgtgacgatgagggaccaggggctgttcacgacaccactgttcaaggtgatgggggagcataacaagagagtgcaagcaggggcgcataggcgatgggggagcacaacaagccactattcgtgaagtcgttaatgccgtcccatctcgatctaaacttaattaggacccatggaacgcattgttcatgtaacaatgctcattttttgatggaatatactacaat

SEQ ID NO: 236496 - DNA, 505 bp, Glycine max
  unsure (1)..(505): unsure at all n locations
ctattacgcgacactatagaaatctaagcttcttttggaccttgaacaagcaatcgactcctctttcataaccatgctatgtgctcgcgactggtccctttcttcccttcgcaacttgagttcattattgctaccccatagagctccgcgaaatttgttccggccatactcttccttgcgagccctcttggtctcttgttcaagggcccttgcggtaattgcattctcttcccgtaacccggcacactccttccgaacgtgtgtagcagccaacttgaacttctccttggcgagttttgcctttcctaactcgcttttgagggcttggacttcttcgtcctcttccggtgcttcaaaattctcttagctgacgacttttaacttggcgagccaatctaaacctcgcatgcgaactntcagccattcgtggtaccccccaatgatgccattacgaatgcctctaagctcttgatctttccttaacggngtttcccatgccttatgg

SEQ ID NO: 236497 - DNA, 385 bp, Glycine max
  unsure (1)..(385): unsure at all n locations
cacttcgattatataattagataccaatttctaactgcatcttgactctctgatgttattgtatcaatttaaagntgatgaacgttttggtgccttaccatgtagttacgaagttntgtcaattactattactgatcactatatgtctatggtctactgatggcaagatcaacttatgaacgcatgaaactagctaatgaaaagaagcgtccttttgttcttacgagagctggattttctggcagccaaaggtatgctgcaacatggactggagataatctttctacatgggagcatcttcacatgagtatctccatggtacttcagctggtaagattcttagtcgcatggatgctacttcccttgaacaatactgccatttgat

SEQ ID NO: 236498 - DNA, 444 bp, Glycine max
  unsure (1)..(444): unsure at all n locations
cattcactatgcagtcacatgcattggtaatttgcatgcaagcctgattagcacatgatctctagatgcaagaagggttagtccggtaataaatgatttttaaattcaaaattattggaattgttcataaactataaatatgagattttaaaggtcaaaaacatagtttttttggatgtttgagtaataatttgaggtccttcttgatcaaattgtaacacaatattttttttggattctttgatgtgaaaactatgaaataaatttggcactaatatttttaatgtattgaaaantaaatttataaattgcataacataaccacttaaacatagttttaagggtcgaaaacaagtttttttttactattaatttgaggtcattcttgatgaaattgtacacgatatttttttattctttgacgtaaaactattaaataaatct

SEQ ID NO: 236499 - DNA, 254 bp, Glycine max
  unsure (1)..(254): unsure at all n locations
ttactgtatacgccacaacgattaccttgataagtcttagattggcgatgagttattattttctcctatttcttaaccctcgatgtcactattttaattactgattagtcttaattgtcaaattaattatgcagttttatcatttgggcctattggactaattntgtgtttttaatttaatttcacgagaatcataagcaattgggtttgaatccggaattgggcttggacttgaagagagcagaacaatttat

SEQ ID NO: 236500 - DNA, 451 bp, Glycine max
  unsure (1)..(451): unsure at all n locations
actcagcttgtacattactttcatangattctggtatgtcacaatgttctcccatagtccttcatcatgatcattatgagttgcgtgtacatcatcaacattgggagactcatttatagaaggcattattgtggaaaaacttggtgtctcacaaatgtcaagcgcggaaccatgctgtgcgtcatttaaatgacttggtcttccctgtagaaccacaaaatatcttgaattgcatggattttggacgtaaaccacttgtcttgcttgttcggccataatgaaaggttcgtccatgtaagccaccttatttaggtctactaaagtaaatcccaattcatcttgatggacaccggtattgccattgacccacttacacttaaacacaagcactctaaattcattgtaatcaagctcccagatttgttcaatcactccacagtaaggcatggat

SEQ ID NO: 236501 - DNA, 391 bp, Glycine max
tcaacctctgttgttgagccttacaacactgtcctctacactcattcccttcttgagcacactgatgaggctgtcctgctcgacaacgaaaccgttgatgacatctgcagacgttcacttgacattgagaggccaacctacaccaaccttaatcgcttagcctctcacgtattggtattgtctgaattagaaataactagggctcgtgtcgagctatatatgccctttgattaactgtctgttggctatattcaagtgatttgatcactgaccgctctcctgacgtttgatggtgccttgaacagtcgatgtaatgaattccagaccaaccttgtgccatacgccacgattcacttgatgctgtcatcatatgctcccccgatttcagctg

SEQ ID NO: 236502 - DNA, 439 bp, Glycine max
  unsure (1)..(439): unsure at all n locations
gctttacatgtcttatgacacctaagtacacttagaggactatcttggacttgatggtggattaatgggctaaaccatatctaaaattcactaatcataattagtgaaaatttggctccacaaattcaatttcaaattcaagtaaaatttgaatagaaattcaaatttcccttcaattttttgtgacacttaagctataaatagaggctatgtgtgtgcatttttccaactttgatcatttggaaattaaacttcatatttcagagctcttttagagcacaaaatttcgtgctcttctcttcctctcccttcattcatctccttcttcctcctagctcttattcatggcctcctatggtggtgagcttcttctagactcatattctcctttgagtggcatctcctctctctctttctttctcaatatgctgncattcat

SEQ ID NO: 236503 - DNA, 302 bp, Glycine max
tgaccaatccctacccactccgcgcatagcctgacactttgagcctgtgatgtacctaaccctgcgagctcctggcaggcatcagatggaaggataacatcaccacaaaacagagaggcttgtggtggctggccagctgtgaattttgtgtgatatgtgacatatggcctatggtgatagatcacaaagagggggtggtcgattacaatgcttaaatgtgagaacacgaggctagaataggctctgggaatcaattatcacggcgtgtgatcgatgaccaaccttgaaaacgaggtcagaga

SEQ ID NO: 236504 - DNA, 333 bp, Glycine max
  unsure (1)..(333): unsure at all n locations
gttaatgtattaattgataaccatcatcaaaatatagcttacccatgaatcttagcaacgtctgaaattacagtagctggcaggtgagctggatcgtcaaccttataaaatagcgagaaaatgtagcatcattaaggacaacattcacccaaaatgatttgaaaagattcagtccaacatgtttttgaaagggttcaataattggtttaaaataatacttccatttttcaggtcttgtctaccaattagtaaatcaatagacatgaagtatcantctgattcctggataccactgtcatatttttgaattgagagtgacaatgaataatgaat

SEQ ID NO: 236505 - DNA, 415 bp, Glycine max
  unsure (1)..(415): unsure at all n locations
ggcgatccaactggaaantcaagttctgagcttcaagttgatcatgtagcatcttgccattcttttctaagacatcaattaattggctttgcaaagtttcctcctctccgtcggttgctaaccgcttcctcttccgttccccttgagatgtagaacccatttctggatttggggttgcccgtttcccattggtagtacctacaaaattaaggaatgtcaaaacattgaatttgcaataatgtcatcagttaagtccttgacactgtgattgtcaaagtagaagctttgatcctattcttatacctattataggaagctacaacctagctagagctcataagtttaggtaatagcataatgaaagctcgtgcctaagacccagcttgccattattattagagaatacttacttttg

SEQ ID NO: 236506 - DNA, 385 bp, Glycine max
  unsure (1)..(385): unsure at all n locations
ctaactcatcaaataaatcatttgtgtcttcactcagttggttatgtttttggggtatttggatcatgactttgtgtcaaggcttttatggctatgtactagagtttaaatctttgttcttctaaattaaaatttcaaatttgagcaccatagatgggatgtctgtatattgtccatgctttaaattcaaaggactattgtgtgaaggacatgttaaataagctcttgaaataatgaatttgagcaccaaagatgggacgtctgtatattagttgtccatgctttaaattcaaaggactattgtatatctgaaggacatgttaaataagatcttgaaataattaattgatgatattnttaagcattttgaaaggaagcttctact

SEQ ID NO: 236507 - DNA, 456 bp, Glycine max
tatacaacagttagtcggatagagtgactaacatgtacaaaacacacgactttttatttgttctaaaataattctaacacatcgcgccccagagtgattgaacttgtcgggttcccaaagtggatccccatcatgatactcattgcgcctcaaagtgattataacttgttgggtttccatagtggatcacatcacaatacttatcgcacattaactcatcacccttaaagggtcttacagtcatttgattgtatggttcatagctcacagctcaatgcacacaacatctcaatacacatgtgtcttacaatttaacacatagtccatgtatcacttacacacaatctcaatcacaaaggaagaattacaatacaatataaactcccaaataaacgctcatttgatcctctcatgatccatacacatgtgcattctaacccaattgcgataaactca

SEQ ID NO: 236508 - DNA, 459 bp, Glycine max
  unsure (1)..(459): unsure at all n locations
agcttcttcttgactcatcttctccttgaagtggcatctctaatcatcttttatctccattctactgccattcatcttcaagaagcaaagaaatccattgataaagaagatccaaggcctacaagctccacatggagctacgtcactgagtggtatacattgctgttgtaataaattttgttattagtggtgttcatggttatgcactctgcttgctgcttgtcttacccacatgactaaatgtagtcgctgagataggttggtttccttatgcaccttttggacctgctagtagatgttggactggtgttgctaacatcaccctctcctggaaaactaaccctgtcctcaagggtataagaggtctacaatgtatcccaatcttcacatgttttatcttccgtggtcaaaaccaggcattggaccanaacatgcttgattggtggtgaaacaaaagtg

SEQ ID NO: 236509 - DNA, 398 bp, Glycine max
  unsure (1)..(398): unsure at all n locations
gatgaaagagagaggaattactatnactccacgctgtagttggcttcaatttttatatagagttcacacttttgttgatggagacaaaaacaacatggagagcgatcaaatctataattctctggatgagttgggtgagaaaatgaaatcggctggatataagcctgatactgattatgttctgcaagatattgaccaagaggaaaaagctgagagtctttgcagccacagtgaaaagctcgctgttgcctttgggatactcaatttgaatggacagtcatctatacgggttttcaagaatctgagaatttgtggcgactgtcacaatgccattaagtacgtttctaagggtgttggtgtgacaatcattgttagagactccttgagggttcatcact

SEQ ID NO: 236510 - DNA, 386 bp, Glycine max
  unsure (1)..(386): unsure at all n locations
ctccatgggataaagaagttatatctaaaacgagtacaccgaagcttaatccagatccgtttttatacatgaagcactgtctgatgtngaatttttctccaaccgttgaaaacttggatctccctatgttctatgttgtgattaaattagttgtatttctttttttccacaagattactttgaaatgtgagatggggttattcatgtacatccagatagagatggtaagtaacagtaattggttattgatgaacttggtaattttatcaccagtcaaggtgggatcttatgcatgcttgcctaatagtaaaagaagagcttttccatgttgctgatgcaactacanttttcactcatcttcatcacatacttcaagtcatagtagt

SEQ ID NO: 236511 - DNA, 390 bp, Glycine max
  unsure (1)..(390): unsure at all n locations
tggtcgaatatcctcaagacttcataagaggggccaatctttcggaanagaccttcaagaagtatttgaaaatttctcttgatgaanactatgacttgcatccttttgagttcaaccattcccacttctgcaccatggggtttgttacctggtgggaaaaatattattcgacccgttcgattggagacactactgccatgatctccaggcttgagagtggctttgcgcaaccaacggtcgagaatattcgctcaagccttcaagctcgaggtataaatttacttttgactntntaaattgatatgtanttttgccttttctaatattattactttcaggcaaagcacccatgacgaagaggagtgctgaaacgtctcgagctgacgtgag

SEQ ID NO: 236512 - DNA, 447 bp, Glycine max
  unsure (1)..(447): unsure at all n locations
ttcagccatttcaaacgatcataactttttactcggatatcatatngagtcccgtaatataacgagacgctcgaaattgaatattgaagctctgaactagttcaaacgacaataactttttactcggatgtctgattgagtcccgtaatatatcgatacgctcgaaattgaatgttgaatctctgagccaattcaaacgacaataaccttttactcggatgtttgattgagtcccgtaatatatcgagacgctcgaaattgaatgttgaatctctgaactaattcaaacgacaataactttttactcggatgtctgattgagtcccgtaatataacgatacgctcgaaattgaatgttgaatctctgagccaattcaaacgacaatatacttttactcggatgtcttgatngagtcccgtatatatcgagaacgctcgaaatgaatg

SEQ ID NO: 236513 - DNA, 439 bp, Glycine max
  unsure (1)..(439): unsure at all n locations
cggatctataaaactcaagctgaagtaactagatgcctattaacctggaaccttttggccatgtataaaaatctgacctgcgctagactcaatgnttatgctcctctgccaccaccacacagacctttgtccttttgtgcaacaatctgaagcaattgaacagcctgaagcttatgctgcaaacatctacaatagaccccctcaacctcagcagcaaaatcagccacaaaagaacaactatgacctctctagaaataggtacaatcccgggtggaggaatcatcccaaccttagatggtcaaatcattcacaacagcaacagcaacaacaacaacagcaacaaccccagaaacaacaaatagttgaggcttctccgcaaccttctctttgagaacttgtgaggcaaatgactatgcaaaacactgcagttcaacaagag

SEQ ID NO: 236514 - DNA, 363 bp, Glycine max
  unsure (1)..(363): unsure at all n locations
tcatgatgattaacatcaattttgatgatgccaaaagttctatgattgattcaagattgattcaagatttcaagatcaagcatcaagaatccaatccaagattcaagattcaagagaagaaatcaagaagcaacaagtcaagacttcatataggataagtattaaaagattttttcaaaaaccaaatagcacagttttgttttacaaaagaattttctcaaattttctaagttaccagagtgattacactttggtaatcgattaccagtgaccattntggttttcaaaatgttttcaaatgatttgaacgttccaaaatgattntcaaatagtgtaatcgattacactatattagtaatcgat

SEQ ID NO: 236515 - DNA, 227 bp, Glycine max
ttcgagggtgcgcagcccaccatcttttgatagtggagtaccgatgatgtggctaccatgacgactatcgacgccctttccattatagtgggtaccacctgggccgccagattccatcagcttctgggcgtgttctgtgagagatccgtcctgctttctgcacatgatcagtaattgcatcctattcagaaccatatcaaaattgtactgatactgcctaacacaag

SEQ ID NO: 236516 - DNA, 423 bp, Glycine max
  unsure (1)..(423): unsure at all n locations
aacgttcagaaactgctggtaatctattaacatatatgtgtaatcgattacacagtgcaaactttgaattcaaattttaatagcttgtgtaaatcagttttggccacacgtaatcgattacatcttctggtaatcgattaccagagagtaaatttgtcgaaaaagactttttaacttaaaattcttggccaaaccttttgctacttcaattgaaattcccttcctatttaatataccctttctaagactctagagactgtcttgatcatccatcttgaatatctttaatttctttgtcttgaataaagctttgagacgcatgtgaaactttggcatcatcaaaacattcagcttgatcctttgtccacagtctcacctttatatatatgtaattatatatgtgagattattattntttgtcta

SEQ ID NO: 236517 - DNA, 400 bp, Glycine max
  unsure (1)..(400): unsure at all n locations
ttactctgngagtgaacgactagctttgagtaataatctttgcatcaatcttataattttagaatgaaatgtataaatgaggacatgatgaaagccatgattatacatacacaagccttttgaccaaaaagcttaccttgaatgataattatatcctttgcaccctttttgagctgaatgatattgtaaaaaatttgaaccccgaacttaaataattatctccagataccttgtttagattctaggagagcatttagttcaaggaaaatttaccccaaatttgggggagtggaactaattgggatgcaaagaaagagataaagcatcagcacacacaacacacaagttgtctgttaaaaaaanaagaagaaaagtgtgttgatgtaacaaggtcaaaagc

SEQ ID NO: 236518 - DNA, 414 bp, Glycine max
  unsure (1)..(414): unsure at all n locations
accccggtacaaatgcttctttgcatcactgtgccagccttatacatatgggcatgtgtntgccaacaagactcttggccaaggtcacgaatcatatcctccaagcgatctcccatttctacatcaaacggttcagattgggacccactctgcatgtgtgtcaattcaccatgccatatccacgtcatgtcattcttcttaatcccgacacacaatataggctctcatatgttgaccaatatttatcgtcttacgttcaaaccattgatacaaggacaatagtattttcgatctttatccggtcgacttctttttgaagacaattgccagaactcttagacgccttccttatatgcaaggctcatgcgactttcattcatccaactttgatccatctaaataataactccgtga

SEQ ID NO: 236519 - DNA, 422 bp, Glycine max
gaaaagttttggcatttgaagtctcaatggcggtcatgactgacctttgcacaacccggttgatggagcaccgctcaatgaccctcccttcaaaggtagaagcgatccagatgcctaccagcactgggaaatgaatactgagcacgtatttgtctgctgcgactacactgatgcgcacaaagtcaagctatcaacagctgaattctccgactatgcccttgtttggtggcataaataccacagataaatgttgccagaggaaaggcgataggtagatacatggactgacatgaaaagggtgatgagaaaaaggtatgtgcccactagctataacagaaccatgcgacagaaactccaatggctgtcccaagggaatttaaccgtggaagaatattataaagagatggaaatggcgttagtga

SEQ ID NO: 236520 - DNA, 405 bp, Glycine max
  unsure (1)..(405): unsure at all n locations
aactacccatcatatgtttcagaaccccatacccacgaaacttgagagagaaagaagtccacccatacctgcaatgttaaagtctcactcggagacacgcacttcacgaccccgaanatgccctcctttcgcgatttgaggcagaaatgagcaccaaaggttggagctctgttggggtgttaatggagaatgatggagaagaaaatggcaacttgagggagagagagagctgtctgataaaaaaagtgcgggggctgagtgaagagagagaatagctttttggtttttaaatgaaaagggtgactctttctctattatattattggagcagtgccacatgtgtccattagagtggagcaagaagggcccactctcactttttgattgtgacccatactcagtcac

SEQ ID NO: 236521 - DNA, 310 bp, Glycine max
gatgacattcgattgatatgtgattcattaatttcatgcagcatgactatagaagtgaaagatgatttacaggaaaatcattcaactgtctcagctgaactgaatgtaaatgtggtagacaatttaatgcaagatcaatcaactgtctcagttgaggtcagttgtgctaaaggcgcatctaacaaattcattgattcagatgctaccaatatgccattcatcaagacactctgtgattctggtgtcaactcagtgtcagatcctggcatgctagaactttcaaattcaaaacctgataatgaatgttctg

SEQ ID NO: 236522 - DNA, 423 bp, Glycine max
gatgacgaaagtaaaaacctgtcaatatttcaaaataatcataatcgaacgaccaacatcattctgataccatcgacctcgttcgccctggttgacgaaaggtacggataaccataaggtattccccgcatgtcatcgaactcgttgtctctggatgacaaaaggtgcagaagacgacgttagtctctgcgtatcaacgggctcgtttgcctctggttgacaaaaggtgcggataaccataaggtacccccgcctgccacttgacttcccgggtcagggttaacataaattgtttgtaggataactgcttgggtatctctgtatgtcacctgacttcacgggtcaggattaacagaagcgcagaagacgacgttagtctctacgtgtcaacgggctcgtttgcccctagttgacgacaggtgc

SEQ ID NO: 236523 - DNA, 450 bp, Glycine max
  unsure (1)..(450): unsure at all n locations
ngatcanaacaattatctaatcattcagatccactcaaatcatacaattgctcattcaaatcattctcaaacactcatttcatgaaaaacaatccactgcatatcattttcaatcaattcactgttcaaacacgcttttggtacaagcaaacaactcaaagtgctgaaatttaaataactaaaatttaaaataattgaaatataaaaactgaaattaaaatgactgaacataaatcataaaataactgaaaataaactaaaatgttcaagatgcacaaatttaaatgtcctactactgtggttgctcctgtgcatgctcattaaggtccaacacctgagcaactagtgaatcctgagagataggttgctctaactcagatgctggtatagatggctgggtctcctcacgaataggtgcangagatggctcatgtatctgatctatggaag

SEQ ID NO: 236524 - DNA, 317 bp, Glycine max
tagactccgattagcagccgtgcattctggctctattcttatggaattagaacgagctactatttccctactggcatggtatgttatgaaccaacattaagtatgttatatgactatatgagctatatagataattcatttatgaacgttgcttaatgattcatgcttcatgtgttggttggtaaggtctcaatgtatgttatatgaatggctacggctgaaggatgatttcagatttgttacgcactttggctttctagtgatgcccaaatgggagagaaatgggattaatatcaagaactctcatgagtaatcaa

SEQ ID NO: 236525 - DNA, 448 bp, Glycine max
  unsure (1)..(448): unsure at all n locations
actcagcttangtgctcttgagtcaattgctgcaagaagatctgatctgtttttgatccgtanaggaacatataccaccaactcttgcaacaggtgcagaattctgattcatggcaagctgagctactaagttgaccaacgcatcaagttttcccttcagctttttatttctaatacatgaagatgaatatgtggccacctcatggactcctctaaggataatagcatcatttcttgcattgaatagttgggagttggaagccatcttctcaatcaaattcctagcctcagcaggagtcatatcaccaagagctccaccactggcagcatcaatcatactcctctccatgttgctaagtccctcatagaaatattgaagaaagagttgctcagaaatctggtggtgaggacagctcgcacacnaattcttgaatatntccagtactca

SEQ ID NO: 236526 - DNA, 224 bp, Glycine max
  unsure (1)..(224): unsure at all n locations
ntgagccttttctntcgacaataacttgttactcggatgtgtgattctaatcccgaanatatcgagacgctcgaagatgaatgttgaacctctagtcaaatgcaaacgacaatcattngttcttggatgtcattttgagtcccgtaatatatcgagatgctccaaaatgaatgttgaagctctttgcaggcttcaacgacaatagcttgttactgagatgtctg

SEQ ID NO: 236527 - DNA, 357 bp, Glycine max
  unsure (1)..(357): unsure at all n locations
tattcttctagccanatggacttaccttgaattaattcctttgatagccctttngagccttgtttccctttccttggtttgaagctcactacaagccttaagtgaaaaaccatgatattaccatatccttaaggaattttggagctttggaattgttttgggaataagtgtggggggttttagattcattggacaacttgttttgttggctatgcttcatgatgtattttgggccatacttgatgtacattgtatattggttaaatgttggacatgctgaatgaaatgttgtttctcacaggctaaaaaaaaaaaataaaaacaaaacaaattcgacaaaaaatttcgaagaaaaag

SEQ ID NO: 236528 - DNA, 435 bp, Glycine max
  unsure (1)..(435): unsure at all n locations
gtttaccctattatttaactataatatgggtgggagggtttgttttgtttgaaacggctcattcgctggtatcatagcttatatcttattatgcaaggtgcttatgctggtcccctagatgatgaatgatcacaacggattgaccactatgaaatttgattctttgagatctagaggtgccgaatgctttgacattaactctactatgtctatgggggtaatagagctactaacagaagtatgggagtatttgttgccagcagacaggttgtgttctcaagacatagganagttggaattcaaacggcgaaagattaataggagggttaatgaattgataagtatgtttaaagtttttatatacaagaggaattgaatgtcttggagctaatggtattgacttatgccccaatatatgtaaagatgaaatcattt

SEQ ID NO: 236529 - DNA, 412 bp, Glycine max
  unsure (1)..(412): unsure at all n locations
aatataatctttttattaaaaagatcatactttaaacagaccgagccataggtctttatggtagtccaacctcttctcatcccctaatgataacaaaagtgaggtgaatatgtatgatattaagtgacttagtacacttaatgactatataaataagtgagaatatatgtttatttagtttgttgacttgttgatccacgtttaaatggaggagattaaaactaattagctatttttatacccatccgtccctatgagaggtggtataaatatgattatttcaatttcaaacaacacccaaatcactatcaagctccaagtaataattaaaaaagactntgatntttaagagaagtcttagaagagaactctatgaaagtgttaaaatcagagacctgcanactaaagaaag

SEQ ID NO: 236530 - DNA, 433 bp, Glycine max
  unsure (1)..(433): unsure at all n locations
ttcatatgattttaattaagaccaaaaaattcttattgctgtccctactaagaatgctcctaagaaaccattgtacattcaacctgagaagtctaataaaattacccagctcatcaggaagtagttgtatactcaacaagtctaagaaggctcctaaaaaccattgtccattcaacctaagaagtctaatgaagttaccttagctcatcaggaagtagttgtatactcaacaagtttgagaaggctcctaaaaaaccattgtccattcaacctgagaagtctaatgaagttacctcagctcatcaagaagtagatgtatactgaacaagtctaagaaggctcctataaaccattgcccattcagcctgagaagtctaatgaagttacctcagctcattangaagtagttgtatactcaacaagttcaagcata

SEQ ID NO: 236531 - DNA, 394 bp, Glycine max
ttcaagctggtccaaagaatgctgaactggtattctgaactccaactccagaaccattcaggttcaactgcaatgtcacagtaaaataaatattcagtacttcaaacatttgctctctcttctccttaattctttttagaaaatactgttttgtatagtatcttcggtcaaatatagtgaagaattatgcacttttatattaatgaattttattctcaaactataaatgccatgtagattttgtctcttctaactttctataacatgataaaaaaaaaatttaaaatggattaaatctcgaattctctcaaaatttaaaagactaaattcattaatataaaaatataaagactttgaaccatatttgaataatagtacagaactaataaaacat

SEQ ID NO: 236532 - DNA, 450 bp, Glycine max
acacgcttaacattttactctagcaatctcaaatgagtcataacctaactacatgcatggattaatagaaaatgattgagaaaataagaaaaagctaggttgcctcccagtaagcgcttttttaatgtcattagcttgacatatgttacctttaggggtcttgtaattacagaatggtggtcaatctcttaatgttcccaccatgatatagcttcaatctcttgccatttactgtccagcttctatccggagtttctgaatgagggtcaaataattccattgccccgtaaggtttgacctccttgatggtgaatggtccaaaccatttggattttaacttgtctagaaatagctttgatcttgagttgaataacagaacttgttgaccaggtcggaagtctttcttcagcagcatcttgttgtgataagcctttactttttctttgtaca

SEQ ID NO: 236533 - DNA, 388 bp, Glycine max
  unsure (1)..(388): unsure at all n locations
actcagctggtgttaacacgctgcctacgctcggtcactgtctttgtgtttgaacaagcttcattggttttcttgcaggcattccattggcacgaaaccagtctttggtcgtgtttgtactcgcaatcacaagttaagttttcctcaccctaccctcgcagtcttcgccattttgttaacttcccttagttataagtccccttaaactgagcttttaacttcccttagttggttgcaacctgaatttgatctatttangaaagttgttgttttgactgtttgaaggtttagataccttgaaactacgtttaggccctttgatttgcactatatcagaggtgagttagcctattggcaattacccctttgttcttagcgaatattattt

SEQ ID NO: 236534 - DNA, 325 bp, Glycine max
  unsure (1)..(325): unsure at all n locations
gctagggtncttcgggcgaactgaaccgaagttgtgttgcggccgactggcatgttctcattttgtcggccaggaaaacattatcccaccttgggatataatacatgattcaccgatatttgacaggaaaagaaaaatgctagccgacgtctgccaggaaagatgaccgaccgaggtctgaaaaagaagcatgaccggatgactccggtcgaacatttcctaacagatatcatccgagtattattcaaggattgaatataaaaaacaatagccgacctcggcagttcaatagccgtgactggatattttcggacgacaatgcgca

SEQ ID NO: 236535 - DNA, 385 bp, Glycine max
  unsure (1)..(385): unsure at all n locations
tgaagcgtttctcataagagggttgcatcacgaacaatgtcctggtaccgatccgttggtgcagggaaaggtttagtgggtctgagtctaaatgatccctgcttccacccattttgttgttgaacttgaagctgagactgaaacccattggtggaaccatctgggtttggcttattagtcacattcatatctccctctttggtcctaaatccttaatctatgtatgtataaattcacacaccttaccttatgacaatntcaattcctttggattattgcaaaaccataggttatatacttatataaaacagcctttatatactgcatctgctctgcacttatnggtatttacggtggtggtattgttgaattgctataatatgaa

SEQ ID NO: 236536 - DNA, 400 bp, Glycine max
  unsure (1)..(400): unsure at all n locations
gaattaattgaaaaggcaaaacaaagccttgcttttatagactcttcatgtctggtcaagaagaccatttataagagttataacttttcgaaaaacttaaaaccaatttgaaaaagtcaaaacctttttgaagagttacatcttttgatttattcagaaacagtcactggtaatcgattaccaaatctgtgtaatcgattacacaaggcttttatgtgaaaggatgtgactcttcacatttgaattngaatttcaacgttcaaagacactggtaatcgattaccaaaacattgtaatcgattacaactttttgaaattaatcggaacgttgtaaattcacattgaaaactttntcaaaacaattttgctactggtaatcgattaccagagagtaaaaact

SEQ ID NO: 236537 - DNA, 324 bp, Glycine max
  unsure (1)..(324): unsure at all n locations
gaaacacgagaagactcaatcgagataaggactacaaacgcttttcaggacatacagtggcagaagagtgctaccaaatcgtttaccaaagaggggtactctctactaatcgagtaccacaaggtagtaatcggctatcagtagccaacattgatttctaaactgatttacaaagatttaatcgattaccatgagcatgtgatcgaccaccaatgctgtaaaacgttagatttcacattgtgagtgtcacaactagcgataaaacattttataagcatttgaactggtgtgatcgantacacaagacttcgaatcgattatcag

SEQ ID NO: 236538 - DNA, 401 bp, Glycine max
  unsure (1)..(401): unsure at all n locations
acactatnagaaactctagcttaagctccttcaattgcacaagctcttaaatttgaatatattncttgggaaccttcacccaacgaagacactgacaaaaacttatcttctccttcttggacaaagtatggcaagctgggggcaaagaaattttcttcccattaatccttggatgcaactgtgattgtgtacccatatcagctagatcttgatgggtattcaagacatccttcatcttgccttgaatgttaaggagcgtcccaatcacactgtcacaaacatttttctccacatgcataacatcaatacaatgcctaacgtgaagatcacaccagtacggaagatcaaagaanatggaccttntctttcatatgcaactctgaactttatccttcttttgg

SEQ ID NO: 236539 - DNA, 453 bp, Glycine max
  unsure (1)..(453): unsure at all n locations
ggatgagttaaacatacccattctgttttanggttnttatgaggatgtttgtgatgttcatgtactgaaattgcttatggaaaactgttagagatgaaaggtagagttaacctacggtcagaaagtgagaatgtggtgttatgagtggaaaaagagtgaggctttgagagttgaaaggctaaatctggactctgtggtaaatggaggttaaaatgagttaatcctagcttgaaatgtcatttangacatgtgagaaaggttaggctgagctagagagaaaaacaaatgaccaaagtgaaccaagagccattgctagggcaaaattgggtgttgaggagtcaaattttgattcggtggagttttaggtgtaaattcagtttgagcaagtttagattgatgttatggacttgtgtgaggtgagagtttgcttcaaaattacctcattctcaattt

SEQ ID NO: 236540 - DNA, 388 bp, Glycine max
cttcactcatttaaatcaatattggagaccaaaggaattagagttagagaggaaaaaaatatcggaggggcttgtcaagaaattgtaattacaggattctaagaatctctataagactaaaaccatggcatctgaaatgattaatttcctaatgagataatctactaaagaacagtgtagattgcatgtttcaggaggattacaaaattttcctagaaccctataggattcaaccgaatgtctaattcttcaaacttggaactgtagagtattactcttcctgcagcaagaatcctaatggaaggccttaattagaaaaaagaaatagatacaatgtaagcagtaagaccattcaagctaaaccacagtagataagcatgttctattt

SEQ ID NO: 236541 - DNA, 384 bp, Glycine max
  unsure (1)..(384): unsure at all n locations
catatacccctggcaacaaaatacatataaaaataaaatcggctgaatttaactttaagctcaatgagtcaatcaggtgattgtgttgcagttaaaattaaattggttaagtattattcaaattcaatatttgataaaaacaattcttagtcacactctatttatctttcaatcgaactttgaaatagctaatgtctctttcccttgatgaacttaaatttatttatcatttaaacttaaacttattaaattaggctaaacttgagatttaagtttaacaaaattgtaaaattggttaatgatttggatatagtcttgaatttggacatttgatctaatgacacagttcttagtcctaanaatctaagaattatatatatattt

SEQ ID NO: 236542 - DNA, 423 bp, Glycine max
  unsure (1)..(423): unsure at all n locations
tcctctgctcgtaaaaagatattatcggccagtgtttgtaaaanaattgcgcaatgtcggctganaaatatccgtcggggctatttaactaccgatgtcggctattgttttttctattccacccctgaattatatttggatgatgcctattaggaaatgttcggtcggggtcatccggtcatgcttctttttgaggcctcgatctgtcgtctttcctagccggccgacgtcggctagcatttttttcgatcaatatctgtgtgaatcatgtttttttttgccaaggagggctaatgttttcgtggccgacaaaatgagaacatgccagtgtcggccgaaacacaatcccgcacgaaaaaccctagccgacctacatttgtaattttttcaggcaataccgagcgacgaaacttcgtctaccat

SEQ ID NO: 236543 - DNA, 393 bp, Glycine max
  unsure (1)..(393): unsure at all n locations
tggcattccggcactcattttaaattcttcatgctgagcctatatatataaaacagtgccacaatcccaagcttacaaaaccatgctcatatgtcattgaggcatttcaccgagcacttggtgggcgcatgtttaagcatgaatagcaagagagtgggggaaatgtggcatgccccattgcttcagaacgcaacataagcctagggccatcccatacaaacctctaactcacatcaatcaagcatgaaagcaaaccacaattgccccacaaatatgagcacatttccacaatttagagcacccaaagaagaccaaaatacaccaatggaaagctagaaagcttaaggatgagatacttacttgttggagtgagtangagtaccacaaatgaaa

SEQ ID NO: 236544 - DNA, 333 bp, Glycine max
tttcgtgcgagctcaaccgagggtgtgtttcggccgacattggcatggtctcatgcactcggccaagaaaacattagcccacatcgaaaagaaaaaaaaaaaaaacattaatcaccgatatcgatcggaaaaaatgctggttgacgtcggccaggaaagatgaccgatcgaggtctaaaaataaaacgatcaccggatgacgccgatcgagcatttcctaaatgacatcatccaaatattatccagggattggatagaaaaaacaatagctgataccagtcgttatgtagacccgactgacatttttcagccgacattgcagcaatattttta

SEQ ID NO: 236545 - DNA, 386 bp, Glycine max
tatggatcgatgtgcattgtatccatatgtggcaatctattttaacattcatccatgcaaaggggtaagaccatcaagacctacgaggcttaatgataaagcatgggccctactatgtgacaagtgtgttagttatgggcttaggatctcaagagcattgtttgcctataaaaatcacacatactggttacgtacgttgtatctcttggtttgtttgtggcattttgaggaacagaggacttaccccttacaaccaacaaattttaggtatcgatgacattgaggacgtcgatgcccttgcaagcctggcgtatttcacacacggagtgggtatagtcatgtgaagtaacacttactacatggtatacatgtcacacctacgtaca

SEQ ID NO: 236546 - DNA, 425 bp, Glycine max
  unsure (1)..(425): unsure at all n locations
nttcaagaaagctacctagtctataaatagaagcatgtgtaacacttggtgtaactctgatgaatgaaagtcttataagatacacttcaaagttccacttctctccctcttttattccttcaatttcgtgctccccccttctctctttcttttcctccattaaagcatcctcttcaagcttcttatccaaggcaattcttggtggtgaagctccttcttccttggcttattccctagtgaatggtgcctcccctctcctcttctcctttgccttccgctgcatctccatggtgtaaaatcaccattgaaggacctcattgaatctcaaagatccagcctccatagaagctccacaagcaagcttccatcaagtggtaattagagcacaagagcttcaagtaggtgctccttaaacctccattaat

SEQ ID NO: 236547 - DNA, 421 bp, Glycine max
  unsure (1)..(421): unsure at all n locations
ttgagccaaaatcctgactcaccatataccttgacccattgtgagaatgtcaattcttaccctcggaagcaaaaaaaaaggggagagggaaaatttccaatcaaagaggaagccaaaaaggagagaaggaaaatttccaatcaaaggaaaaaaagagaggaaagggaattcccaatcaaagagtgggagaaagcaaaaagaaaagaaagaaaattcccaatcaaagaatgggagaaagaaaaaagagaagaagaaagggaagaaagttcccgatcaaaaaaaaataatatgcagaaaggtctttggaccggacaatatctgaacaatacagaattgtcaccaaatgaataanaagaagganagggaaccatgacctanaatggtcttccncctttagttgccaggcaaaatcttgtgcgct

SEQ ID NO: 236548 - DNA, 445 bp, Glycine max
  unsure (1)..(445): unsure at all n locations
tatggcatttgtgtttgcattntgngtgctatatcaagcttcaacaatatggcaaatatgaaaaagcttgaatgttgaattactgtaatgcattttgtgtgctatatcaagctttctatgagttctgttgtgacaaatatgtttagaagggcacagggtaaagtatttaacttttggctgaattttcacaacatatgtatatatatttcaggattccaatatggccctatgcaaagctgattgcaacctgctggttggtccttccttactttagcggtgccgcttatgtttatgagcattatgtgagacctttctatgtcaatcctcagaccattaacatctggtacgttccaaggaaaaaggatgccttgggtaagcgagatgatattctgactgctgcagagaagtacatccaagagaatggaacagaagcatttgagaatat

SEQ ID NO: 236549 - DNA, 367 bp, Glycine max
  unsure (1)..(367): unsure at all n locations
agatgatgaanaaaagcccaagagaatgatttctagattgagtccagaacaattcaagaatcaagagaaatttgatatcaagaatcaagtttcaagtttcaagaatcaagaatcaagaataatcaagattcaagactcaagattcaagaatcaagagataactcaatcaagataagttctaaattttttttcaaaacattgagtagcacatgaagttttcaaaaaatcttttaccaaagagtttttactctctggtaatcgattaccaatagcaaatattgttttcaaaaagctttcaactgaatttacaacattccaattgatttcaaaatggtgtaatcgattacaatgatttggtaatcgatta

SEQ ID NO: 236550 - DNA, 350 bp, Glycine max
  unsure (1)..(350): unsure at all n locations
gcattcacaatgaaactcaaggtactttacttttttctctacctttatacttcatgtcgttcttgctatgtcaccttcgatccatatactccctaacttactaggaccagtgctgacaatgttctaatgtttaagttagagtcatgccaattttaaggacaaaaactgaacttctactctatgcatgtgaaaatttaaaactccatgagagctgcatagcgcatatcgattccttccctcttgccaatgtggagtcaaactgaattgtaggagtagtatctttgtttgcttcngggaatcgaattacaggagttagctctatttctctataccctgctctgatctctata

SEQ ID NO: 236551 - DNA, 122 bp, Glycine max
agccaagacaaaccaccatgactttttactcggatgccgaattgagacccataatctatcggaacgctcgaaatataataccggagctttgatcaaagactaactacaataacctttttact

SEQ ID NO: 236552 - DNA, 447 bp, Glycine max
  unsure (1)..(447): unsure at all n locations
ntactattcttttaatatccaaggaagtctaattctggttctggattaaataactagattagcttctctagtgatagaaagtgaaccactatcaaaaggttgtgtatttcttctcttaatttgagctttatctctcattcaaggattaatatagtttcaaaaaggttcaagatatatctttgtgaaagaaagaactctaatgaaggatcttgtgcgaatgggggaatagattaagtattgattgagttcgatttatgaaaagttctgtgatatgatccgcacaacagaattttttatgtaactggttttaaaagttcattttgtttcgaaaaccaattcacccccctcttggtttgttgagtaccggcatctttttcaatatactacattttgtcatctgtttggcctagcacacaaattctcattaggccacaactcccctctatc

SEQ ID NO: 236553 - DNA, 450 bp, Glycine max
  unsure (1)..(450): unsure at all n locations
tgggcatattatatcactcctacatctcatctctagcatgcattttctttctttacccactcctcacgtttggttttttagggaaaacaccataactaaacgcgccgcaagggatccctatcgcaccagatccaaatctagaacgatgggtgatcaagaggagacacaggaacagatgaaagccgacatgtcggctctgaaagaacaaatggcctccatgatggaggccatgttaggtatgaagcagctcatagagaagaacgcggccaccgccgccgctgtcagttcggctgccgaagcagacccgactcccttggcaactacgcaccatcctccctcaaacatagtangacggngaagggacgcactgnggcacgatggcagccctcacctgngatacaaccgagcggcttacccttatggatngccgcccaactattcaccacccat

SEQ ID NO: 236554 - DNA, 355 bp, Glycine max
  unsure (1)..(355): unsure at all n locations
aacatcttcttatctgataacacttgcacagnggccaaagatgcatgggagatcctgaanatcactcatgaaggaacctccaaagtgaagatttccagattgcaactcttggctacaaaattctaaaatctgaagatgaaggaggaagagtgtattcatgacttccacatgaacattcttgaaattgccaatgcttgcactgccttgggagagaggataacagatgaaaagctggtgagaaagatcctcagatccttgcctaagagatttgacatgaaagtcactgctatagaggagggccaagacatttgcaacatgagagtagatgaactcattggttctctttcaacctttg

SEQ ID NO: 236555 - DNA, 445 bp, Glycine max
  unsure (1)..(445): unsure at all n locations
ntcaacaagttccttcacaaataatcttcacacagcagtatactaacaaaaacacccatcatatctcccaaaaccccatacccacgaaatttaagagagaaagaagtccacccaaacctgaattttcgaagtcccactcgtagccacgcacttcacggcctcgaaaatgctctcctttcacgatttggagcagaaatgatggccaaaggttgaagctntgtgtggagcttcaatggtgaatgagggaggaagaaaagcaacgtgagggagagggagagagagcttctgaaaatgtggggctgagtgaagagagagagagttgctttttggttntaaataaaagggttttctctttttccattattntattcaagctctgccacatgtccctatatgattggagcaaaaagggcccactttctctttttgactgtgacccatactt

SEQ ID NO: 236556 - DNA, 454 bp, Glycine max
  unsure (1)..(454): unsure at all n locations
gatatgtgacccctatgatgcttctccatctccatttatttaggaaataccctataacttatcattttctgatatttatttaaaatttactttcatttagtaatataaaaaaaaaaaaaaactcctaaatggtggtttcgccccatgtgatctatccaccattttataattaaaaggtcaacttctacagggtcttatcacacttaaattaagaaaagtaccatcaagacgtgtctctatgcattttgagttgtgaccgagataggacccacgcaacgaaatcagatgataacagaaccttacactgataagtgctccaaaaatcgtagtaataacctctcacttcatcaagaggaactttcgaagttcccagaaggggcagtaacggtatttcacataacgcaattagagaaaaaagacgcccatattctacgcangcaaattggaaattctg

SEQ ID NO: 236557 - DNA, 468 bp, Glycine max
  unsure (1)..(468): unsure at all n locations
ggtgggacatctngacttgctntccaatctgacatttattacagattctgccttcttctattttcagattgggaatgcctctaacagcacctttgtcaatgattttcttcatgcctcttaagtgcagatgtccaaatctttgatgccatattctgacttcatcttctttggaggatagacatgtggaggagtaactggtttcttgaggtgtccataggtaacagttgtcctttgatctgctgcccttcattagaacttcactcttctcatttgtcaccaagcattctgactttgtgaagtttacattgaatccttcatcacacaactgactgatgctgatcaagtttgcagtcagtcccttcaccagcagtactttgtccagactaggaagtccatcatgggctagctttcccattccaatgatctttcctttagagccatctccaaatgtcacatagctagtggagc

SEQ ID NO: 236558 - DNA, 437 bp, Glycine max
atcattgattatgcttttaaaacacacacttcgagtgattctgtgtcagtctcttaaccctaaaggaaacctataccggaacagtatcttaaaacctcttaactacttcccaatatcttaaaccctaatggtggtagcatattgcaaagccccttacaatggatttcaactgagcaggaatttccacgtaatcaacccaacacttggagagcttgcactccccaagcacaaaagtgtaaaagtttcagcctcaatcatgtgagccttgtttagtatcagaaataataagcttgggataataaccatatttagatacccggcttcaatagtcaagaagtagtctaattctccaagttaagtgcagagttggaattgtttcagaatagggtttcctcaattaggcttaaaggttgcctaacaagagcatcaagtgtatt

SEQ ID NO: 236559 - DNA, 446 bp, Glycine max
  unsure (1)..(446): unsure at all n locations
ttacgtgacactatgaaatctaagcttagaatcacagaatagtcattgcgacatttcatcaaatatttggtgtgcgcatgttaaaacatgtataaatgagagataatgagcaacatgacatgcaaattcataaaagaagcaaagataggcctagagccatccaatacagccatcaatccaagcattntgatcatgggtttacacacaacttacctcataaacattgcaaagaaagcaacaaacaaagcaccaaacattacaaggcaaacgtaaaattagatggagatggcacttacttgaatgggatgaaaggaatgcaaaaaaatgaaacaagagtgcacaaaggaagcttgatattgctgccaatggtggtgcctcgtgaagctntttgattttttggggaatatggggtgaaatcagaattcacccctccccttttatttttt

SEQ ID NO: 236560 - DNA, 166 bp, Glycine max
  unsure (1)..(166): unsure at all n locations
ataagcttggagaagatgcttcactggatgataagcttgagggagagactgagacacgggggagcacgaaattgtaggacaaaaaacggagagatctctgactctgaattgtgccgacaagactattattcatcctagntacaacatgcgtacacatgcttctatt

SEQ ID NO: 236561 - DNA, 270 bp, Glycine max
catgagcacactttagtgaagagacactgcctatggccggtgtcatataaaaaggagccttcccttgggatcgaagatatctcattctacggttcaccgttgtgaaattacaatgctctacttgctccctcccatatcactctcttgttcataccagtctcctctagactcctcaatatgcaatcctatcgtgaccaggagagagctccctcccattgatggaggattgctgcaccttacactgtttgatgctcctatatacgctatctt

SEQ ID NO: 236562 - DNA, 449 bp, Glycine max
  unsure (1)..(449): unsure at all n locations
nttcgattcattccatgtacccgtagtggtccacattgtgtttcgtgcatttttattctcgatttggttactttttatacccnctgttgacgtgcttaagccattttacttaagtcatttctcgcttaacttaaaaataaaataaatttccaccgaacgtttgaattatattatccatcaacttcggttaaaatcaattccgaccgttcggtcgtgccgtaaccacgttggaaatcaaaaagaggtaaaaaataatataataatcaaaaagacatctttcagtaaaataaagcggaaaatcaatcggacgttttctctttgggatttctcattcttaatcgaattgattaataactaaagtgaaactaaaggctaaaatcaattcgcctagtcaagctcgtccataaaaataggcttttgaagtttgtcatttcattttctcactaagt

SEQ ID NO: 236563 - DNA, 192 bp, Glycine max
  unsure (1)..(192): unsure at all n locations
ccttgaagatactaaataatacaagtttcggagatccccaggcaccnatcttgcttacaaaatttaaatgtacggaactaataattctttctaaagcctttaactttctactcagaccccactccacccttcagaacttgagttacacagcttaagttcatcaatttatggtcaaaaatttttatatatggc

SEQ ID NO: 236564 - DNA, 256 bp, Glycine max
ggaacttaaaaaaactacatccttaattgaaggcggaggtgataaccatagtgaattacttaacaagattggaagtttacttaaggtcattccacatactcctcaagcctcggaaaatacttccaaaatggtaacaagagcacctccgagtaataatgttataatgaaataggaccaactcaatacacactgagatagatcatgtcgaaagatatacatcattaattcaacacggaacaccttcagtatatataac

SEQ ID NO: 236565 - DNA, 437 bp, Glycine max
tagctttacagccaatataattatcaatatgcaattacaatatataaaatatttattaaattcaaaatattctatatatgaaagcattttcttttaaaataattaactctatctttccggcatcctttacccctaaaatagtagtgtgcggggtgaacatggtgtatctcttgattgaaagaaaaatcaatctctcatagatattaagacccatttaaaggattaatatctttcgacatatattttttcatagacacaaatcataaattaaattcctaatcacattcttaatagataagattatttgtaaatcatgtcacatcatgttagtatgagtgatgcatcctattgtgtcatccaactataatcttaaaatctaaggttaattatgttttaaattccttatctttttcaattttttacttttagtcctttaa

SEQ ID NO: 236566 - DNA, 455 bp, Glycine max
  unsure (1)..(455): unsure at all n locations
ctatggaggctggatcnttgagctacaataagggccttcaatggtgattttcagccatggtgttgtagcggaagataaaggaggagatgtgagaggaggcactatccactaaagaataagccatggaaggagaagcttcaccaccaagagagttcattggaagagaagcttatacagaaagcttaaatggaggaagagaatgagagagagagaggcatggaaattgaaggagaatatgcagagaagttgaactttgaagtgtgtctcacaagtttctcattcatcaaagttatgataggtgttacacatgtttctatttatagcctaggtaactaacacatccggaacttccttgagaagcaaggaaggtagcttccttgggaagcaaggaagaaagcgttcttgagaagctagagggtagcttccttgggaagctagaggtggggaacacacac

SEQ ID NO: 236567 - DNA, 446 bp, Glycine max
  unsure (1)..(446): unsure at all n locations
gcattccattctcattaacatgcatactttacatagaatacatcttggcagatcctactgctgaagaagaatctattatggaaacccatgtgacaatagttttggatacatccggtcaactaatatctctttacaagcctggtgggccagctcttgcctatacttctgctatccaggttagtttgaacattgcaatcgaactaacaaggtgaaccatatcactgttatagcattaagtcattaacataatgcattagtgaacaattttgaaaaaattagtcaatacttttaaaattttaagtcagttcttcaaatgaatataagttatgaggtcctctgagaccttcatatgccccaactgatattcaaagcacgaccatttaaaggcttgcatctgtctgattgaggttcacacttatntattaatatcatctatcattgtttaa

SEQ ID NO: 236568 - DNA, 306 bp, Glycine max
cttcgaaactctaagtttgggtggacttctttctctcttgattttcaggggtatgggatcttgggagatatgatgggcagttttgttaagtttctgctctctgatagctatccgtgaagaaatttcttgaaagcatgttgaacttgccatgtttggacgagttaaacttacccattcagttttatggtttttatgatgatacttgtgacgattatgtgctgaaattgcttatggaaagctgttagagatgaagggtagagccaacctcacggtacaaagtgagaatgtggcgttatgagtggaaaa

SEQ ID NO: 236569 - DNA, 410 bp, Glycine max
  unsure (1)..(410): unsure at all n locations
atatgcatgtgaattangacgcatcaacaagaattatctcaggctattgtgcaagcaatcaatggggcaaaacacaccaaatgattataatgatggatggctcaaattctcacaaaggtaaaatcatcactttcaaaactatcatgacatgtagagaagaatcaaggatttcaagtcacaaaatgtcaagaacttttattttcaaaacaattacccatttcttgaatatatcctataattcaaagaaaaacatgcaaagtcgtacgtgcacacgaaattgacccaaaatattaaactgaaaatccgacaaaactaacaacattaacaaattaacacaactaacaaattaacaaaaccaacaaaactagcaaaaccaaagaacactccctcncgccccatacttaaacaac

SEQ ID NO: 236570 - DNA, 438 bp, Glycine max
  unsure (1)..(438): unsure at all n locations
tcctcanggtcatttcctgcgaaggctaacattcggaaagttagttttaccaagaaatgctactcttaaaacaaaaatggcgtacaacctccttcaataaacacaaacatcaatgtaaatttagagcaatctcatgcacattcttccttacgaacattcactcgcacaagatattcttctaactaagaaaaatacacccatgcacaatcaaggcaccttcgttacctagattatttatatgtacttccaaggtgtatttgctacctacatcacatgcacttccttggctaaatntacatacatgcatactcaaagcatcttggctaccaaaaattgcacatgtgcacatttctgtatttctaatacctatgcatacacaaaactttgtgatgaaatcttggctatctacacaatatggtgctacatttcatgctctat

SEQ ID NO: 236571 - DNA, 443 bp, Glycine max
  unsure (1)..(443): unsure at all n locations
tcgacatgcttatatctgcatctactaccataagcacatgatcctttnttataataactgcaaatctgttctccacataagaaacaaaaggaaagttaaccaaaagatccatttgggggggtaaacgtagtacatgaaaaccagaattagagttacaacgtacatcatcctttttctcatgagcaaaatcacattgatcccccttcaaacatgctccacgggcatagaacttgcaaaccctaagacaattcattaatttcaaataaattatcaattaataaactaatcaagaaaaagtctacaaaaaaaccaataaataagtagacccctacattaattgataaataaatcaagaaagagtccacaaaaactcaatagaagaattaacaacatccaaggagtgcatacatcaaaaatcataatcctcattattacaaacattc

SEQ ID NO: 236572 - DNA, 445 bp, Glycine max
  unsure (1)..(445): unsure at all n locations
tctaaactttatacaagaatgaagctctgataccacttgttagacaagtggcctcaaatatctacagaaggggggggggttgaattaagatatcacaatcttttctaaattaaaaattctattttgattttaacccaaatcccaagatttctttcaaaaatgaactcctaaataattatgcaaattaatcttactaaatagaaacaataagcaataaacaataaaagagtttaagggaagaaagattgcaaactctgatttatactggtccggccacacccttgtgcctacgtccagtctccaaacaacccgcttgagagtttcactatcttgcanaagccctttacaagttctaaaccacacaaggacaacccttcctttgtgtttagatttctttacaacaagagaccctcggtctctcaantccttttcagaaataagatga

SEQ ID NO: 236573 - DNA, 303 bp, Glycine max
tgacatgcttaatttctgtgtggccaaagaactatagttatgttccacaaagtcagaaaccgatccagaaataaaatgtgtcactattgaaatatgaatatgaaaaaagttgagaagaaagtttaaaagcagccaaatgggaatctataatagttcctacttgtgacttggttgaaaatgaaaacagaatgaacatagcatgtaaaagaaatttcaaaattgagaaatcaagaaaaattatttattgttttggaaggaagaaagtttgggaagagggtatcaagttgtcctattccttaatca

SEQ ID NO: 236574 - DNA, 364 bp, Glycine max
gatgtccattcttatcacactgcggcagctgttgtggccaatttttttcatattgatgcaagggttaaacgccctgctgtgatcttgctcaagaaagaggaggagaaattgaaccattttggtttgttccttatacttctccctcctttccctttgaaaaaaagagacaattattatgggcaactgcgaaattgcattgccatgtagatatatgaattactacaacagctatgttattcacatatctttttccacagtgacaatttttatagagggttctaagaatatgaatttgaataattttttcttatattattaggcgatgtttctctaaaacacttctttcatgccaaaaattaaatat

SEQ ID NO: 236575 - DNA, 333 bp, Glycine max
  unsure (1)..(333): unsure at all n locations
atagaaactctttctttgactngagtcatcaagagattattattatgtgaccatgtcatgagtnntataaaaaaaaatatcaatcatcaatcatctttgaatcatctatctttcaatctttcttcaacatcatctttcaaacatctttcaatcaatctgtccatatctttctatagaattatctgaatcatttgtcttcatccttctaaaagttattgttcaacactttctcttccaagaaaagttctttgatcaaaaacttgtgctattcatcttttacactttcttctcccttttccaaaagaacgaaggactagccgtgatgcaatccta

SEQ ID NO: 236576 - DNA, 419 bp, Glycine max
  unsure (1)..(419): unsure at all n locations
tctcccntattttgctattaataggatggatgaagtgaatttataaaaggggtcagccccttatgcagttctctctctctcgaaatagctgaggaaaattagtctcatgaagaaaatccaagccgaggcgcttccgtaacggttccgtaacgtttccgtgagtaattacgcgaagattcttgaccgttcttcaagattcatcgttcgttcttcgttttcttcggtcttcaacgggtaagtacctcaaaccaggatcttcaattcattctatgtacccgtgttggtccacatnttgtttcatgtatttttgttctcgctttcatttactttttataccccctcttgacgtgctcaagccatttatctaagtcatttctcgcttaatctaaaaataaaatanatttccaccgatcgttcga

SEQ ID NO: 236577 - DNA, 358 bp, Glycine max
  unsure (1)..(358): unsure at all n locations
caccttaatcagaatgggaatcttcaaacatatcttgaggattccgtagagaacaaagccctccatcttaccttcacgattttcttcgaggtaaccataattctaagcctgctccttgttagtttgagcctctctttgcatctcttctgacttgngagccattattggatgtttntacacttcctttgaanaacccttgaaaaatgagacattgtaaatgttatctttttatgaaatgggtgttattttcgtgacctttactgaaccccgttcatattggtgtgatcgaaatttcanaatgatgtctccttttagtagaacccgaagaacccctcagctcttttatgttttgataggg

SEQ ID NO: 236578 - DNA, 448 bp, Glycine max
agcttttagaaattataacataagaactattattttaaagaatctatccatgttgcttttgatgagactaaccctataaggccaagaaaggaaacacttgatgatattataggttcattacaagacatgcacattgatgagaaagggcacaaaggcaaatgaaatggaaatgaaaaagactgtcaaattgatgaaaataaaacaaatatagatcttccaagagagtggagaacttcaagacatcatcctcttgataatatcattggtgacatctcaaaaggggtaacaactcgacactctctcaaagatgcatgcaataatatggcttttgtttccttaattgaacctcaaatattaaatgaagtcataattaatgaacattggattattgttttgcaagaagagttaaatcaatttgaaagaaataaaatctacgaattagttgaca

SEQ ID NO: 236579 - DNA, 387 bp, Glycine max
  unsure (1)..(387): unsure at all n locations
ttaaaacttaagccaccaactcgcttgggcggcaagctcctcccctatttaggctataaaagggcgcgggaagctgtggggaaggggttcaacacccttggcaagcatanttcacataaaattagtgaaaagtaggagaaagaagaaaaaatcaaggctgaggcgtttctgtgatcaattccgtgaacgttcttcatcgntcttcatccgttcttcgtcgntcttcattcttcatccggttagtgtttgctttcagggacttgaatttgatatatggacccttaggggtcccctttattgtttgtgcatcttcatctccttcttcgatcattggtgatcattctctttgtataaagcgagcttcgactgatcgctcataccataatc

SEQ ID NO: 236580 - DNA, 223 bp, Glycine max
aaaaagaaatagctgtggaagataccaaaggcgccagtgaactgataagacgggaaaactgcaagggataaaggaaaaaaggagaaaatgaagggaagaatgagggctcaagactagaaccgatccttgaacaggggaaagaaagtgcaagctagggggaaaaaagtgagaaaattaaaaggagagtgaacaagtagagatagaaattgacagctgcaaaagt

SEQ ID NO: 236581 - DNA, 347 bp, Glycine max
agcttctggtgggacatcttgacttgctttccaatctatctttcaccacagattctgccttcttctattttcagattgggaatgcctctaacagcacctttgtcaatgattttcttcatgcctcttaagtgcagatgtccaaatctttgatgccatattctgacttcatcttctttggaggatagacatgtggaggagtaactggtttcttgaggtgtccataagtaacagatgtccttcgatctgctgcccttcattagaacttcactcttctcatttgtcaccaagcattctgactttgtgaaggttacattgaattcttcatcacacaactgactggtgctgat

SEQ ID NO: 236582 - DNA, 468 bp, Glycine max
  unsure (1)..(468): unsure at all n locations
ttgagccaaaatcctgactcaccataaaccttgagccattgttttaatgtctatccttaccctcggaagcaaaaaaagaatagaggggaaatttccaatctaagaaaaagagaaggaaaatttccaatgaaagcaaaaaaagaaaagaaggaaaattccccaatcaaagagtgggagaaagcaaaatgaaaagaaaggaaaattcccaatcaaagaatgggagaaagtaaaaaaaggaagaagaagaaggaaagatagctcctgatcaaggatcgaaagaaaacagaagatatgtgcagagaggtctttggaccggacaatatctgaacaatacagaattgccaccaaatgaacgaaaaaagaaggaaagggaaccacgacctataatagtcttctccctttgattaccaaccanaatcccgtgcgctagcgaacccttttttctcgccccgcactatacaaaaaaaa

SEQ ID NO: 236583 - DNA, 377 bp, Glycine max
  unsure (1)..(377): unsure at all n locations
agctnnttacgtggagagtgatgcagttggttttgttnccacctcatgcactcctctaatgactacggcaccatttctggcgctaaactgcatgggagtaggaggccatcttctccattaaatatctggcttcagcaggagtcatgtctccaagggctccaccactggcaggaactatcatacttctcttctattactgagtacttataaaaacattgggaaaaaattgttctgaaatctgatggtgggggcaactggcacatagatacataaatctcttccagtactcatacacgctctctccactgagttagctaatacatgagatatccttcctgatggctgcggtccttgaagcagggaaatatttttctaaa

SEQ ID NO: 236584 - DNA, 422 bp, Glycine max
  unsure (1)..(422): unsure at all n locations
ccttaagncacctgcggcatgcagcttaaantggatgggagggctatatttttttttattcngcagccnggctcctccaaaaggtaagggcgtgcttcctttgagagatcacaataccatctcctgactgagccaccttacttccaacgaagtacttccaatatcccaagattttgggccggaaaagactaaataaaggctcctttatttgaaaatcttagatacatcattacctgtaatcactatatcatccacatatactatcaagtagacacattttccatgggatgaatgacaataaataacagagtgatcagcctctctacgtatcaactcaaaaagttgaacaatatgactgagtttaccaaaccacgcccgaggggattgcttcactcctagagagatcgacgcagcttacaaca

SEQ ID NO: 236585 - DNA, 414 bp, Glycine max
  unsure (1)..(414): unsure at all n locations
agcttcanaaagtgtagatgtatgaaaatattattattttgtcgatcccatctcgacacttaatattgacattacaactagtcgtaattaaacaatcgaatcaattatcaataaattttttatgcaaattaactgtatcacaattattctatatatctttaccggcatctattgatgctatttgctaccagagggttgtaccactaagagaagctactggattgactataattaataagtaaaatacataggcatccagaatcttctgttttctaacaaaagactactaaaagggaatgcctaaagacagagaagaacatttccactaagccgcccaaccactagtgatcaatgggagtataattattggacaattccaaagtgtcattgaataaagccgaacacacattctat

SEQ ID NO: 236586 - DNA, 396 bp, Glycine max
tcacacagtctaatctaagacagctaatgagtgttgggggcaaagactgatggaaaagcctgttcattaccattctaaaaaacacacagggtgtaatcataatcatcattactgggaaagtcacgtttgaccgtggaccatatcaagcaaacaataaaatgctcttgtttcaataattttttaatcaaaaatgttaaataaattaagatttttttttagtttcaaataagtcatattatacacactctttcatttaacgtttattataactaatatacataatttacgagagaaacttatttctctcttacaaatacttcttttaagacatattatttcaaaaagtataaaagaatataaatcttaataatatttactttataaatattcttaaaa

SEQ ID NO: 236587 - DNA, 426 bp, Glycine max
  unsure (1)..(426): unsure at all n locations
agctttntaaatcaaattttgccactggtattctattcaggaaactggtaatcgattaccagagagtaaaaactctggtaactcagaaaattttgagaaaaactcttttgaaaaacaaaaattgtgctatgtttgttttttgaaaaatcttttcaatacttcccttgtgaagtcttcttgatttcttctcttgaatcttgaattaatcttctcttggatcttgaaatcaaacttctcttgattcttgaatcttcttgatttcttctcatgaaacttgaaatttatcttgatcttgaacctgttgactgaatcttgaaatcattctttgggctttttgtcatcatcaaaactacttgaatcaacttgattcatcatcatgaagcttgcttctacaatccaatcattcagagatggaaactaaacaac

SEQ ID NO: 236588 - DNA, 425 bp, Glycine max
taaatcatatccacgcaagggctgagagaccatacaaatttcttagacgaatctaactatgcgggccattaactctatcatatgctgacaatagccgcgaagcccatgaatctcttctggggcggagtaggtgtatgccatcgccttggcctaggctaacaaactgggaagatcttgactcccgtttaaggtaagagcataccgatccatccacatggttgcctcttggtgtaaagagtcgatcacccttcctctagcctctttttccgcatatacttgggcatactcatccgcgattctatgctcgcgggccgcggctagacccagctcttcttggtacttggacaagatagctaacatgttggtctctgcctcgcatagacgctgagacaagcatctattggatcttgaacaagcaatcaact

SEQ ID NO: 236589 - DNA, 428 bp, Glycine max
  unsure (1)..(428): unsure at all n locations
agcttcttacccaagtggaccttgctgattactcccacattngggattttttttgtttttgcatcacacaatgcacatcacattctattttgttgatttgattacagcttctcgcttgtattttattttgtattctcatcctaagttgtaagtgctagtatgtacctttcagcttggggaccttatttgaattggttaagttggagttagtgagatcaaagatggttggttatatatttagttgaagagttgataggtgttgattccctacttntatatttgacacacttacactttgattggattggatgaatagaggttggaacgaaaatgagagggagtggaatggtagggataatgaaagaacaatttctaatactcttctatgggtgaagttattaaaattaccaattctgatgaaattatta

SEQ ID NO: 236590 - DNA, 436 bp, Glycine max
ctctgctgtagatgtgtcaaataccccaggagaagaggcggttttttctttgtatcaaaccttgcaaggtgatcactagtgttaaggataacacactcacatccaaatggatgagagtatgagatattatgacttcttccttcccatagttcataaggagtcttataataaatggtcttataaatattctgttttggacatagcaagttgtgtttattgcttatgcctataactatttaggaagtgagttgtcataaagcatggttctagcaatttcttacaaagatctatttgtcctttcaactaccccattttgttgaggttttctcagtgaagagaagttgtggaaaataccactccattcacagaatgatttaatctcagcatttgaactaatacaaaaaccttctcatttgaactctctatagaatatctc

SEQ ID NO: 236591 - DNA, 376 bp, Glycine max
  unsure (1)..(376): unsure at all n locations
acccccncaattgctcttggcggaccgccggggttggccatcacctgaatgtgcctgaacccttctccggtacctggtcgtacatccgtcacgccaccaccacggtgacccacgatactccaaattgtttcttgaagcaaacatgctttttggagaagtttcaatgaaatactaaacctgctactaaaaatctgaaagggtgttctccaagtgaaagaggtgatctgttatagntctgctatagattaagatatcatcgaaaaaaacgatgatttattttctcagacatggctaaaacagttgattcattgtggattggaaagaaaacgcgcattacaaagccaaaggcattactcaaactcgtatgccttgatgc

SEQ ID NO: 236592 - DNA, 323 bp, Glycine max
ttttcggcgcaacgtagagtgagttgctatagaactctatctttcactttggtccttcaaacaaaaagtgaatcgcatgtgataatgatatttgaggcggagtattatattttgtggttgcggcatttccaaatgcaccaaagtgtgatgcttaatctacacttaagctccatggggagggtttcaagaagggtgaaaagtaaagtccatagctgggtctgcatggttcatataataaactaacctggatctaaattcctgcttcttcccacacgtttctaacttggtggcagccaaaaaaactcgtcaatggactcctttct

SEQ ID NO: 236593 - DNA, 414 bp, Glycine max
  unsure (1)..(414): unsure at all n locations
atcttagnccacagagaacttatgtgaacttcatctatattgtaacgcgaatcgtctcgtcataatgttttacgacgtgtttattaaatgaaatctcgattatttcttcttcatcatagtatagttgtctataatatcccgaccaagaaatatcaaatagtccgtttacaatttgcaaagtttttgaatatataagttaacaggcctaaactttgtgtacaaatcattttttgtcattaatcttttgaaaacaagaatgttacacattgattgtttagatctttcacagaaatcttatacaaattgtgcttattggcagtaaatatattgatccatacgttaagttcgaattcctaaagctttaattgacaaacggaactcaaacattagcagtttcttatttaatatactact

SEQ ID NO: 236594 - DNA, 435 bp, Glycine max
  unsure (1)..(435): unsure at all n locations
agcttgngccaaaaatgttatctatcccaccttccccatttttgccacctacctaccatttcctgtagtttttttcaaatcttggggtggttgaaagttttaaacttttcttgatttgattgcaagtttggtcttgaatgaatacttctaagaaaagggtacctttcaactttttgaacgcttcttcttcttcttcttcttcttcgncatgtatgtaatgtatctctgccctttatcaacaggtactgcctcgtgtcattggatgtgtgaatttctgaactcatttcacagaggtcatgcattattctgctgcctctctttgcatccaatacctgctgtcggtttagacttggaattcctgattcaggattgttctaagtaagtacacttactagtgcttggttaatgggatttcatttcagtatttgctttttc

SEQ ID NO: 236595 - DNA, 216 bp, Glycine max
accccttaattcctccctctcttttttcccctatccttttcctttttgaggttctatttggatccttcgtgatccaaatgagctaaatttcacagttgctaattgattgaagtagaaatcatgtaatctggattttctgatccaatttcatagttaatgtgatcctattttcagtttatgcctcgatgcatgttaagagtgatcaaccctagcttt

SEQ ID NO: 236596 - DNA, 412 bp, Glycine max
  unsure (1)..(412): unsure at all n locations
ataaaactaagcttggtcgatacacaggtggagattctatgaaatatcgttttctctaactagactccctatggttttacctagcgagagtgacccgacttactagagagtgggttgtcttgtcatgtactcctaggcgcctgacgaggtttttcactgacatggtaccacattgcatatangattgagtcttaatgtatctgttgcataatgcttgtgtattgatcgaaaatgattgacttattgatgtgtcttgatccttgagtacatgaatgttgtgaaaatgaatgagacgtgttgtgttgtgatatgatgttatgcgacanagtggtggaataacgtgaactatgcttaagtaaggtcgatctcatttatatgatatgtatatctatgttgtcccatttctctctat

SEQ ID NO: 236597 - DNA, 354 bp, Glycine max
  unsure (1)..(354): unsure at all n locations
aggcttaacctcantggccatgacagagcttagatttgggaaccaanccaatccctggggtcggactctcagccacttatgatagccgccgatgatcccattactgcttcccctaagctctctgtcctttcttcacaccgcatcccatgccttgcaaaccccttggagtaccctctcgttagtggtcactgaaaccccatgcgatgaaaggcatgacgctttcatctgatggcacttctttcatggggaagccaaacttgtcctatggcgaggacgggattataattaaaacaaccccttgttcccatcaagagaacattaggacatccttcgcatgaaaataaaaactgattc

SEQ ID NO: 236598 - DNA, 163 bp, Glycine max
cttcttttcatgcacgcctgagagaacttatagcctaaaccatactctccacgatattcttgggtatctatcaagctaagtattacgccgttgtttttgactaaacccatcccaggattataaccgctcctcaacataacttgggccagaattaccgctgcat

SEQ ID NO: 236599 - DNA, 386 bp, Glycine max
  unsure (1)..(386): unsure at all n locations
gctagacatgaaacatgttatgtttttgttcggctcaaggataaaaagggatgccccacattatttccatgacacaaaatgcaaaaaaatgatgatttggaaactttatgcaaaactggtcatgcatgcacctatgcggacactcaagtgtcaaatttntatgggcatgggatgctagggctcaggattcatttcctctattttaatcaacccaaatgtttccaaaatatgttcttttatcaatttgggcattcatccgagtccatttcgggcgtccggggaaatttcacagcattcacccttcaggggtagacacattntccaaaaatggttatgatcaaagacttttttttgggaatcgactcttatcaaaacatgtgcgtttt

SEQ ID NO: 236600 - DNA, 468 bp, Glycine max
  unsure (1)..(468): unsure at all n locations
tattcaacaatggcanatcacataacaagatggtgtagaatctctgtctcactagtagatgggtctaaagcaataattattgcttccatgctagaatgcgaaataatagtttgttcagttgatttccatgatactgcaccaccaactaaagtaaagacaaccacttgtcgatattgtttcattataatcagaaatccaatttgcatcactaaacccctcaattacatcctaatctaccaactgcatatgcaatgtcagacccagagaagtttgtcaaatgcaacaaagaaccaataatttgaggatatttatgtgagaaaattcctttactcaaacttttctttaacttaatggatgagtcataagaagtagaaacatgtttcacatcaaaataattaaacttcttcaatagcttttcaacataatgtgattgggttaaaccatgtatcatattttttatagcttaat

SEQ ID NO: 236601 - DNA, 399 bp, Glycine max
  unsure (1)..(399): unsure at all n locations
tttttcttgatcctatntcctttgaacctgaattattcttgaagcaatgcttaacctttgaatgtttgttgaagctaccttgtattaatcttaaaacaatgcttaatctttgaatgttgattgaaacaaaccttgtgcttaattctactttggcatcatcaaaaccttgtattcatacattcacatgaaggttatttcattgccatagttaatcaattatatgagaatatgattgactttatgttcttcaagaaacccaagtattgtgtgttggacaagtggccttatatatcttaagaaggggggngtgaattaagatatcacacactatttcccttttaaaatttaatncactttctattcaagtataattccttaaaatgaacttttaatattgat

SEQ ID NO: 236602 - DNA, 369 bp, Glycine max
ccaaacgaacgaactgtgaattgatcctggaatctacttctcacaacgagttgcatttcggaataacacaatttaaaggagaatgtataaacaaacaggataatgtagataacaatcgccttatttttatgccttaataaagttcttcatacctataatacagagtatttccagattattatctaacatctatatttcttcaaccccgcatctgaaaaaaaaattcaccttcattgtattacttgttagtcgccttccgcgaagtgataacgtagcagatagagtggtacatcatcacgccttgtcacagacacctcagtgtcacgtcatcaccctcaatgacggaacactggcgtgtaaatggtacgc

SEQ ID NO: 236603 - DNA, 444 bp, Glycine max
  unsure (1)..(444): unsure at all n locations
agctncgatcacagcagagaaaactgaatcnggttttatttcggcaatgacaacctcaaggcagtccaagctggatgaggaaaggttgacttctgccattggagggtggcaagcaagagacaggttggaccaaattgttagagacaaaggcaaagctacactatgctaactacactaacatatatttgatgattcttctttgcctttttctcattcattgcttgatatttataggcttacattgctattggtacttaacaaactataacaattctgttgtaacataattgagggagcattatggttgtcccctaacagaatggtgagcacaaatgttgtctcctcttatgcatagtcattcaggtaagtgggcttagtgcgattccttcttggtctggaattgctatgtctcctggggttgctattgctatcaatatttcttta

SEQ ID NO: 236604 - DNA, 354 bp, Glycine max
ggtcagccccttaggcacttctctctctctctcgaaattactgaggaaaattatattcgtgaagaaaatccaagccgaggcgcttctgtaacgttttcgtgagtaattacgcgaagattcttgactgttcttcaagattcattgttcgttcttcgctttcttcagtcttcaacgggtaagtacctcaaaccgagcttttcaattcattctatgtacccgtggtggtccacatattgattcatgtatttttgttctcgttttcatctactttttatacgcccttttgacatgcttaagccatctatttaagtcatttctcgcctaatctaaaaataaaataaatattcaccgatc

SEQ ID NO: 236605 - DNA, 414 bp, Glycine max
  unsure (1)..(414): unsure at all n locations
agctntcttgagagagctggcttgagttgctttnttgaganaacttccttgagaagctagagcttagctacacacacccctctcataactaagctcacctccttgagaagcttccttaagaagattcgtaaagaagctagagcttagctacacatacctctctaatagctaagctcatctccttgagatgagaagctagagcttagctacacaccccctataatagctaagctcacccccatgacaaaaaacatgaaaataaaaaaaaaagtccttattacaaagacaactcagaatgccccgaaatacaaggctaaaaccctatactactagaatggccaaaatacaaggccttgacgaaggaaaaacctattctaatatttacaaagataagcgggctcatacttagcccat

SEQ ID NO: 236606 - DNA, 373 bp, Glycine max
  unsure (1)..(373): unsure at all n locations
gctggagttgctgcacatgatgtccaacgttatgtcaaagaataagatcgggctgcacaatgcacaacgcangataaagtgtcaaatgaagaatagaagctgcacgattcacgatgtcggatacaatgtccaggacatcctgctcgaaaatagtggaattgctaaaagcattgaagctgcaggatccacgatgtcggatacaatgttcacgacatcctgcccgaaaatactggagttgcttgaagcattgaagttgcaggatccgcgatgtcggatacgatgtccaggacatcttgcccgataatactggacatataattcttgtatatcattaacagattattgtgcagttagcaagagaatagaagatcta

SEQ ID NO: 236607 - DNA, 382 bp, Glycine max
  unsure (1)..(382): unsure at all n locations
agcttanggatggaatacttacttcgtggttattaacaaaagcgcaaaacggaatcaaaaaatgcgaaaaaggatgaccctagggctgcaaattcgtcaatcccgtgggtatggcttttgaaaggggggaaaagaaagttttgaatgtaaaaacgccccccctttcgtcatttttataatttggtgcaggggtggctcgcccaggcgagctaacctgcacttttttttttttttttttttttgaggggaacatttaccatgtccccttccctcttatggattaacatttctcctaacttgaacttacttaagttagaaataagcgctgatacttattttattattacccttttcccttttaaaacacacaaatatttaaaaa

SEQ ID NO: 236608 - DNA, 343 bp, Glycine max
ccacagagtggtacctggagatatgtcgcgggggtcaagagaccttgtggacgtcaagtggggtgctattgcccaaaaccaagcttgaccaatcccgacccaacccgggcatagtctgtcagtgagaacctgtgatgtacctaaacaggtgagctcctggcactcaacagattaaaggaacacagaccacaaagcaaataggcttgtggtggctggccagctgtgaatattgtgtgatatatgggttgtggcctctggtaatcgattaccaacggtgggtaatcgattacgaggcttataaatgaagacatgatgctatgatggtctctggtgatcgattacc

SEQ ID NO: 236609 - DNA, 389 bp, Glycine max
  unsure (1)..(389): unsure at all n locations
agcttttattgatgtaaaacaaaaattnaattatgttttcaagcaaaacaagctataaagggttttactacatgtattgaaagagaaattgacttgcttgaattggttcatagtgatgtatgtgatagtaatgatgtgttaacacgtggtggcaaaagaaactttattactttcattgatgatttctccaaatattgttatatgtatttagtaaatcacaaaagtgagttgtttgataagttcaaagtatataaaacagaagtagaaaatcaattagaaagaaaaattaaaattctatgttttgatagaggtggagaatgcatatctttagacatgagtaatttttgttaaatggatggtattattcatgaagtgacacctccgtatgc

SEQ ID NO: 236610 - DNA, 400 bp, Glycine max
ctcccatttttaatggagtgggttaccactattggaaaacccgcatgcaaatcttcatagaggctatacatttaaatatatgggaagccatagagataacgccttatatttccaccatgtgttagacaagtggcctcatatatcttaagaaggggggttgaattaagatattacaaactatttccccaattaaaaatctatttcactttctattcaagttacagattcccttaataatgaactcttaaataatgattcacatagaacaatctgaatattaatataaaacaataataaataaaagagttaatgtgagagaaagcgcaactcggattatactggtttaccacacccttgtgctacgtcagtcccaagcacacgcttggagttcactatttgt

SEQ ID NO: 236611 - DNA, 325 bp, Glycine max
agcttatagctgacttatgatccactttaatttttactccatcactctccttgattgttaattcctgtaatgatgagtccaaccagacagcttggcaagcactcattgcagctgcagcatactcagcttcacatgttgataaagccactatggattgcttcttacaactccacgatattggtgttgcaccatacatgaatatgtaacctgtaatactctttttgtcatctctgtctcctccccaatctgcatcagtatatcccactaattcttctgagttgttgttttctttatttggaaatagaattccaatattgatggtccc

SEQ ID NO: 236612 - DNA, 401 bp, Glycine max
tgaataaactcttctaacttataaatatttcttctcacttactcatgatgatgcatgatgcacaatagatgatatggactaagatgcaatattcaatataacaatcaatacaaatgtcactcaaaggagttaggcatgtaaaagataaaacatcttcaagcttttctccaagcttccagatttagacttcatgttgttcatgttgctcccctatcttcaacaatattttcccgagatcaataatctctaattaatggaactaataattgatgtcatgtgccaacaaaactaaaacattaatgtcaaacaatagttatatctttgataagatcacacgcgtgtacatttcaaatctcttatttatagcctatttaaaagaatttatttacacttattttttg

SEQ ID NO: 236613 - DNA, 382 bp, Glycine max
accttgaaggcgtgtaagcgattattgttttataaaagagcgcctatcatcattgggtattcatctccctttccttcattgggggcgccacttgagttgtcagatccctccacctttgggcatattcttggaaggagtcatgcctttttttacccatgttctgtatgtgcactatatccggagccatatcataatatgtttataactgcctaacgaaggcgaccattatgtccttccaagaatggactcgggaagatttaagttattataccagatgaccgctgccccagtaaggcttttttggaagaaatacatcagcaatctttcatgtttcacgtacgctttcttcttccgacaggacattttcatatgaattttggag

SEQ ID NO: 236614 - DNA, 400 bp, Glycine max
  unsure (1)..(400): unsure at all n locations
agcttggaagaaaggatgaggtatttncttataggcagagctngaaagagcccgggtagtctaagagaagttcaagtccatagccatcaaagtctgaaaagcgtttgaagaactaagggacgtcaatatggccaccggtgaagccttggaacgagaaaccaagaaggcccgaaaggaataacatgaccaaagcaaagttttgaggggctttatagggcagcaatagtgagctcaagctccaaagaggtgaaaggaattatcacgggtcaaaggcatgatcttgaaggacgagctaaaggcttgccttaggtcgaaaagaaatttgtcccaacagttaagcgagactgaagggaatatgcgggccgtcatcgatgagtgcaaagagaagctaaatttagcg

SEQ ID NO: 236615 - DNA, 415 bp, Glycine max
agcttgccacccagctcgcccaggcgagctatggtgctttctccagaagcaaccgccttctggaggaatattctggaaggcccaagtgggcctggttgctatttgcacccccatttatactaaatacacccccttgctattttatggtgaattttttcgtaacgttatgaaactttacgaatttcgtaacgatgcttgttttcttttcgtaatgttacgaaaccttacggattacttaatcatccctttttttgccttccggaacgttacggaactttacggattgcgcactaacacttccttttaatttccggcatgtcacggaacttcacggattgtgctacaatgctattttttttacttctggcatgtcacagaacttcatgaatagcctaacgatgggtgccaagtacct

SEQ ID NO: 236616 - DNA, 405 bp, Glycine max
  unsure (1)..(405): unsure at all n locations
agctntgcatcccagggaggggattcgagctttatgctgatggtcagcctctgaagatcctcaggaagaacatgaccacactcgctcaaacatggagtgttctttcttactccaacttgatccccacctcccacccttctgatatcacattggatcaggccaagttgatttatggcattattatgaagatgggcatgaatttgggctaactcatctctcaccaaatttctatcattggccagcatgactcctctaggcttggatttccagccttaatcacaactttgtgtaaagctagacggttcacatcagattccagatccttggagagccttagccctgccattaacttggcatatataaagaagaactattggaatctagatgatccaacagtgacattca

SEQ ID NO: 236617 - DNA, 425 bp, Glycine max
tttatttataacattagagtttatctcttttatcttagcgagagtgaatcttctaaattcttgagtgattcaagaacaccttggctgtatcaaaggactttcacaacctttgtgtgttgccctcgctggaaagagtgattctttccttcctatcatctccacccttgttctttcaaaccacaattccagaaaatccacctctgcccaaaattatctcgtgaccataactcccattttacacactcaaattaagtgattcttgagcctaaattgaatttcaaaacgagacctttcacctcgttttggaatcacctcatttggagccctgtagcttacgttattgccatttctatatatctgtccagccaccacttagcctacgttttaccatcccattcatccattttatgccagaaaccacctta

SEQ ID NO: 236618 - DNA, 380 bp, Glycine max
aaacacctgtgtaatagattaagatcaacctgtcatcgattaaaacaaagatttttaactacaaacaaaattttctaactttagaacttttcttcttactcctacttgaagatgcatgatgctcatatgaaatgattgagactaagatgtaacacataatacaacaatcaggatgaatgccactcaagaaggttgggcatgtaaaagacaaaactttttcaagcttcaaggctaagtcttcattgtgctccccctatctctaacaactgaggtatgtggatggcaaaattaagattgcaattacgaaaacattgcatcgagcaagtgatgaacatagtgagtataagaaaacatgttagtcttacacataaaacaagagt

SEQ ID NO: 236619 - DNA, 403 bp, Glycine max
tctaagcttgaaggggagctcgaaagacagagtgtgagaggattcttttgtggcagtcactacggtcacgaaagaatgtgattagctagaagatatcaacatagccacgattaaagcgctatagtgggaaacgagaaagccccgaaaggaagagtggagcaaaaacaagttccgaggggctttgtggggcagtagtaacgagctcaaacttataaaggccgacagggatgaacaaggatggaaagcatggtgttagaggataagttaaaggcttgtcagaggtcgagtataagtttgactgaacagttgagcaaaacagaagagaatatgttaataatcatttatcaatataaggagaaggtgaacctggctgctagtcacgggcagatgctggaagatgaac

SEQ ID NO: 236620 - DNA, 342 bp, Glycine max
atgcacctgttttaattgctgctctcgtttacaaaatggcatacttggcttagattgtgggatcaccaaatgaaaatcaaacttgtttgcgggccaagaatctggcacatctattgtacttaagctttttgacttctgggcagtagattactattatcaattgatgctgaaaaataaattccattctaaaacatgtagtttttgctactacagtactttgaagatagacatatatgtattgtataccctctggcctcaatactacaaaaaacatcatctttttgtctccaagaaaattcactaacttaccttattaatgctactatcttaaaaaccttcttt

SEQ ID NO: 236621 - DNA, 339 bp, Glycine max
acataacagaacgcaaaatctattcaggatcaacgatctattatattaatgcagttcataacagaatcctttgttctttaatagaagcatataattcatagacagataggttggttaatttaagtactgctcaaacagaggtctgggatgccatggtgccttcaaaaaagaggacatgtgcaggtccgccaaagccttcatctgttgagaagctcacgagagacctgtgcactattctccatgaacagcagtcttatttgtctgcatcttctgaagaagaactacgttgcgaaaaagacacaccaatgagttctggtgagaaagacatggagcaatctc

SEQ ID NO: 236622 - DNA, 262 bp, Glycine max
ggcgggaccaaaccccgcgaagaagggacgcacaaacttcacaggaagtttctcacaaagctctcaggaacccacccaggctaaaaatagaagcacgtggaacactcgctggaacttcgaagaatgagagtctcgtgagacacaacccaaagttcaacctcccgcccttattcttaccatcaagttccgaggacccccctcactctttctctccctcacgtctttacccccaacgaagcaccctccccaagcttcttatcca

SEQ ID NO: 236623 - DNA, 400 bp, Glycine max
  unsure (1)..(400): unsure at all n locations
agcttgtaaggctttgggtggcaaattatttntatactcaactnggataccaaccttgtgctacaacaattgcaacaagacccaccatccacaatatgagaacaatttttgtttaaaaccttgtatcttgtatgaaagatgttctctctttgggttcgggttaggtcacaggattgactcccaaagagccttctcaccattagaagatcaccttcttcaatattctcatcacccttggtttcaccctcacttccacttgaggaaggagaagaagtttcctcctcttggctactatagatgtcttgacccctcatgatcatggttttctttgtggggcattgagaagcaatctggcctttcccaatacatttgaagcacttgatgttactagttctatctt

SEQ ID NO: 236624 - DNA, 397 bp, Glycine max
  unsure (1)..(397): unsure at all n locations
ccgctgacaaccatgtgaaagctgtgcaccctggatacaaaggcatcttctaatcattatctattntgtcatacaaaggagcatgtgcttgttgaaatccgtcttgtcccaaatcgcgaatcatgtcttctatacgggttcccatgttcacatcaactgggttattctgagaacttgatgggttctctagcaattccctatgccatattcaccttgtgtaagttggagtgatcctgtgacatataagatgtgttcttatcttagctattacgtggtgtctcccattcccacattttagacatggacaataatatttaccccgcacacatggtgcattcaattcagtaaattggaggaattgtcaactcccttctcatactcatcactgatgcgtgat

SEQ ID NO: 236625 - DNA, 343 bp, Glycine max
  unsure (1)..(343): unsure at all n locations
agcttcactaaaggtagtatcgatgtagctattttcaangaattctatgtaaacctttatgacccaaaagacaagtcacctaagtaggtgagggttagaggtcatctgatcaaatttgataaagaaactttgaacacttttttgaagaccccagtgattctagaaaagggggaaaatctttgtgcttattctagattttcactcttgaggcttgatcctcaagaaatagtttctaagctctgcatcccacggaggggatttgagcttaatgcaaatgacctccctttgaaatattagggagaacatgaccacttttgttagacatgagcggctttccttttta

SEQ ID NO: 236626 - DNA, 399 bp, Glycine max
tacgaaagcttagacaaatttagcctaagctttatcctcatatccctcttgttggactagacttagaccaaacttcattattgtaacaacatatttaaaaccagaacttaatccgcgaatccctcatttaagactaagttccaatcctgcttcattcaagttctaaggcaacgggacatttcccaatgctaaagtcacctaactatgcatacaaatggttgatcagaccaaaagcatacagaatgtaaccactgtaagaagcattcaacacaaaaaacataatcaattagatattaaagtaattacatcacctgttctttagaaatccccaacaagcgtgtttagccaaccattacagaagaaccctcactataatgagattaagagtagagaataact

SEQ ID NO: 236627 - DNA, 415 bp, Glycine max
agcttccttgaaaagctagagcggagctactttctcttttttattaactaagctcacctccttgagaaacttccttgagaagtttccttgagaagattttcagagaagctagagcttaattacacacacctctctaatagctaagctcacctccttgagatgagaagctagagcttagcttcacactccctataatagctaagctcacccccatgagaaaatacatgaaaatataaaaaaattccctactacaaaaactactcaaaatgccctgaaatacaaggctaaaaccctatactactagaatggccaaaatacagggtccaaaagaagaataaaaacttattctaatatctacaaagaagaatggacctaaccttggcccatgggcttagaaatctaccttgggttcatg

SEQ ID NO: 236628 - DNA, 395 bp, Glycine max
cacattatgatatgattgctcacctaatctaatcctatattgattacctttccttttagaaaaaaaaagttaggacccatcattgttatggatgatgcactcatccttcttacaggaaaacatatattcactgccacataatttacttatgcttaggagattgtgtcttagcccttcaaaaaataaaaaattatcaatagaaggatatggaggtatgataacgattgtcgaattgttcaaaaacagaattaatagggaattttgtagcataggagtaacctacgttgaaatcataaatatgattcaatatagttcctacattcatttacttataaatagagatgtgggaatattatcggacaagttgttggcaattgtaaaataatgtgaaatac

SEQ ID NO: 236629 - DNA, 285 bp, Glycine max
ctcttgaatcttgaagtgttcttgattctatcttgaacatcttgaagtcatcacctttgtcatcatcttttgttatcatctttgttatcatcaaaacatctttgaatcactcttgattcaccatgaagctttgcttcaacactctcaagttgagatttgcactaagcacaatatttcgcactaagcgtaattcctttcgggttaggatttgcgttgggcgcaattcctcttgaggtggaattgcacataacacacttctctaacttagtaagaagtccaaaagtg

SEQ ID NO: 236630 - DNA, 435 bp, Glycine max
gcttggagtattttgctaaactggacccggtttcattttattacttccccctcatgtactaaagattgcaagatcttgtgtaatgaaatgtgatggtttacaacttggaatcagtgtgatggctcgaaccatgaaagggaaaaatgagatctattggtggagacatgcattgaatatacttgacagattggagatgggagaagaggtcttaagcgtactaaaacgtatctatgacaatttaattgaaaaggacattcaaaaatggttcttacgatctgcactgctttctaatgagactatgaaagaggaatgggttattatggttgttgagagtggtggcacagtgagtttgtttgtgatatttcatcaagcatatcacaatgtgagaagaatagaataagaaagttgagtgtgaatatattaaaatattattta

SEQ ID NO: 236631 - DNA, 375 bp, Glycine max
  unsure (1)..(375): unsure at all n locations
angctggcgacaactcagccaagcgaacttttttgcttcctctacaagcaacaaccttctggaggaattttctggagggcccaagtggacctggttgctattgcaccccactttttctaaatgcccccacttctatttttttggtaattgtttgtccgtaacggtaccaaactttacgaaattgataacgatactttttttccttctgggaggatacgaattcctacaaattatgtatttactcttttttagctatcaaaaaattacggtaacttatggaatacgcaaaaacacctttgtttattctcgccgccttcagaatttcagcgattgcgcaaaccctgcttcttttgatttttgactaaccttgggact

SEQ ID NO: 236632 - DNA, 381 bp, Glycine max
  unsure (1)..(381): unsure at all n locations
tatgccaccttctgttttaagagtaatgtcccactggttaaactaacttttcaaatgttgccttcgcagaatgccccgagaagcttgctatagaggtccaggaaggacaaagcggtcgatagaactagttccgctccggagtacgacagtcaccgctttatgagcgctgtacaccagcagcgcttcgaagccatcaagggatggtcgattctccgggagcgacgcgtccagctcatggacgacgagtatactgattttcatgaggaaatatggcgccggcggtgggcaccactggttactcctatggccaagtttgatccaggaatagtccttgaaatntatgccaatgcttggccaacagaggagggcgtgcgtgacatg

SEQ ID NO: 236633 - DNA, 437 bp, Glycine max
agcttgaagaccaagtggtgttgaacctaattcaataggcacacatcggagtcttctctattaaaaaatagagctgtctgtagtcaacatattcacagctaatatgctgtattgctgttcagtgccccatattctatcgtagatttaaataaaaatttataacaggctgtagaattttattttattttcaccagaataactataatcaactcgaactaaaaaatactaaaagataatggagtgtagtacattaagataatcgtattaaatgttgatattgcatattgggtcatggtgatctatgggctatcacaactctgggtgcccttggatacatgtcaggataagaattaaaaaatggcattgaatggtagaggatttcattcacaagagaatcaggacatgaaatgttccttctaagcatgtgagaaacctga

SEQ ID NO: 236634 - DNA, 432 bp, Glycine max
  unsure (1)..(432): unsure at all n locations
agctnttgctagaagattattgcattgtgattatgctcatgcatacgcatacacatgcatatttgttatctatgacaggagcaggatcgttttaggcaatagtcaaataccggagccaaatccaaagacagagacgaatcgaggtatgcggtaacgcgaccacgatttgctgcacaatgtcattgcctgctttcaggtacttagggatgggcacgagtggaggctangcccatgatcaacggatcgtcgtcccacgttcagctctggacaagcaagaagcgctactgggaagcagcctactatcctttaaattcctatttattattgctgatgtttctttaaggagatggtcggatgcctaatttaccctagggggttcgagtaagcgaacgccgacccatagagagggcgtaccttttgttttaaaaaatg

SEQ ID NO: 236635 - DNA, 408 bp, Glycine max
gctcttaatatattgcactaaaacatgtagcaaatatgttagtcatcataacattctccatcaaccttataatatgcatggttaatgagttatcataattaaaatcttctgatgtggattcaacaataacaggtatgttcccaatgccaacgagtatgagaaccttcaaggaacttgagcctgatgggtttcaagcaatgttttattaaactcaatgggaaaaggtgggagatgccctctatgatcttgttcagaaattgttccttaaccctcaattgattggtgagaataatgagactttgattacccttatacccaaggtggacaatgtggtgaagatgaaaggctgctggcccattagtcatgtctcttacaaagtgattacatagattctctcacattagttga

SEQ ID NO: 236636 - DNA, 428 bp, Glycine max
agcttttatgtgaaaggatgtgactcttcacatttgaatttgaatttcaacgttcaaaggcactggtaatcgattaccaaaacattgtaatcgattacagcttttttgaaatcaattggaatgttgtaaattcatttgaaaaatttttcaaattcattttgctactggtaatcgattacaacaatctggtaattgattaccagagagtaaaaactctttggtaaacatgttttgagaaaaatccatgtgctactcagtttttgaaaaaacattttcatacttatcttgattaagtcttctcttgattcttgaatcttgaatcttgatcttgattcttgaggtttgatccttgaatcttgattcttgattcttgaattcaactttcctcttgaatcttgaagatttcttcactttccttttgagtcttg

SEQ ID NO: 236637 - DNA, 477 bp, Glycine max
ttcttgagaaaacttccttgagaagcttcggtgagaaaactttcttgagaagctagagcttagctacgcatacccctctcataactaagctcacctccttgagaagcttccttaagaagattcctaaagaagctaaagcttagctacacacacctctctaatagctaagttcacctccttgagatgagaagctagagcttagctacaccccccctataatagctaagctcacccatatgccaaaaaacatgaaaatacaaaaaaagtccctactacaaagactactcaaaatgccccgaattacaaggctaaaatcctatactactagaattgctaaaatacaaggcccaaatgaaggaaaaactattctaatatttacaaagataagcgggctcatacttagcccatgggctcgaaatctaccctaaggctcatgagaaccctatggccttcccttggatctctagcccaatctac

SEQ ID NO: 236638 - DNA, 355 bp, Glycine max
tcctccgaaggaatttccttcaaagtgtcaagctgtttcaagcattctccaatttccttttcctcttcctcatcaagagtttcaaacacatctatgatggttttctcaagaggtgaagcattaaataatttctccttggagtggataacaacttcatcgataacatccttctagaaacaagatttttcatcctttgggtgattcatggactccaacacattgaatgtgatgtcttcatcattcacttgaagctttatttgaccatcatgcacattaaccaaaatcttggccatgttcatgaaagttcttcccagaataaggggcaattcgaagtctttttcgatgtccatcacta

SEQ ID NO: 236639 - DNA, 391 bp, Glycine max
  unsure (1)..(391): unsure at all n locations
aacaaatcttttattatataagagtaaaaaatccacaatatcttctattttgctaagaaggacaaatatagcaaactataagcaacaagtaacacatcacatacctttttctgacttgatcccggaggagtgcaaaacaatgtcagtgatgcccgtgtctgaagagtggaggtggcatccatagttgatggttggagttagaatgttggaattaaaatnggaaagaacccaagtgcaagttgaagaagagtctcaaaagtcaaaactcattaataaatanagcatcatcatttgatgatcattgcatttgatggcctatatattgtgataactcatgctcatttaaagcactttcacgttttgaaagcttacattacatacatatgtgact

SEQ ID NO: 236640 - DNA, 474 bp, Glycine max
  unsure (1)..(474): unsure at all n locations
ctaagctaacaatgcaatgagaacattacagaatcaagtaatgtatttcttattacaaaatatttcattccaaaantattgaaacaaaagaaaagttataacatggtgcaaattacagccaattatgtattaccggccggaaacttacctattgaaactaaaattaaattgagttctgttcaaagccaactagttataaactgattttaatacaatgttgtttgtgttagaatccattaattatagggagtatatatatataatttgaatttaaattgtaattaatttaaatacctatatatatactctctttttatttgtgaatctgcttagatattttgtcctcaataatcatggaaagatggtaaagaggataatgtatttattcactgtttcatatcaatgaaaaatactaaaattcattttcttaacatgggatcagagacaactccaattacctttcttctttataaa

SEQ ID NO: 236641 - DNA, 388 bp, Glycine max
  unsure (1)..(388): unsure at all n locations
agctngctcagatatacattgatgtttgtatttatgggaggaggttatatgccacttttgctttaaagagtaacgtcccattggtaaaactaactttccaaatgtttgccttcgcaggaatggccccgaggaagcttgcctcatagaggtccaagaaggacaaggcggccgaaggaactatttccgccccggagtacgacagtcaccgctttaggagcgttgtacaccagcagcgcttcgaagccatcaagggatggtcgtttctccgggagcgacgcgtccagctcaaggacgacgagtatactgattttcaggaggaaataaggcgccggcggtgggcaccactggttactcctatggccaagtttgatccagaaacagtccttga

SEQ ID NO: 236642 - DNA, 314 bp, Glycine max
aaatccaagcccatgttgcttcctcacaaacaacagccttctggaggaatcttctggagggcccaagatagcctgattgctatttgcaccccaccttttactaaatgcacccccctttttctgcacaaaacaaaatacaaacaataacaagaacaacgaacataatatacatacacacatatacacatatacacatatctggcgaagaaaccgatccggaaaacaacagaataacgtggtttccagtcaccagagacttcgcgcttgataatggaggacacatgaacagcgctaggtaataaaaatcatggagc

SEQ ID NO: 236643 - DNA, 387 bp, Glycine max
  unsure (1)..(387): unsure at all n locations
agcntatcagaaggggaagtggaatttacttctctctgnngacannaagaaggcggcaaagtgtttcttttgcgagaagaagggacacatgaaaaagaattaccccgggttccagaaatggcttgagaagaaaggtaaaccaatctcattagtatgttatgaatctaatatggttagtgttaatattaacacctggtggattgattctggatctactattcatattgcaaattctttacagggtatgcaaaacctaaggaaaccagtgggaagtgagcaaaacattttatcaggccataagctatgctcacatgtggaggccattggaacttgcattttgactttaagtagtggctttattctaaaattagaaaagactttgtatgt

SEQ ID NO: 236644 - DNA, 375 bp, Glycine max
ctaagcttgacatttgaacatgggcacgctcagtgtgtatgttctttctcaaaacagacaatggacaagaaagttctcataaattttactctaccaacaacatcagggttgtccaagaatgaagaattgaatttggcaaatgacaaatgacgagtcttactattgatctttgtttctttcccaagttcttctgatctaaaataaaaatctccaccgagtgacgttgctagatcatgcatgaggtcatgcatcacaaaccatttccgatcagaccaactacttctatttgtacttgaacgttggaaaaatgatctcgaaaccaaatcatcaaaatactcatgaccaacctcttctaaagcctaccatttcttggtt

SEQ ID NO: 236645 - DNA, 426 bp, Glycine max
  unsure (1)..(426): unsure at all n locations
agcttggagtcctcatccacacaaattctatctttattctcatcttcatctctgtggtctacttctctagagctttggaattgtttaaggaagactcttccttgtggacttgagntgaatggattaagaaaatcaaccatgtgaatgcatgttgattccattcgctggttttaatttgtttgaattttgaaattggtgggatgaaaccttgtttggataaatatgttttgtgttatggttgtgcatgcattgcataaactattttctctatcttttttacttctaaatttgttgggagagctccaaatacaaaggagaccctgcccaaattttatcaacatttataacaagttttcccttaacacttgaagaagaaacaaagtggcaatagttgtttcctctttttaggtgagctgcttctactat

SEQ ID NO: 236646 - DNA, 403 bp, Glycine max
caattgagccaaatagaagagaatatgttgactatcatttatccatataaagagaatgtgaacctggctgctagttatgggcagatgctggaagatgaacatgtaaaggtatcaattctacagattgaaagggaagcgagagagatggtgatagaagtattgcaccgggaagccatgaaatggatgaatatattcgctcacactctgaatgagagtcaagagcttccgacgttgctatctataaccaaggcagtggctgacacgtactccgctctcgacaaagttcatgatcttttttattactgccaacacatggtcgaactaatgacccatataattcagagacaatgaggctgtagtattgtacttattgcttgactcttgacagatgtgataaaccatg

SEQ ID NO: 236647 - DNA, 424 bp, Glycine max
  unsure (1)..(424): unsure at all n locations
agcttcaataggagttgtagggagaatgctanatanttgtcttcncncgccacgcggcgatctgcatgatgcattatttttcttgctataataatgccgaaatttataatgaagaatacccaacggaaagtgttatggagccttgagaactgctctaggatccactgtgacactttaagcttagacaaacaaaattactaagcccatgatgacgaacttgtattaattatctaatttgtaatttgatgttgtatgtaatattcgcgattgtatgatcaatgctaaaattaattacagttgttttctgatgagtactgtcatgcctcaaaagggtatgaatattgttaatgtgatttttgagatataaggcgaatgtcatgttcaatgctgagattgattgatgcatgttcgatactattgtatg

SEQ ID NO: 236648 - DNA, 362 bp, Glycine max
  unsure (1)..(362): unsure at all n locations
tagtttggagagatggagaaaggttggacaatggcttatgtattggggatagatgatgattgggcaacgggtgtatgtttgacgataaaaattgatcttacctcttggatgataagtttgtccgcaaacataatttcttcatacactttcttggtggtgcttgttctcttcatccttggaaacttcataagttgaactattggagcctcactaatattagctctagtggtatctttatccaacccttttatcttangagagttaccttgagtctcctcactatccacatcatcatgcttaataagccttctctttggaatatgaggagggttcaatatattctttgggtttatttcttatct

SEQ ID NO: 236649 - DNA, 322 bp, Glycine max
  unsure (1)..(322): unsure at all n locations
gatccttaagcaccgcggctgcagcttctctacttatggaggaacattttatgatgcacgtggnggtgaacccacaggatggcgtaaaaatgacttgggagagctctgtgctctgcggggcctacaaacaaaggctaaacgggaaatatagtgctcccatcacattttaaaccatcatgttgttcattatattatataagggggaaaaaaggttcttaatattcatggacaaatatctagtaagtgggcccactctagaatggacctagaagaacttgtttatggagctacatatgtgcgctaagacatacctaattctaaa

SEQ ID NO: 236650 - DNA, 434 bp, Glycine max
  unsure (1)..(434): unsure at all n locations
agcttctgtgagaagagtcctaaagaagctagagcttanctacacacacctctctaatagctaagctcgcctccttgagatgagaagctagagcttatcaacacaccccctataatagctaagctcacccccattccaaaaatacatgaaaatatgaaaaaaagtcccaactacaaagactactcaaaatgtcgtaaaatacaaggctaaaatcctatactactagaatggccaaaatacaaggcccaaaagaaggaaaaacctattctaatatttacaaaaaaaagtggatccaaccttgacccatgggctcaaaaatctaccctaaggttcatgagtaccctagggcattctttagtagctctagcccaattctcttggagtcttctatccaatacccttggggggagggatgcataaggagatatatcact

SEQ ID NO: 236651 - DNA, 310 bp, Glycine max
cttgcccagtattatgatcaaccgttgaggtgcttcacctttggggacttctaactatcaccaatggtagaagaatatgaagagatcctaagatgccctctacggggaaggaaaccatacctcctctcagggttctatacctcattagctagaatttccaagatagtacaaatctctgcgcatgaattataccacagaaagcaagtcgacaatggggtggttggaataccgagaaaatatttggaggccaaagcaagaatcttggcaggtaaaggaaaatgggcctcgttcatagacattctcacactgt

SEQ ID NO: 236652 - DNA, 382 bp, Glycine max
agcttctattaaagaatgattgcatttgacatcgttcatgcatacgcatgcacatgcatatttttatcttgtgaatcaaaagacaggaacaggatcgctttaagcgatgatcaaatactgtgccaaatccaagacagagatgaaccgaagtaagtggtagcataaccacatttttctacgcaatggcatttcctgttttcaggtgctcgagaacgggtacaagtagacgctaagcccgtgatcagcgaatcatcgtcccacgtccggctccgagtgattaagaagcacgactgggaggcagcctagtatcctttagatttctgcctaatatcatttttatttctctaaggtgatgatcggatatgcctaacttatcctaggg

SEQ ID NO: 236653 - DNA, 413 bp, Glycine max
tcgatcacaatatattggtgatcgaataccagggtatctaaacgttggaattcatattcaattgtgaagagtcacatcttttcataacatgctctgtgtaatcgattacatggctatggaaattgattaccagtgacaagttctgaataagaagtcaagagatgtaactcttcaaatggatctctcaaagattatctcaaggatataactcttctaatggtattcttgaccagacgtgaagagtctataaaagcaagatcttgactcgcatttcaataactcttacaactattagaatttcttgaactactcttgagagatcttgaaacctttgcttctcatctttcttcttcttcctttccaaaagtgttctgagtattctggttttcaaaccttgttcttctacagaaaac

SEQ ID NO: 236654 - DNA, 437 bp, Glycine max
  unsure (1)..(437): unsure at all n locations
agcttgccaacttgccacctattcttggattatgttagtatttttttttattgggcgnttccgcgttgcctggaattgagttattgtagtaaaatagaaaatatgttacgatggacgtttcaatattgtgggggaaagtaacggttgaaatggtttgaatatggtgcagattcgagttttgttcccccattgatatactcgctgcttggaagttctagacatcttggtgttggacctgtttccattgcgtctttggtcatgggatcaatgttaagtgataaaatttcttacactcaagaacctattctctatctgggattggctttcaccgccactttctttgctggtgtattccaagcttctctgggtatattaaggtattagntaattcaacacacccaaaaaaataaactaantttaacttatctataaatatt

SEQ ID NO: 236655 - DNA, 281 bp, Glycine max
aactggagggcaaaaatgacctttcattgaattgctgggtgcaccagcaatattgctgggtgcacctagcatatccctacaaacatctttataaaagattattgggaatggaaatacgaattctgtgggaaggggaattttagaacaaaaaatatatctaaaccccacgagggtagtgccaatagcaatccccttagtagcattgtatgtgtgatgcagagtggactggatttctcatgtttaaaagtggctccttcattgagtggattggatctctttat

SEQ ID NO: 236656 - DNA, 437 bp, Glycine max
ccttaagtcacctgaggcatcaagctaccactttaaaggaggtaggagtttgattacttcctagaggatatattattcctagttgggatgcttagcacaagtagggatctttgatattaaatatgcacaacctttgtggattttgagtttcaagaaatagattgatttatatcttcccccttatatttcaatgcaactcaatttactccagtgttgaacatataaagaaagaataacaactagggatgtgtctttgcatgactgtttatcctagtaatcccttgttgctgtgtacttgacattgtagtttttgtacttgtaaatacgtattgtgtgtgaaattgtaggcttcgaataactaattaatctatctctgtattaaactgtgccaattgagaatattattatattatattattatgggccggaactttttt

SEQ ID NO: 236657 - DNA, 410 bp, Glycine max
  unsure (1)..(410): unsure at all n locations
ctggaaggatccggaaggttaaccctgctgcgggacattatctgtctttaanngacacacnaaatgtgagttgcaagtgaattacatgtgtgacgcattcaacaatgctataatggagtacagagattagccaattattactctactggagggaattcgattttacataagctccacaaatgtgaagttaatgactatcctcatgaagtatgagggtttaatctgtcccaaagatcatgaaatcatttgaaaaaaataaaaaagcatgttaagcatggctgacacattggtgtgggaatgctgatttgtcattgtttgaggtgtcaaagggcatggaaaaatttgttgtgaatcttaaacaacagacatgttcttgtagaaagtgggagtaactggaaatccatgcactc

SEQ ID NO: 236658 - DNA, 430 bp, Glycine max
gctttgaaggtgcgtagcccaccatttttcatagtagaatactggtaatgtgtctactatcattggcatcattttttcgtcattgaggggccactttgagctgccaagttctccacctttgggcgtattctttgaaagatttgtgccccctttttgcacatgttctgtagttgcatcctatccgaagacattatactgacactggctaacgaaggcaaccactaggtcctttcaagaatggactcgggaaggttccaagttagtgtaccaggtaacagctacccaggaagactttcttggaaggaatgtatcagtaattccttatcttttgcgcatgcccccatcttccgataatacatctttagatggttcttggggcaagtagtccccttgacttggcaaagtctagcaccttgaacttgggaggggt

SEQ ID NO: 236659 - DNA, 402 bp, Glycine max
  unsure (1)..(402): unsure at all n locations
agctntacacttatgtgtgtaaagctaggtatgttttattaatacatcaaataaggaattgtcttccacactgcacagcacacaaaggtgtttgaaaactgccatgaggcttaacggacccggactgaggatgttaacgctcctttttcaaagatatactcaattatgccaaatatcatcacatgttttttgccttgacacattcttaaatcctgcccaaaaattttggtgtaggggcttatcttgtttttaaaatcgaaacattaaaggaatatccgtatgtaatgctcttttaacagcgtgctgataagaagtagccattttaatacaaaaaaagagataaacctcaagtaaaagatcataatcatggattccttactgtggactaacaaaatagaaaaa

SEQ ID NO: 236660 - DNA, 263 bp, Glycine max
aatcagcacaagcagtcacaccaaatagcaaccgaaacaaagaatgagtgagtggcaatctctctcccgataaaatacataaagtaataaactacagtttatatccttctacgctaagctggcatgtcagaaaacaaagactatctttccttatatgagacaacaaataatcactcttataatggagcagatgagtcctctccattttgatttgttcaaaatatacactctatcgtaccattggtgggcagacagaaaagaat

SEQ ID NO: 236661 - DNA, 428 bp, Glycine max
  unsure (1)..(428): unsure at all n locations
agctttancaaggactgcgagagagattccttatganctttnaaggtcgataggtcggccttcatctgttcttgcactccctcttcattatccattttattggatcgagtgttataggggtgcctttgcgctctcttaattatggtgagttccctaaaaaaacaaacaatggtgagtatgccaccaaaacatgaatatgctaatgaatgatcagagcacttggatccacctcaaggcccttttttagataacgtgaagagttgcagaacttctcattttataaaaaggaacaaagcttttatctagccaagatcatacaaaagggttacaatagaacctaacgggttctaattgtatgggacatcaaatctatcatgtgttgacagtaattgattaccccgtgaatttcctcgggggctgtacacact

SEQ ID NO: 236662 - DNA, 289 bp, Glycine max
aaagagaattaccttacatagaaataagaatgaagatagaggctttaacaagttagaaaagagcctcacacacagaaaataaaatgaaagaaagaacaataccatgagaatttaaaaataattgtgaacccataagaacgaaaatcatattgaattgctagccttggggaaactaagcagtagctccattgtagaaagggaaagccctttttttaaggaaaggccattataaggaagaatctctccttttaatatgtttaaataaagaatacccgccctcctaattctt

SEQ ID NO: 236663 - DNA, 178 bp, Glycine max
acaattacgaagagtctatctaccagattcccaatagacatgcggaattgattatggatagatgactcttgattaaaacatagggatatgcactgaagatgttttgtaccttagaaacaatcttctacttctacaagaagatgcatgatgtacacattaatagaatacaaccgcatga

SEQ ID NO: 236664 - DNA, 308 bp, Glycine max
  unsure (1)..(308): unsure at all n locations
atctcacattagggcaaattctgggataaataggccatggcttgctactttttaccagaatcatcgtgctgacccaacacgcgccccataaactcgtccaacaccgtcatgtacaggaaaaaaggtcttcctgctacaggtggcatgagcaccggtgggttagctagactctgtttgatcttctcgaaggcctcttggaagtcactgctccacatgaccgcttagatcttacgtaatggcttgaaaatcggctcacaggtangggcgacgtgcgagataaatctcgcgaataattncacctgaccaat

SEQ ID NO: 236665 - DNA, 289 bp, Glycine max
aaatgtgatcaccgaccatcctgaaacaccaagaactattcaggtcccaaacacaacatcatcgactaccatgtgtgcgtgacaactatcgtgcgctacaaacatccgatacttttgaaattaactcggctaatcgactacaaaactcggcaaacgatcaatctgaaaaaatttaccaatttgtcaacaaaagcacgtcatagtgcttgctctaacactatgcaattgattacctaacgaaggtaaactatcaaacaaaattgaacttatacctcctataaactttgaa

SEQ ID NO: 236666 - DNA, 394 bp, Glycine max
ttatcatgaccttgcatcaagaagaaacaaaagaaactatgccaggtcttgaaaaagaattttcacggacaaaaaatatttaaaggattttcaattgacagattaagttaaatgactcttgttcttcacaactcattattcctctccaaaaagacaactcttaagaatgattagatgagatcacatgaatgtctatacttcttatttttgattccgaaacacagtcaatcaaatgtttattcagctttactcatcacttacgacacccccaccaaacgtgtataatgtgcaattttagattgggcggacttggagatcaacttaaagagcataggtcacttgagcaaacaaaccaatggcgtacattcacatttcagtaagttaacatagcaaa

SEQ ID NO: 236667 - DNA, 388 bp, Glycine max
  unsure (1)..(388): unsure at all n locations
agctntgcggatttggtcttcgtcggtgaaaggatcatagcgggtatggaaagaggcaaatatgattatcttgctttgatgaatgcgaaaattggggcaaatgaagagggtgagaatgaaggagaagcccatgctgcgactgccgttcctacatggaaactcccccaccagctcaacaacatcattactcagccaatatcagcccttcacattacccaccacccagtcattcataaaggccatccctaaatcaaccacaaagtctgtctaccgcacttccaaaggccatcccatatccactcgataattcaatggtagccatgaccccaaccaaggttcctcaacctccatttctccgaggatgcgactcgaacgcaacgtgtgcata

SEQ ID NO: 236668 - DNA, 391 bp, Glycine max
  unsure (1)..(391): unsure at all n locations
tacctggggtaaaaaacaagagcaagcctttgctttgctcaaagaaaagcttattaaggcacctgctctagctcttcctgacttttctaaaacttttgagctagaatgtgatgcctctggagtgggagttggagttgtattgttacacggtgggcaccctattgcttattttagtgataaacttcatagtgccacccttaactaccctacctatgataaagaggtttatgccttaataagagccctccaaacttgggaacattaccttgtttccaggaatntgtcattcatagtgatcatcaatcacttaagtacattatagggaaaacaagttaaacaaaaggcattgcaaatgggtagagtacctagatcaatttccatatgttatcaa

SEQ ID NO: 236669 - DNA, 385 bp, Glycine max
  unsure (1)..(385): unsure at all n locations
agctttgaattctagtaaaaaagaatttctatattctgatcttanattcctaggcatgagtcatccttttggcactttattctagcttttacaaactacccacacactcacaatgcgcacaatttatttcaagctaagttccacaaaatcatgtgcaaatgccattgaggcatttcaccgaacacttggtggacgcatgtttaagcatgaaaataaaaggaatgggggcactgtggcatgccccattatctcataacacaccctaggcctaaggccatcccctacaacccctcaattcaacaaaaacaagcaataattcaaggataaatccctcaccgtttgaacaaatacatgcaacttagagcaccaaatatattcatggaaa

SEQ ID NO: 236670 - DNA, 396 bp, Glycine max
  unsure (1)..(396): unsure at all n locations
tgtagaatggctagacacaatacatggcggngattgttttgttttattgataaacaggatgccccacattatnttcatgacacaaatgcacagatgatgatttggaaattttaaacgaaactggtcatgcatgcacctatgcggacactcaactgtcaaaattttatggtcatatgatgctagggctcacgattcattncctctattttaaatcaacccaacgattccaaaatatgtacttttatcaatttgtgcattcatcctagaccattttgggtactccggaaaatttcacagcattcacccttcacgtgtacacacattgtttcaacaactagttatgatcagcgaattatttcttagaaaagatgaaagcatctcttttcaaaagcatgg

SEQ ID NO: 236671 - DNA, 329 bp, Glycine max
  unsure (1)..(329): unsure at all n locations
agctttagggcactgctgcaagtagtgcattttatgctcccagaggaaaacacattgcctanaagttactatcaggcaaagaaggtactgtgtcccatgggtatggagtatcataagattcatactcgcccgaatgattgcatactgtataaacatcaatttgaagaaatgtccaaattccctatgtgtggcgtatcacggtacaaagtgaaaaatgatgaagagtgtagtaatgatgaaaactcatagaagggcccccagtgaaggtgttgtgatatctgctgatcgttccaaggattaagcgtttttttgctaatggagacgatgct

SEQ ID NO: 236672 - DNA, 434 bp, Glycine max
  unsure (1)..(434): unsure at all n locations
agcttaacaggacccaattcacagtgcctatatgtataactaacttaccaaagcactattgggctttcaaagcattactctagtacaaacatgcaacactaaggcttgagtcctattttaggacaaccttaagatctctggatgtagcctaaaataggaaacacatattcagagcccaaaatctagttttaacatgttatcttacaaggattcaatagctacctcattcacaccatttgtgcaatcaaccatcatgcgtgcatacaacatcatatccttctagcttccattcaatcacttaatactcnnttaaaagcctctaaatcatggatttaagtcaagaacaaattcagtaaatcactacaaggcactaacaataacaattatctctaggagttacaatcttacattggtttgaatgtacagctatctct

SEQ ID NO: 236673 - DNA, 417 bp, Glycine max
  unsure (1)..(417): unsure at all n locations
agcttatgattagntatttagcatataattgtatttttttatacaaccttttgtttaagataattaagaatgtaagttgatgaatagctgtttaatcagcatataatagtattttctatttaactttttagttttggctgagaatataatcaaacatataagacacaataactaattcacaaatatttaaaaaattagttaatttaattaataaaaataaatttatcctaaatttatgtttttttaaaagttatccttgacattaatgacacgtactcttatgtgttcattttaaagntatccttgacattaatcatgtgtacgtttctattttctcaacccttcttttggtaattgtgatactattctacacttcgacaccaaccatggaatcaaagccagctggtggtttttttt

SEQ ID NO: 236674 - DNA, 381 bp, Glycine max
tcaactgcctcgcttagcgtgttgactcgctaagcgagcacaccatgacatttgagttttcacactcatgcgcttagcgggaaaactcgctcagcccaatgccaaaaaaattgaaattccagaaaaggaattgggcttagcgcgacaagtcgcgcttagcaagttctgtagctatgattggcctgtaactctcgcttagcgggccatgggccggcttagagaattatcatgctccctgatgttgtagtgggttgcacttagcacattcttctcgcttagtgcaattccaaacccaaaaagtatttgggcttagcgggctgacccgctgggcctaattctcataaatgatccaacagagaggaaatagtgcttagcgcgtct

SEQ ID NO: 236675 - DNA, 357 bp, Glycine max
actgacaactcccccaaatttacagttttgcttgtcctcgagcaaagaaagaacagttcacttgtcctcaagtgacaaagacagtggccaatcaaaagaaaatggtgtttgattcatcaaggacatcaacgatatgaactgattatcatggaatgcttaaatcaattacttctcacaagcatgcagtttttcaaagattagagcacaactattagagtcttagctgaaataagcaagtaagcatgacataaatcaaggaaagatcatcaaccataaccacacaatcattggttcatttaactcaagtgtttaggcttattccatcataaacaaccaacacaagttccaaccttgcat

SEQ ID NO: 236676 - DNA, 336 bp, Glycine max
acaccccctataataactaagctcacccccatgccaaaatacatgaaaatataaaaaaaaggccctattacgaagactactcaaaaagccctgaaatacaaggctaaaaccctatactacttgaatggccaaaaaacaaggcccaaaataaggaaaaaccattcctaacatttacaaaaaagaatggataccaccttgacccattggctaaaaaatctaccctaaggttcatgagaaccctaaggccttctttagaagctctagcctaagcctcttggagtcttctatccaatacccttgggggttaagattgcatcatccccttcaccctggaaa

SEQ ID NO: 236677 - DNA, 351 bp, Glycine max
attagctctctcaaggaagaattctcaaataagcttctgcaggaagtattctcaacaaagctactcatggaagctacctattgtataaagtgaagcatgtgtcacactcgactgaacttttatgaatgaaagtcttatgagacacacttcatagatacacttctctccctcttttattccttccattacatgctcccccctctctcattattgatctccattagagcatactctctgagcttcttatacaacgcgcaatcttggtggcgaaactacatcttacatggcatattacctattggatggtgccatccctctcctcttctactgtgccttacactgcatctacat

SEQ ID NO: 236678 - DNA, 351 bp, Glycine max
aaaccgtgctacaatttagtgcctgtccacaattacgaaatgaattacaataagacaaaaagaactttcttgagaattatttgcatatttgccgaattcaggcagagtaatccttatattcagtgtcaacatgagtggttccttccaagggtatgcacaaatgatgacctccattggaagggggagagacaatgcttggagtgagggaactggtaacagtaatccttgcggtcgcagttttaggtcaaatggctgcgtttgaatgatttgcctttccacaagactctacatcttaagaatccatcgaatgaatataagcctgtcaaaatagcagagatgccacggtttctc

SEQ ID NO: 236679 - DNA, 222 bp, Glycine max
cataaacacaccgagcgaagacgataagggcaggaaagacacattctctaggtaggacaaacaacaggagccaccacaataagtgagaacaaaccacaatacgaagaggggtacaaacacaccccggtacaaaagaccaaaaacgaatgcgaaaaaataccagtgacccgaaaatgaagacagagacccaacccttaaaaaaaaaaacccacgcccctcggg

SEQ ID NO: 236680 - DNA, 368 bp, Glycine max
aaaaattaaaatgtggtatcatataatgttttaatatgaataatttcttttagcaatctggacactgaaaaattagtatttaaattggtttcgagtcattaaaaagtttcagttaactgcatttgaagcacacacataaaaaaaatactccgaaacatcacacatgcacactcttcaccctttccttgcgccgccaccataagaaattgtgaaatgacaccttcatgggggacttgccgaagcataagattttccatccctatggcgaaaaggctctcatatcatgccagttcttgtgcctttgtaccactaaaccctcttcgactttgaaacatctatgctccgcctatacgccaatcttgatcttg

SEQ ID NO: 236681 - DNA, 406 bp, Glycine max
acaaatggggataggcatgacccttgggtatcccaactaaaattttgaaattcaaaagatgcaagcatggcatttgatgcaatcctatcccccaagggcattggatagaagactccaagaaaattgggccagagatgcaagagaaagccctacggttctcatgagctttagtgtagatttcggacccatgggctaagtatgagcccacttatctttgtacatattagactatggtttcattatttctgaattgggagaagcccaatccaattataatttagagggggaggtaagcatttgcttgctacaccctattgtcacatcatatagtcacactttgtgcgtgttcttcatgctttacatgcgtcatgacaccacctaagcacacttagtggagaatctggac

SEQ ID NO: 236682 - DNA, 366 bp, Glycine max
  unsure (1)..(366): unsure at all n locations
agctngnagaatggacagacatgnatacatgtattgtctggaacggntcaagggtaagaaggatgccccacattattttcatgacacaaatgcaaaaatgatgatttggaaactttatgcaaaactggtcatgcatgcacctatgtggacactcaagtgtcaaaattttatggtcatgtgatgctaaggctcaggatgcattccctctattttagtcagacccacagattccaaaatatgttcttttatacatctgtgcattcatccgagaccaatttgggcgggcggggaaattcacaacgttcacccttcgggggtacacacatttttttgaaataccacctaatatcggtgaattctccaaaa

SEQ ID NO: 236683 - DNA, 255 bp, Glycine max
ttttttacaactcccagacattccaaagccatccccaaatcaagagaagaagccaccccccggatacaaaaccacctagccacccctgagaccccgaaatgctcacccttacgactggggcaaaataagcaccaaggttgacgctttgtgtggagcatcaatggagaatgatggaggaagaaagcaacgtgagggagagggagagagagctcagaaaatgtggggctgagtgacgagagacaaggatgctttttg

SEQ ID NO: 236684 - DNA, 308 bp, Glycine max
agcttcaagagatcatgcgctcgataacattattgttgatatctcaaaaggggtaacaactagacattctcttaaagatttatgcaataatatggcttttgtatctatgattgaacctaaaaatataaaagaagccataatagatgataactggatcattgccatgcaagaagaattgaatcaatttgaaagaaacaatgtgtggaaattagtagaaaaacctgaaaattatcctgtcataggaacaaaatgggtttttagaaataaattagatgaacatggtataattattaaaaataaagccaggt

SEQ ID NO: 236685 - DNA, 424 bp, Glycine max
  unsure (1)..(424): unsure at all n locations
agcttgtagaacgcctggcattatatatgtcttggngnnnggttggccagcggttcagggataaaggaatgtcccacattatttccatgacatgcgtgcaacaatgatgattcaaaaattttatgcaaaactagtcatgcatgcacctatgtggacactcaagcatcaagttttgtggtcatgtgatactaaggcttaagattaatttttcctatttaagtcaacccagtgtttccaaaacatgctcttttataaattcatgcattcatccgagtccattttgggtgttcgggaaaattttcacagcattcacccttcaggtgtatacacattttttcaacaaaacccttttgtgttttgatcggtgaatctttttcaaagaaagagctggagtttatttcttttcgaaagcggtttggctttt

SEQ ID NO: 236686 - DNA, 305 bp, Glycine max
catgacgctaagtgtcagtcatggcaactaagcgagattcattacgacaatgtgagcactaagcgagtccatctcagctaagtgcatgctcctctgtacttaagacgcatcattttagctaagctgcgagagatacagcttttctaatctgcagacctcgctaagcggacgtaccctcgcgctaagccgagtttctgttaaaaaaaaaaatctgattttgaatatcaaacggcggctaaacgcacatgttcactaagcgagcctggttgagaaaccaaacgtctcagttgctcgcttagcgcaac

SEQ ID NO: 236687 - DNA, 418 bp, Glycine max
  unsure (1)..(418): unsure at all n locations
agctggttgttggattaagtggccttggaatatttatataagggaggggntgaattaattattaatgaacctttactaattaacatttacccttcttaggcttttactatgttggtaagaaagtaaagaatagaaatataaacttaaccaaaagtaaaagtggtaattaaaagagtagggaagaagacaaacacacaagagttttataatggttcggcaacaacccgtaactacatccagtccccaagcgacctgcggtccttgaaatttcttttcaaccttgtaaattcctttacaagcaaagatccacaagggatgtacctttccttgttctctttgaacaacctagtggatgtaccctccactagaactgatccacaagagatgtaccctctcttgttcagtcacaacaacccaa

SEQ ID NO: 236688 - DNA, 330 bp, Glycine max
tgtcggtaattgaaaatattcaatggatttttgtccatccaaaaaatggtcataagaaattttaactgacatatttttcatgtccgtcggaaatagtccatgaaaaatttttgacagatactattcctttggaaattgtcacagactatttccgatggatgtttcccttaaaatttttttacggaaaatccttcgaaaatttctcatggatttttccatgggaaagttcacaccgaagatctgtcggaaaatcttattttatagataatttaatatttcaatcgattttggtttttaatcattatgaacgataatttagcgattatttta

SEQ ID NO: 236689 - DNA, 354 bp, Glycine max
ctgcagctgacctttattgggtgatgggcttttttactatatcctaacttttgacactaagagcatctttagagatgggtgggtcataattacgaacacggatgaacttacatatgtcgcattcaaccattgcaacatcggacgaatggttcatcaccacgaacgcgatcgcaggaatagaagaccaattcatttcaatcgtaagaagccctgagaagaataggtgacaatgccatcaatgatctatagaaaaaccccaaatttaaatgaatcaacaaaaacagaggaaaccatggctgatcaacaaagtaaaaatctccaactctgagaattaacggatcagtctgaatcaag

SEQ ID NO: 236690 - DNA, 327 bp, Glycine max
aacgaagaatgcatctgtgtcgcgtcatgcagatatgaaaagcacgtcggccacggactggttggtggcatatcaaacgttgtcagagaatccgccatgttataacaaccctgatactgaggcactcaagcatggcttaagtctattgaaaaccggcagccaacgcgtggaggatgtgttcatcgatcgacactctccgtcgcggaactttagagccctcgtcagaggccattctctcgagcgagccttcgcgattcttgatgtccttatgatgatgactctgaacagaagcattactcttttggcggaccgctgcaatccgaatgc

SEQ ID NO: 236691 - DNA, 432 bp, Glycine max
agcttttaactgaatttgcaacgatccaattgttttttattatgtgtaatcgattacaatatattggtaatcgattaccagtgtatctgaacattgaaattcaaattcaattgtgaagagtcacatcttttcataaaatgctttgtgtaatcgattacatggttttggtaatcgattactagtgacaagttctgaataaaaatcatgagatgtaactcttccaatggttttcaagtttttctcaaggtcataactcttccaatggtttttcttgaccagatgcgaagagtctataatagcaagaccttgacttgcatttccaataaattttcatatattcttttacaacctttgaatctctttgaacatcttcttgaactctttcttttcttccttgccaaaagcttctgaagttttggttccaaactttgt

SEQ ID NO: 236692 - DNA, 426 bp, Glycine max
gcggattctaatgactcctttgcggcttacacataatgcatagaggatgggcagctcaccaagatgacttcctcgcctgatacgatgaccagatgcccttccactaccgaattcaacttttggtggagtgtaaaaggaacaactcccactgagtggatccacgaacgccccaacagacagatgtatggggggttaatatccattatttggaaagtaacttgacaagtgtgagggcctatctgtactgggagatcgatctctcccctaacctctcggcgggtgtcgtcgaaggcacgaaccaccattgaactcggctctaaatgggaggcattgaatggtaatttctccaaagtgctcttacgcatcacgtttaaactggaaccactatcgatgagcactttggctacgatatggcccatacactcg

SEQ ID NO: 236693 - DNA, 394 bp, Glycine max
ctagcaatctccatgaacaacaatgttactttgtatgcagtatggtgagggggaaacatacccagatgtagccatttcgaaaaacgatcgacaatgacaaggatacatgtgtttcccttgtacgcgggcaaccctacaataaaatccattgataagtcttcccatggcagcgctggtattgggatggggcacaacaaccctccgggcttacgattatcatattttgtttgttggcacgtgatacagtttgcaatgaagttgtgcacgtctgttctcattgaatcccacttaaagttctcttgaagatgttgcaacgtcttttgcacccccatgtgaccgcctactggtgtttggtggaattcttcgaggagtagtttaatgaatgatgatgttg

SEQ ID NO: 236694 - DNA, 376 bp, Glycine max
  unsure (1)..(376): unsure at all n locations
tatctagcacaaaccaattaagaaaaagaaacaaacatactttcaacaataccatgctagtttgtcagattcgagacaaaccaaaaaatcatcaaaacggttttattaattttaaggcaaagcactaatagaattcctgaaaggtaataaaaaaaaaaaaccaaagagcccaaatttcctttttttttttacaaaaagaaaaacagaaaatttaggtacccacaagcgacatcatccccaccgacctatcatcactgtaataatgaagagaaggcgtacctcgtnatcatcaaagtcacgcgttcttttctcaaccttaaattaaccaacccaccaccaatccaccccacacaagaaagcgcatgaaattggaaac

SEQ ID NO: 236695 - DNA, 375 bp, Glycine max
agcttctaagttctaacatggtgatattgatcatatttgctgaatgtgaaccacaagtataaagttattataatacactgaagctccattaaaaactgaaccatgagtacataattattacactacattgcagctgcattaaacatgttattgttattaaccaatttcaggacctagaggaccccttcccttatttttgagaaaactagcttaatataatttacttctataattaactaaggagttgagagaagctatcccaaaaatgcaatatcaccttcttatgttagttcacaaagtttaattagataatcttgataaagagaacagtatataatcactaattaatagtaaatattatagagattcaaacct

SEQ ID NO: 236696 - DNA, 447 bp, Glycine max
  unsure (1)..(447): unsure at all n locations
tcgtccgtagatccctcatgtaagagtagactcgatttatatagtcctcttacggttagactaagttaaactgagtttcatccgcagatccctcatgtaagactagactcagctcaagtagcttactaaagtttagcctaatttagcctaagcttcgttcgcagatccctcatgtaagactaggcctaaactaaacaacattattgtaacaacataattaaaaccaaaacttagctcacagatccctcatgtaaggctaagtttcaatcctgcttcaatcaagttctaaggcaacaatacattntccaatgctaaagtcacctaactgtgcacacaaatgggtgatcagaccaaaagcatacaaacattaagcattgagggaagcattgaacacagaanacataatcaattagatattacgtattaacattagttggtcatcgaaat

SEQ ID NO: 236697 - DNA, 400 bp, Glycine max
  unsure (1)..(400): unsure at all n locations
agcttctaaactttatacaagaatgatcnctgataccacttggtggacaagtggcctcagatatcttaagaagggggggttgaattaagatattaaaacttaattccccaattaaaattctatttcactttctattcaagttataaattcccttaataatgaatttcttaaatattgattcaaataaaacaatttgaatatgaatataaaacaataataaataaatgagtttaagagaagagaaaatgcaaactcagatttatactggttcggccacacccttgtgcctatgtccagtcctcaagctacccgcttgagagttccactatcttgtaaattccttttacaagttctaaacacacaaggacaacccttcctttgtgttagaattctttacaac

SEQ ID NO: 236698 - DNA, 443 bp, Glycine max
  unsure (1)..(443): unsure at all n locations
tatgcgcatatttccttacgaacgttcacttgcacatgatattctatcaactaagaaaaatgcacccatatacaatcaaggtagcttcattacctagattatttacatgtacttccaaggtgtatttattatttacatcacacacgcctccttggctgaatttacatacatgcatactcaaagcattttggggtaccaaaaactgcacatgcgctcatcttggtatttctaatacccatacatatacaaacttcacgatgaatcttgactacctacacaataaggtgctacatttcatgctttttttcaagattttgctacctatagccacatgcaaattcaagcatattttcctttgctgactaaaattgtattcaaattagaaggtatatattnttttgtatatgntttcttcacataacatgcaacataattatgtatat

SEQ ID NO: 236699 - DNA, 303 bp, Glycine max
ttttctaccatattcctttcccaaagcataaagacaagcgtgcctgaacttctactctaaaacctttcggaatctttgtggaaacctagatgctgcttctctttgtgatggctcctcataccccaaagagtgactgactaagctgtatacgaaaataggaaaatattactacttaatattgcagccttaccaaatgcgaatgtgtacagttatgacagcacaaataaatttttgtttgaatttttatttcaaaatatgttgataaaattgtttacacataacatattggtttattgaagtaag

SEQ ID NO: 236700 - DNA, 327 bp, Glycine max
tcgtccgggatcttaagcacctgagctgcagcttcctaaaaaaagaggaatttttttcctctccatgatagaagccatcacgggcgccatctcctacgttgaacacatttatgatcagctgaacagaagcctaaccttgggggacatgcacctgtgtcccatggataatgattttgtagacatactcatatgttctcttggcggaaggaaacgccacctctgttcacggatgtatccctcattaggcgccattgttatgatgggcctgctctcaccacatgggttctaacatgcaaatgcacatacaccatatggggttgtaataca

SEQ ID NO: 236701 - DNA, 359 bp, Glycine max
atgattatcctgctctgacaaataacaagcctgaggcacatatagaagatgataaagatgaacgaacccacgctgtgactgtcgctcttacatggtccaatcttccaccaatctaacaatgtccttacttagccaatatcaacccttctcattacccaccatccaatcatgcacaatgtcttgcatgtcgcacatccgataccatactacacccttagcacacaccatgacaccagctaaggaaagaaatatccaacaaaagagcctgcataaatcaccccaaatctggtgtcatatgctgactctctacacgaaaacacccttggtgaatatcactataagcggacttttggagactt

SEQ ID NO: 236702 - DNA, 247 bp, Glycine max
aggacacaccttgcaaccagttaataagaccgggtggatcctcaaacaggtcatttcatccccggcctaacatctttcacaggacaactaaaatgggaaaagactcattattaacttataaaaaaatctttttgaaaataaatcctttcgctaagcgcctgtttctcgctaagcacataatcactcatgcaataagccatgagcttaatcgcttatcgcaccaccctggcacctaatgttgactatt

SEQ ID NO: 236703 - DNA, 428 bp, Glycine max
  unsure (1)..(428): unsure at all n locations
agctttctctttgtgcaactatctcatcctctttttatgtgtaaaatgaagctngacaggttcaagtgcaggtgctactactggtggaggcacttgaatttggttgccagacctcaaggtgatggcactcatatttttcggattctgcacagtttgtgaaggcaatttgtcagaattttgggactgagcatggttcaactgagtagccatttgccccatctgatttgtcaaactctgaatggaggctcttgtctcttgctgaaattacatattctggatggtcatttgcctcactaactcttctaaggaaggttgaggaggagcctcaaatgcttgttgtctttgttgtgactgctactgttgctgctgctgtattggaggaggaacatatggcttgcttggaccagcaacattctggaaatgaggga

SEQ ID NO: 236704 - DNA, 404 bp, Glycine max
taatacaataaattgaagacattaaattaataaatattgagtggtcatttattgagaacgaataagatatattactcaatctttcaaaggtatacatccaccgatattgcacgagaccaccaaccctaacttcataaggcaaatgaatcgaaagatgctccataaagttgaagaaacttgggaaatatttgctcaagtttgcacaaaaatattggaatatttttttccattaagcataaagcatcctcttttagtagaggcgaagttatttctcgaaagaactgactgaactctgcctatgtgttccaaatggcctttggtaaagctttgaaggcaactggaacaaacattgccgaacatatggaatcatgactttcattcgaaaacttccatcttcatgtaac

SEQ ID NO: 236705 - DNA, 265 bp, Glycine max
atggactatttgactcgttgaatctaaaactcgagtaaaaatgcgcacgaaaaaatggtgcacacaatttcaaaactaaaaagtatgagcaaataatcatttctcttaactgaaaaatacaaaatttgcaaatcatagaaatcaaaaaaagaaagttctcagcagaactcctatatcaatgtccatgatgggaagaaatgaacgaggtttaaaaatataatgaagccaaagaagttgcttataaaacaaaagtaaccatagattt

SEQ ID NO: 236706 - DNA, 312 bp, Glycine max
cggccataaaataactgggacggggacaccaggggggagggtttcttttacactttggcagggttatatctagtcttcgtcgcttactgtaccataaaacctattacgtgctcaattctctcaatattaccaactggcgaatccggaaggtgggtgaaagggggtagcgaacaaaaacgggttctacgtctccaactagttgaaacggaaggtgaacgccccaacaattttatgatgtacggtcccacatcttagctatatctaagcccctgggcgcaaacatcatatgatatcttagttaggtacaaaatc

SEQ ID NO: 236707 - DNA, 378 bp, Glycine max
gaacaacctagtggatgtatcctccactagaactaatccacaagagatgtatcctctcttgttctcagtcacaacaacccaagtagatgtaccctctacttgtaccacaaaggatgtatcctctaatgtgttaagacaaagttctcaggcggttagtccttcgaaactttgtgaaaggggaaacaaaagaattctcaggcggttagtcctttaaaatcttatgtttatgggaaagggaagaatcaaaagaattctcatactgtgtcattttgaattctttgacaagggagaaaggagacacaaaagaattcatgcggttagtcttttattcttttggaaaagggagaagaagagacaccaaagaattcacgcgggtag

SEQ ID NO: 236708 - DNA, 323 bp, Glycine max
  unsure (1)..(323): unsure at all n locations
ccaagagagaccagncaatgatcttaagcncgacacnagaagacaagccgaaagcggggcagaggaccaaaagcacctcgnccgaacaattggagaagaccgaaaaaaacacgcgagccaccaaggacacaaacaaagagaagcgcaaacaagcctcaacccatgagcaaagggcaaaggacgaggacgcaaaggtagcactcccgcaaggggaaagggaagcaagggaaagagcgaaacaaacaccacaaagagaagcaacgaggcggaagggaaggtccgcaaacacccagaatgggaagcaagaccggcaagaccaccac

SEQ ID NO: 236709 - DNA, 274 bp, Glycine max
tggagatatgtcgcgggggtcaagagaccttggggacgtcaagtggggtgctattgcccaaaaccaagcttgaccaatcccgaaccaacccgggcatagtcagtcagtgagaacctgtgatgtacctaagcaggcgagctcctggcagtcaacagattaaaagaacaaagaccataaagcaaggaggcttgtggtggctggccagctgtgaactttgattgatatgtgagaattggcctctggtaatcgattaccaagggtgggtaatcgatta

SEQ ID NO: 236710 - DNA, 410 bp, Glycine max
  unsure (1)..(410): unsure at all n locations
aattaactttacttactaagttgaaagtaactgcccaanatcccgaccgagatatcccaatcttatgtgtaatatcaatatatttacattctcagtataatatcaattttaatctctgggctcggtacttttgtgggttggtacggcggtatagttgatagacaaatcacataacatgtgcttgtagtatgtgtatgtatgacaacatggtttgtagatgtaaaatatggaataagaaataccaccattggagntatttgctttatgtgtcttctcatcaatttaatgatgaattacagatgttttatgaggtgttatagaagagtttgagtatggagtgaagaaaatcattggcagccattggtgtgactctgaatactattatttngtgatataatatatgaaaatga

SEQ ID NO: 236711 - DNA, 301 bp, Glycine max
actccttatggctcacatagattcgggtatagggcctaatatctcaatgtgtgtgtgagggatatgtgtcatgcgtgtgtaaaaaaagtatttctacctatgaatctaatcgatagacaaacacacaccaaacacaataacatagcaaaggttatatatgaatatggacaaatcaaaagataaaagggaaaagggaaaataaataaagatgaagtcatgataaaaaacattgcacaccgactgaatgacctaactctctaacacgttcccagtggagtcgccaattatcacaacctattct

SEQ ID NO: 236712 - DNA, 385 bp, Glycine max
  unsure (1)..(385): unsure at all n locations
gatggccatacgcctacgctgtgatctgaaatgatggggcaagccacattgcccctatacccttgctgtttgtacccaaaagtgcgcccaccaaatgctctgtgaaatgcctaaatggtgtttgcgcataaatctgtgaatggtgcttatagatggcgtttgtgcatgtatgattgccacttatttgatgtggggacagcttgcggaagatagggtaaatgccagaacatgacttatgcctagggacccaagcctttgatatttgaatgcaacaacgcatgatagtgagagcatgttggtgacgttatcctttangcancacttggttggctgcccatgatgattctttgtcctagatggagtgaaatgtcatcaccatgtcatg

SEQ ID NO: 236713 - DNA, 373 bp, Glycine max
agcttctcaggatgaatttgagaacttgtttcgtaatgtcgacgtaaaatcgcgaattatggatcagtatgctgactggaaaggcgtacgttatcgtctgggcggcagcactaaaaaaggtatcgattgttctggtttcgtacagcgtacattccgtgagcaatttggcttaaaacttccgcgttcgacttacgaacagcaggaaatgggtaaatctgtttcccgcagtaatttgcgtacgggtgatttagttctgttccgtgccggttcaacgggacgccatgtcggtatttatatcggcaacaatcagtttgtccatgctttcaccagcagtggtgttattatttccagcatgaatgaaccgtactggaag

SEQ ID NO: 236714 - DNA, 198 bp, Glycine max
cggggcgcatacgtacgctcatcacgcatatacagaacatgccaacgacagttgcactcatgcccgccaagaaaaatgcttaccacacatcggtccatgttcagtcatctgcataaagccgaacggtccgaggaatgccccgaaatttaggttcaccgactggcatgtcggataattcgttaacgttcatcaaacgtg

SEQ ID NO: 236715 - DNA, 423 bp, Glycine max
gcttttttttatggaaagctaaatcctctgttggatcttccttctaggtacttgatgtaaatatctctttatctatttaatgatattttgtgtgtccactgcgctatcagaacttcattctaccatgcctttaccttgatcacatagatgcatgtgtccttaggatcattcaatagtggaaactagtctgattcttacaacttgatataacagagctaggttgtcgcattttcatgaggaatcggtgtacggggacatacttgctgtatgtttctcttaacgcggtcatggttgagtttactccaacaagaggaatatgccgacgatgcttgatcacgattaggctttactatcatgaggaatcggtgttagcatctcctgagacaccatcgaacatataatcattgttaaatagataatatt

SEQ ID NO: 236716 - DNA, 408 bp, Glycine max
  unsure (1)..(408): unsure at all n locations
ttaagtcaccgcggctgcagcttaatggacttacataaaagtgnngtcntttctttgcagatttttaatggatgcaaaacatgatcaatgggagcaatggaaaaaaaaaacaaaggaaggcataagtcacatcttcgacctcactcccaaaggagagaaaatgaaagaaagcctcaagaggctaacattaacctcccatactttcatgggaaggacaatgtagaggcttacttagattgggaaataaggatagagcaaaaacttaaaagaaagtctactttaaaatcttatggatctcattcttatccaaaaaaagaccaaggtctaggcatcttaggggcagcaccttctaagcccanagatngataggggaagacaatagaaaaacaaccccctaaagctagtatg

SEQ ID NO: 236717 - DNA, 402 bp, Glycine max
  unsure (1)..(402): unsure at all n locations
ttcaaccctcctggtatctgagaatcacttaaaattagtgagaaaaattgtttccgtgaagaaaatccaagccgaggcgcttccataacgcttctgagacgtttccgtgggtgatttcgcgaagattttccgtcgttcttcgtcgttcttcgttcgttcttcgatcttcaaccggtatgttcccgatatcgaacatttcaattcattctatgtacccttagtggtccccactcgtttggcatgctnttattttcatttcatttactttctgtacccccttttgacctgctttagtcgtttatttaagtcattttctcgcctaatcaacaaataaaataaatntccaccgatctttcgaattgaacatatttaatttctgttaaatgagatctaacgatcgtc

SEQ ID NO: 236718 - DNA, 415 bp, Glycine max
  unsure (1)..(415): unsure at all n locations
gctaactgtaaagacatggttattcttttatataactttcactcagttgttgggtcatactttaaaaatgagaacatacttnttggccttttgctaataaatctcgactattttatagccaataccgtaaaatacaagaccatttgaaatttcctgctcatgaaatcactaaaatctttaaagccatttcatgcatatacctggcccacctccagtagatattgacagagggactcagaatccacaattttaccaaatccttcagcttctcttccataatagaagctgagatcaaggaatagataaaatgctccctgcggatgaacagagagaaattatgtttgagtagaaaaacagacagcaaaaggaagagancaaaacacaggaggagaattatttaacggaaaaagaaaaa

SEQ ID NO: 236719 - DNA, 401 bp, Glycine max
agcttagcccaagaggggatggtacctttttatgtcttggagaggatcaataataatgcctataggttggacctcccaagagagtatggagtcagcaccacttttaatatttctgatttaattcctttcgcaggtggagctgatatagaggaggaggaaccaacagatttgaggtcaaatcctcttcaagggggaggggatgatgcaatcctccctaggaaaggaccagttaccagagccatgagcaaaaggctccaagaggattgggctaaagttgataaaaaaggccttagggttctcatgaaccttagggtagatttttgagcccatgggccaaggttgggtccactcttctttgtaaatagtagaataggttgttttcttatcttgggccttgtatt

SEQ ID NO: 236720 - DNA, 379 bp, Glycine max
cagagctgcttagatcgtggtctcgacccatctatgaataatgagagctgtattggttctgacaaactgagaggggaagtcttctgcaataaacctctgtatctctgaggtgccttactcaacgattcatctggcaactggtacaaagaatagatggtagctctgccttttgtagacttagatacaggctaggacttttttaagaacttttctaccacctcatcctatgacttcatactgtgtcccttaaaagaatgaagacatgtctttgcttctcccgatacagaagatgagaacaaactctacctgattgcatacgcatgcacacctgccaacctagtgagattgcatatctctatataggtagctaagtgagcat

SEQ ID NO: 236721 - DNA, 204 bp, Glycine max
agcttgggctagactgttaataagttttgtttttttcttagaacaagacaggccgccatgcctaagaagtctttgggcttggcaaccactatcaacaaaatactttctgcacctactatatggtgacttcacccacgctgctaattgaatgcttctacaatccttaaacaccgtattcacacattcagaaaggctggatgtcct

SEQ ID NO: 236722 - DNA, 317 bp, Glycine max
gccacaccaagtgatgttcctttatggcgagactgcaggttacgtcatgtatataatgatcaccaaagtgccacagaatactcttactacacaccctttctacttgatggagacattgtgtccatagaatccatgcatgatagtcaggctttggaacatacacagtacatttgccatgtgtgaagagtaaagtagccactatctggtgtccatggaggcatgtcttgtctctggtcaagatatatgccacaagagatatttatccttagtacccaaactttttgggacttatatgtggcctgaagcagtggcaactc

SEQ ID NO: 236723 - DNA, 335 bp, Glycine max
gagcttgaatcaaatgcaaaccacaataactcttatttcggatatccgattgagccccctaacttatcaagacgctcgaaatagaatacagaagctctgaccaaactaatacgacaataactttctactcggatgtccgatggggtcacgtaatatatggagatgttcaaactggatacagaagcctgaaactaattcacacgagcgggacatttacctcggatatcccattaaggcccgcaatatatcatgacactgaaaattgaataaataagctgctagataactcaaaagactagaaccttttctctgatgtcgattgagtgccgaatata

SEQ ID NO: 236724 - DNA, 390 bp, Glycine max
tatatgacgggactctatcggacatccgagttaaaactaattggtcgttgaatttcctcagagtttctattttcaattttgggagtctcgatatactacacgattcaatcggactttccagtaaaaatgtattatcgtttgaattttctcagagcttctatattcaatttcgagcacctagaattattaagggactcaattggacatccgagtcaaaagttattgtcctttgaatttcctcagagcttctattttcaattttgagcgtctcgaattattaaaggactcaatccgacatctgtgtcaaaagttaatttcgtttgaatgtcctcagagcttctggttttcaatttgagtgtctagatatattacgggactcaatcggacatc

SEQ ID NO: 236725 - DNA, 391 bp, Glycine max
tgcctctcatcaataaggacagatataacatgccctaatctgcttgctaataacttagctatcaccttgtacatacactcaatcaaagagattggtctgtatcatcaaggactaagggtgttaactttgggaattatagccaaaaggaagcactattgtctctagggaagcttccatgcacatgagattcatctaccaatcttctgaaatccagtttcaacactccccaaaattctttaatgaaattgaagttaaatccattaggtccaggacatttgtttccaccacagctccacactgcttctttgatctcatgatccaagaaaggaagcaacaattcctccctctgcctctggtaattgaagaaaatgactccatcacggtgggtctg

SEQ ID NO: 236726 - DNA, 304 bp, Glycine max
  unsure (1)..(304): unsure at all n locations
ttacactcatttttatgcacctaatagatctgcggctaaggggattacaaagaacctaatattctcacctccaaaagcctctccaatgcactgcaaacccatgcacacaccanacaatggcacaattggtccaagcttcaaaactgtttgcacagatatgccagaatcttgaggttctcctgcaacgatgaaaaaaaatgtaaattagcagccttgcggttattctattatatcttttctttatctattatctaaatattgagcatgtatcacgtttttattaactctggaaattaaaaaaaaa

SEQ ID NO: 236727 - DNA, 210 bp, Glycine max
gggaacatcttgactggatctaccgaacccatctggttggatgcactggggaacggattatccgaattcacatgattggagcgatataggttcgatccttctttcaccgaaacataattaaggtgactattgataaatgggccgtggcaaaaatgtttggctctaatatggcattacagacaatacgcctttgacccgatcataatattt

SEQ ID NO: 236728 - DNA, 309 bp, Glycine max
taattatatgggccatcaaaactatcatgtgttgacagtaattgattagcccatgaatcttcttcggggtcggacacacttcggccatgggttttgctttggctaatagacgcgggaggtcttgactttcattcaaggtcaaggcgaacctatccatccacataatcgcttcttgatgcaatgcatcaatcaccctccctcttgcttctttttcggcgtacacttgtgcaaaatcctccactagcttttgttcatgggccacagactggttcaactcttccttgtattggcctatgatagctagcatgc

SEQ ID NO: 236729 - DNA, 412 bp, Glycine max
  unsure (1)..(412): unsure at all n locations
ggctgtaagagaaaccattcaaactaatggtttttcctttcaanagacaatagaggacgcttcgtcgagtgtccccattgaaaaacctttattcacacctttcaaagttagtgatatagctaaaccaattattagggaacttcgaaaaactaaatccttaattgaaggcgtaggtgacattcatagcgaattactaaacaagattagtagtttgcttaaggtcattcccgatactccccaagcttctgaagatacttccaaactggaatcaagaagacctacaaattaattaatgttattaatgaagatagngacccaaacttagattacacaactgagactggatcagtgtcagaaaagaatattaatccattaaacttcaaacactgagaaaccccctccaattatatta

SEQ ID NO: 236730 - DNA, 325 bp, Glycine max
ttaatgacaaaatcatattctataccttcacattaatcacatgctcatgacaaaacatctcaagtacaacacaacatctctcacacacaattcattacccaccatgacgtagcaagtcacaatgatcatcacacagacgttatgcgacatatatactaagactcaatcctatattgaatgtggcatcttgtcagtgaaaaataacactatggcaaatctctccaccaaagggaggctatcttcacaacatctgaattgtccaatccccttgagccctcatactttgattaaaaacaatgcacaaagaatcccgtcatggtttaaa

SEQ ID NO: 236731 - DNA, 373 bp, Glycine max
tgtgatgaaagctccaataaactcttcttggtagggatatgaactctatcacacaagattgtgtggtcaccgatagccatattttcaattaagtccatggcttcttcaagagtcttcaacttaatttttcctcttggcctccatcatggaggtcatttggtccttcatggcctctatgtcgaccttcatctgatcttgcacttcctctatttcactcatgattttggttttggcacatgtttggtaggagtgtcgtaaggcgcattcattatttctggttattgtgtttactttttggctatgattgctaaataaacaaaatgcaatgagtaatgcaacaacgaaataaacatgaatgcatcctaacgataag

SEQ ID NO: 236732 - DNA, 335 bp, Glycine max
ccctaaataacgatctgggtaataggaatgatttaaataacacaaaaaacaccatgggaaagtttcttctctttttctttttcgcgccattctctttttcacagaaatttagttcaaaaggaagatcatcacttttgagtcctgaatgaccagtttacaactctattcggagtctattcttttttatcacgcataacctctaaaatattgtgctctttcaaaaaaataaaagtatgtcagccattactttaggtcgtcacgggaaaataaaaaataaaaattggcggtgaacttctttaaataaaggttgttaacacattcttctcaattaacaa

SEQ ID NO: 236733 - DNA, 329 bp, Glycine max
  unsure (1)..(329): unsure at all n locations
ggctccagaacacaatgntttcttgtgggtaatgggagaatgtcaagaggttctgaaggtgagaaacaaaacgtaagatcgcccagtgaggtaaaagcattaagctaatgacgttaaagaagggctccctgggaggcaacccagtttcaatttgtgttatttttgggttttcatgcatttgatcattggaaacttggtgtataatctaaacattggagcatatcaacctccctttgaatggtaaaattaaagggttcaatttcttgggaaaggactaagtttaaaacttagaanatctttttgaaaattagtccttttgctaagcacct

SEQ ID NO: 236734 - DNA, 422 bp, Glycine max
  unsure (1)..(422): unsure at all n locations
agcttgtgtcgacctcacatgtttggtgcattctcgcanaacagcgtgaccctgactggtctccctatgatattatctagtgagagtgacctgacttactagtgtgtgatttgtcttgtcatgtactcctaggcgcccgacgagatatttcactgacataataccacattgcatatatgattgagtcttagtgtatctgtcgcatatacgttcgtgtattgattgatttaatgatattgtgttttgatccttgagtacatgaatgatgcacaaatgaatgaggcgcgttgtgctgtgatgtgattgtaccagacanagtggcgaaacgacgcgagttatggtaagtaaagtagatattgtttatgtgatatgatatcaacatggcgccttgttccttctattaggatatgaaactcattcct

SEQ ID NO: 236735 - DNA, 251 bp, Glycine max
attcaacgggagtggtttaatttaagttctcaaggacctctaataaaaccagttcactttaggcatataatctctagaagtcactaaagtgtgttctggttgtgggcttgtagtcttacaaatgtctattaaccactatccaaaatggaaaagaagctactttggtgaatggggaaaacatgggttacgttcaactcaacgtttttccaaacacaccctacgtatgtaaaaaaatatattattaaaattaa

SEQ ID NO: 236736 - DNA, 354 bp, Glycine max
gcgtcgcgatatattatgcgcctgaatcggatcatcctgtgaaaagttatgaccatctcaatttctcgagagcttctcttgttgagatgcgagccgcttcatatgtgatgggccggaatcggacctcgcggtgaaaagttatgaccatttgaatttctcgagagcttgcgctgatcaatttcgagcgtctagatatgtgatgtgcctgaatcggacctccgtgtgagaagttatgaccatttgcatttctcgagagcttccgttgatgaatatcgagggtctcgatatatgatgcgcccgaatcgcacatccgagtgagaagtgatgacggatgaatattctcgagagcttacg

SEQ ID NO: 236737 - DNA, 435 bp, Glycine max
  unsure (1)..(435): unsure at all n locations
agcttccatatgctgcctgaggccaagcaatgtgcattgtatgtttcactgaaatgttgatatccaagctatacctttgtcctttactatgtatctgtggagtgtgcccatacagtatacgggctagggtagtgctcatttgtcactgtaccataccttttcaattgctatgatgttattatatggctattggtagcataaataaatgctgaagctcgacaccatatgagcaccacttgaaaccaattagtcctatctgtcattacatgaaattgcgagctagaatngctgataaagcagttattaatggaattttgttggacattgcatacaatgtgaatcttcatgccaaaagagcaatggatgtgtgttttatgagcagttctgaagtggggtactggttttgcacatcaaatttcttggtaattggcacta

SEQ ID NO: 236738 - DNA, 437 bp, Glycine max
  unsure (1)..(437): unsure at all n locations
tcctggatcggtttaatcaattaccaatatatcataattgattactctgttgttaagacaatgactgatttatccaggaatctctactttaatcgattaccaagtggtttaatcgattacttctctctcgtttagttgttcaaaagtgaacaagaacactttaatcgattactntgagtatctaatcaattaaattgttcttgagttatttccagatgttggtaagaacaatttgattgattaaagagataatctaatcaattacttcgttgaattaattgattattttgtagatttaatcaattacaggtggttataatggttntctctataaataactaacttatgttcccctccatatacattaagagaatactcaatatcttgagaaacacataaacctctaaatgagacanagatcttgagttgtcataagt

SEQ ID NO: 236739 - DNA, 465 bp, Glycine max
agctagagatgatgaagtgttgaagggtgaatcttcttgctcttattgtcgaccacagagtggcacctggagatatgtcgcggaggtcatgagaccttggggacatcaggtggggtgctattgcccaaaaccaagcttgaccaatcccgacccaacccgggcatagtcggtcagtgagaacctgtgatgtacctaaactggcgagctcctgtcagtcaacagataaaaggaacaaagaccacaaatcatggaggcttgtggtggctggccatctgtgaaacttgaatgatatgtgagatatggtctctggtaatcaattaccaagggtgggtaatcgattacaaggcttaaaaatgaagacagggggctaagacggtctctgtgtatcgattaccaggggatgtaatctgataccattccttgaaactaagacaggaagctatgggagcctcttgtaatcgacta

SEQ ID NO: 236740 - DNA, 319 bp, Glycine max
  unsure (1)..(319): unsure at all n locations
ctttctttccttcgcaacttgagttcactattgctaccccatagagctccgcgaaatttgttccggccatactcttccttgcgagccctcttggtctctcgttcaagggctcttgcggtaattgcattctcttcccgtaacccggcacactccttccgaacgtgtgtagcagccaactggaacttctccttggcgagttttgcctttcctaactcgcttttgagagcttggacttcctcgtcctcttccggtgcttcaaaattctcttcgctgacgactnttaacttggcgagccaatctaaacctcgtatgcgaactt

SEQ ID NO: 236741 - DNA, 302 bp, Glycine max
ggaccctgaagactcagctgagcttccataatacctcaaaagatactctttttttattcccgcagagtacaacaatcgtggcgactccaagacatcacacgttcaatcttcacgcgatcactgtgcacaaaggcaatctaacatgtaacaaacacacatacgtacatagttgaaccacaaagataactccaacgcttcttttggggagagacaaatagacgaagggttatggagatggaatcaatcgattatgccaatttcttcgaccacaactatgattggcacccttgcacacatgggga

SEQ ID NO: 236742 - DNA, 435 bp, Glycine max
  unsure (1)..(435): unsure at all n locations
agctnggtgctgngtgagtttgccacggtattctctatccgttcaagggaagtttggcaggttgtgagctcaagcatgggtctgagtaacatgtcggaccaatttgctatgaaacagtatactaagctaagctagctatggatatcaggtaatagaaatgattctcctcttgctgatgttattcatcttccatatatttataacaggtgactataagcacgtgctgaaattgggtcagctatcccaacaaacttctaagtattaacagaattggttatcaaataccaataacaaacatatactttactgttaatatcctaatatcatatcagcaagtattcctcaagctatcagcgagtatccttcacgcacagtcacggtatcgtgcaagaatactgaggagtctctcggatctgctctgngccgcattgctat

SEQ ID NO: 236743 - DNA, 349 bp, Glycine max
  unsure (1)..(349): unsure at all n locations
aatgctggttaacatcttccatgactttatccaagaatggcacccttgtcaatataatggactngctcatcctgttccacaagttatccacctctttatcactcttcaaacgggtcaaaataacccctctttctctaagaatcttagcatcctcctcagagtctataatcccgttcattaattcagtgtaacgggtgaaaaccaattataatcccgctcattaattcagtgtaacgggtgaaaaccaatgaccctaatgcagtagatgcttcataagcaactaagtttctcaacaacacttcactgttcaagtctaaacccaattgtggagggtcagtgtactgtttta

SEQ ID NO: 236744 - DNA, 381 bp, Glycine max
  unsure (1)..(381): unsure at all n locations
acatganggatctgcggacanacgctggatattcagcctgacgagggatcgatggtttagtaatttaggctacaacatataacacaagagcatgatttattagagaaatatatttctatgcatcagcttatntgttagaaagacccaacatatctacctactgctgtcattntatttaccttgcattttatagtttttagcacacaagtttagtttaaattctgtttgaaattatcacttatacatgttctctcaacaatgcttcgattctgaacttaattcacgctaacattaggtccctgtgttcgatactcggattcatcccgtttaattntaaatacttgacgaaccagtgcgctttccggtgaaaactccccaatg

SEQ ID NO: 236745 - DNA, 367 bp, Glycine max
  unsure (1)..(367): unsure at all n locations
taagtcaccgcagctgcggcttcaacagtgcaaatatatagctagctccttatagttgcttgccgganaaaatgtggaaaggcgaagagcatgaggttctaagacccttaccaatcactaatcataagaggccgccagttcgcttctatagagacaaatcacaagcggccagtgcattttttgcacaaatggacatctggctcttacaattcctatctctctattaagcgtgacgaaactaatcactctcacacacacatatatgatcagcccattcgtatgaataaagaactcatattctctgcagtgttcttgtacatgcacagatgcacatgacatattttccttcgtttgtgcactttatttt

SEQ ID NO: 236746 - DNA, 404 bp, Glycine max
tttcttcattgagggcttatgtctcaagaagtgttcgttggagcatttaatgcaaacattaaacacacatcctttccatgttgaaataccactctctttggttttcttgagccacacgtcaatagagatcaacgcgcttttccttataatagttctgatcaacactagtgtaacatagtgcatcttatgagatgaggaaatatgttgttttctttaagacatgaatgttctcttacttccttggacttcaatagatcctagcatggttatcgaaatcacgagtcaactcataaaatggtacaagtttataactcctctctgactccacgagttaaatcacacactaaataagaaaatgagtgaacttaagtagacttaaacaaaatccagctaattcatgagtc

SEQ ID NO: 236747 - DNA, 408 bp, Glycine max
  unsure (1)..(408): unsure at all n locations
agcttataacaatatacttggccttctgttaattgtctttgggctnggcgaccacgatcaacaaagtactttcgacatctactatatgttgacttgaccaacgctgttattggaatgatgcgacaatctttcaacaccttattcacacattctgataggttggttgtcatgtgaccatatcttcgtccagatgtatcggaagccatgctctcatttttctttgaaatgcgatcaatccatcttgctatggctggactcaactgacgaaatttttctaagttttgatcaaacacatgcttgcaaggagtgtacgctgcataaaatttgttaccatcaaaagttgtaggtagatatgaaactcaaattaacttcatgtataaaataaaccttacccaatgtcttgaacat

SEQ ID NO: 236748 - DNA, 438 bp, Glycine max
  unsure (1)..(438): unsure at all n locations
taacaacaaaatgttcagttnttaatcataatagagatgtttattaaaaactcaatattttgtttttacgatagtatatgataatgaaaaatgttctatgtataaattgaaattatatattaacgcttgaaatttattatcctatcataaattgaataaataaataaaaaaacacaaaaaacatattaaaaattaaacattcaaattaattaaactattagttgaagctggactaattgatgattaatttattaacatgttagaatttctttgaacataaatttcctcaattttaaagaaactggacttaagataagagttcaaaaccaaaactattcttttaaggcaacgataccgatccctattcgtgtttttacgtgacgcaaagacgtatgaatactatttcaacacatgaatgagcgttgggatattatttaa

SEQ ID NO: 236749 - DNA, 261 bp, Glycine max
  unsure (1)..(261): unsure at all n locations
aattgagagacaagctacgagtgacatccttgactaatctgtattaaagacggatgttgacgtatgctgtaattcacttagttagttaatagctaggagttatctagtttgacagctatcaaggttgttaaagctataagtgcagngtatacatatagtacggatcatgactgatcataatgagtatgaatgataatgagactgcacaacttntactcatacatttaagctccctctatttctcaaccaaagctttcatct

SEQ ID NO: 236750 - DNA, 377 bp, Glycine max
  unsure (1)..(377): unsure at all n locations
agcttgataatatatgagctagctagctttttttggtagagaggaaaaatttgtgaaacggngaagggcagagaggaactaatagcacagaccaatcaccaatcttaaagggctgccacaagggcactaaaaagagtaaacaaaattggtggtgacgtaatggaacagccaacccctctggcttttacaaaaaaggcacacaaatgaggcatggtggcccccaccttcattcttagtccctaccatttccacccccttcgattctcaactgtaattaaattgtgatgatggtctttggaaatgacattggatctcatggatgttctacgggacatttggccctcatatatatatgccaaatcttgaaaattaaagct

SEQ ID NO: 236751 - DNA, 449 bp, Glycine max
  unsure (1)..(449): unsure at all n locations
tgcaatgctagttaggggtgtcactaacaaagattcttacatcgagttctgctataaaggttgaagccatacatgttctccattcctaggtgaccttcataggtctttttatgattntgagaagggatagagattatctattattcggaggggagattaaggctacctcgaggtcatagaaggatttcttattctcagcttgattagttnttctataaaagaaaatagtattatttttattttctatgtagccatttttatcttcttcatagcctcttcttaggcccagcttatatcatctgatgtatctctttccttttcttctctatcaccatttacaagtagttnttttctctttttatgagacgtgtcacacttaaacttttgactntatctatttataaaaggtaacagtggtatgtgagtgtcaagataaatatttgatcttt

SEQ ID NO: 236752 - DNA, 179 bp, Glycine max
  unsure (1)..(179): unsure at all n locations
acatgtgacatgatactatnaaatgcctctaataaaacttgtccagatctttgatgaaaaagaatacctttagttaccatttacaccattaactttagatttgcttaaaggagaaacgagaagataatgcanattcaccaggcttctcacccaagtttcttgcttcaacaaatacataa

SEQ ID NO: 236753 - DNA, 371 bp, Glycine max
  unsure (1)..(371): unsure at all n locations
ctctatcatgagaatcttcatagtcattcacctattcatatgctcccatgaacaaaaagntccaaatcatcacaggatccaaacacaaaccacacacaggaagtgagttattacattcctaactagtggagagaaataagataacatgtaggtataaatagcatataagcaaaatacaacttacttaagcatcactcactttatttcaccactttgtcgcacaatattacatcgcaacaccacacatttcattcattttcacaacattcacgtactctatgatcaaaacacaatatcatctagtcaatcaatattgatcaatacacaagcgctatgcgacatatacactatgactcaatcctgtatgcaat

SEQ ID NO: 236754 - DNA, 413 bp, Glycine max
agtcttttactttatagcatagttgagacatctcttatgagcttggtctatactaagcaaaacactgcctatgttctattcttcacatatctttcattgtaccatgtctagatcttgcatagctctcctgcatatttgatgtgatccttactaggaccgacttgcttgatacagggcacatatgttaggatgatgctcactttcagagagggaagataagccagggtagatgccacaaggattaccttgataagtccgagattggttcgacgaggatcccaaagagaagttctcacaaaatgttatcaaatgcactaatgttcctttatcgaaaacgagtcaatacatatagtgcatctgaggtgcatctagaaaggcaccaatttatctaattaaactaataaaaattgaaa

SEQ ID NO: 236755 - DNA, 240 bp, Glycine max
gctactttccctaagcgccttatcttttattaccactctattccatgctgtatagattttctgaagtatctatgcgttagcttcattaaaacctcgcgagatgaaaggcatgatgatatcctctgacggcgcacctctgataggggagactaactgtcttatggccagcataggaggataattaatgtgaccactcatccgcatcacagggacatttgggaatccctcacatgacataac

SEQ ID NO: 236756 - DNA, 313 bp, Glycine max
ggactaagcacgagcgcactgaccagagggactatttttttaaaaacaacagcggggtagaagagaagactgtttaatgctgaaagaaactcctcataaaaagctatgaaggagattgatgtcccaaggaatatgttttggatgcaaaagattattcgtgaacattagaccccattggacccaacttagggtgggcaccacctctctctaaatgattttgtcttgaagctgcgcctaaaagcaaaggactcactaagagacttgtatagcggctgctctaggcagatgacttgtgacaagtccatactcatag

SEQ ID NO: 236757 - DNA, 228 bp, Glycine max
taatgtttgtaagtgaacctataattatttggtagaggacaatttctacagaactactgtagataggctaagactgcatagctagctcaaacttactggtcaatatcatatacacagacttattaatggataatgcttacttttgacaatgtcttatactgaattacttgtagttgcacctacccactgcttaatgaaaaaactaatgcgactataagcattcttata

SEQ ID NO: 236758 - DNA, 468 bp, Glycine max
  unsure (1)..(468): unsure at all n locations
agcttcaagaatggcccaaactccctctccatttctgattntaggcttaaataggtggccttgttggtgcttgcgccattancgcaactctggctcgcttagtgcgtattagtgaatttcggcttagcgcgcatcttttcgctcagaaaatagactcaagtgatgcacttagcaagattagcccttgctcagtgaacatgcatagctcatccttcttccagattatttcttgcgctcagccacaagagtggtgcgctcaacggattgctcgctaagccaacaaattggcttagcgagcgaatgaaaattagcacttcacaaacttgtctaattaacctgaaattgagaggaaatgnatattaaacacacaaaatgggagtactaagtatttactacctatctttaactanaagtaattacaacattacaaaataaccatgacttggaggagtttgtacaattacacat

SEQ ID NO: 236759 - DNA, 361 bp, Glycine max
  unsure (1)..(361): unsure at all n locations
tatgaggtaataatatattaaattntatcaaaaaactttttaaaatattattttttttgcacaagaattatantttttatataaattattggacgagtatgggtagggaatngatatacctaatccccaataggagagattgaanaanaaattcacgtccatcataaatcggaaaaagaacgaatttgagagaaaaatgaanagaaaaaaccacacattccttcccatttcaccccattgtcatgtgtagtttacatgaattntcataatttttccaactctaatggactttggacaaagtgtatttggngtcaagttaacttttccttagntatatttttaacttttaccaaattatgct

SEQ ID NO: 236760 - DNA, 411 bp, Glycine max
  unsure (1)..(411): unsure at all n locations
ctgggaagttctatgataatgccttcgtacatcattacttatgtttgccacttaaaacattgtgcatggcagntgtgagtctttttgcctaagcaagaatgtgcttagagagtttttttggtactggaaggaaagcttttgttggttttcttacccataaggtttaccaaaaatctttattttgttattgctgaagatattgttttagttgcttttgatttgtagaacaaggtccggcaaccatatacttttagttntggcctaaattatacaggaggacacgcaaatagtttttaattgttcttccttgagttatatgggttactgatcaaaggctaacaaatatattttatgccttttggccatatattatgatatacgtaacaacctaatttagctatttagaaaatg

SEQ ID NO: 236761 - DNA, 226 bp, Glycine max
ctcaacgtgcaaggacactggcaatcgaataccacaaacactcttaatgagaccacagccgctttgaaaatatctggaacgcggaaaaagcaggcggaaaacattatcaatcgcattttgcgactgggaaacgagaacaacaagagtggaatcgaacaccagacagaaaaaaccgcttggtaaaggttaaggcaaaaactcatgtgctatacaaagctctgaaaaa

SEQ ID NO: 236762 - DNA, 382 bp, Glycine max
cttccttgagaagcttgagcttatctgcacacacccccctcataactaagctcaccttcttgagaagcttccttaagaagattcctaaagaagctagagcttagctacacatatcctctctatagctaagctcacctccttgagatgagaagctagaacttatctacacaccccctatatagttatagctcacccccatgacaaaaaacatgaagatccaaaaaagtcctactacaaagactactcgaatgccccgatacaagctaaacctatctactaaatggcaaatacaggcccaacgacgaaaacctttctatattacaagatagtggctctactagccatggctcgaactacctaagctatgagacctagggccccc

SEQ ID NO: 236763 - DNA, 378 bp, Glycine max
aatttcctaaagtttcttttccattggttaatacaaaacactcgcaaccaaaaacatgaaggtgtgaaatgttaggttttctaccattaaacgagtcatatggagttttctttaatatgggtcttattaaagccttattcatgatatagcatgcaatattaacggcttcagcccaaaatattttggaagatgaggtcattaataatgtttagcaatttcttcaaagatctattgttctttcacaaactcatcttgttggggggtctaagtgcaaaaggtatgttcatgccatgcttgtcacaaataattcaaatctttatttcaattcaccccatgacactctatacatatatttgagattttcttgttgaacatttt

SEQ ID NO: 236764 - DNA, 101 bp, Glycine max
ctgatattagcccatgatccggcaagcaataggatagtgggtgacctgaaaaaatgggtcgagagaagagcgcctcttggcttgaccgagcctggaggttc

SEQ ID NO: 236765 - DNA, 412 bp, Glycine max
catttatctgaatatacataccaatatcaacgcgtaaatgtaagaaatcaaagacagaccaaaattacagctcatccgtaattagattgcaagtcatacatcttgccatcttggtgtcatgacatggcgaaaaaatgattatataaatacacaccaaagcggctgtttcacgataacagacgaatcaactcagcatccgctgattatctcttcacaatttttcttcaccacataactacagagccctttcaatactggctgccatacatcatccgacatataagtgcaaaacatatgaagcatacagcatcggaatgcattcaatattccacaagggaaaaaggagaaaggcgaaaagaaccagattacaaacgctgatctttcgttccaaacagtcatacagcagatagca

SEQ ID NO: 236766 - DNA, 353 bp, Glycine max
tgctaacaaaataataaaaagtagtgtcgaatagaaaaataagaacatgtttggatatccattaaaaaccatgtataagaggatttctgtgtcaaatttgtaaaaaagagacaaaagctagttcaacttgcttcaataaaacgcacaccatttcttttttatggaaccaaacacactataaaacaagtgatgtcaataataaaaataataattggtgattgaaaaatattaagacaacattcttttgaataaattcacttattattctcaatttattaagaactataaaattctgtaagtctcacatcttattattttaatgaacactttgtttgatttgatagtttctaata

SEQ ID NO: 236767 - DNA, 356 bp, Glycine max
ctatgataataagatgatcaagtttttgttgatacaagggatgacaaagctcctatctgattggttcagactaatcaagaacacttcaggttaagaggaatttgatttaagaatcagaatcaagttcatgatcaagctccaagaataagatttgattcagactcatgactcaagattcaagaataagaaagacttatcaaataagatgaaaagttttcaaactgaatagccatggttttctcaacttgtttccaaaatctttctctctggtatcataccagatgtgaatcataccagagcaatgtttgaaaagttaactgattacatgtcaatgatcaaagctgattgtacatgtt

SEQ ID NO: 236768 - DNA, 335 bp, Glycine max
  unsure (1)..(335): unsure at all n locations
aaaaagtttgactctttgaaatgggttttaagtttttctgaaagttataactcttctgaatggccctcttgaccagacatgaagagtctataaaagcaaggctttgttatgcatnntttatcaagtctttctaacaatcatatacaatcctttacaagccttgaatctctttgaatctctttgaacttcttcttcttctttgtaccaaaagctntctgaagttttctggttttctaaaccttgaaaacatgtgctattcatctttttcattctcttctccctttgccaaaaagcattcgccgaggactaaccgcctgattcttnttgtgctctct

SEQ ID NO: 236769 - DNA, 407 bp, Glycine max
  unsure (1)..(407): unsure at all n locations
agctnttgccaattagttatcgccggcgaaaggatctatttgtgtttgagaagaggcaaatttgattattctgctttgatgaataggaagcctgcggcaaatggagagaatgagaaggagcgaggaacccatgctgtgactgccgttcctatgtggccaaatttcccaccagctcaacaatatcaatactcagccaatattagcccttctcattaaacactgatggaagcttgcttgtggagcttctatggaggctggatctttgagcttcaataaggccctataatggtgattttccaccatggagatgtagtggaagacaaaggataagaggtaagaggcggcgccatccactagggaataagccatggaagaaggagcttcaccaccaagatgagccttggata

SEQ ID NO: 236770 - DNA, 172 bp, Glycine max
ctaccatcatgaatatcggctccctttccatcaatgggggtaccacttgggccggcagaacccttcaccttttgggcgtggtctttgaaagaaccatccccctttttgcacatggtctggagttgcattctattcaaaaccatatcaaaattggactgatactggctaacac

SEQ ID NO: 236771 - DNA, 452 bp, Glycine max
  unsure (1)..(452): unsure at all n locations
gacaaatggcctttgaaagcattatttgtatgtntgttgaacaatagatatgtccaagcatgctatgctatatcctataggtaatggtaggccacttccaacaacaactatccaagtgagcatttatgctttggtgcccctaggggatccacactccatactctactcaagagcacttgtgggcctcatattttatagtgttagtatagaaagagtacccaatttacccaccctccccatctcagtctttttcaacaacaaaaagagaggggaaaggaaataaattatntttcaactctctactctttttttgtcacttttgtttaattagatgaagaattttattttatcatgtttattgggaaaattgatcacatctgcattaactagttaggtccctttgcctatctgaatttagatgttattgtacaatataagccagtgttcctctg

SEQ ID NO: 236772 - DNA, 387 bp, Glycine max
  unsure (1)..(387): unsure at all n locations
attttagttgatgactgatgatgagttaaattaaattaaattgacctcnggagtggcgcgtggatagtggattccggcggagatgaagaagcggcgtttgccgttgaggatgagagcgcggtgatcgtanctcacgttgaacgggttgaaatactcttccccctccgtcactcttactccatactccattgctactacgcaaacacacacacataccactgccactaccaattctgatccaaatcctcctctggaatttgaagtacgcagcatcttcttaacctttcgtgcctagttcgcaactgcaaccaccgtttgaaaactatatatataattggaatanacgggatgcttgtttctctacttcgtactactgatcacaagtta

SEQ ID NO: 236773 - DNA, 378 bp, Glycine max
acatgaatggcccttaaaagtcatagaagccaatatttgtgacataaaattggataactactgcgatcaaagttgtttcaccgattgcttcaggaaatatgggaagaaagtattacctctgtgcaatgaatggtgtcaatgcatatgccgttatcgatgctaagtgtttgacattctgtccaacatccttatgaatgctagattatgtagcaacaactcttaattcagaaaaaaaataaagatactctcttggtattgttatctattcatttatcttttccttatttctttctagaagatgaccattcattccattcataattacaatgtaatatgtcactactacacaaaggatatttatcgaccggtaaaacagac

SEQ ID NO: 236774 - DNA, 349 bp, Glycine max
agtgacctgcggcgtgcagcttatcagaactacttcaaactttcgtttgttttctctacagaaacacgagagaagattgtaaaaaggcttgccaagatcataacgaacttgtaaaagatattgatgctaaaccatatagttttttggaagacccactcaagatgtcaatgctatcttaaaataaaagagactaaagtctaccttgagaatgagatgataaccggagaaaaatgcgctttactcaaaaattataatgagttagacaataaacttggaactttacaaaatgaattaaaagaactcttcgaccttcatgatcatgttaaagaacgtatcacctttggacata

SEQ ID NO: 236775 - DNA, 459 bp, Glycine max
  unsure (1)..(459): unsure at all n locations
ggagatgttgtgaaaggaatatggccctcatgattgattatggtattcctggttgaccacggncgnggtcaatgtaccacgattgttatcaagggaaattagcatcacatcttcatgaaattgtgtagtttccaacttttccacttgattgagcgattatccttatgtaagataaaaactaatgtccaaacatgagttcttccaataaaatacatggaataacacacaaactcacataaaatatcactcaaattatgggttattaggtatagtaatacaacttcattggcccaaatttatataatctttattaattgaattattgatattaagttgaattcagattatcttgacttaattgtggtttttaaccaaacccacccactacgaagcactatatgatgacatgtgtcatctgaagcttgaaaacaacgggtgaatgtacatgtactcaacctg

SEQ ID NO: 236776 - DNA, 267 bp, Glycine max
aatactttcacattctgactgacatagaattgcttaaagttaaatgcgcatatcatatctgagaagaaaatttaaagataaacactaatttttaaaatgagattgtgtcttgtaaaaaaatctcacatccgaggcataagaacatgaaactgtattcatggtaaacaaaaattacgtgttaaccactatataagaataaacaacattttttcagatgatggattgggtacttgcatgacggatcacccacccatatcaacagattac

SEQ ID NO: 236777 - DNA, 395 bp, Glycine max
  unsure (1)..(395): unsure at all n locations
cgattacacaagtttttttagacaatgattgatttattcaagagtctctaatttaatcgggtaccatgtgatatgattgattacttctctttctataagtagttcaaaagtgaaaaagaacactttaatcgattactttgaggatttaatcaattgcattggtcttgagttgtttccaagtgtntgaactacactttaatcgattaaaaagataatctaattgattagtttattgaagtaattgattactttatagatttaatcgattacaagaggttatattgttttctctataactaaccaacttgtgttctctttaatacacaatgaaaaatatagtgaaatgagctaagatcacgtgatggtattagttaaagaatgttttagttaagaaa

SEQ ID NO: 236778 - DNA, 318 bp, Glycine max
gaagctcattacaagccttaagcaaaaaccatgatatcaccttacccttaaggaattttggagctttgaaattgtttagggaataagctgggaataagtgcgggggtatatttcattggaagatatgatgtttggccatgattgatgaatttgtatattgcctacgacttgctgtaatcttcaaattcgatcgacaaaaaaaaaattcaattgctgcaaatttgtattgctcttatggaagaacatacaagaagaacagaagtgaagttgaataaatgagttcttgttatgaagactctatttgcgagccttggttga

SEQ ID NO: 236779 - DNA, 388 bp, Glycine max
gacctattgtcgcttagcgcaaatccttacggccataattgaggtccatgaggctaagcatcaatcatggcagctaagcgagattcattgcggcaatgtgagcgctacgcgagtccatcgcagctaagcacatgctcctctgtacttaagatgcatcattttagctaaactgcccaaagctaggcttagcgagagttgcagctttttaaatctgcagacctcgctaagtggactcaccctcgcgctaagccaagtctctgtgtgaaaaaaaaaagattttgaaattgaaacatcggctaagcgcaggggtccgctaagcgagccttattgagaagccaaatgtctctcttgctttgctagcgcaactgtccgctaagcaaaagtatcg

SEQ ID NO: 236780 - DNA, 361 bp, Glycine max
agcatgcaagctcgacaaacaagggtgttcaggttctcttttctttgaattttatgacagctgagtgtattgtcttacccttcccagaaaaaaagtaatacatacatgctgactgcctacccaaccttgagcagtaagggtcttatgcaagtgttatattcgactctctgtccatctttcctgtagacgcgtgacaatattgagtggacggaaaatacacataatgggagtttagagacagagggaacatgaactactcgaataccggattaatcgtgtgtgataaaccaccggagcagagctaggtcataatgtcaacaatgattatgagacacagtaaagggcatactccatggatgag

SEQ ID NO: 236781 - DNA, 408 bp, Glycine max
ttatgtaagccccgagaatgacagtgcgtcgaacccttatcttgaatgaagtttatgatccggtgaaggacatcgtaactatctttgggaagacccaaaataaggcatcatctgaaaagaacatatgaaagaaaaggtcaatattcttttatcttccatactggtctagtttagatttgcgacattgtatagatgtaatgcatgttgagaaaaatgtttgtgatagtttaattgacacctttctcaacattaaaggctagtcaaaggatggtttgaaatttcatcaagacttgattgacatgggtatgcaagagcagttgcatccgatatcacaaagtcggcgaacgtatctgcccccagcatgttacacaatgtcaacaaaagagaaaaaaaaaattgtcaatgtct

SEQ ID NO: 236782 - DNA, 323 bp, Glycine max
ttttggggtcgtgaagtgagtggcttaccacgggacttccaaacatcatggttgggtggacttctttctctcttaaatttcctgggtatgggggtttgggagacatgattggggcgtctggtagttttctgctgtgtaatgattatttgtgaacgaacttgttgaaagcttgttgaaattgccatgtttggatgagttagacatacccattctgtgttagggttttgtgatgatgtttatatgctgaaatcgcctatggaaactgttagagatgaatggtagagtttacctacggttacaaagtgagaatgtggtgttgtgag

SEQ ID NO: 236783 - DNA, 415 bp, Glycine max
  unsure (1)..(415): unsure at all n locations
cgagcgtctcaatatattattggcctgaatcagacatgcgaatcaaaagttatggctggttgaatatgccatgtgcttccatgttcaattttgaacatctcgatatattatgcccctgaatcgggcatctgagtgaaaagttatgccatatgagttagccgagagcttcgttgntcgatttcgagcgtctccacatattattggcctgaatcggacatccgagtcaaaagttatggcagcttaaactttccatgtgcttccatggttaattttgagcatctcgatatattatgcacctgaatcggacatctgagagaaaagttatgccatatgagatagctgagagctttcgttgttcattttccagcgactcgatatattattggcctgaatcggacatccgagtcaaaagtta

SEQ ID NO: 236784 - DNA, 339 bp, Glycine max
  unsure (1)..(339): unsure at all n locations
tctgaacctatctttatctctcattcatggattaatcaattttcaaaaaggttgaagatatatctttgtgaaagaaagaactttaatgaaggatcttgtacaaatggtggatttattaagtattgattgagtttgatttatgaaacagtttgtgatatgatccgtacaaaaaatgcctttgtaactttggttttaaaagttcattnntgtttgaaaaccaattcacccccccccccctcccgcctcttggtttgttgagtaccattcatattttcaattgctatcagagctaagtcttgaaagttactcaagatcacaatctttttctaaatatgggat

SEQ ID NO: 236785 - DNA, 259 bp, Glycine max
ctcgcaaagcgatgaatactaatactgccacgtggatgaaaataaaattggcatcatccctgaggctgctcatatctctggaaaagtactcccaacagagcataaactgataaggggagagaggatcctcctgtctaagaccccgctaccctctgaagcgaccataaatggatctattgactgccacactaaaagaagtggaagaaacacactccatgaatcaagtacagaactgggttatgaagccaatggacttaat

SEQ ID NO: 236786 - DNA, 300 bp, Glycine max
agcaaactctcatctcaagcaagctatacattaatccaacatgctcaaccggttttacaaccaaaaatctacccgaatcaatactttgactcctcaacacccaatttaccctagaaataggtcttgccttcactttggacactattatcctcaatggtcagaccaagcttttccataagtcctatatgacatttaaactaggattaactcactttaatatcgaattaccactaaatccagagttagcttttcaaacccctcgagcatgacacttttacactcataataatacattctcac

SEQ ID NO: 236787 - DNA, 397 bp, Glycine max
taccaagaaatgctattcttaaaacaaaaatggcatacaacctcctttaataaacacaaatatcaatggaaatttagagtaaactcatgcacatactcccttacgagcattgactctcacaagatattcttttaactaagaaaaatgcacccatgcacaattaaggcaccttcgtcacctagattatttatatgtactttcaagggtgatttgctacctacaatacatgcattgtcttggctaaaataacatacatgcatactcaaagcattttggctacaaaaattgacacgcgccatttggtatttctaaacctatgctatacaaaccttggatgaaccctggtatttaccaaaaggcgtacatttcatgcttaataagtggtttgtacctaaac

SEQ ID NO: 236788 - DNA, 110 bp, Glycine max
actctcaaccacctatgataatcgctgatgatcccattactgctttccctaagctctctgtcctttcttcatgccgcatcccatgcctcgctaactccctggagtaccct

SEQ ID NO: 236789 - DNA, 389 bp, Glycine max
  unsure (1)..(389): unsure at all n locations
cctggcactcgctaaatactttgggcctatgctctctgcacattgatgcaaaagtactcttcatatctaattctaacctttccattttgaacctgaaagacctgaagatcttggacaccattcaacaaaaaatcgtgtnttctactccaaatcttagttctctcacaatcaccaattatttacgtttcagtcatcaaccattctcctccacatgcaatctttcgtgtcttgaagaaggaactattcacaccactacttatatatcttactcgggcttcatacgctggctgcaactcttcgctaatgtaaagatattgaaactttcttacgataccctgagaatacttgaaagaagctttctttagttggcctctcctctcctttctttt

SEQ ID NO: 236790 - DNA, 378 bp, Glycine max
agcttcttctttaggagttcgatttgaatttaattattattttgtgcagaactgggttgctgatcatttaagctggatggaaggacatgtggatccctttcctattaaggataatttccctgatgaacatttgatgcatttgcattcattacttgctacactttggttggttgacatcgtgaatttcattgtagtatatgtcatgccacctcatgcctttaggtctcaaagattaactttatagcgatgcgtaatataatgcgtgagatgaacctaatttgttgatattaggaaatgaccaagtgatttacaggagcgtgccagacaatgagattcaggatattcttcagttacgtcatgacacccatacaggccgtc

SEQ ID NO: 236791 - DNA, 416 bp, Glycine max
  unsure (1)..(416): unsure at all n locations
aagtcattctagttcatgattttgatgaatgaaacaaaagtcattaattgatggcacaactctatagtcttaatctttcacaatttctctcattcagaaaccacaaatagtattacacaaagagaggatttaagtataataaagtaccttgcaagcatgcaaatgatgaagaataatatcccaaccttccagagaataactgagcagtaaaataaataaaaatgaaatcaacactgatttttatttatataaatgatttcattctcttaaaaaaaatgagtcagattcgagagtttgtttatataggaaaaatttaatatcttaattacaacaataacataagaatgcacttttaaatacctgaacatggtgaaatngcctcagacaagctgagagaagtaacagagactatcatt

SEQ ID NO: 236792 - DNA, 471 bp, Glycine max
  unsure (1)..(471): unsure at all n locations
cctgaggcatgcaagcttccatntagtattttcctacaaatcatttctttatgcttgatcccaggccaaatggaagaattaacatatgatgtagaaggatgttngtttttcagaaacctatcacaagccattacaggtcattgtccatcagaggttaacaaagaccaacataaacgaagcacagatgccttgtcaatatttattaagagggcaaatgcctaggaccccaacatcatggctagaacaaacctttctccaagaaactgtaaccaacttacgtttcaaattatcaccagaccaaatgaaattgcaaatacatctatccagctccttgcgaagagaggaaggccaatcataaacatagaaagtgtgaaagagcataccttgaataaaaaacttaactaatcggacacgtcccatatgagagaagataatacctttacaggaagttatattatttacatacaacat

SEQ ID NO: 236793 - DNA, 383 bp, Glycine max
  unsure (1)..(383): unsure at all n locations
tgaagcgccaacacttttgcattccaggaatcttttcccagaatttggtggtgacgaatataccatggtggaatcagagagacttgctttcatcgggatgaatcaatcaaagntaagagttgacaaatattctaattaacaccaatcctctgatgaaggtactactcaaggatcaaatagaggaaaaagaatcatcttgccttcaacacttgtttgcagccctaggtacatggaacaactatattttgatggtattggtatatgtagtaatacaggatttcccgatttatttatcacatttacgtgtaatcctaattggctcgaaatacaaagaatggtgtctccaatgaatttgaaagtatggatagacctgatgttatctc

SEQ ID NO: 236794 - DNA, 235 bp, Glycine max
gttaaagatgattttactcccagcacaagagaagctataaacaccgccagagtggacaacgaaaagcagacaatgactttaagctgtgaatttccctgtggtgatttggttccggcattcaggctggaagctggggctattttagccacacgaggcagagggtggctctgccacttcatattctgtcaagggtggaaatggagcctctgctggaggcaagaattctttggtaatg

SEQ ID NO: 236795 - DNA, 431 bp, Glycine max
gttcggaccttaagcactgagctgcaagctgagccacatattagtccctacacttttattgttctgctaatgggccaattgcatgaccgtagcctccaaatcagcaaaaggatctagttctaaacagtcatggatcatatgatcaatggttgaaggagtccaaagaacacctacatcatctaggtggctgaaaatagctgttattaagaagcaagcaatacccgatgtggtagacttaattcaaagcattcgcctaaggtgggatccttggcatattggttcagtgttgagccaatctttgttctttggtgtaacatggaaaaatatctagtacccaaatttgaagaactaaaagggcttaaacacttttatatttgaccatcttcttctttcaaagaaaagaatgtttgaaaagaagaataaacattcta

SEQ ID NO: 236796 - DNA, 452 bp, Glycine max
  unsure (1)..(452): unsure at all n locations
tatgcgcctatttccttacaaacgttctgctgccaatatattaaccgaaaaacattctcccatttacaatctaggcagcttctgtacctagattatntacacgtacctccaaggtgtatctgttacttacatcacacacatctccttggctaaactcacatacatgcatactcaagcattttggggcaccaaaaattgcacatgtgcacatcttggcatttctaatacctacatacgcaaacttcatgatgaatcttgactatctacacaataaggtgctacatatttaagcatatttttctttgctgactaaaattgcattcaaaattaaaaggtatattnttttgcagtatgttttcttcatgcaacatatttatatatattttttgtgagacattttgactaccaacaatatatatacatacattcaagtattttgctattcataccca

SEQ ID NO: 236797 - DNA, 398 bp, Glycine max
gagccgaaatccaaacatgataatgtgtagctgaataaagcaaccattatagctgccaaatttccagaccatctataaagaagatttgtttgcctttaacatggttatacggcctcattttggggttcttcaagcataattttcctgacagatatgtcgagggatgagagatactctgtgtgatttcaactttatttcttaacgaggatcttatcctgcatttattctatgcagactctcttttacaactaactttctttttctatttaaagaatctataatatataaatagctggatcttctgctgaaacaagaccattgatttgatattcttcaatgtcaatgttccctaaatgaatctataggaactactgagtgctactaattgttcatgttca

SEQ ID NO: 236798 - DNA, 382 bp, Glycine max
  unsure (1)..(382): unsure at all n locations
gcttatcaaaanaagctctcatgtcatataagttcttgctaaaaaaagattaattctgatgaaggacagaagtaccacatgagacaatcttactcatgctcagtaaaagttctatgaacaacaaaaaattccctccctccaaatatttaactgaatatttcggactcaaacttgacactactaatgcaatcccgacgctcggtgttaattaaactatttactgaaatacacaccttatgtcctacgttcaattaactactatactacaatgacaatatccagagaggattattaaattataaatgacnagtggaactaatttcaataacaacaacaaagtcttattccactaaataaggtcagttacatggatatggatcac

SEQ ID NO: 236799 - DNA, 420 bp, Glycine max
  unsure (1)..(420): unsure at all n locations
tatagttgaagatggaggtcacttacctaagcttgatgttagaaaggctcaagaaaactcggtaaaacttggaaaaaaaaaaagaaaaaatatggtctcctctttctcttaaagcttcagaaaaatgggagaactggcctaggctctggctnttaaataaatgatacttattgtaggtgaaatgcttgaaccaatggaattgtaaggtttaatccttatcttcttaatctaagctctttgaatgaccattaatatgactaattggcagcttggacagcccttgatgtgctctttgcaagctcagccatgtcttacgtggnttgttgcactnttccaaaactaactataaaaggataaagtagtggtttgtcaaaaatggaaaaatactttagctgaaactagaaatttatcttaaattat

SEQ ID NO: 236800 - DNA, 307 bp, Glycine max
aacattattatcttacaaaacggcatatactaataaaaattacttattaattcacaatttaattatgccattaagaatatttattattacttaactaactagagatgttttaattaataaatgaaacttacaaaaataaagtactgaaccgagactatagttttgttctatctctcaatatcaatatattacttaatataaatttctctataggagtactatgtattcactacctattctatcatagggggaccaccattaaaccatcgaaactctaaatatactattgactatgtctgatacacct

SEQ ID NO: 236801 - DNA, 395 bp, Glycine max
  unsure (1)..(395): unsure at all n locations
tgccgctggagttgccctatctactgctctagctcttttatactggtgatccctatgctatagaccttgacttgatagaacctctttttaagcgaaggcgtttgacttgattccatgttttacggctgtaacaaaatcggtgcgaatcaaaactccgacatctatcatgggtggaatggatgaatgcatgaagaaatgcatatgacacagacactatctatgaatacgggagcccgggaaatngtctccttcttagatacaacatctttgggtagcatagtgtagacaaaggatcaagctgaatgttttgatgatgccanagattcacatgcgtctcatagctttattcaagacacacgaaataaagatattcaagatggatgatcaagacaatc

SEQ ID NO: 236802 - DNA, 376 bp, Glycine max
  unsure (1)..(376): unsure at all n locations
atgctttgttcgtattgttgaatatggtgatcaccttctcgtataaagcttccttggttctcttggcttttggccaaaacatatgtcctcctagcgcaattaaaggatcctacttcttagcttgccccttttcatttgatggccttccttgattttcagcacctgctatagcaccactatagtgtgctattgagtattgactactatatgaaacaataaatatcttacacatattgttatgcttgtagcaagctgtcaatggaacccattagttcgcagacaatattatttactttagatgacattgngaatttactccaacttngataacagaaactctgatacaaatacctcttcgtggaattcatggatcatt

SEQ ID NO: 236803 - DNA, 319 bp, Glycine max
  unsure (1)..(319): unsure at all n locations
gctgcaagctatatacaaaaagcctaatcttttcattatgctgtgaataggaagctgaacataatttagccatagctattgagcaagcaatcaatgtggcgcaacacaccataagattatgatgatggatggctctaattctcacaaagggaagcttatcactttcaaattgagcttncaaaactatcatgacatgtagaggaaaaacaaggatttcaaatcacacaaagtcaatagacttttattttcacaacaattaccaaagcttgatttgtgagtatattttaacctttggttcactctgataattagtcaatta

SEQ ID NO: 236804 - DNA, 346 bp, Glycine max
  unsure (1)..(346): unsure at all n locations
ttagaaagcttaagctaaactttccaataaaaagtgttcttttgggttgaatttttcgcacttcctccaaggactgaaattcaagatcagaataaatttcctttatccaaggaaagttttaacaaatgtgaaactaactactaccctttgaagtccaaaatatggagaagtaaagcgatcaggtcccaaagcatcttgtaaaatcacacaatatgagtgaaggagaaatcatacaagtaatcccaattatgccatgtaaagataaggcacatctgtgtcaagataaaaggatgggagggtagatcactangattagaatttcacagtccttttagaagtggatatg

SEQ ID NO: 236805 - DNA, 369 bp, Glycine max
gatcatggactgcggaaatatcacgggcgtcctcttgatcactatttaaaaacaggatgaaagtaatgaaatacaatatactctttatctgtattcccactgatgattattcctaccaaaaatatacaactgaacctaatgcgtccgcatataagtcctaagcttgaattgaaactaaaaataagaacaaacctacctagcgagtccctatgtactaaaatcttgaatatgtttggtgcatgagtgatattataatagaggattgcaccactcaaaacattcttattaacccctattttacggaattggtgcctaataatacctattgtgcgcaccaacaacgtacaaggatataaactcttgcgaact
